United States Patent Application Publication US 2007/0067865 A1 - sequence listing, part 18

SEQ ID NO: 118318 - DNA, 2138 bp, Arabidopsis thaliana
aaacaagcccaccaatctcttcttctctgctcttctctctctgtagacactagaagaagaacaaaaatgctcaaacagtttcttcttctccaatccttctccttcttcctcttcaatgtagttatcgtcggaggaagaacattcggcggcggtttctcagcggaggagaatccatttactccaaaagcatctctagttcgttactggaacaaagagattcgtggccaatctcccagatcggagtttttaatctcaaaagcttcaccactcaacgccgtagactcagcaactttctcaaaactcgccgccgcgaactcgctgccgactcgttttcccgatttctgctccgccgcgaatctcttctgttttcctgatttaggagcgagtctcgagaaacacgacgacgacgttaaattctccgtttatgaccagaagaacttcactaactacggcaatgctcgtgccggaggagcagattcgttcaaaaactactcgaaagacggtaatgtcgtaaccgattcgttccggagatacagccgtaacgcggcgggtcacgacgataaattcactgtctacggtgaaaacagtaacgtggtagaggaaggattcaattcatacggaacattcggaaccggcggcgccggagatttcactaactaccaaaacaacgtgaacaatccaacgagtcgattcacggcgtattccgacggaggtaacggtcgatctcaaacattcaaaacctacacacacgaagctaacgccggtaacggtcaatcattcacaagctacgccaaaaacggaaacggagttcctaacgagttcacttcttacggcgtctcctccaatgtaatcggctccggtttctctaactacggcgagagtggaaacgcggcgaacgataccttcacaagctacggaagcgacggtaatgtacctcagaacaattttaataactacggtgcttccggtaacgccgccgtggataccttcgcgaattacagagacaaggccaacgtcggagacgattcgttctcatcctatgcgaaagattcgaattcggagaaggttaatttcgtaaattacggtcaatctttcaatcccggttcagaaactttcaccggttatggcaaaggagctgaaggaagcaaactcagcttcaaaacctatacaccaaactctactttcaaggactacgccaaaaagggcgtcgcttttgctaaatacaacgtttcaacaaccaccgcgaacaccgtcggcgatggcaaaaccgtaaataaatggatcgaaccgggtaaattctttagagaatcgtcgcttaaagaaggtacagtgattcctatgcctgatattaaagataaaatgcctaaaaggtcgtttttaccccggagtataattacgaaactacccttctctacttctaaactcggtgagattaagagaatcttccacgccgttgagaattcgacgatgggaggtataatcaccgacgcagtgacggagtgcgagaggccaccgagcgtcggagagacgaaacggtgcgtaggatcagcggaggatatgatcgatttcgcgacgtcggtgttaggtcgtagcgtggtgcttagaacaacggagaacgtagccgggtcaaaggaaaaggtagtgatcgggaaagtcaacggaatcaacggtgggaaattaacgaaagctgtgtcgtgtcatcagagtttgtacccgtatctattgtattactgccactccgtaccaaaggttcgggtatacgaagctgatcttctagagttgaatagtaagaagaagattaaccacgggattgccatctgtcacatggacacgtcatcatggggtccgagtcatggagctttcttagctctcgggtcaaaaccgggtcggatcgaagtttgtcactggatatttgagaacgacatgaactgggctatcgctgattagaccggtggttatggacttatcaaatagtatgattattactatcttatcgccgagttttaattacatagaggaatgttaattttctattatcattactataatattttgaagttttttcagtaacatgtaaagaatgcttgttactgatttggggtggtgcaaaataatttttatgaaaaaaaaaaaaaaaa

SEQ ID NO: 118319 - DNA, 485 bp, Arabidopsis thaliana
aaactcagcttcaaaacctatacaccaaactctactttcaaggactacgccaaaaagggcgtcgcttttgctaaatacaacgtttcatcaaccaccgcgaacaccatctgtcacatggacacgtcatcatggggtccgagtcatggagctttcttagctctcgggtcaaaaccgggtcggatcgaagtttgtcactggatatttgagaacgacatgaactgggctatcgctgattagaccggtggttatggacttatcaaatagtatgattattactatcttatcgccgagttttaattacatagaggaatgttaattttctattatcattactataatattttgaagttttttcagtaacatgtaaagaatgcctgttactgatttgtggtggtgcccaataatttttatgaagattttagtgaaaaaaaaaaaaaaaaaaaaaagggcggccgctctagaggatccaagcttacgtacgcggc

SEQ ID NO: 118320 - DNA, 900 bp, Arabidopsis thaliana
  unsure (1)..(900): unsure at all n locations
nnnnnnnnnnnnnnnnnnnnnnnnnnnnnnnnnnnnnnnnnnnnnnnnnnnnnnnnnnnnnnnnnnnnnnnnnnnnnnnnnnccacgcgtccggaaggaatcnaagaacagatttaacaatggcggcagttcaacagcaacaagcgatgcagaagaacactttatacgtaggaggtttagctgatgaagttaacgaatcgatccttcacgccgcgtttatacctttcggcgatatcaaagacgtgaagacgccgttggaccaagcgaatcagaagcatagatccttcggattcgttacttttcttgagagagaagacgcttctgctgctatggataatatggacggtgctgagctttatggtcgtgttctcactgttaattatgctctccctgagaaaattaaggggtggtgaacagggttgggctgctcatccactttgggcagatgcagacacatggtttgagaaggcagcacaggagaaggagattctgaagatgcaagctgagaacaaggctgccatggagactgctgaggagcttcacaggaagaaattggcggaagatcgacaaggagagatggaggatgatacagataccaaaaatgatcctatggccagagcagaggctgatgctctaagtcacggcgaatgcctaatgaaagtaagcgttaccggattctcttatgcaccttgtcctgtaggataacaagtatgttttcgcctgagtgtgtacactgtcactatcacctcatagagtttttgaggtagattgttcttgaggtgataccatgtattgtatagtaatagattgtagttggtgaaaaaaaaaaaggcggcgtctaagatcagctacgnnnnnnnnnnnnnnnnnnnnnnnnnnnnnnnnnnnnnnnnnnnnnnn

SEQ ID NO: 118321 - DNA, 933 bp, Arabidopsis thaliana
  unsure (1)..(933): unsure at all n locations
ccacgcgtccgctttatctatcttcgtacattatatataatgggatcaaccgtggccgccgctctcctcctcttcctagcggcagtccctgccgtctttgccgcaactttcaaggtcggcgatatttctggctggaccagtaatcttgattacacggtttggctcactggaaagactttcagagtcggtgacactctagagttcgtatatggtctttcacactcggtgtccgtggtggataaagctggctacgataactgcgacagtagcggagccacacagaactttgccgatggagacactaagatcgatcttaccacagttggaacaatgcacttcctttgccctacttttggtcactgcaagaacggcatgaaactcgccgttcctgtcctcgccgccgctccatctccttcgactccttcttcgcctccctccactccttcgactccttcttccccgccctccactccgtctaccccttcttcgcccccctcccctccttcgcctccttctccatcgctcccccctagctctctgcctccatctgcatctccgccgaccaatggcacgccggattcagagacattgacgcctccgccagctccattgccgccttcgctgtctccaaacgcggcatctaagggagtcatgagctatggaataattggagtcacgatgatattgatgtacgctgttatgacctaaataacagggtggaaacagagcattgttttgctccatgtcttttttggtcggcggcctttggaaatactacaccactacgtgctcttttgtgtgtaacggaatttttttgccattgacaatttttccttcttccttctttttttaattacttgtaggggttgataaacgttatagccatctccaagctattttatcttattcttnnnnnnnnnnnnnnnnnnnnnn

SEQ ID NO: 118322 - DNA, 1552 bp, Arabidopsis thaliana
cgtatttgctttcaccaacccactcgacggagtctccaacgccttcctcctcattctccactctcacaccaccaacttctgattccagatctcaacgatgcaaagctccgccgtattctccctctctccgtcgcttcctctcctaaaaccacgtcggctctctctccgccaccatcccataaccaccgccgcttcttcaagcgatctaaacgtttctccaaatgttgtctctattccttctttatctcgtcgatcttggcgtctcgcttcgtctgattcgcctctccgtgcttggtccggtgttccttctccgatctctcactccttagacacgaatcgtttcagaaccgccgctactgcagttcctgaaagtgctgaggaaggtgataacagtggtaaattgacgaaggttttggaacttggcttgttgttcgctatgtggtaccttttcaatatctacttcaacatctacaataaacaggttttgaaagctctacatgctccaatgactgtgactttggttcagtttgctgttggtagtgtgctcattactatcatgtgggttcttaacctgtacaagagaccaaagatcagtggtgctcagctagctgccatcttgccgcttgctgttgtgcacacacttggtaatctgtttacgaacatgagtattgggaaagtttctgtttcctttactcacaccattaaagccatggagcctttcttctctgttttattgtctgctatgtttctcggggagaaacctactccatgggtactcggtgccattgtaccaattgttggtggagttgcacttgcttcaatttcggaggtctcattcaactgggctggattttcgagtgcaatggcatcaaacttgactaaccaatcccgtaatgtgctgagtaagaaagtcatggttaagaaagatgattctcttgacaacatcactctcttctcaattataacattgatgtctctcgttctgatggctcctgtgactttctttacggaaggcatcaagttcactccttcatacattcaatcagctggtgtgaatgttaaacaaatatatacaaagtctcttatcgctgcactctgcttccacgcataccagcaggtgtcgtacatgatattggcgagagtatcaccggttacacattctgtcggaaactgtgtgaaacgtgttgtggttattgtgagctctgtcatcttcttcaagacacccgtctcgcctgttaatgctttcggaactggaatcgcccttgcgggtgtcttcttatactccagagtgaagggtattaagccaaagccaaagactgcttaagcaaatatcggctaatacctaatgtcatatcactcccgcgctttggatttgtatacaatttctcgagctaaagttttcagatagatggttttattcttttgcgggttttttcacgaagtttcatcatccctttctaagcttttcgctgcagccatcggttctcttagagtttgttataagttctcttctgtgtctagacaaatgccaaactcttaaatttcttaccgg

SEQ ID NO: 118323 - DNA, 1322 bp, Arabidopsis thaliana
gaaaaacaaaacaaatccattttttttattactctgttttttcccctgtttttaagtttatttacttcttactctgttttctgctcaaaagagtctttaaacagaagactaaagaagatggttgcggttgaaagagttgagagtctagcaaaaagcggaatcatatcgattccaaaagaatatattcgtccaaaagaagagctcgagagcatcaacgatgttttcctagaagagaagaaagaagacggtcctcaagttcccacaatcgatctaaagaacatcgagtcagacgatgaaaagatccgtgagaattgtattgaggagctgaaaaaggcatctttggattggggagtgatgcatttgatcaaccatggaataccagctgatctaatggagcgtgtcaagaaagccggagaagagtttttcagtttgtctgtggaagagaaggagaagtatgcaaacgatcaagccactggaaagattcaaggctatggaagtaaattggctaacaacgcgagtggacaattggaatgggaagattacttctttcatcttgcgtatcctgaagagaagagagatctatcaatttggcctaagacaccaagtgattacatagaagcaacgagtgagtacgcgaagtgtcttcgtttgctagcgactaaagtcttcaaggctctctctgtcggtctaggtttagagcctgaccgtctagagaaagaagttggtggtttagaagagcttcttctacaaatgaagataaattactatccaaaatgtcctcagcctgagctagcactcggtgtggaagctcacaccgatgtaagcgctttaactttcattctacacaacatggttccgggtttgcagcttttctacgagggcaaatgggtcactgcaaaatgtgttcctgattcgattgtgatgcacattggggatactttggagattcttagtaatgggaagtataagagtatacttcatcgtgggttggtgaataaggagaaggttaggatttcttgggctgtgttttgtgaacccccaaaggataagattgttcttaagccgttgccggagatggtgagtgttgagtctccggctaagtttcctccacggacttttgctcaacatattgagcataagttgtttgggaaggaacaagaagaattggtatccgagaaaaatgattaagtttctgtgtttactcttatttttgaaactctatgtgcgagtttcttttataatgtgtttgtgtctttctcatgaatttgatgtgtttgtgccttttatagtgaatattgcggagcttaaaaaaaaaaaaaaaa

SEQ ID NO: 118324 - DNA, 768 bp, Arabidopsis thaliana
agaaaatggtggtcaaagtatatgggcagataaaagcagctaatccacaaagagtattgctctgctttttggaaaaagacatcgagtttgaagtaattcatgtcgatctcgataaacttgaacagaaaaaaccacaacatcttcttcgtcagccgtttggtcaagttccagctattgaagatggatatctgaagctttttgaatcgcgagccatagcgaggtactacgcgacaaagtatgcggaccaaggaacggacctattgggcaagactttggagggacgagccattgtggaccagtgggtggaagttgagaataactatttctacgctgtggctctacccttagttatgaacggcggtctttaagcccaagtcttggtaagccatgcgccgtcgctttgggttgaggggctaaaaggtcaaagttcgacaaggtcctggatgtgtatgagaacccgttagcttcgaaccggtacttgggcggtgatgaattcacattggctgatttggcaagtcatatgcccggtatgggatttatcatgaatgaacccagtttgagtggtttggttacgtctcgagagaatctcaaccggtggtggaatgagatttcggctagaccggcttggaagaagctcatggaattggctgcctattaatttgtctagtagttcttgtagtcctccgttaatggcttgagtcaagccgcttgacgcttgtactccattcaaatatttgatgatatactaatttaaatttggatcgtcta

SEQ ID NO: 118325 - DNA, 1537 bp, Arabidopsis thaliana
  unsure (1)..(1537): unsure at all n locations
atgatcctgccnnnnnnnnnnnnnnnnnnnnnnnnnnnacccacgcgtccgcccacgcgtccgcccatttctctccttctccaccagttttcccccaatcgctcctccttaaaccctaacatttttgcttcccctgtttcgattctcgagagttatcagagatgagttcggacgatgagagagacgagaaggagctgagtcttacctctcctgaagtcgtcaccaagtacaagagcgccgctgagatcgttaacaaggcgttacaggttgttttagctgaatgcaaaccaaaagctaagattgttgatatctgtgagaaaggagactcttttattaaagagcaaacagcaagcatgtacaagaattctaagaagaagattgagagaggtgttgcgttccctacatgcatttctgtgaacaacactgttggtcatttttcaccgcttgctagtgatgagtctgtgttggaagatggtgacatggttaaaatcgatatgggatgtcatattgatgggttcattgcccttgttggtcacacacatgttcttcaagaagggcctcttagtgggcgtaaggctgatgttatcgctgccgcaaatactgcagctgatgttgctctaaggctcgtacgtcctggaaaaaagaacactgatgtaactgaagctattcagaaggtagctgcagcttatgactgcaaaattgttgaaggtgttctttcccaccagctgaaacagcatgtgatagatggaaacaaggttgtgcttagtgtatccagccctgaaacaactgttgacgaagtggaatttgaagagaatgaagtctatgcaatagatattgtggcaagtactggtgatggcaagccaaagctattagacgagaagcaaacaactatttacaagaaagatgaaagtgttaactatcagttgaagatgaaggcctccagattcataatcagcgaaattaaacagaacttcccccgtatgccattcactgcaaggtcactggaggagaaaagggcacggcttggacttgtggagtgtgtgaaccatggtcatttgcaaccatatcctgttctttacgagaagcctggggattttgttgctcagattaagttcacagttttgctgatgccaaatggatcagataggatcacttcacatacacttcaggaacttcctaaaaagaccatcgaagaccctgagatcaaagggtggttagctttgggcatcaagaagaagaaaggtggtggaaagaagaagaaagcccaaaaggcgggagagaaaggagaggcttcaacagaggctgagccaatggacgcaagtagtaatgctcaagaatgagtaggaagatttgtctttgtttcttttaaagaatttttgaaacttgaggtacctctttcgttgtatgtttgggtttcaagagagtctcttcttaaacaaaaaaaaacaaacaatagtttaccacctttgtgcatatttttgcacaaagcacttttcatcatcatttctttgcttgtcctaatcttatctcattctct

SEQ ID NO: 118326 - DNA, 1969 bp, Arabidopsis thaliana
atttttcctattttgaaaaatttatttgaaatctcataatttacgttaatggagattgctccatctacaagtagattcaagctctacgatcaattcgagcttctggagtttcctgacaagtacgtcgtcaaacccatcgaatcgcctgaggaaggcttctccgtcaatcggcgcgatggcaatatcaaacctcttgatgaaaacgcatcttctgggagtcctactagagtctctactatctatggcgtaggaggaactattaggctcttagcaggaacatacttgctagttataacgtctcgggaggaagttggaaattttctcggtttaccgatttttagagttacggctatgaaattcttaccttgcaatgaggctttgaggtttgctactgctcaagaaaaaaaggacgaaacatattttaggactctgttacaagcacttgagacaacccctggattgtatttttcgtatgaaacagatctaacattgaatcttcaaagaaggtgcaagctagctgaaggttggaatcgtaagcctatgtggaagcaggctgaccctcgatatgtttggaactggcatcttttggaggacttaattgaatgcaaactggatggttttattattcctatacttcaaggaagttaccaagttgctgagctaaagctcaagaattctcctgctgtggtatcgataatgtccaggcgctgtacacgacgtctaggtacacgtatgtggagaagaggagccaatcttgaaggggacgctgctaattttgtcgaatctgaacaaatagtggagattaatggtttcaagttctcattattgcaggttcgaggttcaatcccacttctttgggagcagatcgttgatttgagttataagccacggcttaagataaataagcatgaagagacgccaaaagttgtacagcgccatttccatgatctttgccaaagatatggagaaattatggcagttgacctaacagatcagcatggagatgaaggtgcattaagcaaagcatatgccaccgagatggagaagcttcctgatgtgagatatgtctcctttgacttccatcaagtctgtggaactacaaacttcgacaacctgggggtactgtatgagcagattggggatgaatttgaaaagcaaggatatttccttgtagacgcagacgagaacatcctagaagagcagaaaggagttatcagatctaactgcatcgactgtcttgaccgcacaaatgttacccagagtttcatgggccaaaaaagtctgaatctacaacttcaaaggatcggagtgtgcgattccacagagtgtatatccacgttcgaagatgattacacaaagttcagaacaatttgggctgagcaaggggacgaggttagtttgcaatatgccgggacatatgctcttaagggcgacctcgtaaggtacgggaaacagactatgactggagctatcaaagatggcctcagtgcaatgtcgagatattatctgaataatttccaagatggtgtaaggcaggatgctttggacctcataagtggtcgctacacagtgggcacacacagcccttcacaactccagcccattggatcacaaccgtcttttctgccggtagcatcagcattgttgataggtggtgtaacagtgacatctttcacaattcatcaagcgggaagaaacacgcagcagtatctggcgtcggctttgtgggctggagtgactgcaggagttgtggcgatgatcaaagccaatggaaggcacttgacttcaaggcctcgtctttgccatctaatttgattccatttgaattgagattatttgcgtctcacattcttcccaaaacccacacccactgtccctctttgctttctcgttcaacgtccgcacaaaccaaaaatcgaactaaaagtctatattactgaacttctttattcaatgcaatcagttttat

SEQ ID NO: 118327 - DNA, 1843 bp, Arabidopsis thaliana
  unsure (1)..(1843): unsure at all n locations
atgatactccnnnnnnnnnnnnnnnnnnnnnnnnnnnnnnnnnnnnnnnnnnnnnnnnnnnnnnnnnnnnnnnnnnnnnnnccacgcgtccgcggacgcgtgggcacgaagccaaagaacaatttctccgtcactatcataaccatggcggtgctttcatctgcagatcgagctagtaatgagaagaaggtgaagagttcatactttgatttgccacctatggaaatgtctgtagcatttcctcaagcaactccagcctctacatttccaccttgtacttcagactattatcatttcaatgatctactgactccggaagaacaagctatccggaagaaagtgagggaatgcatggagaaagaagttgctccaataatgacagagtactgggagaaagcagaatttccattccatatcactccaaagcttggggctatgggtgttgctggtggctcgatcaagggttatggatgtcctggtctctccatcaccgccaatgcaattgccacagcagaaatagctagagttgatgcaagttgttcgactttcattttggtgcattcttctttgggcatgctcactattgcactctgtggatcagaagcacagaaggagaagtatttgccttctttggctcaattgaatactgtggcttgttgggctttgacagagcccgacaatggaagcgatgcaagtggtctaggaacgactgcaacaaaggttgaaggaggttggaaaattaatggacaaaagcgttggattggaaacagcacctttgcagatctgttgatcatctttgcgaggaatacaacaactaaccaaatcaacggattcatagtcaagaaagatgcgcctggcctaaaggctactaagatcccaaataaaataggtttacgtatggttcaaaatggagatattctactacagaatgtctttgttccagatgaggatcggttacctggggtaaattcttttcaggacaccagcaaggttctggctgtctcacgtgtaatggtggcctggcaaccaatcggcatatcaatgggaatctacgatatgtgccacaggtatctgaaggagaggaaacagtttggagcaccgttggctgctttccagttaaaccaacagaagcttgtgcagatgctgggtaacgttcaagcgatgtttctaatgggttggcgtctctgcaagctgtatgagacgggtcagatgactccaggtcaagccagtttaggaaaggcatggatttcatcaaaagcgagagaaactgcttcgctaggtcgggaattacttggtgggaatggaattctagcagattttctggtagcaaaggctttctgtgaccttgaacccatttatacatacgaagggacttatgatataaacaccttagtaacagggagggaagtaacgggtattgcgagtttcaaaccggctacacgtagccgtctctaagttaaaaggttgtccattgtttgttgttgtctgttggttagtattgatattgtgatgtggggtttacatctacaaatgtgccaaataatctgacccaaaaagatttagggtccaatgggggaataatatcgttgttgcaaaacttaatccagttattgcttcttgcaatatggattcgtcttgtggcttgtactgggggaaataccatttgttaaccttttattaattcaaattgccaatgtcaataacttttggtgaatgtcaaagtgtcaattaagttgtgtttctttgtttaaaaaaagattaaaaggaagggcgaaggctctagaggatccaagcttacgtacgcgtgnnnnnnnnnnnnnnnnnnnnnnnnnnnnnnnnnnag

SEQ ID NO: 118328 - DNA, 523 bp, Arabidopsis thaliana
atacgactcacttagagaaagcacgtacgcctgcaggtaccagagtccggaattcccggtttcgacccacgcgtccgcacgttgaaggaggttggaaaattaatggacaaaagcgttggattggaaacagcacctttgcagatctgttgatcatctttgcgaggaatacaacaactaaccaaatcaacgggtaagtcagattattggctttcttagatctctcagattttgtatcttaggcgtagaggtcgttcccagaaaactgaaggtaatgaggtggctcttgatttcatcttatggtagtgctgtaaaaatccattttcataaagaatgctaaataggttgctacgcaattgaatgttctgaacaataaatttggtaaggaccgttatcaagtgcatactggactaatgtctggctcctcattcatcttatatagactatatttcctgcattagaaacttatcagcaaccctctttcagattcataggcaagacagaatgccctggcctaaaggctact

SEQ ID NO: 118329 - DNA, 658 bp, Arabidopsis thaliana
  unsure (1)..(658): unsure at all n locations
aaatccagtaccacnnactttcaanctggacgtcaancgtttctaagggtgcncccngcagctnttgagccggncagatgccccaggcaacccatttnagaaagccatgnattcntcaaaancgagagaaaccctcgctaggtcggnaataccttggtgggaatggaattctagcagatttttctggtagccaaaggctttctgtgacccttaaccccatttatcacatacgaagggacttatgatataaacacccttagtaaccagggagggaagtaacgggtattgcgagtttcaaaccggctacacgtagccgtctctaagttaaaaggttgtccattgtttgttgttgtctgttggttagtcccgcgcgtccgatgtggggtttacatctacaaatgtgccaaataatctgacccaaaaagatttagggtccaatgggggaataatatcgttgttgcaaaacttaatccagttattgcttcttgcaatatggattcgtcttgtggcttgtactgggggaaataccatttgttaaccttttattaattcaaattgccaatgtcaataactaaaaaaaaaaaaaaaaaagggcggccgctctagaggatccaagcttacgtacgcgtgcatgcgacgtcatagtattctatagtgc

SEQ ID NO: 118330 - DNA, 1173 bp, Arabidopsis thaliana
  unsure (1)..(1173): unsure at all n locations
nnnctatacgacttactatagggaaagctgctacgcctgcaggtaccggtccggaattcccgggtcgacccccgccgtccgcccacgcgtccgttcttctccaacccaaattcctctcttctcaacctcgtcctctccgttctcctcctccaacatttctccgatcagtgatgggttcgtcttcttctttctcctcttcttcctcgaagcttctctttcgtcaactctttgagaacgaatcttccacctttacttatcttctcgccgacgtttctcatcctgataaacctgctttgttgattgatccggtggacaagactgtggatagagacttgaaactgattgatgagttaggactaaagcttatctatgctatgaacactcatgttcatgctgatcatgtcactggtactggacttcttaagacgaagctcccgggtgtgaaatccgttatttcgaaagcaagtggttccaaagctgatttgtttcttgaacctggtgacaaagtatctattggtgatatataccttgaggttcgtgctacacctggacacactgcaggatgtgttacatatgtgactggtgaaggagctgatcagccccaaccaagaatggcttttaccggggatgctgtactcatccgtggttgtgggaggactgactttcagggaggaagctcagatcaactctacgagtctgtacattcacagatatttacattgccaaaggacacattgatctatcctgctcacgactacaaaggtttcgaggtaagtacagttggagaagagatgcaacacaacccgcgtctaactaaagataaagaaacattcaaaaccattatgtcaaatctgaatctgtcgtatccgaagatgattgatgttgcagtaccagcaaacatggtctgtgggttacaagatgtgccttctcaagccaactaaaaaaaactcttacatataatgtttgtcttttatcgatgtcattctatatttaccaaagccaataaaaactcttgagagtaatttctacaataagatttgcttccgttgtagataagttcattagaaaattgtgtaaattagattgaacatgtggaatttgttatgaagatgaagacagtatttgcgtgttcgactaaaaaaaaaaaaaaaannnnnnnnnnnnnnnnnnnnn

SEQ ID NO: 118331 - DNA, 1199 bp, Arabidopsis thaliana
ataccaattaatttaagggaaggtgggacccctggcaggacccggcccgaatttccgggttgaaccaagccttccgccaagccggccgtttttttccaaccaaaattctttttttttaagcctggccttttcggtattctgcttccaacatttttccaatcagggatgggttcgcttcctcctttctcctgtactacctcaaagctactctttcgtcacctctttgaaaacgaatcttccacctttactaatcttttggccgacgtttttaatcttgataaacctgcttggtggatggatccggtggacaagactgtggatagagacttgaacctgattgatgagttaggactaaggcttatctatgctatgaacactcatgtccatgctgatcatgtcactggtactggacttcttaagacaaacctcccgggtgtgaaatccgttatttcgaaagcaagtggttccaaagctgatttgtttcttggacctggtgacaaagtatctattggtgatatataccttgaggtatgaaaccacaatttcaaaccggtacaataaatgagaggctagaaagtgaagagtgtacatttgtctcaggttcgtgctacacctggacacactgcaggatgtgttacatatgtgactggtgaaggagctgatcagccccaaccaaggatggcttttaccggggatgctgtactcatccgtgggttgtggggaggcctggcttttcaggggggaagcctcagaccaactcttcgggtctgtacattcacagatattttcattgccaaaggacacattgatctatccagctcacgactacaaaggtttcgaggtaagtacagttggagaagagatgcaacacaacccgcgtctaactaaagataaagaaacattcaaaaccattatgtcaaatctgaatctgtcgtatccgaagatgattgatgttgcagtaccagcaaatatggtctgtgggttacaagatgtgccttctcaagccaactaaaaaaaactcttacatataatgtttgtctttttatcgatgtcattctatatttaccaaagccaataaaaactcttgagagtaatttctacaataagatttgcttccgttgtaaaaaaaaaaaaaaaaaaaaaaagggcggccgctctagaggatccaagcttacgtacgcgtgcatgcgacgtcatag

SEQ ID NO: 118332 - DNA, 517 bp, Arabidopsis thaliana
cttctaccaacccaaattcctctcttctcaacctcgtcctctccgttctcctcctccaacatttctccgatcagtgatgggttcgtcttcttctttctcctcttcttcctcgaagcttctctttcgtcaactctttgagaacgaatcttccacctttacttatcttctcgccgacgtttctcatcctgataaacctgctttggtatgtttttgcttcctaaagattgaatttttcgacatgggttttggttttttcgtgtctggtctttgtttttcgaatcctagttctgatcttcatgatgaataataggaactggattcatttagttttgaaaagatcatcaattttggatcaagttatgttctttgttcatctgatttgttgaatttggattgttttatgtgatgtgatgagcagttgattgatccggtggacaagactgtggatagagacttgaaactgattgatgagttaggactaaagcttatctatgctatgaacactcatgttcatgct

SEQ ID NO: 118333 - DNA, 513 bp, Arabidopsis thaliana
  unsure (1)..(513): unsure at all n locations
tgaggactgcctttcaggaaggaagctcagatcaactctccgagtctgtccattcacagatattttcattgccaaaggacacattgatctatcctgctcacgactacaaaggtttcgaggtaagtacagttggagaagagatgcaacacaacccgcgtctaactaaagataaagaaacattcaaacccattatgtcaaatctgaatctgtcgtatccgaagatgattgatgttgcagtaccagcaaacatggtctgtgggttccaagatgtcccttctcaagaccaataaaaaaaaactcttacatataatgtttgtcttttatcgatgtcattctatatttaccaaagccaataaaaactcttgagagtaatttctacaataagatttgcttccgttgtagataaaaaaaaaaaaaaaaaacaaaaaaaaaacccaaagggcggccgctctagaggatccaagcttacgtacgcgtgcagnnnnnnnnnnnnnnnnnnnnnnnnngtcctaa

SEQ ID NO: 118334 - DNA, 1784 bp, Arabidopsis thaliana
gtcgccacgcgccgacttgatccgtcgtcttctctcagtctccatctccgtcttccaagttttactgtcaggtagaagaatccatgtcgatttacgtcgcgtcgcgacagctctccggcggaacaactgtgacggcgctgcgttatgccacctctctgagatcttattcgacctcgtttagggaggagagggacaccttcgggccgattcaagttccttccgataaattgtggggagcccagacgcagagatcgctgcagaacttcgaaatcggtggtgagcgcgagcgaatgcctgaaccaattgtccgcgcttttggcgtcttgaagaaatgcgctgccaaggttaacatggaatacggtcttgatccgacgattgggaaagcaattatgcaagctgctcaggaagtagctgagggaaagctcaatgatcatttcccccttgttgtctggcaaactggtagtgggactcagagtaatatgaatgctaatgaggtcattgctaatagagcagctgagattcttggtcgcaaacgtggtgagaaatgtgtgcacccaaatgaccatgtgaacagatcacaatcttctaacgacacttttcctaccgtcatgcacattgcagctgcaaccgagattaattcgaggctcatccctagtttaaaaactttgcatcgcactttggaatctaagtccttcgagttcaaagatattgtgaaaattggaagaactcacactcaagatgctacacctttgacactaggacaagaatttggtggctatgctactcaagttaagtatggactaaatagagtcacctgcactcttcctcgcctctatcagcttgcacaaggtggaactgcggttgggacaggattaaacactaagaaagggtttgatgtaaagatagctgctgcagtagctgaagaaacaaacttgccatttgtcactgcagaaaacaagtttgaagctctggctgcacacgatgcttgtgttgaaaccagtgggtcacttaacacaatcgccacatcgctgatgaagatcgccaatgatatacgttttcttggaagtggcccaagatgtggtcttggtgaacttgtactacctgaaaatgagccaggaagcagtatcatgcctgggaaggtaaatcctacacagtgtgaggccttgactatggtttgtgcacaggttatgggaaaccatgtagctgtgacagttggtgggtcaaatggtcatttcgaattgaatgtattcaagccggtgatcgcgagtgctcttttacattccgtcagattaatagcagatgcttcagcttcgttcgagaaaaactgtgtgaggggcattgaggccaacagagaaagaatctcaaagctattgcacgagtctcttatgcttgtgacatcattgaatccgaaaatcgggtatgacaatgctgcagcagttgccaagaaagctcacaaagaaggatgtacattgaaggaagcggctctgaatttaggcgtgcttactgcggaagagtttgatacacttgttgttcctgagaagatgattggtccctccgattgatagttgtttttggagccaaagcttcaagtaccattattcttctgatgcttttatttaggttataataaaaatgagcaaatccagaaacaattcaaattttcttgggagggcaacattgttcttcatcttacggctaaactatgatcttctttatgtatcaattttttttttgtgttgaataagagagtgagtactcagcgagaagaatttctgagtttcgtt

SEQ ID NO: 118335 - DNA, 1287 bp, Arabidopsis thaliana
  unsure (1)..(1287): unsure at all n locations
nnnnnnnnnnnnnnnnnnnnnnnnnnnnnnnnnnnnnnnnnnnnnnnnnnnnnnnnnnnnnnnnnnccacgcgtccgcccacgccgtccggtaaaacgccaaaacgcacgagatttttttgtcgattcttcgtcgtcctcctttgaaattcacaccaatttgtctctcttcctagagaaacaaaagattattcgaaactcgggaaagtatcatccggtcaccggaaaattgattatttccgatgccaataggtgaccgtcagaatccgagtgtggagaagaagaagaacctcttcaggctatgtccgttttggcagaggagaagcaccacttcttcatcttcaacacagaatccaaaccaaaactaccgtagccgccatggaaatcggaatacagatatttccgccgtctctaagcctccgttgactatgtcttccgtcgccagatcacttcttccagctcgccgtcgtctccgactagatccttctagttatctgtatttcccttatgaacctggaaaacaagttcgcagcgcaataaagcttaagaacactagcaaatctcatactgcatttaagttccaaacaacggcacctaagagttgttatatgcgtcctcccggaggtgtttggctccaggagagagtgttttgctactgtgttcaagttgtggaacatccagagaacaatgaaaagcagccgttgaatcagaagagcaaggttaagtttaagattatgagcctgaaagttaaaccaggagtagagtatgtgcctgagttgtttgatgagcaaaaggatcaagtagcagtggagcaggttcttcgggtcatttttattgatgcggaccgcccaagtgctgcattggagaaactgaaacgtcaattggatgaagctgaagctgcagttgaagcaagaaagaagcctcccccagagacagggcctcgagttgtcggggagggtcttgtcatagacgaatggaaggagagaagagagaagtaccttgctcggcaacaagtcgaatccgtagattctttgtcctaaacgcagagagcaatgtggacttgttctgcagatcatgtacataatttattatccctcgattatgtatttatctctagacgattactttgtggttcttgtatgtctctgtttgttgtgtgattcatgccggttttttctccttcatcaaattttgtttcggtcgtttttagttgatctagaatcgaaccagagtttgttcagtatttagttacaaatgaaaaatcctgttataccaaaaaaaaaaaaaa

SEQ ID NO: 118336 - DNA, 576 bp, Arabidopsis thaliana
  unsure (1)..(576): unsure at all n locations
ttnggccccnnggacatnaaccccccnttnnccanaagnccaggttagttaagatttggccctgaagttaacccgggattagagtagtccctgagttgtttgatggcaaaaggatccagtancagtggancaggttcttcgggtcattttattngatgcggaccgccccaagtgctgcattggagaaactgaaacgtcaattggatgaagctgaagctgcagttgaagcaagaaagaagcctcccccagagacagggcctcgagttgtcggggagggtcttgtcataggcgaatggaaggagagaagagagaagtaccttgctcggcaacaagtcgaatctgtagattctttgtcctaaacgcagagagcaatgtggatttgttatacgcttatagcagaggtaaaagaagctccttcttcttattcttcatcttctgcagatcatgtacataatttattatccctcggttatgtatttatctccagacgattactttgtggttcctgtatgtctctgtttgttgtgttattcaatacaggtttttctccttcaaaaaaaaaaaaaaagggcggcc

SEQ ID NO: 118337 - DNA, 3087 bp, Arabidopsis thaliana
  unsure (1)..(3087): unsure at all n locations
aattcgcggccgctctctttctctctcctccatttcagtaataaacactccttcctctttaatttttctgggtttcttcttcttccctcttttgttgtttctgtgtgattcagttctcgatccatcttttcgtgaaaagtatcaatcttttaattctctagttgtttgtcaaatctggttagtttcttctcttgtatttatttgatgaacttcggtagtctcttcgataacacacccggtggtggctctaccggagcaagacttctctccggtttaagttatggcaaccacaccgccgcaactaacgtcttacccggtggtgctatggctcaagcggcagcggctgctagtctcttctctcctcctctaacgaaatctgtttacgcttcttctggcctctctctagccctcgagcaaccggagagaggaaccaaccgtggagaagcatcgatgaggaacaataataacgtcggaggaggaggcgatactttcgatgggagtgtgaacagaagaagccgagaagaagaacatgagagtagatctggtagtgataacgttgaaggtatctccggtgaagatcaagacgctgctgataagcctcctcggaagaaacgttatcaccgacacactcctcaacaaatccaagaactcgaatctatgttcaaagagtgtccgcatccagacgagaaacaaagattagaactaagtaagagactttgcttagagacaagacaagtcaagttctggttccagaatcgtcgcactcagatgaagactcaattagagaggcatgagaacgcgttattgagacaagagaacgataagttaagagctgagaacatgtctattcgtgaagcaatgaggaatccaatctgcaccaattgtggtggacctgccatgcttggtgatgtctctcttgaagaacatcatctccgtatcgaaaacgctcgtttaaaagacgagcttgatcgtgtctgtaacctcaccggtaagttccttggccaccaccataatcaccactacaactcctccttagaactcgctgtcggcaccaacaacaacggtggacatttcgctttccctcctgatttcggcggtggtggtggttgcttacctccgcagcagcagcagtcgacggtgattaatgggattgatcagaagtcagttttgctggagctggctttaactgctatggatgagttagtgaagcttgctcagagtgaagaaccgttatgggtcaaaagcttggacggtgagagagacgagcttaaccaagatgagtacatgagaacattttcatctactaaaccaaccggtttagctactgaagcttctagaacctctggtatggtcatcatcaatagcttagctctcgtcgagactttaatggactccaatcggtggacggagatgttcccgtgtaacgtcgcaagagctacaaccaccgacgttatatccggtgggatggctggaacaataaatggtgcacttcaactgatgaatgcagagctacaagttttgtctccactggttccggttcgtaatgttaatttcctccggttctgcaaacagcacgcggagggtgtgtgggcggtggtggatgtatcaattgatcctgtcagggaaaactctggtggtgccccggtaatccggcgactaccatcaggatgtgtggtgcaggatgtgtctaatggatactctaaggtcacgtgggtggagcatgcagaatacgacgagaaccaaatccaccagctgtacaggccgttgctacggtcaggccttggttttggctctcaaagatggctcgctacacttcagagacagtgcgagtgtctcgccatcctcatttcttcctccgttacatctcacgacaacacatcaataacgcctggtggtcgaaaaagcatgctgaagttagctcaacgcatgacgttcaacttctgttcgggaatctcggcgccgtcggtccacaattggagcaagctcactgttggaaatgttgacccggacgttcgagttatgacccgtaagagtgtggacgatccaggagagcctccggggattgttttgagtgctgccacttctgtttggctacctgctgcaccacagcgtctgtatgatttcttgcggaacgaacggatgagatgcgaatgggatattctatccaacggtggtcccatgcaggagatggcccatatcaccaaaggtcaagatcagggtgtctctctgctccgctccaatgcaatgaacgcgaatcagagtagtatgctaattcttcaggagacatgcattgacgcatctggagcgcttgtagtatacgcgcctgtcgacattcccgccatgcatgtggtgatgaacggtggtgattcatcctacgtggctctccttccgtccggtttcgctgttcttcctgacggaggcattgacggtggtgggtcaggtgatggtgaccagcgaccggttggtggtggatccctcttgacagtggcgtttcaaatccttgtaaacatctcccaacggcaaaactcacggttgagtcggtggagactgtcaacaacctaatatcatgcaccgttcagaagattcgtgccgctttacaatgcgaaagctgatcttgatcaagactggcgcgtgcgtgtgtttctttttcttaatgaattgtgaatttttatataacttgtttttttggtcttgtactatgggagggagggggtgtcgagtcaagaacgaaccgcgcgagtgggcgagatccaactcctttgtcaccgtgatgggacaacgacgtaaaagggttcgggtccgatcacggtggaggagttggtggttcgggtattgactggggtttggaaaccccctctttactctttttgtttgtgtttgttatttttattatgtagcgcgagtaagccacacgcgtggggtgtgttgtggttagaaaacgcgaactgtgaggtgatgatgttatgttggatgggatctgtatcgtttcaagttaaaaaaaaaaaaaaaaaaaaagnnnnnnnnnnnnnnnnnnnnnnnnnnnnnnnnnnnnnnnnnnnnnnnnnnnnnnnnnnnnnnnnnnnnnnn

SEQ ID NO: 118338 - DNA, 798 bp, Arabidopsis thaliana
agacaaagtaaggaggccagatagcagacccgtctctctccgtctccgtctccgtctccgccatgaccagctcttccgctccttcacgcaaggctttaagcaagatcgcgtgtaataggttgcagaaagagctttctgagtggcaattgaatcccccctctggatttcgtcacaaagtcactgataatcttcaaaaatggacaatagatgttaccggagctccagggacgctttacgctaatgagacttatcagcttcaggttgaatttcctgaacattaccctatgggaagcaccccaggtagtgtttggttctccggcaccttcacatccacatatttacagcaatggccatctttggtttagatcttctatatgactcatgggcaaccagcaatggcaggggactcagcctgcatcagcatcctttcggtgcttatcaagttcacccgcaaagcaacgccctgcggataacgatcgttatgtgaagaactgtaagaatgggaggtctcctaaggagacgaggtggtggttccatgacgacaaggtttgatgcaccaccaagattaaagagaagcctttatatgttaatgatgacatttaaaaatgtcaaaacctaactttttgtctcactcttactgtggaatatgtcaagtgaagagctctgaattatataagagaacactgagagccggaatctacatttcgtactgaacatgtgcacaaaaagattaattaatgctaaacaataagttgtcattaatgccaatagttattacacaaaaaaaaaaaaaaaaaa

SEQ ID NO: 118339 - DNA, 1522 bp, Arabidopsis thaliana
  unsure (1)..(1522): unsure at all n locations
atttttcgctttgcgtgccttcttatcaacttgtaaacaaagctacaaatatctttaaataaggacccaactctttttcaattcctcccatcaatcttcttcatttgttcttctgttggtggtggtgaatctagttttcaaagaatcgattttgccaagtgggttcttcttgataacctttcttcttctttgaaatgggttcttctgtggagcagaacattcttgttactggtggtgctggctttatcgggacgcatactgttgttcaacttctcaaagatggttttaaggtttcgatcatcgataattttgataactctgttatcgaagctgttgatagagttagggagcttgttggtcctgatctctccaagaagctcgacttcaatctgggtgatctaagaaacaaaggggacattgagaaactattctccaagcagagatttgatgctgtgattcattttgcgggtcttaaagctgtgggtgagagtgttgaaaaccctcgccgctactttgacaataacttggttggaacaatcaatctatatgagaccatggcaaagtacaactgcaaaatgatggtgttttcatcttctgccactgtttatggacaacctgaaaagattccatgcatggaagactttgaattaaaggctatgaatccttatggtcgtactaagctgtttcttgaagagatagctagagacattcacgctgcagaaccggaatggagaattattctgctgaggtacttcaatcctgtaggagcacatgagagtggcagtattggtgaggatccaaaaggcatccccaataacctcatgccttacatccaacaagtggccgttggacgtttaccggaactcaatgtctatggacatgactatcccaccgaggatggtagtgcggtaagagactacatccatgtgatggatttagcagatggccatatcgctgcgctcaggaagctatttgctgatccaaagattggttgtactgcttacaatctagggactggtcaaggaacgtctgtgttagaaatggttgcagcttttgaaaaagcttccggcaagaaaatcccgattaagctctgtccgagaaggtcaggagatgcaacagcagtttatgcttcaacagagaaggctgagaaagaacttggctggaaggcaaaatatggagtggatgagatgtgcagagatcagtggaaatgggcaaacaataatccatggggttaccagaataagctttgaatttacttcttttgtttggagttaccatttctaattactcaaatctaaaagaaagaaatatacatacatatgatgatatagttgtgctttatattccacatgtatcgaactgatctcttacttcgatgaataaaatggaaagttgatttgattgaaaaaaaaaaaaaaacgggcggccgctttaaaggatatccaggttaaggaggggggcatagccaaggtaaagattcctttcaaaaggtgtcccctaannnnnnnnnnnnnnnnnnnnn

SEQ ID NO: 118340 - DNA, 1817 bp, Arabidopsis thaliana
  unsure (1)..(1817): unsure at all n locations
cacataagttgtcgaaggcttgagcgttgttccttcttcttcaggtttttgttctattgttaagatgggagacaaaaacgatgacgacaagaacattgagatatggaagattaagaagctgatcaaatcacttgaagctgctaggggtaatggaaccagcatgatctcactcatcatgcctccgcgtgatcaggtctctcgtgttaccaagatgttgggtgatgagtatggaaccgcgtcaaacatcaagagcagagtcaatcgtcaatctgttttgggggccataacttctgctcagcaaaggttgaaactttacaacagggtccctcctaatggtcttgtactctatactggaaccattgttaatgaggatggtaaggagaagaaggttactattgactttgagcctttcagacccatcaatggttctctctacctttgtgacaacaagtttcacacggaagctttgaatgaattgttggagtctgatgacaagtttggtttcattgtaatggatggaaacgggactctctttggaactcttagtggtaacacccgtgaggtacttcacaagttctctgttgatcttccgaagaaacacggaagaggaggacagtctgctcttcgttttgcccgtctccgtatggagaagcgtcacaattatgttaggaagactgctgagctcgccacacagtactacatcaatcctgctacaagtcagcctaatgtgtctggactgattcttgctggttcagcagatttcaagactgagttgagtcagtctgatatgtttgatccccgactggctgcgaagatactgaatgtggtggatgtatcatatggaggagaaaatggttttaatcaagctattgagctgtcagctgaaatccttgcgaatgtgaagtttatccaagagaagcgtctgattgggaagtactttgaggagataagccaggacacggggaagtatgtgtttggtgtggaagatacgttgaacgctttggagtctggtgctattgagacactgattgtatgggaaaatctcgatatcaacagatatgtgatgaagaacagtgcgactggtgaaactgtgatcaaacacctgaacaaggaacaagaagccaacactgagaacttcaaagtagccgacagtgacttggctttggacgtggaggagaagctgtcgttactggagtggcttgccaatgagtacaggcgttttggttgtgcgttagagtttgtgaccaacaagtcacaggaaggttctcagttttgcagagggtttggaggaatcggaggaatacttcgttaccagcttgacatgactgcctttgattccgaggatggagaagctcttgatgatgattcggaatgacaatcaatcaaatcctcaccatcgctggttggggaagatggcgctccgccatgcctgaaccagcttgcgcgggctgtcggggtcgcgctgaagaatttgaaaataaattgaagaagcatcttttgtgaaggtgatgaatgaaggaacatgtggagagtgaagaagccttggctttggtagcgttgttggtgcctagacatttatggagttttattttgagttggtgtttctttaataatttactttggtcagttttatttccagaattggaatactcttgtctgagagaatttgggtttttattacatggatgtctttaaaaccttaattaaatcctaaattctataagttcaaagaattaatcctaaaattcggcaaaaaaaaaaaaaaaannnnnnnnnnnnnnnnnnnnnnnnnnnnnnnnnnnnnnnnnnnnnnnnnn

SEQ ID NO: 118341 - DNA, 1158 bp, Arabidopsis thaliana
  unsure (1)..(1158): unsure at all n locations
nnnnnnnnnnnnnnnnnnnnnnnnnnnnnnnnnnnnnnnnnnnnnnnnnnnnnnnnnnnnnnnnnnnnnccacgcgtccggtgaaaatccgatctacgtctctgtctctctccaatctctctgcgccacagaattgtgcgatttacgaaaatctctgaaacctccgatcgttaacggcgaccgccgattttcccggtaaaaatgaacgacggagatgtatcgaggcagatccagcagatggtgagatttatccgccaagaagcggaagagaaagcaaacgagatctcggtttctgctgaagaagaattcaacattgagaaactccagcttgttgaggcggagaagaagaagatcaggcaagattatgagaagaaggagaagcaagctgatgttcgcaagaagattgattactctatgcagctaaatgcatcaaggatcaaagttcttcaagcgcaagacgatattgtcaatgccatgaaagaccaagcagctaaggatcttctgaacgttagtcgcgatgagtatgcctacaaacagctcctcaaggatctaattgttcagtgtttgcttcggttgaaagaaccttctgtgttgttgcgttgtcgtgaagaggacttgggtttagtggaagctgtacttgatgacgcaaaggaggaatatgctggtaaagcaaaggttcatgccccagaggttgctgttgacacaaaaatattccttccccctcctcctaaatctaatgatcctcatggtctccactgctctggaggtgttgtgttagcttctcgtgatgggaaaatcgtgtgcgagaacacacttgatgcgcgtcttgatgtggcattccgtatgaaactcccagtgatccgtaagtcgttgttcggccaagttactgcctgatgaaagaaaggaaaagagaaaagagattattcaaaccggtttgcgtttggttatttacctattttgggagagatttctctttgttgtgattctttgtattttgcaaaatcttactttggtgccaaacccatcgaacgcttctttttttcgaattcctttttttcattcctcctcgaatgtgtgttatcatggctatacaaataaataaaatgaaagacttcttttctaaaaaaaaaaaaaaaaagggcggcccccacgcgtccg

SEQ ID NO: 118342 - DNA, 699 bp, Arabidopsis thaliana
  unsure (1)..(699): unsure at all n locations
gctggnacgcctgcaggtaccggtccgtaatncccggggcgacactcgcgttcgcaagcagctaaggatcttctgagacgttagtcgcgatgagtatgcctacaaacagctcctcaaggatcttattgttcagtgtttgcttcggttgaaagaaccttctgtgnngangcgnngccctcctattacgggnnggnagnggaagcngnacttgangacgcaaaggacgcanatgctggtgaagcaaaggcccatgccccagaggttgctgttgacacaaaaatattccttccccctcctcctaaatctaatgatcctcatggtctccactgctctggaggtgttgggttagcttctcgtgatgggaaaatcgtgtgcgagaacacccttgatgcgcgtcttgatgtggcattccgtatgaaactcccagtgatccggaagtcgttgttcggccaagttactgcctgatgaaagaaaggtaaagagaatagagtttattccataccggtttgcggtgtggttattgacctattttggaagagatttctctttgatgaagttctttgaacaagaccttatcttagtttggtgccaaaccaatcgaacgcttctttttttcgaattcctttttttcattcctcctcgaatgtgtgtcatcatggctatacaacccactcaaatgaaagacttcttttctttttc

SEQ ID NO: 118343 - DNA, 1041 bp, Arabidopsis thaliana
  unsure (1)..(1041): unsure at all n locations
ggccgaggaaggataaagagattttttcggccagcagccgcgctttttggccgaggaaggataaagagagacgccatgggaagaagacctgcgaggtgttaccgtcagatcaagggtaagccatacccaaagtctcgctactgtcgtggtgtgccagatccaaaaatcaggatctacgatgttggtatgaagaggaagggtgttgatgagtttccattctgtgtccatttggtgtcatgggagaaggagaatgtgtcaagtgaagcacttgaagctgcccgtattgcttgcaacaagtacatggtgaagtctgctggaaaagatgcttttcatttgaggattagggttcatcctttccatgttctcaggattaacaagatgctttcgtgtgctggagctgataggcttcagactggtatgagaggtgcttttggtaaagctttgggtacttgtgctcgtgttgctattggacaggttcttttgtctgttcgttgcaaggatgcccatggtcaccatgctcaagaggctcttcgtcgtgctaagttcaagttccctggtcgtcaaaagattattgtcagcaggaaatggggcttcacgaagtttaacagagctgacttcaccaagttgaggcaagagaagcgtgttgtccctgatggtgtcaacgctaagttcctctcatgccatggacctttggctaaccgtcagccgggaagtgcctttttgccagcccactactgaagagtatcagaactgaagtatccttctcattccggtgaagaagaattataatcagcctgaatctttttacttatcgttatctctggtgttgttttaagtttttagttggacacaatcagtattctgaatctttttgtgactcttttgtttaagctctgaaatgattttgttccttcgttcttggccatataaaaacaaaaaaagggaggccgctctagaggatccaagcttacgtacgcgtgcatgcgacgtcaaagctcttctatnnnnnnnnnnnnnnnnnnnnnnnnnnnnnnnnnnnnn

SEQ ID NO: 118344 - DNA, 645 bp, Arabidopsis thaliana
  unsure (1)..(645): unsure at all n locations
ctcgcgggtccacgcaagactctatactgagtcgtaataacgacagaaggggagggttttgcaaaaccaacaccgaagatccaacacgatgggacgaagacctgcgagatgttaccgtcagattaagggaaagccatacccgaaatcacgatactgtcgtggtgtgccagatcccaaaatcaggatctacgatgttggtatgaagaggaaaggtgttgatgagtttccattctgtgttcatttggtttcatgggagaaagagaatgtgtcaagtgaagcacttgaagcagcacgtattgcttgcaacaagtatatggtgaaatctgctgggaaagatgcttttcatttgaggattagggttcatcctttccatgttctcaggattaacaagatgctttcgtgtgctggagctgataggcttcagactggaatgagaggtgcttttggtaaaagctttgggtactttntnctcgtgttgctattggccaggtncttttgncttttccgttcaaaggatncccatggtnaccatgnnnaaagggctttttcggccggnnnaagtcaaattncccngggcggcaaaaagttttttcaaccaggnaatggggtttncggggttacagnnttgctttcccagttgggggc

SEQ ID NO: 118345 - DNA, 781 bp, Arabidopsis thaliana
  unsure (1)..(781): unsure at all n locations
atgatacttcagctctctacgactcactatttggaaagctggcacgcctgcaggtaccggtccggaattcccgggtcgtcccacgcgtgcgcgatgttggtatgaagaggaagggtgttgatgagtttccattctgtgtccatttggtgtcatgggagaaggagaatgtgtcaagtgaagcacttgaagctgcccgtattgcttgcaacaagtacatggtgaagtctgctggaaaagatgcttttcatttgaggattagggttcatcctttccatgttctcaggattaacaagatgctttcgtgtgctggagctgataggcttcagactggtatgagaggtgcttttggtaaagctttgggtacttgtgctcgtgttgctattggacaggttcttttgtctgttcgttgcaaggatgcccatggtcaccatgctcaagaggctcttcgtcgtgctaagttcaagttccctggtcgtcaaaagattattgtcagcaggaaatggggcttcacggagtttaacagagctgacttcaccaagttgaggcaagagaagcgtgttgtncctgatggtgtcaacgctaagttcctctnatgccatgggcctttggctaaccgtnaccgggaagtgcctttttncagccactactnagngntcagacctgaggntcctttcattccggtnaggggattttaannacctgatncttttactatnggaaccctggggcggttaagtttagntggcaaanagtttctnancttttgnncnttttttaagta

SEQ ID NO: 118346 - DNA, 662 bp, Arabidopsis thaliana
  unsure (1)..(662): unsure at all n locations
ctctacgactttattagggaacgctggtacgcctgcaggtaccggtccggaattcccgggtcgacccacgcgtccgcgaagatccaacacgatgggacgaagacctgcgagatgttaccgtcagattaaggggaaggccatacccgaaatcacgatactgtcgtggtgtgccagatcccaaaatcaggatctacgatgttggtatgaagaggaaaggtgttgatgagtttccattctgtgttcatttggtttcatgggagaaagagaatgtgtcaagtgaagcacttgaagcagcacgtattgcttgcaacaagtattatggggaaatctggctgggaaaagatgcttttcatttgaggattaggggttcatcctttccatggttctcaggattaacaagaatgctttcgtgtgctggagctgataggcttcagactggaatgagaggtgcttttggtaaagctcttggtacttgtgctagagttgcgattggacaggtccttttgcctgtnaggggaaggntaancatggggtccatgcccaggaancctccgaaagccaaggttaagtnccctggcgcaaagacattgtnncagaatgggntnccnaatcaccggcgngacncgactnaccntnaagntnccnatgggcaaccaagtcnn

SEQ ID NO: 118347 - DNA, 734 bp, Arabidopsis thaliana
  unsure (1)..(734): unsure at all n locations
ttttgggccatgaaggataaagagagacgccatgggaagaagacctgcgaggtgttaccgtcagatcaagggtaagccatacccaaagtctcgctactgtcgtggtgtgccagatccaaaaatcaggatctacgatgttggtatgaaaagatgcttttcatttgaggattagggttcatcctttccatgttctcaggattaacaagatgctttcgtgtgctggagctgataggcttcagactggtattgaggaggtgccttttttggtatatagcttttgggtacctttgtgccttcgtgttgcgtagttggaccaaggttcttttggtgctggtgtcgttgcaagggggatgcccanntggtcaccatgcctcnnaagaggctcnnttcgtcgtgccttaagttcaaaagttccctgggggtcgtcaaaaggattattgggtcagcnnaggaaatgggggctttcaaacgaagtttaacccagagctgnnacttcaccannagttgaggcaagaagaanngcgtgttgtccctttgatggtgtcaaccgctannagttcctctcatgnnccatggacctttgtgcttaaccgtcaagccgggaaggtgcctttttgcccagcccacttactgaagagtatcnagaactgaagtatnccttctcattccggtgaagaagaattataatcagcctgaatctttttacttatcgntatctctggtgttgttttaag

SEQ ID NO: 118348 - DNA, 457 bp, Arabidopsis thaliana
gtcgactttatcgataagcttgatatcgaattcgcggccgcccaacacgatgggacgaagacttgcgagatgttaccgtcagattaagggaaagccatacccgaaatcacgatactgtcgtggtgtgccagatcccaaaatcaggatctacgatgttggtatgaagaggaaaggtgttgatgagtttccattctgtgttcatttggtttcatgggagaaagagaatgtgtcaagtgaagcacttgaagcagcatcgtattgcttgcaacaagtattatggtgaaatctgttgggaaagatgcttattatttgaggattagggtttatcctattcatgttcttaggtttatcaagatgcttttgtgtgctgtagctgtttggcttaatactgtaattataggagctttttatagatttttgtttttttgttttagtttcaattgttctggattttttg

SEQ ID NO: 118349 - DNA, 1746 bp, Arabidopsis thaliana
  unsure (1)..(1746): unsure at all n locations
nnnnnnnnnnnnnnnnnnnnnnnnnnnnnnnnnnaccacgcgtccgcaaaaaacagagacaaaagaatggcgcgaaaatccctaattttcccggtgattttgctcgccgttcttctcttctctccgccgatttactccgccggtcacgattaccgcgacgctctccgtaaaagcattctcttcttcgaaggtcaacgttccggtaaactccctccagatcaacgcttaaaatggcgccgtgactcagcattacgcgacggttcctccgccggcgttgacttatccggtggttactacgacgccggagacaacatcaagttcggttttccgatggcgttcacaacaacgatgctttcatggagtataatcgatttcggtaaaaccatgggacctgagcttagaaacgccgtgaaagctgttaaatggggaacagattacctccttaaagcgacggcgattcccggagtagtcttcgtccaagtcggagacgcttactccgatcataactgttgggaaaggcctgaagatatggacactctccgtactgtttacaaaatcgatagagctcatcctggttctgacgtcgctggtgaaaccgcagccgctttagccgccgcttcaatcgtttttagaaaacgcgatcctgcttattccagacttctacttgaccgtgccactagggtattcgcgtttgctaacagatatcgcggcgcgtatagtaacagtctctaccacgcggattgtcctttttactgtgatttcaacggttaccaggatgagttactgtggggagcggcatggctacacaaagcctcgaggaaacgagcgtacagagaattcattgtgaagaacgaggtcattcttaaggctggagataccattaatgagtttggttgggacaataagcatgctgggattaatgtcttaatctccaaggaagtgttaatgggaaaagcagagtattttgagtctttcaagcagaacgcagatgggtttatctgttctatattgcctggaatttctcacccccaagtccaatactctcgaggagggctactagtgaagactggagggagtaacatgcaacatgtaacatcactatctttcctcctattggcttactctaattatctgagccatgccaaaaaggttgtgccttgtggcgaattaactgcttccccatctctcctccgtcaaatcgccaagcgtcaggtggattacattctcggagacaacccgatgggactgtcttacatggttggatacggtcaaaagtttccacgtaggattcatcaccgtggtagctcggttccttcggtttcagcccatccaagccacatagggtgcaaagaaggctctcgctatttcctaagcccaaatcctaacccaaaccttttggttggtgctgtagtcggtggacctaatgtcactgatgcttttccggattcaagaccttactttcagcagtctgagcccacgacttatatcaatgcaccactagtgggccttctcggttacttctccgcccattctacttggcgatgagggagggccttattacttattactctctatcctattagaggtgtgctggaaactttaggccaccctaaaacccttttttttcttttttaatgttattgccactctttattttctactacttaaccaattgtattgtaagcccgtaattagcggccgcgaattcgatatcaagcttatcgataccgtcgacatcgagggggg

SEQ ID NO: 118350 - DNA, 1222 bp, Arabidopsis thaliana
attcatttcatacatatttgtctctcttaaatgtgtttatttccccttttgtagtaaccactcagaaggttttccttcactcaaaatggctttgtctcttatctttctagctctcgtagtgttgtgccctagtagtggtcacagccaacgttctccttcaccgggatactacccgagttcccgagtaccgacttcaccttttgatcgtgaattccgtactttatggggctctcaacaccaacgtagagagcaagacgttgtcactctttggctcgacaaatccactgggagtgggttcaagtctcttcgtccataccggtcgggctactttggtgcttccattaagctccaaccaggcttcactgctggagtggatacatccctctatctctcaaacaaccaagagcatcctggagaccacgatgaggtcgatatcgagtttctagggacaacgccagggaagccttattcccttcaaacgaatgtcttcgttaggggaagtggcgaccgaaatgtcattggaagagaaatgaaatttaccttgtggtttgaccctactcaagattttcaccattacgcaattttgtggaaccctaaccaaattgtattctttgtagacgatgtaccgatacgtacatataatagaaagaatgaagctatattccccacaagaccgatgtgggtttacggatcgatatgggatgcatcggactgggccacagaaaatggaaggatcaaagctgactaccgataccaaccatttgtggctaagtacaagaactttaagctagcgggatgcacagcggatagctctagctcatgcagaccgccatcgcctgcacccatgcgcaaccgtgggttgacccggcagcagatggcggcattgacatgggcacagaggaacttcttggtctataactattgccatgacccgaaaagagaccatacccaaacaccagaatgttaaaacaaacaaacaaaacaaccaaagaaaggttataataattttattttgcattacccaacatacatgaataatgggaggtcttgtgacgggtccacactggaaactaaattgaagcagttgagcgtccggtcctctatgatttgagattaaaaagaaaaggttttgtttttcaaaactttgtaatgtttccatttggtatctttcttataattgtaatattgtgtgatcacatatattaatatctggtattgtatt

SEQ ID NO: 118351 - DNA, 3670 bp, Arabidopsis thaliana
  unsure (1)..(3670): unsure at all n locations
cttctcttcacccaagtcttgtttttaatctgttcttcgaatctgaactctttgatttctatgtttgtattaataactctacaaaatcaagtagctacatagcccgagattgtgctcgtggaggcagtaaactatctgaagcagccactattaccatttcgtggcgatcacaaaaacgattcaaaaaatgtggaggaacattctgggaagagcttcattgagaaaggttaagtttttatctgattctagctcctccggtactcattatccagtgaatagagtccgtgggattctgtcttctgttaatctcagtggcgttagaaatggtttatctataaatccagtcaacgaaatgggtggattaagctcgtttcgtcatggtcaatgttatgtgtttgaagggtatgctacagctgcgcaagctattgattcgactgatcctgaagatgagtcttctgggtctgatgaagttaatgaattgataacggaaatggagaaagaaactgagagaatccgtaaaaaagctaggcttgcagctataccgccaaagagagtcattgcgggaatgggagcacagaagttctatatgctgaagcagagacaggtgaaaatggagactgaagaatgggaaagagcagcgagagagtgtagagagattctagctgatatgtgtgagcagaagcttgcaccgaatttaccttatatgaagtctttgtttctaggctggtttgagcctgtgcgtaatgctattcaagatgatcttgatacttttaaaatcaagaaagggaagattccgtatgcgccttttatggagcagttaccggctgataagatggctgttatcactatgcataagatgatgggattgttgatgactaatgcggaaggcgttggcattgttaagctagtgaatgctgctactcagatcggggaagctgttgagcaggaggtcaggatcaacagttttttgcagaaaaagaataaaaaaaatgcaactgacaagacgatcaatacagaagctgagaatgtttcagaagaaattgtggccaaagaaacggaaaaggcgaggaaacaagttactgtactgatggaaaaaaataagttgaggcaagtaaaagcattagtgaggaaacatgactcattcaagccatggggtcaagaggctcaagtgaaggtcggcgcacgtttgattcagctgctgatggaaaatgcatatatacaacctccagctgaacagtttgatgatggtccacctgacatccgacctgcttttaagcaaaatttcagaactgtcacattagaaaatacaaaaacgagcaggagatatggttgcatcgaatgcgatcctttggtcctaaagggccttgacaaatcagctagacatatggtcattccctacttgccaatgctaatacctccccagaactggacagggtatgatcaaggggctcattttttcttgccttcgtacgtcatgagaacacatggagctaaacaacaacgcactgttatgaaacgaactccaaaggagcaactggagccagtatatgaggctttagatactctaggaaacactaaatggaagataaacaaaaaggtgttaagtttggtggacagaatctgggctaatggaggtcgcattggtggtctggttgaccgtgaagatgtacccattccagtagagccggaaagggaagaccaagaaaaatttaaaaattggagatgggaatccaaaaaagcaattaagcaaaataatgagagacattcacaaaggtgtgatatagagctcaaactcgaggtggcacgtaaaatgaaggatgaggaaggtttctactaccctcacaacgttgattttcgtgggcgagcatatcccatacatccatatctcaaccatctcgggtctgatctctgccgaggcatccttgagttttgtgagggaaagcctcttgggaaatcagggttgcgttggctgaagatacatatagcaaacttatatgctggtggagtcgataagctggcttatgaggataggattgcgtttactgagagtcacttggaagatatatttgattcttctgatagacctcttgaaggaaaaagatggtggcttaacgcagaggatccctttcaatgtttggctgcttgcattaatctttcagaagccttgagaagcccctttcctgaagctgcaatatcccatatccccatccaccaggatggttcatgtaatggtttacaacactatgctgctcttgggagggataagttgggagcagatgctgtcaaccttgttacaggtgaaaagccggctgatgtttatacagaaattgcggctagggttctcaagatcatgcagcaagatgcagaggaagatcccgaaacatttccaaatgccacatatgccaaactcatgctcgaccaggttgacagaaagctggtaaaacagactgtcatgacatcagtgtatggtgttacttattctagcgcacgtgaccaaataaagaagagattaaaagaacgtggtacctttgaggacgattcactgacttttcatgcatcgtgttatgcagcaaaaatcactttgaaagcattggaagagatgtttgaagctgcaagagctatcaagagttggtttggtgattgtgcaaagataatagcttcagaaaacaatgcagtttgttggacgactcctcttggacttccagttgtacagccttatcgaaagcctggtagacatttggttaagactacccttcaggtgttgactctaagccgtgagactgataaggtcatggcgaggaggcagatgactgcttttgcaccaaattttatacattctcttgatgggtctcacatgatgatgacagcagttgcctgcaacagggcgggcttgagtttcgcaggggtgcatgattcgttctggacgcatgcctgtgatgttgatataatgaacacagtactcagagaaaagtttgtcgagctctacgaaaagccaatcttagaaaacttgttggagagtttccagaagtccttcccagacataagttttccgccattaccagaacgaggcgactttgatctgaggaaggtcctagagtcgacatacttcttcaactgagctgcagcacattcaggttacttacatactggaagctccaatactccacatctaacattcaggacagagtaagtttgcttcttcaggccaatacatcagccacattgatcaaagtggaaaagattcttaataaggaatgttgatggttaacctcaacttagaggtgggcttcgggttacttgtaaatatacacagaaagagtgtttcaaagcttggcaggagggaaggcgttggatcggactgatggatcgggttatcgaaccagtgactgtggcactccggattactagcagtttcttatcgaccacacaaaattaccaagagatacatgcagtcttgtaggaactgaaaacgggtgctaaaggataatcatttaaatggtcttagtagacactcttttttgattgacttgtaatttattatatactctaaaatgcattttatttaataatatatgaacttgaacaaaaaaaaaaaaaaaaaannnnnnnnnnnnnnnnnnnnnnnnnnnnnnnnnnnnnnnnnnnnnnnnnnnnnnnnnnnnnnnnnnnn

SEQ ID NO: 118352 - DNA, 957 bp, Arabidopsis thaliana
ctttttttagttcccaaaagatcgaacttggcgctactttcattttctcatctctgtttttccaacatcctaagaacagagttcgttgctccttttgttttctttaaagaaaaagtcagattcagatacatacatactctgaagaacatgtcgacgcgaagacgaactttactcaaagttataattcttggagacagcggggttggcaaaacatcgttgatgaatcaatatgtgaataacaagtttagtcaacagtacaaagctacgatcggagctgattttgtcactaaggagcttcaaattgatgacaggcttgtcacattgcaaatatgggacactgctgggcaagagaggtttcaaagtcttggtgttgctttctatagaggtgcagattgttgtgttcttgtctatgatgtgaatcacttgaagtcatttgaatctctcgacaattggcacaacgagtttcttacacgggctagtccacgtgacccaatggcattcccttttatacttcttggtaataaggttgatattgatggaggaaatagccgagtggtatctgagaagaaggctagagaatggtgtgctgaaaagggaaacatagtctatttcgagacatcggctaaagaagattacaatgtcgatgactccttcttgtgcatcacaaaacttgcccttgcaaatgaacgcgaccaagatatatatttccagccagatactggttcggtgcctgagcaaagaggaggttgtgcttgctgaatgctgaagaaacatttcttactctcttgatttatgcattacttgttgtgtgtgtctataatcttaatgctgagaaggaccaataaaacttgtattgttccctaagtaaggttttgttacctttctggttcttcatctttgacatttggtggttcacgatttgtatgtaacaacagttcaagtgtaaaaaaaaaaaaa

SEQ ID NO: 118353 - DNA, 1019 bp, Arabidopsis thaliana
  unsure (1)..(1019): unsure at all n locations
gaaaacaatgaatggtcattgctttcttccgagttttgtggaggaacccacataacaaacacccgcgaagccaaagcatttgctcttctatcggaggagggaattgctaaaggtattcgtagggtaactgctgtgactactgaatgtgcttttgatgcattgaatgcggcgtccttacttgaaagagaagtagaggatgcctccagagcggagggaagtgcattggaaaagaaagtttctgctttgaaaagccgagtagatgcagcaattatcccagcagctaaaaaggcagatattaggactaagattgcttcgcttcagaatgaagtaagaaaagctcagaagaaaatagcggaacaaaacctgaaaaaatctgtcaaattagcaacagaggcagctgagtccgcagcatcagatgggaagactttctgcataatccagctggatgtgggtcttgatgcagcagctgtgcgagaggccgtttcaaaagtcatggaaaagaagggtatgtcgataatggtgttcagcacagatgaaagcacaaacaaggcggttgtgtgtgcaggagtgccagaaaaatcagaccagtttaagccgttagacgtcactgaatggttgacaactgcattgggtcctctaaaaggaaggtgcgggaaagggaaaggtggtcttgcatcagggcagggaacggatgcttctcaagtgcaggcggctttggatatggcttcatcatttgcatcaatgaagctcaactgatttggtcgggaggttacataatctgtgaggtcagaataacctctacttaatttgctttcattgtacaccgttttacacatgttttaagaatctgttaaatttctctgttcttgtgatggaatttgtggtatcacactcttttagtcaaagttaccaatggctgttataaaaaaaaaaaaaaaaagnnnnnnnnnnnnnnnnnnnnnnnnnnnnnnnnnnnnnnnnnnnnnnnnnnnnnnnnnnnnnnnnnnnnnnnnnnnaca

SEQ ID NO: 118354 - DNA, 642 bp, Arabidopsis thaliana
  unsure (1)..(642): unsure at all n locations
caatagaaagagattttgggtctttcgaagagtttttggaaaggttcaagtcggctgcagcttcgaattttggttcgggttggacatggcttgcatataaggcgaatagacttgacgttgcaaatgccgttaatcctctcccaaaggaggaagacaagaaacttgttatagtgaagacgcccaatgcagtaaatccgctcgtatgggattattctccacttctcaccattgatacctgggagcacgcttactatctggattttgagaaccgaagagctgaatacataaatacattcatggaaaagcttgtgtcatgggaaactgtaagcacaaggttggaatccgcaattgctcgagcagtgcaaagagaacaagaaggaacagagacagaagatgaagagaatccagatgatgcaagtaccagagggctatttagatagtggcatcgatgtatctgagggtggctaaaaccggggccgggaaatcctgganncccggggggtccccnagttctanaccgncggcacccnnggtggaccncancttttgnccctttgtggggggnaattcggccttggggaacnntggngaaannggtcccnggggnaaatgttcccgncccaatccnccnaanaatngggc

SEQ ID NO: 118355 - DNA, 1326 bp, Arabidopsis thaliana
  unsure (1)..(1326): unsure at all n locations
aacttccccacttccaaccaaaattaatttaaaatgtcaaatattttttcattttcctcttttcgaaattaaagaaaaccctaaacgccgttgtctgatattgagagagagagagagattaaaaacttcttctggttccttttatcaacattttttctctctcttaaaacttcgaagcgatttttgatttacagactatggaaatggaatcattcatggacgaccttttgaacttctctgtaccggaagaggaagaagacgacgacgaacatacgcaaccaccgaggaatattactcgccggaaaactggattacggccaacagactccttcggtctctttaataccgacgaccttggagtggttgaagaagaggatttggaatggatttcaaacaaaaatgcttttccggtgattgaaacattcgtcggtgtattaccgtcggagcattttcctataacgtctcttctggaaagagaagcgactgaggtaaaacagctgagtccggtttcagtacttgagacgagtagccatagctccacaacgactacctcaaacagtagcggcggaagtaacggaagcacggccgtggctacgaccaccaccactccaacaataatgagctgttgcgttggttttaaagcgccggctaaagcgagaagcaagcgtcgtcgtacaggacgccgtgatttacgagttttgtggacaggaaacgagcaaggaggaatacagaagaagaagacgatgactgtggcggcggctgcgttgattatgggaaggaagtgtcaacactgtggagcggagaagactccgcaatggagggcaggaccagcggggcctaagactctgtgtaacgcttgtggcgtgaggtataagtccgggaggctagttccggagtatcgtccagcgaacagtccaactttcacggcggagttacattcgaattctcaccggaagattgtagagatgaggaagcagtatcagtccggtgacggtgacggtgatcggaaagattgtggataaaaagtgattaggattaatttttattttttcggagaaacttttttttttttttttcgtttaatttctctttatttgtttttaaagtctgttttagggttttgcagttggaatttaggtttttaattttttgcttatcttttttatttgtgaaattagtggtaattacttatttagggaatattatggtcatggaatggaagataactttctcattaaaaaaaaaaaccaaagnnnnnnnnnnnnnnnnnnnnnnnnnnnnnnnnnnnnnnnnnnnnnnnnnnnnnnnnnnnnnnnnnnnnnnnnn

SEQ ID NO: 118356 - DNA, 552 bp, Arabidopsis thaliana
aatacgactcactttagggaaagctcgtacgcctgcaggtaccggtccggaattcccgggtcgacccacgcgtccgtacagactatggaaatggaatcattcatggacgaccttttgaacttctctgtaccggaagaggaagaagacgacgacgaacatacgcaaccaccgaggaatattactcgccggaaaactggattacggccaacagactccttcggtctctttaataccgacgaccttggagtggttgaagaagaggatttggaatggatttcaaacaaaaatgcttttccggtgattgaaacattcgtcggtgtattaccgtcggagcattttcctataacgtctcttctggaaagagaagcgactgaggtaaaacagctgagtccggtttcaagtacttgagacgggtagccatagctccacaacggcttacctcaaacaagtagccgccggggagtaaccggaagccacgggccgttgggctacggccaccacttcccactccaaccacttaatgaggctttgtgttttggtttttaaaagccc

SEQ ID NO: 118357 - DNA, 1160 bp, Arabidopsis thaliana
  unsure (1)..(1160): unsure at all n locations
nnnnnnnnnnnnnnnnnnnnnnnnnnnnnnnnnnnnnnnnnnnnnnnnnnnnnnnnnnnnnnnnnnnnnnnccacgcgtcgacagagtcagagtcttcgtctgcaagagagaacaataccactcaatcataatctataacaatggacgtctatggcttatcttcaccagacttacttcgaatcgacgaccttcttgatttctccaacgaagacatcttctccgcttcttcttccggtggttccaccgccgctacttcctcttcttctttccctcctcctcaaaaccctagtttccaccaccaccatctcccttcctccgccgatcatcactccttcctccacgacatttgcgttcccagtgatgacgcagctcatcttgaatggctttcgcaattcgtggacgattctttcgctgattttccggcgaatccattaggaggaactatgacttctgtcaaaactgaaacttcctttccggggaaaccaagaagcaaacgatcaagagctcctgctcctttcgccggaacatggtctccgatgccactggaatccgagcatcagcagcttcactccgccgccaaattcaagccaaagaaagaacaatccggcggaggaggaggaggaggaggaagacatcagtcatcgtcatcggagactacggaaggaggaggaatgaggagatgtactcactgtgcatcggagaaaacgccacagtggaggacaggaccacttggacctaaaacactatgtaacgcttgtggagtccggtttaaatccggtagacttgtaccggaatatagaccggcttcgagtcctacttttgttttgactcagcattcaaactctcaccggaaagtgatggagcttcgacggcagaaagaagttatgagacaaccacaacaagttcaacttcatcaccaccaccacccgttttagttttcacttttcactgcctcgtccgtcgtcactcttttttttgtttttctttttggttcttggggttgggttttgggtaacgtcacgtgatgatgacgtgtcgcgatcctagcggcgttaatcacgtgaccgacgacgacgggagcctaaaatttttagtgaacgttggaaaatcaaacctcatttaattgttaattattaaaaaaaaattatatcaaaaaaat

SEQ ID NO: 118358 - DNA, 1129 bp, Arabidopsis thaliana
  unsure (1)..(1129): unsure at all n locations
nnnnnnnnnnnnnnnnnnnnnnnnnnnnnnnnnnnnnnnnnnnnnnnnnnnnnnnnnnnnnnnnnnnnnnnnnnnccacgcgtccggaatatctctcttcctctgtttcttcgccattctctcagcttttctccttcttctgtatgtgttaaagagtgaatggagctgtggacagaagctagagccttaaaggcaagtctaagaggagaatctactatatctctcaaacatcaccaagtgattgtgtcggaagatttaagccgaacttcttccttgccggaagatttctccgttgagtgtttcctcgatttctcagaaggtcaaaaagaagaagaagaagaagttgtctctgtttcttcttcacaagagcaagaagaacaagaacatgattgtgtctttagttcacaaccttgcatctttgatcaacttccttctttgccggatgaagatgtggaagagcttgaatgggtatctcgtgttgtggatgattgttcatcaccagaagtttcacttctcttaacacaaacacataaaaccaaaccaagcttctcaagaattccggttaaaccaagaaccaaacggtctcggaacagtttaaccggtagtcgtgtttggccactcgtttcaaccaatcatcaacatgcagcaacagagcagttgaggaagaagaaacaagaaactgtccttgtgtttcaacgaagatgcagccattgtggcacaaacaacacaccacagtggagaaccggtccggtcggtccaaaaaccttatgtaatgcatgtggagtccggtttaagtctggtaggctctgcccggaatacagaccggcggatagtccgacgttctcgaatgagattcactcaaatcttcataggaaggttctggaattaagaaagagtaaagagttgggtgaagaaacaggtgaagctagtactaaatcagacccagtcaaatttggcagcaagtggtagataagacttaggtaaaacctactttttgtaacattatctgtagtgttgtaatttaacaacttgcttcttaacaaaaaaaaaaaaaaaaagnnnnnnnnnnnnnnnnnnnnnnnnnnnnnnnnnnnnnnnnnnnnnnnnnnnnnnnnnnnnnnnnnnnnnn

SEQ ID NO: 118359 - DNA, 466 bp, Arabidopsis thaliana
tctctcttcctctgtttcttcgccattctctcagcttttctccttcttcttcgtctttgtcaggtaaagagatacgatgagcatatcccacatacctctctcctcttctcatctttttagtttctcgaaagtttgcatgcgccgactttgttataggttataaactttagttttaagcctattttcgtatgtttatggttgttgtaatagttgagaattcagagtatgtcaagtgaaacttaaaaagaattctatatgtatgtgtgtatgcgttaaagagtgaatggagctgtggacagaagctagagccttaaaggcaagtctaagaggagaatctactatatctctcaaacatcaccaagtgattgtgtcggacgatttaagccgaacttcttccttgccggaagatttcttcgttgagtgtttcctcgatttctcagaaggtccaaaagaagaagaagacgaa

SEQ ID NO: 118360 - DNA, 934 bp, Arabidopsis thaliana
aagccgagtcaacaatggacgtctacggcatgtcttcaccggacttgcttcgtatcgacgaccttctcgatttctccaacgacgaaatcttctcttcctcttccaccgtcacttcctccgccgcttcctccgccgcttcttccgaaaaccctttcagctttccttcttccacctacacttctcctactctcctcaccgacttcactcacgatctctgcgttcccagtgacgacgcagctcatctcgaatggttatcgcgattcgttgacgattcattctccgatttcccagcaaatcctttaaccatgaccgttagacccgagatttcattcaccggaaaacctagaagtcgccgatcaagagcaccagcaccttccgtagctggaacttgggctccgatgtctgaatcagagctttgtcactccgtcgctaaacctaaaccgaagaaagtctacaacgctgaatcggttacggcggatggagcgaggcggtgcacgcactgtgcctcggagaaaacgccacagtggagaactggaccgcttggacctaaaacactttgtaacgcttgtggagttcgttacaaatcagggaggcttgtaccggaatacagaccggcgtcgagtccgacgtttgtattgactcagcattcgaactctcatcggaaagttatggagctccggcgacagaaggaacaacaagaatcttgcgttcgaattccgccgtttcagccgcagtaaatttgggggttttcttttcaagggtttttgtgatttggtgacgtgtcgtaatcttaacggtgatgatcacgtgaccgacgggaggggttaaggacttaattatcagtattagtttaaagtttgcaaatctctgctaattaatttgttggtaatttctattgatttttttcttgcttttgtttaaaaaaaaaaaaaaa

SEQ ID NO: 118361 - DNA, 1191 bp, Arabidopsis thaliana
  unsure (1)..(1191): unsure at all n locations
nnnnnnnnnnnnnnnnnnnnnnnnnnnnnnnnnnnnnnnnnnnnnnnnnnnnnnnnnnnnnnnccacgcgtccgcggacgcgtgggcggacgtcgagagcattttatatcttcaatcatcttacgcaggctgttgtagcagcagtgtctatcggagacgatgaagttcaacgtcgccaatccaactactggatgccagaagaagctcgagatcgacgatgaccagaaactacgtgcgttttacgacaagagaatctctcaagaagtcagtggagatgctttgggcgaggagttcaaaggatacgttttcaagatcaagggtggttgcgataagcaaggtttcccaatgaagcagggagttttgactccaggccgtgttcgccttttgcttcaccgaggaactccttgcttcagaggacatggaaggagaactggtgagaggagaagaaagtctgttcgtggttgcattgtgagccctgatctctctgttctgaaccttgtcattgtgaagaagggtgagaacgatcttcctgggcttaccgatactgagaagccaagaatgagaggaccaaagagagcctccaagatccgtaaactgtttaacctcaagaaggaagatgatgtcaggacctatgtcaacacttaccgccgcaagttcacaaacaagaagggcaaggaagttagcaaagcccctaagatccagaggcttgtgaccccattgactcttcagaggaagagagctagaattgctgacaagaagaagaaaattgctaaggctaattctgatgctgctgattaccagaagcttctcgcctcgaggttgaaggaacagcgtgacaggaggagtgagagtttggcaaaaaagaggtcgagactctcttctgctgctgccaagccctctgtcacagcttaaaaaagcttgagaatcaaatcaaagatgtcacctttctagttttgttctcttttcttctccggctattaaaaagttagttcgagttcatattcgagttcatattcagctgtttttgttccaagacatgggtacacaatcgctttgggcttgtttcatgatttatgcttttagttgaagaccattttaaactcaatttttatagggcggccgctctagaggatccaagcttacgtacgcgtgcatgccacgtcatagcttttgtgatagttacacataatt

SEQ ID NO: 118362 - DNA, 1022 bp, Arabidopsis thaliana
gagagcattttatatcttcaatcatcttacgcaggctgttgtagcagcagtgtctatcggagacgatgaagttcaacgtcgccaatccgaccaccgggtgtcaaaagaaactcgagatcgatgacgatcaaaaactccgcgcctttttcgacaagaggctctctcaggaagttagcggagatgctctaggcgaggaattcaagggatacgtattcaagatcatgggaggatgtgacaagcaaggtttcccaatgaaacaaggagttctcactccagggcgtgtccgtcttttgcttcaccgaggtactccttgttttagaggacacggaaggaggactggagagaggagacgaaagtctgtccgtggttgcattgtgagccctgacctgtctgttcttaacttggtcattgtgaagaagggtgtaagtgatcttcccgggcttaccgacactgagaagccaagaatgagaggtcccaagagggcatcaaagatccgcaagttgtttaaccttggaaaagaggatgatgtgaggaagtacgttaacacttaccgccgtaccttcacaaacaagaagggcaagaaggttagcaaggctcctaagatccagaggcttgtgactccattgaccctccagaggaagagagctagaattgctgacaagaagaagagaatagccaaggctaactctaatgcagctgattaccagaagcttcttgcctccagactaaaggagcagcgtgatcgccgtagtgaaagtttggccaagaagaggtctagactctcttctgctcctgctaaacccgttgctgcttaaactgcctcaagattaagaaatttctttctctctagtttgtttctggtcgtatttaagttgctccacagacatgagaacgccattttgaacactatttttggtttctgttttgtgtcaacttttcaagccttttattatatcaaagttttgaacctcttagtagtacgtttgttatatttagttattatttaaaaaaaaaaaaaaaaa

SEQ ID NO: 118363 - DNA, 893 bp, Arabidopsis thaliana
  unsure (1)..(893): unsure at all n locations
cgccaagctctacttctgacttacatctagggaaagctgtgccgcctgcaggtgccgggccgcaattcccgggtcgacccacgcgtccgtacggctgcgagaagacgacagaaggggagacgtcaaatatgaagttcaacgttgagaatccaactactggatgccagaccaagctcgtgatccacgatgaccatgaactacgcgcgttttacaatcatgaaatcgggggggaagacagaggagatgctttgagcgaggagttcaaaggatacgttttcaagatcaaggatggttgcaataagcacgggttcccaatgaagcagggagttctcactccaggccgcgtccgccttctgcttcaccgaggtactccttgctttcagaggacacggaaggaggtctggtgagaggagaccaaagtctgcccgtgggtgcattgtgagccctgaccgctctgttcttaacttggtcattgtgaagaagggtgtaagtgatcttcccgggcttaccgacactgagaagccaagaatgagaggtcccaagagggcatcaaagatccgcaagttgtttaaccttggaaaagaggatgatgtgaggaagtacgttaacactttaccgncgtaccttcaacaaacaagaaggggcaagaaggttagcaaggtccctaagatcccagaggcttgtgacnccattganccncccagagnagagagcaagaattttgctggcaagaagaanggaatcgccaagggtaanccttggttnagctggttttccannaagtnttttcccccaanactaaaaggggcccgntattccccggantnaaaattttgcccaaaagggttanncctttttggncccnggaaacccggtggngntaaannccccaa

SEQ ID NO: 118364 - DNA, 591 bp, Arabidopsis thaliana
  unsure (1)..(591): unsure at all n locations
gcgtcgagagcattttatatcttcaatcatcttacgcaggctgttgtagcagcagtgtctatcggagacgatgaagttcaacgtcgccaatccgaccaccgggtgtcaaaagaaactcgagatcgatgacgatcaaaaactccgcgcctttttcgacaagaggctctctcaggaagttagcggagatgctctaggcgaggaattcaagggatacgtattcaagatcatgggaggatgtgacaagcaaggtttcccaatgaaacaaggagttctcactccagggcgtgtccgtctttttgcttcaccgaggtactcctttgtttttagagggacacgggaaggaaggncttggagaaaaggagaccgaagcttgtcccgtgggtgcatttttgagccctgacctgtcttgttcttaaactgggccaattttgaagaagggtgtaaggaatcttccccggggttnccgacaattaggngcccaagaattannggncccaagngggnattaaagnnccnnaattttttaaccttngnaaaaagggntttttttanggaagttggtaaaatttccggcgttcctttaaaaaaaag

SEQ ID NO: 118365 - DNA, 383 bp, Arabidopsis thaliana
ctcgcctcgaggttgaaggaacagcgtgacaggaggagtgagagtttggcaaagaagaggtcgagactctcttctgctgcatgccaagccctctgtcacagcttaaaaaagcttgagaatcaaatcaaagatgtcacctttctagtcttgttctcttttcttccccggctattaaaaagttagttcgagttcatattcagctgtttttgttccaagacatgggtacacaatcgctttgggcttctttcatgatttatgcttttagttgaagaccattttaaactccatttttaaaaaaaaaaaaaaaaaaacaaagcggccgctctagaggatccaagcttacgtacgcgtgcatgcggttgtcatagctaaagctatagtgt

SEQ ID NO: 118366 - DNA, 1488 bp, Arabidopsis thaliana
  unsure (1)..(1488): unsure at all n locations
atgaatncccagtggaagaaagggaagctaataggtcgtggtacttttggaagtgtttacgttgcaagcaacagcgaaactggagcattgtgtgcgatgaaagaagttgagctatttcctgatgaccccaaatccgcagagtgtataaagcaattagagcaggagatcaaacttctaagtaaccttcaacatccaaacattgtgcagtattttggtagtgagacagtagaagatcgtttctttatatacctggaatatgttcacccgggttcaataaacaaatatatccgtgatcattgcggcaccatgacagaatctgttgttcgcaattttactcgtcacattttgtctgggctggcttatttgcacaataaaaagactgtacatagggatatcaaaggtgctaatctccttgttgatgcttctggggttgtcaagcttgctgatttcggcatggctaaacaccttactggacaaagagctgatctctcgttaaagggaagcccgtactggatggcaccagagctcatgcaagctgtgatgcaaaaagatagcaacccagatctggcttttgctgttgatatatggagtttaggatgtacaatcattgagatgttcactgggaagcctccttggagtgagtttgaaggggctgcagctatgttcaaggtcatgagagatagcccaccgatacctgaatcaatgtcacctgagggtaaagacttcctgagattatgcttccagagaaacccagctgagcgaccaaccgcatctatgttgctagaacaccggttcctaaagaactctttgcaaccaacctcaccaagcaacagtgatgtctctcaattatttaatgggatgaacataacggaaccaagcagtagaagggagaagccaaatttcaaactagaccaggtcccgcgagctagaaacatgacatcctcagagagtgaaagtgggcaacagcagcagcaacaacagtaccggtctcccgatctaacaggaaccgtgaaccgtctgtctcctcgttccactctggaggctatcccaagcccgtgtccttcccaacgacctaagcccagcagcagtgacaggagaagaacgggcgtcacttcagatcacctttgatttgcagctcgagaggttaaccaatagaagctacttctatacgtattcttgtacacgtaagtgtatgtcaatgtacgtatttagagtttggggtcgcgtgggggaatacaattgggatgaaatgaaaatcctatgggtggtagatgaagaatattgtgtctgtaaaattataattcaatgttgaatcgatagaagaagcttttttctttcttcctctttgtttttttttttttgcttgagagagttgtgtataaattattttaacgacgtcttgtgtacctttggtttcgggtctgtatccacttttagatttagatccatttaaaacaaaattaatctctgaaaaaaaaaaaaaaaaaa

SEQ ID NO: 118367 - DNA, 1742 bp, Arabidopsis thaliana
cgcatctgattcgtaccaatgtgatcatcctccttattttaatctcccacctgatttgagctgtttctttctctttcgaactctccgtcacttccatttcatttctatttgaatcttctcaaagctacacagatctctgaaatcgaaaaagcttgagctgtgttaatggcggaggagaaatgggtggtgatggtgacggcgcagactccaacgaatatcgccgtgattaagtattggggaaagagagatgaggttcggattcttcccattaatgatagcattagcgtcacgcttgatcctgatcacctctgtactctcaccaccgtcgctgttagtccttcctttgatcgagatcgaatgtggctcaatggcaaggaaatctcgctttctggaagtaggtaccagaattgcttgagggaaattcgaagtcgtgctgatgatgtagaagataaagaaaagggtatcaagattgcgaagaaagattgggagaagctgcatctgcacattgcttctcataacaacttccctactgctgctggcttagcatcttctgctgctggttttgcttgcttagtttttgctcttgccaagttgatgaatgtaaatgaagatccaagccaactttctgctatagcaaggcaaggttcaggaagtgcttgccgtagtttatttgggggatttgtcaagtggaatatgggaaacaaagaagatggaagtgacagtgttgcagttcaactggtagatgataagcactgggatgatcttgttatcattattgctgtggttagttcacgacagaaggaaacaagcagcacctcgggaatgcgtgagagtgttgagacaagtttgcttttacagcatagagcaaaggaagttgtcccagtacggattttgcaaatggaagaagctataaagaatcgagatttcacatcttttacaaaattgacgtgttcagacagtaatcagtttcatgctgtttgtatggatacatctccacccatattctacatgaatgacacctcccacaggataatcagcttagttgaaaagtggaaccgttctgccggtacaccagagattgcttatacatttgatgctggcccaaatgcagtcatgattgcaagaaacaggaaagtagcagttgaattgctgcaggggctgctctactgcttccctcctaagcctgacacagacatgaagagttacgtactgggggatacatcgatagtaaaagaggcaggcttggaaggagagcttccacaaggaattaaagacaaaattggaagtcaggatcaaaaaggtgaagtgagttattttatatgcagcagacctggaagaggtcctgtggtgcttcaagaccaaactcaagctcttctccatcctcaaactggcctccccaaataaccatttctatgtcttgttgttacttcaactctgagatttgcaacagcttcatcttttgctttgccagctccaactcttgtcctaagagagcactcttctgaatcttttcccaattatttgtgtttacgtacaattcttctgcatcgggtgcaaaaaacaaaacaatcaatattgcaaacgaataagatcatcccagtgcttatcatctaccagttgaactgcaacactgtcacttccatcttctttgtttcccatattccacttgacaaatcccccaaataaactacggcaagcacttcctgaaccttgccttgctatagcagaaagttggcttgatc

SEQ ID NO: 118368 - DNA, 799 bp, Arabidopsis thaliana
  unsure (1)..(799): unsure at all n locations
aaaaagaattcaaattttttccctttttttaaaaaaataaagggtgttcaaaccagtaaaccaagtttcaatgcgggttggtatggaatacatctcccacccatattctacagaaatgccactccccccaggataacaagcttagttgaaaattggacccgttctgccggtccaccaaaaatggttaatacatttaatgctggcccaaatgcattcatgtttgcaaaaaacagaaaagtagcagttaatttgctgcaggggctgttctactgcttccctcctaagcctgacacagacatgaagagttacgtactgggggatacatcgatagtaaaagaggcagccttggaaggagagcttccccaagggattaaagccaaaattggaagtcaggatcaaaaaggtgaagtgagttattttatatccagcagacctggaagaggtcctgtggtgcttcaagaccaaactcaagctcttctccatcctcaaactggcctccccaaataaccatttctatgtcttgttgttacttcaactctgagatttgcaacagcttcatcttttgctttgccagctccaactcttgtcctaagagagcactcttctgaatcttttcccaattatttgtgtttacgtacaattcttctgcatcgggtgcaaaaaacaaaacaatcaatattgcaaacgaataagatctggatgctaaaaaaaaaaaaaaaaaaaagaaaaaaaaaagggcggccgctctagaggatccaagcttacggacgcgtgcatgcgaagtcatagctcnnnnnnn

SEQ ID NO: 118369 - DNA, 553 bp, Arabidopsis thaliana
  unsure (1)..(553): unsure at all n locations
accttgggccatgggggggggggnnnttagtatcgccgnnnnnnnnnnnnnnnnnnnnnnnnnnnnnnnnnnnnnnnnnnnnnnnnnnnnnnnnnnnnnnnnnnnnccacgcgtccgcggacgcgtgggcggacgcgtgggcggacgcgtgggcggacgcgtggggagaaatgggtgttcatggtgacggcgcaaactccgacgaacattgcggtgattaagtattggggaaagagagatgaggttcggattctccccgttaacgatagcattagcgtaactcttgatcctgatcatctctgcacagtcaccactgttgccgttagtcctgcttttgatcgggatcgaatgtggctcaatggcaaggaaatatctctttctggaagtaggtaccaaaattgtttgagggaaatacgaggtcgtgctggtgatgttgaagacatggaaaaggggatcaagattaggaagaaagattgggagaaattgaatctacatattgcttctcataataacttccctactgctgctggcttagcatcttcagctggtggat

SEQ ID NO: 118370 - DNA, 1734 bp, Arabidopsis thaliana
acaggaagaggtttcttctccatttattgcatttgtctctccaaaatgtctaattaatggttttgatcttccaaccagatcttcttctctatctcttcgacaaacccttttttctgggttcttcggagaggtgatttatcaccaaaaaaaaagattttaaaagtctaaatccttttttctttctttccttcaacatgcctttaccttggaagaaatctaaatctagtcggatctctagattcgtatcagactttcaacaatctcctaaacatggtggatctctcgttgttgaaactggtttcccaacttctttaatcgatctctttgttaagaatcgcgatcgtctcaaaaaacaatcttcaaaacgtaacaacaagaacaacaaagcccagactgaaacgcgtgttttgtctccacctcctcctcatatgtctttgcagcgtcgtatgtctcttccttccaagcttgatccagctttggttacagaggattctcctttggtgagaaagatcgaggaaacttctgttccggagattatccatgaagacgacggtggtcatcgcggtggaggaggaggagggtgtgttttgatagtggtggtgtttaaggtttttatggtggctgtgcttgccttgagcacgaagaagctcgccgtggggatcacgctctctgcttttgcccttctcttcctcgagcttgcggtggcgcgtgtcttcacgtacttgaatctctgtcccgacgcgcagattcggatagattctttgatcgataagctcatagggaagcgacataaagagaagctagaagaagaagaagaagaagaatcaacatcgacgcatgacagaagaaacaatgtctactttgaaatcatcgaagaacctagagaggagattagagtcactcctcaatcggattcgtcgtcattggagaaggcgaaacttgtggtggatgagaagaaagaaatgcagacgataagagatgttatgtttaagactgagaaaagcaaaagcgcgaagctgaaatcaaagattgtgaagaagattgtgccaaagaagctaaggagttataagaagaagaagaagatgaagaacaaagaaaaagaagaagaagaagttgaacttgaaactgaagaagaagggtctatgacagaagtttctagcttgtattcagatgagagaatcgggagtgaaatctctgagagggatgatttaagttcgaatccgccatttttagagagttgtacagaggttgaagaagaagaagagactggaccaaaagaggatctaacgaaagtgattggtttgatagtgattgttcttgttggattgctgtgtgggaaagtctttgctattggtctgacactctcttggtgtctgattctcagagttttctgttgcaaatctcaaaccagtttctgaaacagaggaaaacatgattcagactttgggttcttttttttttgtggaagtccgtggcagtggtgggccttagggatcgccgttagttgttgacggtgacggtgttgacggtagagagacggtgacgggagtgttgttgttgggggtggttggcagttcgaagctagacaattggtttgcttatgaaactgtgtaaatttgttttgttgttaacagagatatatatcgtgttattatgatggtcaaagagtcaaagttgttgttatgaagaaccaaaaaaaactgagtaatatattcttaaaaaaaaaaaaaaaaa

SEQ ID NO: 118371 - DNA, 2124 bp, Arabidopsis thaliana
  unsure (1)..(2124): unsure at all n locations
gagtggtggcactgtaataacgacggagaagaacgaacgaacgcgagagatcgagagagagagaaatatttaatggatcggattctgaaagcagctcgaacatctggttcgctgaatctttccaatcgttctctcaaggatgtacctactgaggtatatcaatgtttggaaacgaccggagaaggagaaaactggtgggaggctgttgatttgcagaagttgattttggctcataatgacattgaggttttaagagaagatctgaagaaccttgcctgtttggttgtgctaaatgtcagtcacaataaactctctcaacttccagcagctattggggagcttactgcgatgaagtctttggatgtgtcctttaactcaatatcagaacttcctgagcaaattggttcagcaatttctcttgtcaagcttgactgttcaagcaatcggcttaaagaattgccagattctattgggagatgtttagacttatccgatttaaaggccacaaataatcaaatttccagtttgccagaagacatggtgaactgttcgaaattatctaaactggatgtggagggaaacaagctcacagctctctctgagaaccacatagcatcatggaccatgcttgcagaacctaatgcatgtaaggatatgctgggtgttctgccacaaaacatcggaagtctttcgcgtcttatccggcctgaccctcatcagaacaaaatttcgtctgttccaccatcaataggcggttgctcctctcttgtggagttctatttgggaataaactcactatcaacattaccagcagagattggagatctatcacgtctaggaacattggatcttcgttctaatcagctcaaggaatatccagttggggcatgtaaattgaagctctcgtacctagatctttcaaataattccttgacaggattgcatcctgagctcggaaacatgactactctgagaaagcttgtgcttgttggcaatcctttgagaacccttagaagctcattagtaaatggtcctacagctgctctattgaagtatcttaggagccgcctttctaatagtgaagaaacaagtgcaagcactccaacaaaggaaaatgtgattgcttcagcagctcgtatgtccatttcttcaaaggaactttctctggaaggtctcaacttgagtgatgttccttcagaagtttgggaatctggtgagatcacgaaagttaatctttctaagaactctatcgaggaattgcctgctcaactttctacatctgtttcccttcagacattaattttgtcaaggaacaaaattaaagattggccaggtgcaatcttgaaatcacttcccaatcttatgtgcttgaagctggataataatcccctgaatcagattccactggatgggttccaagtagtctctgggcttcagattctagacctaagtgttaatgcagtttccttcagagagcatcctaagttttgccacttgccacaactgcgagagctttatttgagtcgaatccagctatctgaagtccctgaagatatcctcaacttatctaacctgattattcttgacttgaaccagaattcacttcaatcgattcccaagggtatcaagaacatgacttcactcaaacatctagacatatccaacaacaacatttcaagtcttcctccagaactgggtttgcttgagcctacacttgaggttctacgacttgacgggaacccattaagaagtatcaggaggccaattctagaaagaggaacaaaagctgtgttgaactacctgaaagacagacttccagatcagtagcttctacaacattaacatcaacacctatgttgttgtttgtaagatttgtgtgaacaccagattgattttattgatgagaaatgcgtgtgtcccttgtctaagatattttcacttttgttggtgtgtaatccagtacgtctggttctgtgatatgtactacaagtctataaactccaatggcctcaacaggagaatttttttgtaacaaaaaaaaaaaaaaaaagnnnnnnnnnnnnnnnnnnnnnnnnnnnnnnnnnnnnnnnnnnnnnnnnnnnnnnnnnnnnnnnnnnnnnnnnn

SEQ ID NO: 118372 - DNA, 2633 bp, Arabidopsis thaliana
  unsure (1)..(2633): unsure at all n locations
ctctctttctccaatttcttcattttatcagcttcctctcttctttagtttctgggtcactttagtttcgctctttccgaggaaaaacaaaacaaagatttgatttttctttttggtgggtttaaacagtgatttcttcttttgcccttttattggttcttattgttctcctcaaaagtctacaggattgtcggaagcaaacacacttgtccatgttcgggttatgaatttccctctaattggtgaagaagacacatgaagcagtgaaatctctgtttgtattgaatcttattagtctcaaactatgaatttccgacaagagaagtttgtaaggtttcaagattggaagtcggataagacttcctccgacgtggaatattccggtaaaaacgagattcaaactggaatattccagagaacaataagctcaatctccgacaagttttacagaagctttgaatcaagctctgcaaggatcaaactattcaaaagatcttacaagtcttactcttttaaagaagctgtttcaaaagggattggttctactcacaaaattcttgacccacaaggaccttttcttcagagatggaacaagatctttgttttagcttgtatcatcgctgtctcgcttgaccctttgttcttctacgtgcctatcatcgatgatgctaagaaatgtcttggtattgacaagaaaatggaaataacagcaagcgttttgcgctctttcactgatgttttttatgtccttcacatcattttccagttccgtactggctttatcgctccttcgtctcgtgtttttgggagaggtgttcttgttgaggacaagcgagagatcgctaaacgttacttgtcctcacatttcataattgacattcttgctgttcttccgcttccgcagatggtgattttgataatcattccacatatgagaggttcatcgtctttgaacacgaagaatatgttgaagtttattgttttcttccaatatataccgaggtttataagaatatatccgctctacaaggaagttacaagaacttcaggcatactcactgagacagcttgggctggagctgctttcaatctcttcctctacatgcttgctagtcatgtgtttggtgctttctggtatttgttctcaatcgaacgcgaaacggtgtgctggaaacaagcttgtgagaggaataaccctccgtgcatttcgaagttgttgtactgtgaccctgaaactgcaggaggcaatgctttcctcaatgagtcttgtccgattcagacaccaaacacaacactcttcgactttgggatattccttgacgcacttcaatccggtgtagtggaatctcaagatttccctcaaaagtttttttactgtttctggtggggtctgcagaacctcagttcgctcggtcagaaccttaaaacaagtacatatatttgggaaatctgtttcgcggtgttcatttctattgcggggctggttttgttctccttcttgattggaaatatgcagacgtatctgcaatccactaccacgagattggaggagatgagggtaaagagaagagacgcagaacaatggatgtcacaccgtttgctacctgagaacttgagaaaaagaatccggcgatacgagcagtacaaatggcaagagacaagaggtgttgacgaagagaatcttcttagtaatcttcccaaagatcttagacgcgacatcaaacgtcatctctgtctcgcccttctcatgcgggtccccatgtttgagaaaatggacgaacagcttcttgatgcgctctgtgaccgtttgcaacctgtgttatacacagaggaaagctacatagtaagagaaggagatccggtagacgaaatgctcttcataatgcgcgggaagcttctaacaatcacaacaaacggtggaagaaccggttttttaaattccgagtatcttggagccggtgatttctgtggtgaggagcttttaacctgggctttagacccacactcatcctcaaacctcccaatctcaacaagaactgttcgagctctcatggaagttgaagctttcgcacttaaagctgatgacctcaaattcgtggcttcccagttcagacgtcttcacagcaaacagctaagacatactttcaggtactactcacaacaatggaagacttgggccgcttgcttcatacaagccgcttggagaagatacattaagaagaaactcgaagagtctcttaaagaagaagagaatcggttgcaggatgctttggctaaagaagcttgtggaagttccccaagcctcggtgctacaatatacgcatcacggtttgctgcaaatatcttgcgcacaatacgtaggagcggatcagtaaggaaaccaaggatgccggaacgaatgccacctatgctacttcagaaaccagcagagccagatttcaacagtgatgattaattaattagcatatatgtatatgaaagattttattgcgaaccatagagccaatatataaatataagtctttttataaaaaaaaaaaaaaaaaagggcggccgctctagaggatccaagcttacgtacgcgtgcaggcgacgtcaagactnttnctatagtgtgtccctaaatagaattc

SEQ ID NO: 118373 - DNA, 2399 bp, Arabidopsis thaliana
ctccctgcaaattttcttctctccctctcccatggtggttcctctatttcaatcatgccctctcaccccaacttcatcttcaggtggattggactgttttccgataagttccgtcgacaaacgactgggatcgatgaaaacagtaacctccaaatcaacggtggagattcgagcagcagcggcagcgatgagacgccggtgctaagctccgtcgagtgttacgcttgcacacaagtaggcgtcccagctttccattcaactagctgcgatcaagctcacgcgccggagtggcgtgcctccgccggctcttctctagttccgatccaggaaggatctgtccctaacccagcccgaaccagattccgacgtctcaaaggtccgtttggtgaagttctcgatcctaggagcaagcgcgtgcagagatggaaccgcgcgttgcttttagctcgtgggatggctttagcggtggatccgctcttcttctacgcgctttccatcggccgaactaccggaccggcgtgtctttacatggatggtgcgttcgccgcggtggtcacggtgctccgcacgtgtctcgatgctgttcatctttggcacgtgtggcttcaattcagactggcctacgtctcgagagagtcgcttgtcgttggttgtgggaagctcgtttgggatccacgcgccatcgcgtctcactacgcacgctctctcactggcttctggtttgatgttatcgtcatcctccctgtccctcaggcagtgttttggttagttgtgccgaaactgataagagaagagaaggttaagctgataatgacgattctgctgctaatattcttgttccagttcctccccaagatttatcactgcatctgtttgatgagaaggatgcagaaggtcactggttacatttttggaactatttggtggggttttgctcttaatctcatcgcatatttcatcgcttctcatgttgctgggggatgttggtatgttctcgcaatacagcgtgttgcttcttgcataagacaacaatgtatgagaaccgggaactgcaatctgagtctggcttgcaaagaagaggtctgttaccaatttgtgtcaccgacaagcacagttggatatccatgcttatctggaaaccttaccagtgtggtcaataagcctatgtgcttagactctaacggaccattccgatatggtatctaccgttgggcacttccagtcatctccagcaactctcttgcggttaagatcctttaccccatcttctggggcctaatgactctcagcacatttgcgaatgatcttgagcccacaagcaactggctcgaggttattttcagtatagttatggttctaagtggcttgttacttttcacgctgttgataggaaacattcaggtgtttttgcatgcggtaatggcgaaaaaaaggaaaatgcagatacggtgtagggatatggaatggtggatgaaacgtaggcagttaccttcccggttaagacagagggttaggcgatttgagcggcagagatggaatgccttgggtggtgaagacgagctagaacttatacatgatttgcctccgggtcttcgaagagatatcaaacgatatctttgctttgatctcattaacaaggtgccattgttcaggggcatggacgacttgatcctcgacaacatttgcgatcgggctaagcctcgagtcttctctaaagacgaaaagatcatccgtgaaggagatcctgtacagagaatgatattcatcatgcgtggacgagtcaaacgtatacagagcctaagcaaaggcgtcctagccactagtacactagaaccaggcggttacttgggcgacgagctactctcatggtgcctacgtcgcccgtttctggaccgtcttcccccttcctcagcaacatttgtctgcctagaaaacatcgaggcattctccctcggatccgaagatcttaggtacattaccgatcatttccgttataaattcgcgaacgagcggcttaagcggaccgcaagatactattcctcaaactggaggacgtgggcagcggtaaatattcagatggcgtggcgccggcgtaggaaaagaacccgtggtgaaaacatcggcggttcgatgagtcctgtgtcggagaatagcattgaaggtaacagtgaacgccggttacttcagtatgcagctatgttcatgtccattcgaccgcatgatcatctcgaataataataaaaagttccaattttatatcggtccaaataattgtgtgttcattgttcctcctcaattgtttacctttacttctttaaaaaatctttcttggaatgatacttcaacctcttacggttaagttcaaagtagattttttgagcaacaaaatcttggaggag

SEQ ID NO: 118374 - DNA, 2280 bp, Arabidopsis thaliana
  unsure (1)..(2280): unsure at all n locations
tcggaattnccggggcggaccacaggcgtccggccgcaattcacaattcctctttcacaatctttctttcgattttttagcttaatcctgagtagcgttaacaatggctggtaaaggagaaggtccagcgattggtatcgatctcggtaccacttactcttgcgttggagtttggcaacacgaccgtgttgagatcattgctaatgatcaaggtaacagaaccacaccgtcttacgtcgccttcactgatagcgaacggttgattggtgacgccgcaaagaatcaggtcgccatgaacccgattaacactgttttcgatgcgaagaggttgattggtcgaagatttactgatagctctgttcaaagtgacatcaaattgtggcccttcacgctcaaatctggacctgctgaaaaaccaatgatcgtcgttaactacaagggagaagataaagagttttctgctgaagaaatctcttctatgattctcatcaagatgcgtgagattgctgaagcttaccttggtacaacgatcaagaacgctgttgttactgttccagcttacttcaatgactctcagcgtcaggctactaaggatgctggtgttattgctggtttgaatgttatgcgtatcatcaacgagcctactgcagctgctattgcttacggtcttgacaagaaggctacaagtgttggtgagaagaacgttttgatctttgaccttggtggtggtacattcgatgtctctcttttgaccattgaggaaggtatatttgaagtgaaggcgactgcaggagacactcatcttggtggtgaggatttcgacaacagaatggtgaatcactttgttcaagagttcaagaggaagaacaagaaggacattagtggaaacccgagagctctaaggaggttgagaaccgcctgtgagagagcgaagaggactttgtcatctacggctcagaccaccatcgaaatcgactctctgttcgatggtattgacttctacgctcctatcacccgtgccagattcgaggagcttaacatagatctcttcagaaagtgtatggagcctgttgagaagtgtcttcgtgatgctaagatggacaagaactcaatcgatgatgttgtccttgttggtggctcaacccgtatccccaaggtccagcaattgctcgttgacttcttcaacggcaaggagctttgcaaatctatcaaccccgatgaggctgttgcatatggtgctgctgtccaggcagctattctcagtggtgagggtaatgagaaggttcaagatctcctcttgcttgatgtcacaccactatctcttggtcttgaaaccgctggaggagtcatgactgtcttgatccagaggaatacaaccatccccacaaagaaggagcaagtcttctcaacttattcagacaaccaacccggtgttttgatccaagtctatgaaggcgagagagcaagaaccaaggacaacaacctgttgggtaaattcgagctttctggtatccctccagcaccaagaggtgttcctcaaatcactgtctgttttgacattgatgcaaacggtatcctcaacgtctcggctgaggacaagacaacggggcagaagaacaagatcacaatcaccaacgacaagggaagattgtcaaaggacgagattgagaaaatggttcaagaggcagagaagtacaagtcggaggatgaggagcacaagaagaaggtggacgccaagaatgctcttgagaattacgcatacaacatgaggaacacaatccgtgatgagaagattggcgagaagcttgctggagatgacaagaagaagattgaagactcaattgaagcagccattgaatggctagaagcgaatcagctagcagagtgtgatgaatttgaggacaagatgaaagagctcgagagtatttgcaacccgatcatagcaaagatgtaccaaggcggtgaagctggtggtccagctgcaggaggaatggacgaggatgttcctccttctgccggaggtgcaggtcccaagattgaggaagtcgactaataactttctctcttactctcttactctcagtctttatgtgtttgtatttcaacattttcctgttttgtcccctagttttttttttctttttctttcttgtattgactctattttgagggctcgcttgtttcgatgagctccttattttttttaatctataacaggaatgttttgattaaaaaaaaatacccactaaagcaattaatnnnnnnnnnnnnnnnnnnnnn

SEQ ID NO: 118375 - DNA, 638 bp, Arabidopsis thaliana
  unsure (1)..(638): unsure at all n locations
caaaaatgcagggagctctgtttatcaaaccaactattcttcttcctcttccttcttcagtttcttctccaaaactcacttttcttcttcctcacgcaaccaaagcttcaagactctcatctctcagatcaaacaactcatcatcatcatcatccttaacgtctgaccctaacaccgtcgacccacgcgtccgcagccattgaatggctagaagcgaatcagctagcagagtgtgatgaatttgaggacaagatgaaagagctcgagagtatttgcaacccgatcatagcaaagatgtaccaaggcggtgaagctggtggtccagctgcaggaggaatggacgaggatgttcctccttctgccggaggtgcaggtcccaggattgaggaagtcgactaataactttcccccctaacccccctaaccccagcctttaagggggttggaattcaacattttcccggtttgccccccaagtttttttttccttttcccccctggaatggccccaattttgaggggccccttgtttcgntgaggcccctaattttttcaaccanaanaggatgntttgggttaaaaaaagggnnaaaaaaaaaaaaaaaaangggggnccccnnaaggggnccaactttgga

SEQ ID NO: 118376 - DNA, 580 bp, Arabidopsis thaliana
  unsure (1)..(580): unsure at all n locations
ttccccctggcccnggttcntngcccngccntttttgggattggccggtacatttcccccgggaccgtttgccntgttccccnagctttanccgccccattagggaacctggtccccctgcaggtaccggtccggaatccccgggtcgaccccaggcgtccgcagccattgaatggctataaccgaatccgcttgccagagtgtgatgaatttggggacaaggttgaaagagctcgagagtatttgcaacccgatcattagccaaagatgtacccaaggcggtgaagctggtggtcccagctgctggaggaatgggcgggggtgttcctccttctgccggaggtgcaggtcccaagattggggaagtcgactaataactttctctcttactctcttactctcagtctttatgtgggtgcatttcaacattttcctggtttgtcccctagttgtttttttctttttctttcttgtatggactctattgtgagggctcgcttgtttcgatgagctccttattttttttaatctataacaggaatgttttggttaaaaaaaaaattttaaaagggagaaggtc

SEQ ID NO: 118377 - DNA, 1089 bp, Arabidopsis thaliana
  unsure (1)..(1089): unsure at all n locations
cgactaatttaggcgacctatagaagagctatgacgtcgcatgcacgcgtacgtaagctcggaattcggctcgacaacaaacacaaaaatcaaaaggggtcatttactatcttttaagagacgacatatatagttctcgaccaagaaaagaaaagggggtgacctgagttcttcaacacataacataatggccggagttttcaaaacggttacgtttcttgttttggttttcgctgccgttgttgtcttcgcggaggactacgatgttggtgatgatacggaatggacgagacctatggaccccgagttctatactacttgggctaccggtaaaactttccgtgtaggcgacgagctcgaatttgatttcgctgctgggaggcatgatgtggcagttgtatcagaagctgcatttgaaaactgtgagaaagagaaacccattagccacatgaccgttcctccggtcaaaattatgctaaacaccactggaccacaatactttatctgcaccgtcggtgaccattgtcgttttggtcaaaaactttccatcactgtagttgctgctggtgcaactggaggtgctactcctggtgccggtgctaccccagcacctggatcaaccccaagtactggaggaaccactcctcccactgcgggtgggaccacaacaccttcaggctctagcggaaccactactccagctggaaatgccgcttcctcattaggtggtgctacttttctggtcgcttttgtttctgctgttgttgctctcttttgagtcacactcgaaacctagttatgtatttgttttaccttactctccttatttaaatagtcatgtatttgattatttgtgagaataaggacttgttttcaagtcattataaacgtcttatacttgtgattagtattgagtttcaatatatgattattcggttgcaaaataaaaaaaaaaaaacaagcccaaaaaaaaaaaaaaaaaaaaaaaggnnnnnnnnnnnnnnnnnnnnnnnnnnnnnnnnnnnnnnnnnnnnnnnnnnnnnnnnnnnnnnnnnnnnnnnnnnnnnnnnnnnnnnnnnnnnntagctg

SEQ ID NO: 118378 - DNA, 1450 bp, Arabidopsis thaliana
tctctctttcgctgtccgattccgacagatagacagagggcgcgaaacagagagaaaataagaagaagaaggacgatccagatatggaggatccttctaactcacaaccaaaccagagcaatctctcgcaatgcccgcctttagccacagctccgacacctgcgccagttcgtggtccgtaccaccggagagcacattcggaggtccaattccgtctccctgaagatctggatctctctgaaccattcggaggattcgatgagcttggatccgaagatgatctcttttgctcatacatggacattgagaaacttggatccggatccggatccgcatccgattcggctggtccttctgctcctaggtctgataacccgttttccgctgagaatggaggtgcggaggctgggaattcgagacctcgacacaggcatagcctctccgttgatggctcttcgactttggagtcaattgaggctaagaaagctatggctcctgataagctcgctgagctttgggtcgtcgaccctaaaagagctaaaaggataattgctaatcgacagtctgctgctcgttcgaaagagaggaaggctcggtatatcttggagctcgagaggaaagttcagaccttgcaaactgaagctactaccctttcagcacagttgtctttgttccagagagacacaactggtttgtcatctgagaatacagagctcaagcttcgtttacaggtcatggaacaacaagctaagttgcgagatgcactgaacgagcaactgaaaaaggaagttgagaggctgaaattcgccacgggagaagtctcacccgcggatgcttataacctcggaatggcacacatgcaatatcagcaacaaccacaacaatccttctttcaacatcatcatcagcaacaaaccgatgctcaaaacctgcaacaaatgactcatcagtttcatctcttccagcctaacaacaaccagaaccaatcttctcgcacaaaccctcccaccgctcatcagcttatgcatcacgctacttctaatgccccggctcaatctcattcctattcagaggcaatgcatgaagaccatcttggccggttacaggggcttgacattagcagctgtggcagaggctcaaactttggtaggtctgacaccgtcagtgaaagcagcagcactatgtgaggctgcctttcccagattcccctttgtcgataaacctattctttcgccctcccttgaaatctttagctaaaaagtaacatcttcgtgacagtcggattcattttttattctgtaaaactggttttttggggggggttggggtttcaactttagagaccacagttgttttaacttgtctgatttctcatttcctgattcatcttgttctcctggggagctactgaattataaacagatcatatttctgtttctttatgttgtca

SEQ ID NO: 118379 - DNA, 1131 bp, Arabidopsis thaliana
ttacccaaaagaacccataatgtttagagtgaccggaactctctcggcggcatcatctccagcggtggcggcggcgtctttctccgccgctctaagactttccataactcccactctcgctatcgcctctcctccccatctccgttggttctcgaagttttctcgtcaatttctcggcggacgcatctcttcactccgaccacgcattccttctccgtgcccgattcgactctctggtttcccggctctcaaaatgagagcttcgtttagcagtgggagtagtggaagtagtgcaagtagagagattctggtgcagcatttgcttgttaagaataatgatgttgagctctttgccgaactccaaaagaaattcttggatggagaggagatgagtgatcttgcggctgagtattcgatttgtccttccaaaaaggacggtggtatacttggatgggtaaaactgggtcaaatggtaccagagtttgaggaagctgcgtttaaagcagagctgaatcaggtggtgaggtgtagaacccaatttggcttgcacttattgcaagttctatctgagagagaaccggtgaaagatatccaggtagaggagctgcattccaaaatgcaagatccagttttcatggatgaggctcagttaattgatgtcagagaacccaatgagatagagatagcatccttgccaggattcaaagtgttcccactccgccaatttggaacatgggcaccagacatcacttcaaagctgaaccctgagaaggatacatttgtcttgtgcaaggttggtggcaggtcaatgcaggttgccaactggttacagtctcagggcttcaagagtgtgtacaacattactggtgggatacaagcttattctctcaaggttgacccatcaattcctacttactgaaattgagcatcttagtctctttttcttgtatcctcctaattccaaattagatttgcaaattcgtattcaataaactatataatataaggttcatttttgagaatatagataccaaatttagaataaaaaaaaaaaaaaagggcgaccgctctagaggatccaagcttacgtacgcgtgcaggcgacgtcataatcttctatagtggtaccta

SEQ ID NO: 118380 - DNA, 521 bp, Arabidopsis thaliana
tttacttgtaatgccaaatgacgatttatgataatgttatcatattccacaatgcaaaaattcaaggaatcagaaccagatagctttaggtgaaatatgaatcatcccaatgattttatatttattcaacaaagaaagagagacgttggaatgcaaaacaacatggaaatttccaattcttgcttttggtctgaagagaattcaaaaagaagaaagctcattcctctactggcctttgacccaacacagagatgtcttcatatcgtttcccaacattgttgcgttcccagagcttatgaacaccgtaatccacagcccgttcaccgaaaaatgcgccggcgatgatgaaagtgacgtagacggaattacggcgcatgataagtttgtaaaagccttcgaaagcgcctttctgatttctccgagcagcgtactccatgattgattggttgttttcaggtatctgatctctctacgtattttagggttagagaaagcgatctacgacaatggcgagagcgaag

SEQ ID NO: 118381 - DNA, 2144 bp, Arabidopsis thaliana
cccacgcgtccgcggacgcgtgggttcttcgacatgacctttggtccttcttctcttttctctctctcttaaacccaatttgagattgttcgatttcgatctacgagattcttacaagaacataagcagcttcggttttttgggattatcttatttggtcggatgatgatcttctcgatgtctgtgctaggctttgggaattagatatatttggggttaagctcgagtctctccggttttgagtttacttgagtttgttagtatttatggctgaggtgggaaaagttctggctagtgatatggagttagaccattcaaatgagactaaagcagtggatgatgttgttgccactactgataaagcggaggtcataccagtggctgtaactagaactgaaaccgttgttgaaagtttggaatctactgactgtaaggagcttgaaaaacttgttccacatacggtagcttcgcagtcggaagtagatgttgcttccccggtatccgagaaagcaccgaaggtttctgaaagtagcggtgcattatctttgcagtctggttcggaagggaatagtccttttattcgtgagaaggttatggaagacggatacaactggcggaaatatggacagaaacttgtgaaaggaaatgagtttgtaaggagctattacaggtgcactcaccctaactgcaaagcgaaaaaacagttggaacggtctgcgggtggacaagtcgtggataccgtttactttggggaacatgatcacccaaagcctcttgctggtgctgttcctatcaatcaggataagcgaagtgatgtcttcacagctgttagtaaagagaaaacatctggatccagtgttcagacacttcgtcaaaccgaaccaccaaagatccatggaggattacatgtttcagttattccaccagctgatgatgtgaaaactgatatttcacaatcaagtaggataacgggggacaacactcacaaggattataatagtcctaccgcaaagcgaaggaagaaaggagggaacattgagctgagtccagtggagaggtcaaccaatgattcacgcattgtggttcacactcagactctgtttgatattgtgaatgatgggtaccgatggcgtaaatatggtcagaaatcagtaaaaggcagcccatatccaaggagctactatagatgttcaagccctggatgccccgtcaagaaacacgtagagaggtcatctcatgacacaaagttgcttataacaacttacgagggaaaacacgaccacgatatgcctccaggaagagttgttactcataataacatgctggactcggaagttgatgataaagaaggagatgccaacaagactccacagagctcaactcttcaatccattacaaaagaccagcatgtcgaagatcacttaagaaagaaaacgaagactaatggctttgagaaaagtcttgatcaaggtccagttttggatgagaagctgaaggaggaaataaaagagagatcagatgcaaacaaagatcacgcagccaatcacgccaagccggaagcaaagtcagatgataaaaccactgtttgtcaagagaaggcagtaggaaccctggagagcgaggaacaaaaacccaagacagagcctgcccaaagctaagcattcagtgttgtaccgagtggtaatttatatggctgttttaacatagattagtacaggcgatatggttatagactgtacagttgttgttcaggcgggaccagatttagattagtgtttaatggaatagtatgctttaatacctttatgtaaccacttccatttggttcaaataagagttacaggaagagaaggtaacacaacaagagcccttctttgttgatggagcctgtgtaatagttgtagcatggggatgtatatgatttgattcaaccttattaatggttatgagacaaaactatctattacttccagttctgtcttttgcattacattcttggagacgtttattctttcacttccatgcacaagatgagaccaagattcggtccatccaaccaaggtacagagcaccatctctttcttcaatcgcatacccgttgctgtaatctctcaagagggctctaatggtggctgaaatgattg

SEQ ID NO: 118382 - DNA, 2203 bp, Arabidopsis thaliana
  unsure (1)..(2203): unsure at all n locations
nnnnnnnnnnnnnnnnnnnnnnnnnnnnnnnnnnnnnnnnnnnnnnnnnnnnnnnnnnnnnnnnnnnnnnnnnnnnnccacgcgtccgcccacgtcgacccacgcgtccgccctttcttcatttccttcctctgcttcttctccggtggatgtcctctttcatcaatggcggcgaggataaacacttcgcttcataacgccctctcttttttaaagccttttaacactcccctcaataccaaaccattctcttttagaagaaacagcttcagattttccaaaaagcttccttattattctcagttttcctcagggaagagagctctctattgcacttccagttcccaggaaagtaccgtcgatgaaggcgagacatttgtcctcaccactcctctttattacgttaatgcccctccccacatgggtagtgcttacaccactatcgccgccgattcaatttctcgtttccagagattgcttggtaagaaggttatctttatcacaggaacagatgaacatggtgagaagatagctacttcagcagctgctaatggacgtaatcctcctgaacattgtgacctcatttctcaatcttatagaactctttggaaagatctcgatatagcttatgacaaattcattagaactactgatcctaagcatgaagctattgtaaaagagttctacgctcgtgttttcgcaaacggcgatatttacagagctgattatgaaggtctttactgtgttaactgcgaggaatataaggatgagaaagagttgcttgaaaacaattgttgccctgtccatcaaatgccatgtgttgcaaggaaagaagataactacttctttgctttgtcgaaatatcagaaaccacttgaagacattttggcccagaatcctcgttttgtgcagccttcgtatcgtcttaatgaggtgcaaagttggataaagagtggcttaagagatttttccatttctcgagcattagtggattngggaattcctgttcccgacgacgataagcaaaccatatatgtttggtttgatgctctacttggttacatatcagctctaacagaggacaacaaacaacaaaatctagaaactgctgtttcatttggctggcctgcttcattgcatttgatcggaaaggatattctacgatttcacgctgtctactggcctgccatgctaatctctgctggtcttgaacttcccaagatggtgtttggccatgggtttctgacaaaggatggaatgaagatgggaaaatcgttggggaatactctagaaccgtttgagttggttcagaaatttgggccagatgccgtgaggtatttcttcctacgggaggttgaatttggaaacgatggggactattcagaagaccgatttataaaaatcgtcaatgcacatctcgccaacactataggaaatcttcttaaccgtactcttggtcttcttaaaaagaactgtgaatccactttagtggtagactcgacagttgcagccgaaggagttcctttgaaagacacagtggagaagctggttgagaaggctaggacaaactatgaaaatctgtcactatcatcagcgtgtgaagctgttttagagattggaaatgcgggaaatacctacatggatcaacgagcaccatggtttctgttcaaacaaggtggtgtctcagcagaagaggcagccaaggatctggtgattatactggaagtaatgagagtcatagcggttgcgttatcccccgttgcaccttgcctaagtctgagggtctattcacagcttggctattcagaggatcaattcaatagcataacctggagtgacaccaaatggggagggctaaagggaggacaagtaatggagcaagcgagtcccgtatttgcaaggatcgagctgaatccagagaaagaagaagatgagaagaagccaaaggttggtaagaaaactggcaaagccaaggtcaaagtagtagagcaaactcctacagtagctgaagcttaaaaccaactccacaaaatcctgaaaaactgattacagcattcctctgatctcttcaattttatgaaatactgtaaatttatggttgttatgtaaacttgagaagctcttcatagttttgagggattataaaatttatcttcttatggtaaattctttttaacacatcnnnnnnnnnnnnnnnnnnnnn

SEQ ID NO: 118383 - DNA, 2183 bp, Arabidopsis thaliana
cgcagtgaaagctatttggcatatacttgtcttcgcttttcgtagctctttcgcgcataataataactgaggttgttgtttaatcaagaagagtgtgcaaaaattggaaggccagggaatgcagaaacatgtatttgaaagctgaactcaattgctctacaccaccctctcagatcctttgtccctttgggcccttgttctccctcatcccttatgtggacacccattttctaaacccctgcttccacaacttccagccttcctctcacaatgctagaaaaaacgccacttggaagcatgatctttgcgaagacggttgatccgacactaacagcctcctcctgagttcctcctctaccctttatgttgtctgcgttttagtatattctagggtggtctttttatttagtggtattagtagtgctctaagctaaccagttagtcaatggagaagaaaggatctgtgttgatgctccgttatgaggttgggaagtttctcggtcaaggtacctttgctaaggtataccatgctaggcatttgaaaactggtgatagtgtagcgattaaggtcatcgacaaagaaagaatcctcaaagttggcatgaccgagcagattaagcgagagatctctgccatgagactcttgaggcatcccaacatcgttgagctccatgaagtcatggccaccaaatctaaaatctacttcgtcatggaacatgttaagggtggtgagctcttcaacaaagtgtcaactgggaagctgagagaagacgttgcgagaaagtactttcagcagcttgtacgcgctgttgacttctgtcacagccgtggagtatgccacagggacctgaagccggagaatctcttgttggatgagcatgggaatcttaagatctctgattttggtctcagcgctctttctgactctagaaggcaagacgggttgctgcatactacatgcgggacccctacatattgtgcaccggaggtgataagcaggaacgggtatgatgggtttaaagcggatgtgtggtcctgtggagtgatattgttcgtcttgctcgctggatatcttcctttccgtgattccaatctgatggagctgtataagaagataggcaaagctgaagtcaagttccccaactggcttgctccgggggcaaagagattgctcaagaggatcttggatcctaaccccaacacaagggtatcaactgagaaaataatgaagagctcttggttccgtaaaggcctacaagaggaggtgaaagaatcagttgaggaagagacagaagtggacgcagaggcagagggaaacgcaagtgcagagaaggaaaagaagcggtgtatcaacctgaacgcgtttgagatcatatctctgtccacggggtttgatctctcgggactgttcgagaagggagaggagaaggaggagatgaggtttacatcaaacagagaggcatctgagataacagagaagctggtggagattgggaaggaccttaagatgaaagtgaggaagaaggaacacgaatggagggtgaaaatgtcggctgaggctacagtggtggaagcggaagtgtttgagattgcgccgagctatcacatggtggtgctaaagaagagcggtggagatactgctgagtataagagagtcatgaaggagagtataagaccggctttgatcgactttgtattagcttggcactgaaacatattctatcctttttatgtgtcttcttcttttagaatgtttttcttgttttgttttgccaatgtgtttagtttatgtattttctcttgagtctcatcttaagacgtgtttcgtatttttctaggtgtcagtgtaacaataataatatgtgaggaccaattatatagtttgagacaaaataagtagatttctttatcagataaaataaaataaattgagccttaatgaaataagccaatagaccgacaacggttttaggaagcattatactactattttgtagttatttcgtattattgtagtcttttggatgatcctttttgtgtattaacaaagtcaaaacaaatttataatttaccttacggtacagaaaaaaaaaaaaaaaaaaaacaaagggcggccgctctagaggatccaagcttacgtacgcgtgcatgcgacgtcaagatacttctatagtgtcgcctaa

SEQ ID NO: 118384 - DNA, 528 bp, Arabidopsis thaliana
  unsure (1)..(528): unsure at all n locations
atgannnnnnnnnnnnnnnnnnnnnnnnnnnnnnnnnnnnnnnnnnnnnnnnnnnnnnnnnnnnnnnnnnnnnnnnnnnnnnnccacgcgtccgttcgcttttcgtagctctttcgcgcataataataactgaggttgttgtttaatcaagaagagtgtgcaaaaattggaaggccagggaatgcagaaacatgtatttgaaagctgaactcaattgctctacaccaccctctcagatcctttgtccctttgggcccttgttctccctcatcccttatgtggacacccattttctaaacccctgcttccacaccttccagccttcctctcacaatgctagaaaataatgaagagctcttggttccgtaaaggcctacaagaggaggtgaaagaatcagttgaggaagagacagaagtggacgcagaggcagagggaaacgcatgtgcagagaaggaaaagaagcggtgtatcaacctgaacgcgtttgagatcatatctctgtccacggggtttgatctctcgggact

SEQ ID NO: 118385 - DNA, 3126 bp, Arabidopsis thaliana
  unsure (1)..(3126): unsure at all n locations
nnnnnnnnnnnnnnnnnnnnnnnnnnnnnnnnnnnnnnnnnnnnnnnnnnnnnnnnnnnnnnnnnnnnnnnnnncggcgcgtgcggtgaacgattgaatcttttcttcttcgttggttccaaccctaatctagggttactctctctctcgcttccttctgttcttcgttcttaccgagttccacgagcattagcttcagagaccttgaattggagtgcggttggatcaaaaacagttgagcgaagatgaggattatgattaagggaggtgtttggaagaacaccgaagatgagattctcaaagccgccgtgatgaagtatggtaagaaccaatgggctcggatctcgtctcttctcgttcgtaagtctgctaaacagtgtaaagctcgctggtacgagtggctcgatccatctatcaaaaagactgaatggaccagagaagaagatgagaagcttctacatcttgctaaacttctgcctactcaatggagaactattgctcctattgtgggtcgtacaccatctcaatgtcttgagaggtatgagaagctccttgatgcagcatgcactaaggatgaaaattatgatgcagcggatgatccacgaaaattacgtcctggtgagattgatccgaacccagaagcaaagcctgctcgtcctgatccggtagacatggacgaagatgagaaagaaatgctttctgaagcaagagctagattggctaacacgaggggaaagaaggctaaaagaaaagctagagaaaaacaacttgaggaagctagaaggcttgcttctctgcaaaaaagaagagaactaaaagcagctgggattgatggaaggcataggaaaagaaagagaaagggaatcgactataatgcagaaattccttttgaaaagagggcacctgcgggattttatgatactgcggatgaagatcgtcctgctgatcaagtaaaatttccaactaccattgaagaacttgaaggaaaaagaagagctgatgtagaagcacatttacgcaaacaagatgttgcaaggaataaaattgctcagagacaggatgctccagcagctatattgcaagcaaacaagctgaatgatccggaagttgttaggaagaggtcaaagctgatgttaccaccaccgcagatttcagaccacgagctagaagaaattgctaagatgggctatgccagtgaccttcttgccgagaatgaggagctaacagaaggcagtgctgctactcgtgcacttttggcaaattactcacaaacaccaaggcaaggaatgacacccatgaggacacctcaaagaactcctgctggtaaaggtgatgctattatgatggaagcagaaaacctggccagattaagagactctcagacacctttgctaggaggagaaaatcctgagttgcacccttctgacttcactggggtcactccgagaaagaaggagattcaaacgcctaatccaatgttgaccccttcaatgactcctggtggtgctggtcttactccaagaattggcttgacgccatcaagggatgggtcttctttttctatgacacccaaagggactcccttcagggatgaacttcacattaacgaagacatggacatgcagcaaagtgcaaaacttgagaggcagagacgagaggaagctagaaggagtttacgctctggtttgactgggcttcctcagccaaagaacgagtaccaaatagttgcacaacctcctcctgaggaaagtgaagagccagaagagaaaattgaggaagacatgtcagacaggatagcgagggaaaaggcggaggaagaagcaagacaacaggcattgcttaagaagagatccaaggtcttgcagagagatcttcctagacccccagctgcttcattggcagtaattaggaactcgttgctttcagctgatggagacaaaagttctgttgttcctcctactccgattgaggttgcagataaaatggtaagagaggagcttctacagttgctggagcatgataatgcaaagtatccgcttgatgacaaagctgagaagaagaaaggagccaagaaccgtaccaaccgttctgcttctcaagttcttgcaattgacgattttgatgaaaatgagctccaagaggctgacaaaatgataaaggaggaggggaagtttctgtgtgtgtcaatgggacatgagaacaagacacttgatgattttgtagaagctcacaacacatgcgtgaatgatctcatgtatttccccactcgaagcgcttacgagctctcaagtgttgctgggaacgcggacaaagttgcagcttttcaggaggagatggagaatgtgagaaaaaagatggaggaggatgagaagaaggcagaacacatgaaggccaagtacaaaacttatacaaagggtcatgagaggagggcagagaccgtgtggacccaaatagaggcgacattgaagcaggctgagattggtggaacagaagtagagtgctttaaagcattgaagaggcaagaagagatggctgcatcttttaggaaaaagaatttgcaagaggaagtgataaagcaaaaggaaacagagagtaaactgcagactcgctatgggaatatgttggcaatggttgaaaaagcagaggagataatggtcggtttccgagcacaggcattgaagaaacaagaggatgttgaagattctcacaaactgaaagaagctaagctagccactggagaggaagaggacatagccatagccatggaagcttctgcataaaaacttgagttttgtattgcttacaagttttaaggagacgtagcttgactttgtattggtaagtttttttaatatgagtcatgactttgtaaaaaggttatgatatattctctgtttgtatgctttgcaagagtcaagaaatttgaatgcttcaggatctatttggttccaaatgtaagtacaatctgaagatgtttaatcctcctctctttcaatgcaaattttatccttggctagaaaaaagaaaaaaaacacaaaaacccacccccctagaggatccaagcttacgtacgcgtgcgtgcgacgtcataactcttctatagnnnnnnnnnnnnnnnnnnnnnnn

SEQ ID NO: 118386 - DNA, 1373 bp, Arabidopsis thaliana
tcttcttcattagcctttcgtctccttcttctcttctctatctctctttagcttctctacgcaagcttattatctctttctcttaaagctttttctatatacaaacagaagcgtttgatactgtaaaaaagatttagaaatggagactctgagtcgtttattggttttcatgtctctgttttccggtttagtttctggatttgctctgcaaaatcttccaatcacatcttttgaagaaagttacactcaactttttggtgacaagaacttatttgttcatcaagatggcaaatctgtccggttaacgctcgatgaaagaaccggttccggttttgtttcaaatgattattacttgcatggattcttcagtgcttcaattaaattaccttctgattatacagctggagttgttgttgccttttatatgtctaatggagatatgtatgagaagaatcatgatgagatagattttgagtttcttggtaacattagagaaaaagaatggagagttcagacaaacatttacggtaatggaagtactcattcaggaagagaagagagatataatctctggtttgatcctactgaagattttcatcaatacagtatcctctggtctgattctcacatcatattctttgtagacaatgttcctattagagaggtcaaacgtactgcggaaatgggtggtcactttccatcaaagccgatgtctctctacacaacaatatgggacggttctaaatgggcaactaacggtggaaagtacggtgtaaactacaaatatgcgccttacattgcgcggttctcggatctagtcctgcacggctgccccgtggaccctatcgagcagtttccgaggtgcgatgaaggcgcggctgaggatatgcgtgcggcgcaagagattactccttcacaaaggagtaaaatggatgttttcagacggagactcatgacatattcatattgctatgatcgggctaggtacaatgttgctttatcggagtgtgtggtgaatcccgctgaggctcaaaggcttagggtttatgatccggtcagatttggcggcattccgaggcgccaccgcaatggaaagcaccggagcaagagaagccgggttgatggaaccgagtcgatatgataacatatataggcaaaatagtatgggtgagatttggccggaattcaataagtccattattttggttatttatgattcaaggcattttcccaaaaaaaggaggcatttttgtcatttgttagttggaaatccttataagaaaagaaaaaataatttattttaaaaaaaaaaaaaaaaaaaagggccgcccgtttaaaagaatccaggctaaggtaggggggcttgcgcctta

SEQ ID NO: 118387 - DNA, 537 bp, Arabidopsis thaliana
  unsure (1)..(537): unsure at all n locations
aaaatggatgttttcagacggagactcatgacatattcatattgctatgatcgggctaggtacaatgttgctttatcggagtgtgtggtgaatcccgctgaggctcaaaggcttagggtttatgatccggtcagatttggcggcattccgaggcgccaccgcaatggaaagcaccggggcaagagaagccgggttgatggaaccgagtcgatatgataacatatataggcaaaatagtatgggtgagatttgggggttctataataagtccattattttggttatttatgattcaatgcattttcacatatagaggaggcatttttgtcatttgttagttgtatatcattataagaaaagaaaaaataattaatttatttatttgtgatattttttttatatatgataaattgtttcttgttcaaaaaaaaaaaaaaaaaaaaaaaaaaaaaagcgaccgctctagaggatccaagcttacgtacgcgtgcatgcgacgtcataactcttctataggtnnnnnnnnnnnnnnnnncg

SEQ ID NO: 118388 - DNA, 1094 bp, Arabidopsis thaliana
tcagaacattaacgtaacaaaacaaagatgagccaagagcaaccaaggaggccaagagagccagtcaaatacggcgacgtttttgaagtctccggtgaactcgctgataagcccatagcacctgaggatgcaaagatgatgcaatccgcggagacacatgtgttcggccatactcagaaaggcggtccagctgcggtcatgcaatctgcagccaccaccaatatacgcggtggctttgtccatccagatgacaaaactgagcttgtcgctgaacgaggcgccacagtggagcaaacggtccctgctgcaactgttacaaccgaattcgtcggtggacaggtcgttggacaacacgttgaaccgaggcgtgtagtcgctgctgcgcgtacggacgaagaagctttgcaaagtacaataacgattggagaagcactggaagcaactgtgaagacagctggaaacaaacctgtggatcaaagcgacgccgcagcgattcaagcggcagagatgagagcttccggtaccaacgtcattgctctagctggagtcgccgcttcagctcaatctgcagcggatcacaacgctaccgtagatcgtaacgagaggaaaatcaagcttcgtgatgttttgacgggtgcagcagggaagttatcggcagacagagctgtgacgagggaagatgccgagggagtggtgagcgcagagatgaggaataaccctaaattgtgtactcaccctggtggtgtagcggcttctcttaccgtcgctgccaggcttaacgagagatttgatatatgacaagacaaatccggcgagaggatcgatgatcttccttttttttgtttgtttgtttgtttgtccgtctccctttcacaacttaggaaacttgttatgtaaaaccgtctacagcttttggtcctttagccgatatgttagaaaatccggcggggagaggatggtgttcacaagcttgtgacatttaatcgactagcttttttgttcttttttgtatcttactgcttaaaaacttcccaaggatgatgttggaatgaataatggggactttttagatttgaagttaaaatccattcttt

SEQ ID NO: 118389 - DNA, 1817 bp, Arabidopsis thaliana
gaccgaccatcgatgcttgcttgcttatgtcttagctcttaagtcatgccatgaacactcaagaatcatgatccatgcatgaaaagtccacgtgtcataccacgtccgtagaagataaagctaagtaaattgtacgtggcagctgttgcgtccctctatctaccacgtagcgtctcaacagaaacagagcattactataagaagtaacaaaagcagctcaactgatagcacaagttaaagaattctaaaatcgtaaagttctaaagcggtttttcatcaattttcaagcaatcgagaaaaaagcaatggcgtcagacaaacaaaaggcggagagagccgaggttgcggcgaggctagcggctgaggacttgcatgacattaacaaatccggtggtgctgatgtcacaatgtataaggtgacggagagaacaactgaacatccaccggagcaagataggcccggtgtgataggatcagtgttcagggctgtccaaggaacgtatgagcatgcgagagacgctgtagttggaaaaacccacgaagcggctgagtctaccaaagaaggagctcagatagcttcagagaaagcggttggagcaaaggacgcaaccgtcgagaaagctaaggaaaccgctgattatactgcggagaaggtgggtgagtataaagactatacggttgataaagctaaagaggctaaggacacaactgcagagaaggcgaaggagactgctaattatactgcggataaggcggtggaagcaaaggataagacggcggagaagattggtgagtacaaagactatgcggtggataaggcagtagaagctaaagataagacagcggagaaggcgaaggagacttcgaattatacggcggataaggctaaagaggctaaggacaagacggctgagaaggttggtgagtataaggattacacggtggacaaggccgtggaagctagggattacacagcggagaaggctattgaagcaaaggataagacagctgagaagactggagagtataaggactatacggtggagaaggcgacggaggggaaagatgttacggtgagtaagctaggagagctgaaggatagtgccgttgagacagcgaagagagctatgggtttcttgtcggggaagacagaggaggccaaaggaaaagctgtggagaccaaagatactgccaaggaaaacatggagaaagctggagaagtaacaagacaaaagatggaggaaatgagattggaaggtaaagagctcaaagaagaagctggagcaaaagcccaagaggcatctcaaaagactagggagagtactgagtcgggagctcaaaaagccgaagagaccaaagattctcctgccgtgaggggaaatgaagcgaaagggactatttttggtgcattagggaatgtaacggaagcaataaagagcaaactgacaatgccatcagacattgtggaggaaacacgcgcggcacgtgagcatggagggacgggtaggactgtggttgaagtcaaggtcgaggattcaaagccgggtaaggtggcgacttcactgaaggcgtcggatcaaatgaccggtcaaacattcaacgacgttggacggatggatgatgatgctcggaaagataagggaaagctgtgagaatactagaaaaatgacaatgttttttgggccttttgttctggatgaatatctctgttgttttttgggccttttgttttggatacgtctgttatagcagataacgttttctgatagtttctatgtttgtattcttgttttggaataggaaagctttcttcagtt

SEQ ID NO: 118390 - DNA, 1780 bp, Arabidopsis thaliana
cggacgcgtgggcggacgcgtgggaaagacttaagtaagtcaaacagaaaaaaatggatctcttattgattatagccggtttagtagcggctgcagccttctttttcctccgtagcacgaccaagaaatctctccggttacctccgggaccaaaaggtcttcctattataggaaaccttcaccagatggagaaattcaacccccaacacttccttttccgtctctccaagctatacggcccgattttcacgatgaaaatcggtggccgtcgcctcgcggtgatctcctcggccgagctagccaaggagctactcaaaactcaagacctcaacttcaccgctcgtcctctcttgaaagggcaacaaaccatgtcgtatcaaggccgtgagcttggtttcggacagtacaccgcgtactaccgtgagatgaggaagatgtgtatggtgaacctcttcagcccgaaccgtgtcgcaagtttcagaccggttagagaagaagagtgtcaacggatgatggacaagatctataaagccgctgatcaatcaggcaccgttgatctaagtgagcttctcttgtctttcactaactgtgtcgtatgtagacaagcttttgggaaacggtacaatgagtacggcacagagatgaagagattcatagatatcttgtacgagacgcaagcacttttgggcactctgtttttctccgaccttttcccttatttcggattccttgacaacctcactggtctcagtgcacgtctcaagaaagctttcaaggagcttgacacttaccttcaagaacttctagacgagactcttgaccctaaccgccctaaacaagaaacagagagtttcattgatcttttgatgcagatctacaaagaccaacctttctccatcaaattcactcacgaaaatgtcaaggccatgatattggatattgttgtgccgggaactgacacggcggctgcagtggtggtatgggccatgacttaccttattaagtaccctgaagcaatgaagaaagctcaagacgaagtgaggagtgtgataggtgacaaaggatatgtctctgaagaagacatacctaatctcccttacctaaaggcagtcatcaaggagtctcttcggctcgaaccagtcatccccattcttctacacagagaaactatcgcagacgcaaagataggtggctatgatattccggccaagaccatcattcaggtgaacgcatgggcggtttctcgtgacacagccgcgtggggagacaaccctaatgagttcattccagagaggttcatgaacgagcacaaaggagtggacttcaagggccaagattttgagctcctacctttcgggtcgggccggagaatgtgcccggccatgcatcttgggattgcaatggtagagatacctttcgctaaccttctctacaaatttgactggagtctacctaaagggattaaaccagaggatataaagatggacgtcatgactggactcgctatgcacaagaaagaacacctcgttcttgcaccaacgaaacacatctgatgctatatatatcattaggacgtttctgctggtagatatggcgtgaccaatggttatttttcattgcaatatccctttttgttttaatgagtactatgttctcattttaacgaataaaaatgtatcagtgctcttgtttttggactagaaaagaaagtagtccgatgtttaatattcgggtccctttaatattccctctggtttacaataaaaaaaaaaaaaaaaaa

SEQ ID NO: 118391 - DNA, 728 bp, Arabidopsis thaliana
  unsure (1)..(728): unsure at all n locations
ccatcaaattcacncacgaaaatntcaaggccatgatatnggttcgtaacnctatatatctaacccttattgcaattctctaagttagttaaacntcaatattattatnaactcggtttgtttgtaatttcatcaggatattgttgtgccgggaacngacacggcggctgcagtggtggtatnggccatgacttaccttattaagtaccctgaagcaatgaagaaagctcaagacgaagtgaggagtgtgataggtgacaaaggatatgtctctgaagaagacatacctaatctcccttacctaaaggcagtcatcaaggagtctcttccggctcgaaccaagtcatcccccattcttctacacagaggaactatcgcagacgcaaagatagggggctatgatattccggccaagaccatcattccaggtgaacgcatgggcggtttctcgtgacacagccgcgtggggagacaaccctaatgagttcattccagagaggttcatgaacgngcacaaaggagtggncttnaaggggccaaagatttttagctccctaccttttngggttcggggccggnagaatntgncccggcccatgcattcttttgggggtttnccaaattgggtnggaggtanccttttnggnttaaacctttcttttaccaanattttaacntgggagtcttacctaaaanggntttaaancnagagggttttaaaaggtttg

SEQ ID NO: 118392 - DNA, 1973 bp, Arabidopsis thaliana
cacagatggacataatctcagggcaagctctgttactcctcttttgctttatcttatcatgttttcttatcttcaccaccacaagatctggacgaatctcccgcggggccaccgcgctgcctccaggacctccacggttaccgatcatcggaaatattcacctcgtcggaaaacatccacatcgctcattcgccgagctctcaaaaacttatggaccagtcatgagtcttaagcttggaagtttaaatacagtggttatagcttcaccagaagctgcgagagaggttttacgaacacatgaccagattttgtctgcccgtagtcccactaacgcggtacggtccatcaatcaccaagacgcttcccttgtctggcttccttcgtcgtccgctcgttggaggctgttgagaaggctgtcggtgactcagctcttgtcaccacagcgtatcgaagccacgaaagccttgaggatgaacaaggtgaaggaacttgtgagcttcataagtgaaagcagcgatagggaagaatctgttgatatttctcgtgtagccttcatcacaactcttaatatcatatcgaacattctgttttccgtcgatctcggtagctacaacgcgaaagcttctattaatggggttcaagacacggtgattagtgttatggatgctgccgggactccagacgctgctaattactttccatttctgaggtttcttgatctgcaaggtaatgtgaagacttttaaggtttgcacggagaggctggtaagggttttccgtgggttcattgatgctaagattgcggaaaaatcatcgcagaataaccctaaagatgtttcaaaaaacgatttcgttgacaaccttctcgattacaaaggagatgaatcagaactctccattagcgatattgaacaccttctcttggatatgtttacagcaggcacggatacaagctctagtaccctggagtggccaatgacagagttacttaaaaaccctaaaacgatggcgaaagctcaggccgagatcgattgtgtgataggtcaaaacggtatcgttgaagagtcagatatctccaaactgccgtatttacaagcagtcgtgaaggaaactttccggttacatacgcctgttccgcttcttatcccgcgaaaagccgaatccgatgcggagattcttggtttcatggtgcttaaagatactcaggttctagtgaacgtctgggccataggacgagacccgagcgtgtgggataatccgtcccagtttgagccagagaggtttttggggaaagatatggacgtgagaggtagagattatgagcttacaccattcggcgccggacgtagaatttgcccgggaatgcctttggctatgaaaacagtgtctcttatgcttgcttctcttctttattcctttgactggaagcttccgaagggtgtcctttcggagggatttggacatggacgagacctttggtctaactttgcataagacccaacccgttacatgccgtacccgtccaagaaacgcgccaatattaattagtcgtggttttataattaaaaataaacagagaaataatctccaaagctttgtttattacccaaaaactatctgttttcggttctagagtttgtttgtttctctctcttgaggtggctagagcttgaagaagtcaaaagtatccatattgatgcctagcttcggtcctcggtttaggctaggaaggaaacgaagaagtttctgcaaaccgatgcagatcatcaatggaataatgaaatgttaattttatcatttactcatataggtttccgcctcattatcatttacttgatgtttctcctaaatcttgtcatttaattgactaaggaaataacgaagaaatctcgtgttacttaaaaaaaaaaaaaaaaaaaagggcggccgctatagaggatccaagcttacgtacgcgtgcatggtacgtcatag

SEQ ID NO: 118393 - DNA, 1549 bp, Arabidopsis thaliana
aaactatgtcgattcttctgtatttcttctttctccccgttattttatcgttaatattcatgaagaaattcaaagactcgaaacgaaatcttcctccgagcccaccgaagctaccaattatcggaaacttacaccagcttcgaggattgtttcatagatgtcttcatgatctctccaagaaacacggtccggtgttacttctccgtctaggttttatcgatatggttgtgatctcatcccaagaaacaacggaagaagttctcaaagtacatgaccttgagtgttgtactagacctaagaccaacgcctcatcaaaattctcgcgtgatggtaaagacatcgcctttgcgccatacggggaggtttcgagagagttgcggaagctttccttaatcaactttttcagcacgcaaaaggttcgatcttttaggtacatcagagaggaagaaaatgatttgatggtcaagaaactaaaggaatcagctaagaagaagaatacagtggatttgagccaaacacttttctatctagttgggagtatcatattcagggctacctttgggcagcgtttagaccagaacaagcatgtcaataaggaaaagatcgaagaactcatgtttgaggtccagaaagttgggtctctaagcagctctgatattttccctgctggtgtgggatggtttatggactttgtgtcaggacgacataagacacttcacaaagttttcgtcgaggttgatactttgctaaatcatgtaattgatggtcacttgaagaatcctgaagacaaaacaaatcaagatcgccctgatatcatcgactcgatcttagagactatttataaacaagaacaagatgaatctttcaaactcaccattgatcatctcaaaggaattatccaaaatatatatcttgctggagtagacacaagtgccatcaccatgatttgggcaatggcagagcttgttaagaacccacgggtaatgaagaaagctcaagaagagatccgaacatgcattggaatcaaacagaaggagagaatcgaagaagaagatgtcgataagcttcagtacttgaagcttgtgatcaaagaaaccttaagactacacccaccagcacctcttttacttccaagagagacaatggctgatatcaagattcaaggctacgacattcctcggaaaaccattcttttggttaatgcatggtcgataggacgaaaccctgaactctgggaaaaccctgaggaatttaacccggagagatttatcgattgtcctatggattacaaaggaaatagttttgagatgttaccatttggttctggtcggaagatatgtccagggatagcttttggaatagcgaccgttgaactgggactattgaacttgctttactactttgattggagattggctgaggaggataaagatattgacatggaagaggctggtgatgccacaattgttaagaaagttcctcttgaacttgtcccaattattcatcattgaatgatgttccaactctataaataaaaatgaagttatat

SEQ ID NO: 118394 - DNA, 1846 bp, Arabidopsis thaliana
  unsure (1)..(1846): unsure at all n locations
tgcactatacaagactttgacgtcgcatcgccgcgtacgtaagctcggaattcggctcgagaaaaaagcagagcacaaaccagaggaacgacaataatggtgagtcttctatcttttttcttgcttctactcgtccccattttcttcttgttaatcttcaccaagaagatcaaggagtcaaaacaaaatcttcctcctggcccagcaaagcttccgatcatcggaaacctacaccagctccaagggttgcttcataaatgtcttcacgatctctccaagaaacacggacctgtgatgcatctccgtctagggtttgccccaatggtcgtaatttcatcaagtgaagcagctgaagaagctcttaaaacacatgaccttgagtgttgttcaagacctatcactatggcctcaagggttttttcgcgtaacggtaaagacatcggatttggggtttacggtgatgaatggagagagctgcgtaagctttcggttcgcgaattctttagcgtgaaaaaagttcaatccttcaagtatattagagaggaagagaatgacttgatgatcaagaaactgaaagaattggcttcgaagcaatctccggtggatttgagcaaaatcctctttggtctcactgcgagtatcatattcagaaccgcctttggacaaagtttctttgataacaagcatgtcgatcaggaaagcatcaaagaactgatgtttgaatctctgagcaatatgacttttagattctctgattttttccctactgctggtcttaaatggtttataggctttgtgtcaggccaacataagaggctttacaacgtcttcaacagggttgatactttttttaatcatatagttgatgatcatcactcgaagaaagcaactcaagatcgtcctgatatggtcgacgctatcttagatatgatagataatgaacaacaatatgcatctttcaagctcaccgttgatcatctcaaaggagtcctctcaaatatatatcacgctggaattgacacaagcgccatcaccttgatttgggcgatggcagagctcgttagaaacccgcgggtaatgaagaaagctcaagacgagatccgaacttgcattggaatcaaacaggaaggaagaatcatggaagaagatcttgataagcttcaatacttgaagcttgtggtgaaagaaaccttaagactacacccagcagctcctcttttacttcctcgagaaacaatggctgatatcaagattcaaggctacgacattcctcagaagagagctcttcttgttaatgcatggtctataggacgagatccggaatcctggaaaaatcctgaagagtttaacccggagaggtttattgattgtcctgtggattacaagggacatagctgtgagttgttaccatttggttctggtcggagaatttgtccaggaatagctatggcgatcgcaaccattgaattggggctcttgaatttgctctacttctttgattggaatatgcctgagaagaagaaagatatggacatggaagaagctggtgatctcactgttgataagaaagttcctcttgagcttctgccagttattcgcatcagtttgtagatgagcttggagaaaaacatatggtatgcttattgtataaaccagaacgctttttcttgtttattttgtttttttgaatctaatgttaaattatattcaaaaaaaaaataatcgttgttacaatcagaactctttttttttatctnnnnnnnnnnnnnnnnnnnnnnnnnnnnnnnnnnnnnnnnnnnnnnnnnnnnnnnnnnnnnnnnnnnnnnnnnnnnnnnnnnnnnnnnnn

SEQ ID NO: 118395 - DNA, 1692 bp, Arabidopsis thaliana
caaccaacaaaaactacaagacgataacaacaaaatgtctcttttctccttccccatctccactgagttgcttccatggcttctcctacttttgattcctccacttcttatcttctttcttcttcgttcccctaaaaatcttccaccaggtccaccaagattacctatcttaggaaacatccaccagctcggatccctccctcaccgcagtctcagagatctctctctcaaatatggcccagtcatcaccgtctatctcggcagcgtccgtaccgtggttgttcactctccggagacggcggaggaagttctaaaacttcacgactccgagtgttgtactcgtccaaagctatctatcaccaaaagctttttctatgatggacttggtctagggtttactaaatggggtgattactacagagatgtgcggaaactctgtgttcttgaacttttctccgttaaacgagccaactcgttccggaacataagagaggaggagctgagtcgactcgttaactcgttttctgactcggcgtcatctggatcttccgttgaccttaccgcaaatttggctaagttcgtcgcgagctttacgtgtcgaatggcgtttggattgagttttcaaggaagtggaatggataacgagacgtttctggagctgttcacggaggcgaacagagtgatcggaaaattcgcggcggcggatatattccccgggtttggctggatcttggatcggatcagtggtcttgattctagccggaggaagagttttcaagatcttgatacgttttaccagaaagctattgttgaccatcgggagaagaagaaaactgaagaccgtgaagatctcattgacgtcttgctcaagttacagagtcaagaaaccaaacttggttcttcaagaatcaccgatacacatatcagagctattattatggatttgtttgtagcaggagtagacacatctgttatcactttggattggacaatggcagagctttcaagacatccaagagtaatgaagaaagtacaagccgagattcgtgaacacgtaggagacaaaggtatagtgacatacgatgatctcgaggctctagtctacatgaaaatggtgatcaaggagacttggaggttacacgcaccgagtcctattctgattccaagagaagcaatgactaacttcaagatcaagggttatgatatttaccctggaacgcgtattcatgtcaatgcttgggctattggacgtaaccctgatgtatggaaggatcctgatgagtttataccagagagatttgttgatagcaatgtggaaactaaagggacaagttttgagctgttgccgtttgggagtggacgcagaggttgtcccgcaatgtacgtgggattaagtacggtggagtacacattggcgaatcttttgtatcattttgattggaaagcgactgaggaagtgagtgttgaagaagcacctggtctcactagccacaggaagcatcctcttcaccttgttcctgttaatgtcatcaaccgcaagctttagagtgcggaaagcacaaacatttagttttcgacgaataaggcttaataatgtttctgtttattgaatagtcgatactttctgtttagctttcaaacaataattctcattacatgaataaaactttggcttatctatctccacacaaa

SEQ ID NO: 118396 - DNA, 1620 bp, Arabidopsis thaliana
gaaaaacaaaaatgacgatcttgctctgtttcttcttagtttcacttcttactatcgtatcatcaatctttcttaaacagaataaaacctcaaaattcaatcttcccccaagcccttcaagccttccgatcattggaaacttacaccatctcgcaggattgcctcacagatgttttcataagctctctatcaaatacggacccttggtctttcttcgtctcgggtctgttccggttgttgtgatctcatcgagtgaagcagctgaagcagttctcaaaaccaatgacttggaatgttgcagccgaccaaagacggtggggagcggaaaactctcttacggtttcaaagacatcactttcgcaccatacggtgagtattggcgagaagtgcgaaaactcgcggttatcgagctttttagctctaaaaaggttcaatctttcaggtatataagagaggaagaggtcgacttcgtggtcaagaaagtgtcagaatcagctttgaagcaatctcctgtggatttaagcaaaacctttttctccctcaccgctagtatcatttgtagagtcgccttaggacagaatttcaatgaaagcggctttgttatcgatcaagacaggatcgaagaacttgttaccgaatcagcagaagctctagggactttcactttctctgacttcttccctggtggacttggaagatttgtagattggttgtttcaacgacacaagaagatcaacaaagtctttaaggaacttgatgctttttatcagcatgtgattgatgatcacttgaagccagagggaagaaagaatcaagatattgtcaccttgattttggatatgatcgataaacaagaagattcagattctttcaaactcaacatggataatctcaaggcaattgtcatggatgtatttctcgcggggatagatacaagcgcggtaacaatgatttgggcgatgacagaacttattagaaaccctagagtgatgaagaaggctcaaggaagtattcgaaccactctgggtctcaagaaggaaagaatcactgtagaagatttaggcaaagttgagtatttgaaccacatactcaaggaaacttttaggttacacccggcacttccatttgtggtgccaagggaaacaatgtctcacatcaagatccaaggctatgatattccaccgaaaacacaaatccagcttaacgtgtggacgatcggacgtgaccctaagcgttggaatgaccctgaagaattcaaccctgaaaggtttgcaaatagctctgtagattttagaggacaacattttgacctattaccgtttggttctggtcgaaggatttgtcccggaatgccaatggcgattgctagtgtggaactagcattgatgaatttgctttattattttgattggagtatgcctgatgggactaaaggtgaagacattgatatggaagaagctggtaatatctctattgtcaagaaaatacctcttcaacttgtgcctgttcaacgttattgatgagcaataatataagctcgataacatggaaagtgtatgaagcaaaaaacataagattctttagattttgttgtgttatataagaaagaaatgttccaat

SEQ ID NO: 118397 - DNA, 1580 bp, Arabidopsis thaliana
aagaaaccaacattagagttgttctctactccattttctctctcatcttcttgataatctctttcaagttcttaaaaccaaagaaacagaatcttccaccgtctccgccgggatggttgccaataataggccatctccgccttctgaagccacccatccaccgcaccctccgctccttctccgagaccctcgaccacaacgatggtggcggcgtgatgtccctccgacttggatcccgtctagtctacgtggtgtcgtcacataaggttgcggcagaggagtgctttggcaagaacgacgtcgttctagctaaccggccacaggtgatcatcggaaaacatgttggttataacaatgcaaacatgatcgctgcaccttacggtgatcactggcgtaacctccgtcgcctctgcactatcgagatcttttcaacacaccgccttaactgctttctttatgtccgtaccgacgaagtacgtcgccttataagccgcctctctcgtctcgcaggaaccaaaaaaactgttgtggaattgaaaccaatgcttatggacttgacattcaacaacataatgagaatgatgaccggaaaacgatactacggtgaagaaacaaccgatgaggaagaagcaaagcgtgtccgtaagttggtagcagatgttggggctaacacgagttcaggcaacgccgttgactacgtccccatcctcagactgttttcaagttatgaaaatagggttaaaaagttaggagaggagacagataagtttttacaaggtctcattgacgataaacgtgggcaacaagaaaccggtactacaatgatcgatcatttgcttgtcctccaaaaatctgatattgagtattacactgatcaaatcatcaaaggcatcatactgataatggtaatagcagggactaacacatcagcagtcactctagaatgggcactttccaatttgcttaaccatcctgacgtaatatctaaagcgagagacgaaatcgataaccgggttggtttagaccggcttatcgaagaagcagatcttagcgagctaccatatctaaagaacattgtccttgagacccttaggctacacccagctacaccattgctagtcccacacatggcatcagaagattgcaagataggatcctacgatatgccacgtggtacaacgttgttggtgaatgcatgggccatacatagggatccaaacacgtgggatgatccggatagctttaaaccagagcggtttgagaaagaagaggaagcacaaaagcttctggcgtttggattaggtagaagagcgtgtcctggatcgggtctggcccaacgaatcgtgggactagctctcgggtcattgatacaatgctttgaatgggagagagttgggaatgtggaagtggatatgaaggaaggagttgggaatactgtacccaaagcgattcctttgaaagctatttgcaaagctcgtccatttctacataagattatttcctaaaattgttgaaactacgaataaaagatgtgtgacatgttaatgcaaatcaatgattctctctaaaaaagaaaaaag

SEQ ID NO: 118398 - DNA, 1652 bp, Arabidopsis thaliana
cacaagtagaaaaaaacacaaacatcctgaaactagaagagagagacaaaatgttatacttcatccttctccctcttctatttcttgtaataagttacaaatttctctactccaaaacgcaacgtttcaaccttcctccaggaccaccgtcacgacccttcgtcggccatctccacctcatgaaaccgccgatccaccgtctcctccaacgctactccaaccaatacggcccaatcttttccctccgtttcggctcccgacgcgtcgtggtcataacatccccttctctcgcccaagaatccttcaccggccaaaacgacatcgttctctccagccggccgctccaactcaccgccaaatacgtcgtatacaaccacacaaccgttggtacagctccttacggcgaccactggcgtaacctccgccgtatgtgctcccaagagattctctcctctcaccgtctcatcatcttccaacacatccgcaaagacgagatcttacggatgctcacacgcctctcacgttacacacaaacctccaacgaaagcaacgatttcactcacatcgagctagaaccgctcttatctgatctaacattcaacaacatagtaagaatggttacagggaagagatattacggcgacgacgtcaacaacaaagaagaagcagagctattcaagaagctagtctacgatatcgccatgtatagcggcgctaatcattccgctgattacttaccaatactaaaactattcggaaacaaattcgagaaagaagttaaagctataggcaaatcaatggatgatattttgcagcgtttgttagatgaatgtagaagagataaagaaggtaacacaatggtcaatcatttgatctctctacaacaacaacaacctgagtattacactgacgttatcatcaaaggccttatgatgtcgatgatgctcgccggaactgagacctccgctgtgacattagagtgggcgatggcgaatctactgagaaatccagaagtactggagaaggcgagatcggagatcgatgagaagatcggaaaagatcgactaatcgacgaatcagacatcgcagtgcttccttacctccaaaacgtcgtctccgaaacattccggctatttccggtggcgccgtttctaatccctcgatcaccgacggacgacatgaaaatcggaggttacgacgtcccgcgagatacgatagtgatggttaacgcttgggctatacatagagatccagagatttgggaggagccagagaagtttaatccagatcgatataatgacggatgcggaagcgattactatgtttacaagctgatgccgtttgggaatggccggagaacttgtcccggcgccggattaggtcagaggattgtgacattggcgcttggatcgttgattcaatgctttgaatgggagaatgtgaaaggggaagagatggatatgtctgagagtactgggttgggtatgcgtaagatggatcctttacgggccatgtgtaggcctaggcccattatgtcaaagcttttactctaataagatgagtagaggttaaaaaaagaaaaaataacttattcggatgtaactggtaattatctttaagataaagatgaataaaatgaatctttgcctcat

SEQ ID NO: 118399 - DNA, 608 bp, Arabidopsis thaliana
  unsure (1)..(608): unsure at all n locations
cgccatgtatagcggcgctaatcattccgctgattacttaccaatactaaaactattcggaaacaaattcgagaaagaagttaaagctataggcaaatcaatggatgatattttgcagcgtttgttagatgaatgtagaagagataaagaaggtaacacaatggtcaatcatttgatctctctacaacaacaacaacctgagtattacactgacgttatcatcaaaggccttatgatggtaaaattctataaacttctgtgagatttcaatgaagtgaattgtgagattcggttttaacccggattgtttttgcaaattgtgaagtcgatgatgctcgccggaactgagacccccgctgtgacattagagtngggcnatggcggatccactgggaaatccagaagtaccggngaaggcgagatcgggntcgatgagaagatcggnaaagatcggcctaancgccgatcagncatcgcagngnttccctacccccaaaacggcggcncccgaacatcccggnanttccnggggggcggttcnaancccncngnaccggcggcggatgaaccgggggtcncgnccccganacgtnggtggacccctngga

SEQ ID NO: 118400 - DNA, 523 bp, Arabidopsis thaliana
  unsure (1)..(523): unsure at all n locations
tcacacgcctctcacgttacacacaaacctccaacgaaagcaacgatttcactcacatcgagctagaaccgctcttatctgattgtttttgaaattgtgaagtcgatgatgctcgccggaactgagacctccgctgtgacattagagtgggcgatggcgaatctactgagaaatccagaagtactggagaaggcgagatcggagatcgatgagaagatcggaaaagatcgactaatcgacgaatcagacatcgcagtgcttccttacctccaaaccgtcgtctccgaaacattccggctatttccggtggcgccgtttctaatccctcgatcaccgacggacgacatgaaaatcggaggttacgacgtcccgcgagatacgatagtgatggttaacgcttgggctatacatagagatccagagatttgggcggacgcgtggnnnnnnnnnnnnnnnnnnnnnnnnnnnnnnnnnnnnnnnnnnnnnnnnnnnnnnnnnnnnnnnnnnnnnnnnnnnnnntcat

SEQ ID NO: 118401 - DNA, 1439 bp, Arabidopsis thaliana
  unsure (1)..(1439): unsure at all n locations
ctcccaaccctctatatataacaacgcgtcgacctaattaagttctcatacccgctttattcattgattcattcaatttttgttcatcgttttctctagatctctcttctatatagtcctctcggaggttttccgatgaagatcgtcactgatctccttccgatctacagatcggcgtcttatacgaagagatccagaggctccggttgattcctcgtcagaagacggatcgtcgcggttgagctccgaagatcggttgaagatctgatctgatcttagatcatgaaccggcctcgaggttcgtcagatctgcgttactgagcttttgatgaggtgatgaatgatgaatccgtcaattctctatggagctagagagatgagagggtgaagaagagagaagaagctgatatgtgatattgatgtgagttaagttgattgatggatgtatgagatgtttatagggacgatatagtcctccgtaaacatctttgtcatccgacctttgccatgacaggtgcgcttgcatggcaggtcaccaaaatccttaataaaaaaaaaaaagtttcgtgttgtcgaggggagttcgcacgggggattttttttgcccgggttctcccctcttgcgtgtgtgtcttgcttctcgctcttcgtacacactacctttgatctcgattcattcacgtaaattctctcaataccacaggaatattctcgatccggatcttaagatcagcggatctggagacaagctggccaaatcttaatccaacatcctccaaccaaggtaccgtcaattttgagtttaaattctccgttattctctttatttgcatcatataacaaacctgacaccaaatatttattacaatctcgaatcggcctttatttttgagcatggaaatagttgcctcattttcaaattgactgtnataatacattattcacaaagtacttctaccaaagtattcgtaggaccttaaattgtctaatcgaacggttccatggcagtttgtnatattctccactttatctatctactgttgtttgatgtttgtacttttcctgtaagaattctcattggaagaaattgtacccagttttatgattacgtaaagaaatatcagtagtgaatattctgacctattctagaaaatagcgctgtagtatttagtctctcgtatgggttttacgatttggatttatcacggctgcattcattagcaagagctatggctagagtagctagctcctggagaagtaatacgagtatcgaaggtctctgatttttgatatgatggcgtttggactcgattcgagcctgcagtttccgattgatatatactctgtttgttgtatcatttcgtacaagtaggttttttttagaccttttgcattctgatgggatctttcaaatttaataaggcagnttcaggttatgc

SEQ ID NO: 118402 - DNA, 1923 bp, Arabidopsis thaliana
gcgtccgctttgttatagagccatcacttcagagtgactcacacacttgtttcaagaattaaatctgaatttggctcttcttataaactaatgtctgcagttcgtagagtcatggcgttagcatcaaccacgttgccgacgaagtccggattatctctttggtgtccgtcttctccgtctctcgctcgccgatttcccgctcgtttttctccgatcggttctagaatcgcttccagaagcctcgtcactgcttcgttcgctaacgagaatcgcgagtttgtgattgttggtggaggaaatgctgctggttatgctgctagaacttttgtggaaaatggaatggctgatggtcggctatgcattgtgaccaaagaggcttacgcaccttatgagagaccggctttgacaaaagcttacttgttcccaccagagaagaagccagctcgtttaccaggatttcatacttgtcgttggaggtggtggagaaaggaaacaccagattggtataaggaaaggattgaggtaatatatgaagatccagtggctggagctgattttgaaaagcaaacactcaccacagacgcagggaagcagttaaaatatggatctctaattatcgctacagggtgtacagcctcaaggttcccagataaaatcggtgggcacttgccaggggttcactatattcgggaggttgcagatgctgattcactgatagcatctctgggaaaggcaaaaaaaattgtcattgttggtggtggctacatcggcatggaggttgctgctgcagctgttgcgtggaatctagatacaacgattgtattccctgaagatcagcttttgcaaagattgttcactccatcgcttgctcagaaatatgaagaactgtaccgtcaaaatggtgttaagtttgtcaagggcgcttccataaataacttggaagcaggttcggatgggcgtgtatcagctgttaagcttgctgatgggtctacaattgaggcagacacggttgtaattggaattggagctaagcctgctattggcccctttgaaactttggccatgaacaaatcaattggaggaattcaggtcgatggcttgttcaggacaagtacccctggaatttttgctattggagatgtcgcagccttccctttgaagatatatgataggatgactcgagttgaacatgttgatcacggccgccggtctgcacaacactgtgtgaaatcactactcacggcacacactgacacgtacgattatcttccatatttctactcaagagtattcgagtatgaaggaagcccaagaaaagtgtggtggcagttttccggagataatgtgggagaaacagtggaggttgggaactttgacccgaaaatcgctaccttctggattgaatctggcaggttgaaaggtgttctagtagaaagcggatcgcctgaggagttccagcttctaccaaagctagcaagaagccaaccacttgtcgataaggctaaactccaagcgcatcttcagtcgaagaagctctcgagattgctcaagccgctctacagagttagagaaggaaacttcatggagtttttttaatagcttttgggttcagagaaatcaacatcttttattcccggtgagagttattcatctttccattggaaaaatgatctatagagagcactgttgtcaataatctcctcgaataatttataacctctttttgggataatcatattttgctcattagagagctttgtttctaaaaaaaaaaaaaaaaaaagggcggccgctctagaggagttttctcatgatctatgggttgtttcgtggatcattaaaatatttatttatttagatttcttttatcgactgtaaaccataaacgaaatttgtataaacaataatgaagactttgttata

SEQ ID NO: 118403 - DNA, 559 bp, Arabidopsis thaliana
  unsure (1)..(559): unsure at all n locations
tcnncgccccctgccgtcgttnccccatattctcccagntntcgntttnagggacccnagaaagtgtggtgcagtttttcggagataatgtggagaaccagtggaggttgggactttgncccgaaaatcgctaccttctggattgaatctggcaggttgaaaggtgttctagtagaaagcggatcgcctgaggagttccagcttctaccaaagctagcaagaagccaaccacttgtcgataaggctaaactcgcaagcgcatcttcagtcgaagaagctctcgagattgctcaagccgctctacagagttagagaaggaaacttcatggagtttttttaatagcttttgggttcagagaaatcaacatcttttattcccggtgagagttattcatctttccattggaaaaatgatctatagagagcactgttgtcaataatctcctcgaataatttataacctctttttgggataatcatattttgctcattaaaaagctttgtttctaataaaatctatgttagtcacccaaaaaaaaaaaaaaagggcggccatatt

SEQ ID NO: 118404 - DNA, 1746 bp, Arabidopsis thaliana
  unsure (1)..(1746): unsure at all n locations
acgccagctctaatacgactcatttagggaaggctggtacgcctgcaggtaccgggccggaattcccggggggagcgcggcggtgcnaaaaaaaaacaaaatcntanataatgatcatgcaaaaccgagccggtggatcttactttcgatttcaaaccacataaatcttagggactgagctaaaaaagtgatcgacccacgcgtccgagacctcctctgtttccatattctcaccacagaagaactcttgaggctttctcttttctctaccatggcgaaaccggtgtccattgaagtgtataatcctaatgggaaatacagagttgttagcacaaaaccgatgcctggaactcgctggatcaatctcttggtagaccaaggttgtcgcgttgagatatgtcatttgaagaagacaatcttgtctgtagaagatatcattgatctgatcggagacaagtgtgatggagtcatcggtcagttgacggaagattggggagagactctgttctcagctttgagcaaagctggagggaaagctttcagtaacatggccgttggttataacaacgttgatgttgaagctgccaataagtatggaattgctgtcggtaacactccgggagtgttgactgagacgacggctgaactagctgcttctctttccttggctgctgcaagaagaattgttgaagccgacgaattcatgagaggtggcttgtacgagggatggcttcctcatctgtttgtggggaacttacttaaaggacagactgttggagttattggagctggacgtattggatctgcttatgctagaatgatggtggaagggttcaagatgaatttgatctactttgatctttaccaatccactcgtcttgagaaatttgtgacagcttatggacagttcttgaaagcaaatggagaacaacctgtgacatggaaacgagcttcgtccatggaggaggtgctgcgtgaggctgatctgataagtcttcacccggtgctggacaaaaccacttaccatcttgtcaacaaggagaggcttgccatgatgaaaaaggaagcaatccttgtgaactgcagcagaggtcctgtgatcgatgaggcagctttggtcgaacatctcaaagagaacccgatgttccgagttggtctcgatgtgttcgaggaagagccattcatgaaaccagggcttgctgatatgaaaaacgctattgttgttcctcacattgcttctgcttccaagtggactcgtgaaggaatggctacgcttgcagctctcaacgtcctcggaagagtcaaagggtacccgatttggcatgacccgaaccgagtcgatccattcttgaacgaaaacgcttcaccgcccaatgccagtccaagcatcgtcaactcaaaggccttaggattgcctgtttcgaagctatgagttaagtatgaagaaggggagatttggaagaatccttttagtgaatatatgatggtgtcaagttgtgtttatgtattgtatatgaaacaaccatgttggatcatataaatcactcctttaaagtgttacattgttgatgagtctattagacgattacccactctctttatttcataaatttgctaagaatacaatttctaagtcatcaagaatttcatctctaaaaaaaaaaaaaaagnnnnnnnnnnnnnnnnnnnnnnnnnnnnnnnnnnnnnnnnnnnnnnnnnnnnnnnnnnnnnnnnnnnnnnnnnnnn

SEQ ID NO: 118405 - DNA, 777 bp, Arabidopsis thaliana
caaactgaagaaacgtttctttgtgtctaaatagataattaacagaactgaccttaacttaacttcttctgatgatgacagtggactcgtgaaggaatggctacgcttgcagctctcaacgtcctcgtatgtattttcattccaagaaaactcattcttataagattcaaaatgactaaattctgatcagcctctgaaaatgtttaacagggaagagtcaaagggtacccgatttggcatgacccgaaccgagtcgatccattcttgaacgaaaacgcttcaccgcccaatgccagtccaagcatcgtcaactcaaaggccttaggtactacaacaacacttacactcatgcctcagattgtttcaaacgctaattttatgcttgcatttcctgttaacaaaatatttaaacataaacagaaacaaaagaacattgactaatccacttaaacaaatttgttcccattctctctattaaaattactctcatatatatattctttgggttttttcaggattgcctgtttctaagctatgagttaagtatgaagaaggggagatttggaagaatccttttagtgaatatatgatggtgtcaagttgtgtttatgtattgtatatgaaacaaccatgttggatcatataaatcactcctttaaagtgttacattgttgatgagtctattagacgattacccactctctttatttcataaatttgctaagaaaacaaaatctaagtcatcaagaaaaaaaaaaaaaaaaaaaaaaagggcgg

SEQ ID NO: 118406 - DNA, 754 bp, Arabidopsis thaliana
  unsure (1)..(754): unsure at all n locations
cgcctgcatgtaccggtccggaattcccggctcgacccacgcgtccagctctgacatggaaacgagcttcgtccatggaggaggtgctgcgtgaggctgatctgataagtcttcacccggtgctggacaaaaccacttaccatcttgtcaacaaggagaggcttgccatgatgaaaaaggaagcaatccttccctccggtaggagaggncctgagatcgatgaggcagctttggtcaaacatctcaaagagaacccgatgttccgagctggtctcgatgtgttcgaggaagagccattcatgaaaccagggcttgctgatacgaaaaacgctattgttgtccctcacattgcttctgcttccaagtggactcgtagaaggaatggctacccttgcagctctcaacgtcctcgagaagagtcaaagggtacccgatttggcattgacccgaaccggagtcgatccatttcttgaacgaaaccgcttcaccgcccaatgccagtccaagcatcgtcaactcaaaggccttaggattgcctgtttcgaagctatgagttaagtatgaagaaggggagatttggaagaatccttttagtgaatatatgatggtgtcaagttgtgtttatgtattgtatatgaaacaaccatgttggatcatataaatcactcctttaaaaaaaaaaaaaaaaagggcggccgctctagaggatccaagcttacgtacgcgtgcgtgcgacgtcataactcttctatag

SEQ ID NO: 118407 - DNA, 425 bp, Arabidopsis thaliana
attaaagaacaaaatcgtagataatgatcatgcaaaaccgaccgttggatcttactttcgatttcaaaccacataaatcttagtgactgagctaaaaaactgaaattttttaaaaggcaagacctcctctgtttccatattctcaccacagaagaactcttgaggctttctcttttctctaccatggcgaaaccggtgtccattgaagtgtataatcctaatgggaaatacagagttgttagcacaaaaccgatgcctggaactcgctggatcaatctcttggtagaccaaggttgtcgcgttgagatatgtcatttgaagaagacaatcttgtctgtagaagatatcattgatctgatcggagacaagtgtgatggagtcatcggtcagttgacggaagattggggagagactctgttctcagc

SEQ ID NO: 118408 - DNA, 3684 bp, Arabidopsis thaliana
  unsure (1)..(3684): unsure at all n locations
aacgcgtcgtgagaggaggggaaattcgaaaagagaaagaaaaaaaattgaaaacgccgattcactttttttatatatataatataaaaaatttcttttacggaattaaatattctgtgatggatgcgattggatagaaggaaacaaaaaggaaaggaggaagataaaagagagaagaaggaattattctcttctctcttctctttcatctctgtctacatcgctgtttttttttttcttcacggatcgtgatacctgaagaagaagaaggttttttcaggggaagtgatatggttcgttgaaataagtttaaagttttaaaagattttgattctggttttattagtcaaattttgtaagatgccgtctgatataatggaacagagaggtgttcaacacctcccactttcatgaagatattcatattacttcagagaggcaatttgggtttatgaaaacagacatgatgcctgaaaaccaaggtggtcgtgatagactttcaagtatgccaaagagttcctggacatctgaaagttaccagctgaagccacaatctagtttttctgggtcgcacccctctggtagccctaacgcaagaaacactacaaatggtagtcagtgggaaagcagtttattttccagctcaatgtctgatttatttagtagaaagctgcggctacagggaagtgatatgctatccactatgtctgcaaacacagttgttacccaccgtgaagaagaaccgtctgaatctttggaagagattgaggcacaaactattggaaatcttctcccagatgaagatgatctttttgcagaagtgacaggtgaggttgggcgtaaatctcgtgctaatacaggagatgagttggatgagtttgacctcttcagcagtgttggtggcatggaactagatggagatattttttcttctgtgagtcatagaaatggtgagagaggtggcaataattctgttggcgagcttaaccgtggggaaattccatccagaacacttttggtcggaaatatcagtagcaatgttgaagactatgagctgaaggtcctttttgagcaatttggagacatccaggctcttcatacagcttgcaaaaatcgtggctttatcatggtatcgtactgtgatataagggctgctcagaatgcggcgagagcactccagaataagctgttaagaggaacaaaacttgacattcgttattctatctctaaggaaaatccttcacaaaaagatacaagtaaaggagccttgttggttaataatctcgattcttctatttcgaatcaagagctgaatcgactggtcaaatcgtatggagaggtcaaagagattcgtaggaccatgcatgataactcacagatatacatagagttctttgacgttcgagctgcagcagctgctcttggtggactaaatggacttgaggttgctgggaagaagcttcaacttgtgccgacctatccagagggtacaagatacacgtcgcagtgtgctgcaaatgatactgaagggtgtctacctaaaacgtcttatagtaatacatcatcgggacacataggtagacatttcccaggaatgatttcttcaacctccagtgatggtggatctatgcgggttatacataattctattggatcacctgtgaattccttcattgaacgacatcgtagtctcagcattcctattggattcccaccttcggcaaacggcatctcagcaagtaagcctgtaggacttcaggagcatggccaccattttgataattcaaatatggggatccaaagcatgccaaatctccatcctcattctttttcggagtacgtcgacaactttgcaaatggtagtccatatacgtcctctgcattttctgaaatggtcagtgatggctcaaaagcaaatgaaggctttatgatacataatgttcgtggagtggaaggctttagtggaggcggtataggatctcccatgcatcaaagctctcgccgccctattaatttatggagcaactctaacactcagcaacaaaatccgtcaagtggcatgatgtggcctaactcgccatctcacatcaacagcattcctactcagcgcccacctgttactgtattctctagagcacctcctataatggtgaatatggcatcttcccctgtgcaccaccacattggatctgcgccggtattaaattctcctttctgggacagaagacaagcctatgtagctgaatctctagaatcatctggcttccacataggttctcatggtagcatggggattcctggctcttcaccatcacatccaatggacattggttctcataagactttctctgttggtgggaatcgcatggatgtaaattcccaaaatgctgtcctgcgatctcctcaacagttatctcatctctttcctggaaggagtccaatgggttcgatgccagggtcatttgactcgccaaatgaacgatacaggaatctctctcaccgaagaagcgaatctagctctagcaatgctgacaaaaaactgtatgagcttgacgttgaccgtatattacgtggggaggacaggaggacaacattgatgattaaaaacattcctaacaagtacacttcgaagatgcttctatctgctattgacgagcattgtaaaggaacttatgatttcctttatttgccaattgacttcaagaacaaatgcaatgtgggatatgctttcatcaatcttattgaacctgaaaagattgtcccattttttaaggcatttaatggcaaaaagtgggaaaagttcaatagcgagaaggtggcaacgcttacgtatgctcgtatccaagggaaaacagctcttattgcccatttccagaactcaagcttaatgaacgaagacaaacgttgccgacctattctcttccacactgatggtccaaatgctggtgatcaggaaccatttccaatgggaagcaacatacggtcaagaccaggcaagccacgaagcagtagcattgacaactacaacagctttagcatctcttccgtttctgaaaaccgagaagaaactcctaatggaactgatccgttcttgaaggagaactaaccaatgagcaaaacaagcagaggtaaaacaaagaacacataaaaagagacacgaagataacaagaaggttaaatatatataaagttattattatatgatatcatccacacaccctagagttctgtaaatcggggggtgttagatttaccctgacaaaactcattttgcagtgaagaaattttttggagagatgaaaaactttggtgaccaccaacctttacccaggttgttgttgcttcaccagttttgttgtattacccaaatcccctgaaaaaaattgcaggttttttttttttgttcctctttttttttgggttttggggttatattcaaggatttttggttcttgctatcaatgtataacagccttggattacactcatcttctttgctggctatttgtggccattctacgttgtactcttttggacccttttttgaatgcttctattttgggatatataaaaatattatttttcctnnnnnnnnnnnnnnnnnnnnnnnnnnnnnnnnnnnnnnnnnnnnnnnnnnnnnnnnnnnnnnnnnnnnnnnnnnnnnnnnnnnnnnnnnnnnnnnnn

SEQ ID NO: 118409 - DNA, 1598 bp, Arabidopsis thaliana
acccaagcgtctattcagctaaacagacattgcgccgccgttaagtcgaaaggatagaaagaaattaaagaaagaagaagcttgttgtctttgcttcttgaggctctcttcttgtcttgatcatctgttacgttgttccacgaaaagaacagtagctttgtctctccatatagggttattatctgaaatgggtaattgtttagattcatcagctaaagtggataatagcaaccatagcccacatgctaattctgcttcttcgggctctaaagtttcaagcaagacaagccgttcaacgggtccttcaggactaagcacaacttcttacagcacagatagtagttttgggccattaccaacacttaggacagaaggagagatactttcatcgcctaacctaaaagctttcactttcaacgaactcaagaacgcgactaagaactttcgtcaagataatctactaggggaaggaggtttcggttgtgtattcaaaggatggattgatcaaacatctctcactgcttcacgtcccggttctggaatcgttgttgctgttaagcagcttaagcctgaaggttttcaaggtcataaagagtggttgactgaagtaaactatcttggtcaacttagtcacccaaatcttgtattactagttgggtattgcgcggaaggcgaaaaccggcttcttgtatatgaattcatgccaaaaggaagcttggagaatcatctttttagacgtggggcgcagccacttacatgggcaataaggatgaaagtggcggtaggtgcagctaaagggctaacttttcttcatgaagcaaagtcacaagtgatatacagagactttaaagctgctaacattctactcgacgctgacttcaatgctaagctttcagatttcggattggcaaaagcaggtcctactggtgataatacacatgtgtcaacaaaggtcattggtactcatggatatgcagctcctgaatatgttgccacaggtagattaaccgcaaagagtgatgtgtacagcttcggggtcgtgctactagaactaatatcaggacggcgtgccatggacaattcgaatggaggaaacgagtatagtcttgtagattgggcaacaccgtaccttggcgataagcgaaagctttttcgcataatggacacgaaactagggggtcaatatccacaaaagggagctttcacagctgctaatcttgcattgcaatgcttaaatcccgatgcaaaactccggccaaaaatgtcagaggttttagtcacattagaacagctagaatccgttgctaaacctggaaccaaacacacccaaatggaatctccaagatttcatcattcttctgttatgcagaaatctccggtaagatatagtcatgatcggcctctgctgcacatgactcctggtgcatcgcctttaccttcttacactcaatctcctcgtgtaagatgaaacacatttaagaaaacagatcgtgctttatgcttgtatgtgtactatatgtaaaaatgcaggcttgtctgtgtaattagagaggagtgattgcaaaggtttatacagagattaactatttacttcaact

SEQ ID NO: 118410 - DNA, 1539 bp, Arabidopsis thaliana
gaaaatcttctttttcttttctttagttggataatttagtgattattattattacaatcagcttttgcgccgcagagtaaacaaaaaaagctcgttggctttgttcctttgaatctgttgattgtgttatcgagtgagaaatgggtaattgcttagattcatcagctaaagtggatagtagcagccacagtcctcatgctaattctgcttcattgagctcaagagtttctagcaagacaagtcgttccacagttccttcaagcttaagcataaattcttacagcagtgttgagtctttacctacaccaagaacagaaggagagattttgtcatcaccaaatcttaaagctttcacctttaacgagctcaagaacgctacgaggaactttcgacccgatagtcttttaggtgaaggaggttttggttatgtgtttaaagggtggattgatggaactactttaactgcttcaaaaccgggttctggaattgttgttgccgttaagaagcttaaaactgaaggttatcaaggtcataaggagtggttgactgaagtgaactatcttggtcagcttagtcacccaaatctcgtcaaactagttgggtattgtgtagagggagaaaaccggttactggtatacgagttcatgccaaaaggaagcttggagaatcatctttttagacgtggcgctcagccacttacgtgggctataaggatgaaagttgcaataggagcagccaaaggactaacttttctccatgatgcgaaatcgcaagtgatatacagagactttaaagctgctaacattctacttgatgcggaattcaacagtaaactttcggacttcggtctagctaaagcaggtcctaccggtgacaagactcatgtgtccacacaagttatgggtactcacggatacgctgccccggaatatgtagctacaggtcgattaactgctaagagcgatgtatacagtttcggtgtggtactactggaattactctcaggacgaagagcggtggacaaatcaaaagtgggaatggaacagagtctagtggactgggcaacaccgtatctcggcgacaagcgaaagctctttagaataatggacacgagattaggcggacagtatcctcaaaaaggagcatacacagcagctagtcttgcattgcaatgcttaaaccctgacgcaaaactgagaccgaagatgtcagaagttttggccaaactagatcagcttgaatcaacgaaacctggaactggagttggaaacagacaagcacagattgattccccaagaggtagtaatggatctattgtacagaaatctccaaggaggtatagttatgatcggcctctcttacacataactcccggtgcttctcctttgcctactcacaatcactctcctcgtgtaagataggaatcactgtaatagttttcttttgtcttttgtctgttgtatgctgctctgtgtaaaatgtgttgtgtaacggaccaaagtttcattcttggctcaatttataaaatttggtttcagt

SEQ ID NO: 118411 - DNA, 763 bp, Arabidopsis thaliana
  unsure (1)..(763): unsure at all n locations
atgatctccnnnnnnnnnnnnnnnnnnnnnnnnnnnnnnnnnnnnnnnnnnnnnnnnnnnnnnnnnnnnnnnnnnnnnnnccacgcgtgcgtgccgattcatcaactgagagagaagaagaattgagaaatgatgaagcgtctgatcccaacgttcaaccgcatcttggtgcagagagtcatccagcccgctaaaaccgaaagcggcattctcctacctgagaaatcctccaagctgaactcaggcaaggtgatagctgttggacctggatcaagggataaggacgggaaattgattccggtctctgtgaaggaaggcgacactgttcttcttccagagtacggtggtacacaggtcaagctcggcgagaacgagtaccatctcttccgggacgaggatgttttgggaactttgcacgaggattgaaaaggctaagcttgccaacttaaccacgagggttcatgttggtgtttgtgttatgaggagaagtcatttataaattagtttatcttgaagatgtggttggactttgttgtcgtttatcattgaatctacctttatgaacctgtctttgaatttttacaaatgggcatcaatcacatggataacccaagtgttgcatcttctcattttgtgcttttccgtaatctgtggatgcttttcgtttacgtttaggcagcaacttcaatagccaatgtagacgatagcttagttgactttgcttattcnnnnnnnnnnnnnnnnnnnnnnnnnnnnnnnnnnn

SEQ ID NO: 118412 - DNA, 1434 bp, Arabidopsis thaliana
  unsure (1)..(1434): unsure at all n locations
nnnnnnnnnnnnnnnnnnnnnnnnnnnccgggtagactgagaaataaagaagcccttgattttgcccattgcagtcatctctctcgaatctctctctataatccgatctgagaaatttcgccggagctaggttttgttgtttaccgatcaatcctttaatcaatggcaatggctgttttccgtcgcgaagggaggcgtctcctcccttcaatcgccgctcgcccaatcgctgctatccgatctcctctctcttctgaccaggaggaaggacttcttggagttcgatctatctcaactcaagtggtgcgtaaccgcatgaagagtgttaagaacatccaaaagatcacaaaggcaatgaagatggttgctgcttccaagcttagagcagttcaaggccgagctgagaactcccgtggactttggcagccatttactgcacttctaggagataatcccagcattgatgtaaagaagagtgtggtggtcactctctcttctgacaagggtctctgtggtggaatcaactccactgtcgttaaagtgagcagggctctgtacaaattgaatgctggtcctgaaaaggaagttcagtttgttattgtcggagagaaagcaaaggctataatgtttcgtgactcaaagaacgacattgtcctctctgtaacagagctgaataagaacccactcaattatgctcaggtgtcagttctagctgatgacatcctgaagaacgttgaatttgatgctttgcgcattgtctacaacaagttccattcagttgtcgcatttctgccaactgtgtccactgttttgtcacctgagattattgagaaggagtctgaaattggaggaaaacttggcgagcttgactcatatgagattgagggtggggaaacaaagggagaaatattgcagaatctggccgagttccaattctcttgtgtgatgttcaatgcggttctggagaatgcatgtagtgagatgggagcaagaatgtctgccatggacagctcaagcagaaacgcaggagaaatgctcgaccgtctcaccctcacatacaacaggactcgtcaagcttctattacaacagagcttattgagattatctctggagcttctgctcttgaagctgctaaataagcccatccgtgttagttctcttttcttcgctttgatatttacccccaccttgaaggagaagagtgtgttaaaattttactgaatcagtttcctttgctggcttcttgttgagacctaccaatgtttgctcaacgatttttaataaacatacctgtaatttccagcaggatttcgaataattgcattaacattttgttctgaaaaaaaaaaaaaaactccagagtctgtagtgttgttttgtgcaaaaaaaggaaaccattaacgggaaggccatcgttaaaccgggcagcaaac

SEQ ID NO: 118413 - DNA, 766 bp, Arabidopsis thaliana
acgcctgcaggtaccggtccggaattcccgggtcgacccacgcgtccgagaacgttgaatttgatgctttgcgcattgtctacaacaagttccattcagttgtcgcatttctgccaactgtgtccactgttttgtcacctgagattattgagaaggagtctgaaattggaggaaaacttggcgagcttgactcatatgagattgaaggtggggaaacaaagggagaaatattgcagaatctggccgagttccaattctcttgtgtgatgttcaatccggttctggagaatgcatgtagtgagatgggagcaagaatgtctgccatggacagctcaagcagaaacgcaggagaaatgctcgaccgtcttcaccctcacatacaacaggactcgtcaagcttctattacaacagagcttattgagattatctctggagcttctgctcttgaagcttgctaaataagcccaacccgggttagttctcttttcttcgctttgatatttaccccccccttggaggagaagagtgtgtttaaattttactgaatcagtttcctttgctggcttcttgttgagacccaccaatggttgctcaccgatttttaataaacaaacctgtaatttccaccagggttttggtttaaaaaaaaaaaaaaaaaaaaaaaaaaaaaaaaaaaaaaaaaaaaaaaaaaaaaaaaaaaaagggcggccgctctagaggatccaagcttacgtacgcgtgcatgcgacgtcaaagctcttctat

SEQ ID NO: 118414 - DNA, 1126 bp, Arabidopsis thaliana
  unsure (1)..(1126): unsure at all n locations
atgatcctnnnnnnnnnnnnnnnnnnnnnnnnnnnnnnnnnnnnnnnnnnnnnnnnnnnnnnnnnnnnnnnnnnacggacagcagctgagcgacttttgcacatttctagggttccaatcaaaatctatctgcaacaaaaatggctaatcgtttcagatcagggatctccttcttcaagaccatcgccgtaacagattctgtctcctccgttagatccaagtcgcttttcccagcgttgagaacttatgcaactgcttctgctcaaacaaccgctaatgttaaggtgcctattgctttagttggtgaaaatgggaactttgcttcatggctatacattgcagctgtgaaaatgaattccttggaaaagattgagacggatctttctgagatgattgaggcaatgaagacagctcctatttttgctcagtttacaaaggatccctctgttcctagagggacaagattggctgctattagggatgcttgtgatcaagcaaagtttgccgaacccactaagaacttcctctctttgttagctgagaatggaaagctgaagaacctagatgccattgtgaagaaatttatgcagctgacaaacgcacataggggagatgtcaaagttttggttaccacagtcattccgcttccccctgctgaggagaaagaactgactgagacgcttcaggagatcattggagcagggaagaaaatcactgtggaacaaaagattgatccaagtatctacggtggactaatcgtagagttccaacaaaaggtgttggacatgtcaatcaggacaagggcacaacagatggagaggctcctccgtgaacctgttgacttcaacaacctctgaaaatcttgagagaaatttcccccaagaaaacatgcttgtgatgaatgccaccaattgacaaataaatatggaccctcctgggaaacaatataatagctggccacttctctccctttgaattttgtcatttgctttttacatattgttgtttgcttcgaaataaagcttttcgagacatcaaatttcaatgagattgtttttgtttagatttgnnnnnnnnnnnnnnnnnnnnnnnnnnnnnnnnnnnnnnnnnnnnnnnnnnnnnnnnn

SEQ ID NO: 118415 - DNA, 507 bp, Arabidopsis thaliana
agggattgcgtttcccccccgaggaggaagagaatgatttagccgctttcgggggatccttggggcagggaagaaaaatctctgtggaccaaaagattgatccaaggagctccggtgggctaatcgtagaggttccaaccaaaaggtgttggacatgtcaatcaggccaagggcccaacagatggagagggctcctccggggaacctgttgactttcaacaacctctggaaattcttgagagaaatttcccccaagaaaacacccccctgatgcatgccccccattgccaaataaatatggaccctcctgggaaacaatataatagctgggccacttctctccctttgaattttgtcatttgctttttacatattgttgtttgcttcgaaataaagcttttcgagacatcaaatttcaaaaaaaaaaaaaaagggcggccgctctagaggatccaagcttacgtacgcgtgcatgcgacgtcatagtattctatagttgtcctaaat

SEQ ID NO: 118416 - DNA, 1079 bp, Arabidopsis thaliana
  unsure (1)..(1079): unsure at all n locations
atgatactgccnnnnnnnnnnnnnnnnnnaggacgcgtgggcggataatttccccaatttctcagagagactcaaaatcaccaccaccaccaaatcgccgccatgtttaaacaagcttctcgtctcctctcccgatctgtcgccgccgcatcttccaaatcggtgacgactcgtgccttttcaacggaacttccatcgacgctcgattccactttcgtcgaggcatggaagaaagtcgcaccgaatatggacccaccgcagactccttctgctttcatgaaacctcgtccttccactccttcttctatcccgacgaagctcaccgtcaattttgtcctcccttacacatctgagcttaccgggaaagaggtcgacatggtcatcattcccgcatcaacaggacaaatgggtgtcttgcccggacacgttccaacaattgctgagctaaaacctggcatcatgtccgtccatgaaggcactgacgtgaagaaatacttcttgagcagtggttttgcattcctccacgcaaattccgtcgctgacataatcgcggtggaagctgtgccgcttgaccacattgaccctagccaagtccaaaagggtttagctgagttccaacagaaacttgcttctgccacaacagatcttgagaaagcagaggcacagattggtgttgaagttcacagtgccatcaacgcagctctctcgggctaaaagaaggtttctttctttatttcttcgaagaaacaaaaaaaaaactaaatcatttggcttttcaagtgattagtgaagtccctttttactactgcaaaggatggaatattgattcttcttgtttaatcgtgttggacttttgtttgaataaatgattttgtttaacgggcacaaaaacccacaaaagtttcttgtgttcatatctctgcacctttgtttttgtgtatgactttgttgtgttgagaaactaagttggaatttctttaaggtttcgtttactaataaaaaaaaaaaaaaaaagggcggccgctttaaaagaatccaggctaaggaagggggccagnnnnnnnnnnnnnnnnnaatcg

SEQ ID NO: 118417 - DNA, 662 bp, Arabidopsis thaliana
cgcctcactttagggaaagctgctacgcctgcaggtaccggtccggaattcccgggtcgacccacgcgtccgtgcttagaatcggaacggacgaagaaggaagacaaggaagaagatcggagatggcatcgaatgcggcggttccgttctggagagcggcggggatgacatatatatcgtattcaaacatctgtgcgaatatcgtgaggaactgtctcaaggagccacacaaagctgaagctcttactcgcgagaaggttcacttctctctctccaaatgggctgatggaaagccccagaaacctgttttgcggtcagacacacctgaagtttgaagtcaactttgagcttatgttcttaagggattcaaaagtaactgagttaccaagatttgttttctttttattgtcaacaatggagcttgagtgaaaaactcatttccgatcataataatgacacactgagtcttgtgtatctcttttcttcttttgctattctgtttcactttttgtatgcgaacaatgaaaaaaagcctttaaagactcttctggctaaagacaagttcttttgattgttttttaaaaaaaaaaaaacaaaaaagggcggccgctctagaggatccaagcttacgtacgcgtgcatgcgacgtcaaagctctctat

SEQ ID NO: 118418 - DNA, 1178 bp, Arabidopsis thaliana
  unsure (1)..(1178): unsure at all n locations
ccacaaagagtcttttttttttttctcttcgacttagcttatacatagttttattacaagatgtcattgtcagcctcggagaaggaggagaataacaagaaaatggcagcggacaaggctgagatggggaggaagaagagggcaatgtgggaaagaaagtggaagagattggacattgtgaaagcttttgcatctctctttgtccatttcctctgtctcttggcgcctttcaatttcacttggccggctttaagagtcgccctcattgtctatacggtgggtgggctcggtatcaccgtctcttaccaccgaaatttggctcaccggagcttcaaagtccctaaatggctcgagtatttcttcgcttattgcggccttcttgccattcagggagatccgattgattgggtgagcacacatcgataccatcaccagtttacagattcggatagggacccacatagtcctaacgaaggattttggttcagtcacctcctatggctatttgataccggttatcttgtagaaaagtgtggaagaaggacaaatgtggaggacttaaagaggcagtggtactataaattcctccaaagaacagtcctttaccacattctaacatttggtttcctcctctattactttggtggtttgtcttttcttacttggggaatgggtattggggtagcaatggagcatcatgtgacttgcctcataaactctctttgccatgtttggggaagccgaacttggaagactaatgacacttcccgtaacgtttggtggctatcagtattctcgtttggagagagctggcacaacaatcaccacgccttcgaatcctcggcgagacaaggcttagaatggtggcaaatcgacatttcttggtatattgtccgctttctcgagattatcggtttggctactgatgttaagttgccttccgagagtcaacgtcgtcgtatggcaatggttcgttgaagatatggaacgacgtctcgtctcatttaagcattagttaattaatgtctacgtacgttttaagtttttggtaaacgtaacacttgtaatattgtgcgatgcggtgttgttttgtgacttgtggtgtgtgtttgaaccaacttgcttaattaagataacgttcgttttgatatgagcgnnnnnnnnnnnnnnnnnnnnnn

SEQ ID NO: 118419 - DNA, 1259 bp, Arabidopsis thaliana
  unsure (1)..(1259): unsure at all n locations
aaaaaagagagagagaacctaaaaagaagagaagagaaagagagatccgaaatgtcggtgacatcaacggtggaggagaaccaccagaaaaatccatcaacgccggcggcggtggaggagaagaagaagaggagatgggtgttttgggatagaaggtggaggagattagattatgtgaaattctcagcttctttcactgttcattctcttgctctcttggctccgttttatttcacttggtcggctctttgggttacgtttttgttttacaccatcggtggtcttggtatcaccgtctcttatcatcgcaacttggctcaccggagtttcaaagtccctaaatggcttgagtatctcttagcctattgtgcccttctcgctattcagggagatccgattgattgggtgagtacacatcgttaccatcaccagttcacggattcagaacgtgatccacatagtcctaaggaaggtttttggtttagtcatcttctttggatctatgactctgcctatcttgtttcaaagtgtggaagaagagcaaacgtggaggatttgaagaggcaatggttttataggtttcttcagaaaacagtgctatttcacattttaggattgggtttctttctcttctaccttggtggcatgtccttcgttacttggggaatgggggtaggagcagcattggaagtgcacgtgacttgcctcataaattcactctgccatatttggggcactcgaacttggaagaccaatgacacttctcgtaatgtttggtggttatcggtattttcatttggagagagttggcacaacaatcatcatgcgttcgagtcatcggctagacaaggacttgaatggtggcaaatagacatttcgtggtacattgttcggtttttcgaaattatcggtttagcgaccgatgtgaaagtgccaacggaggctcaacgacgtcgtatggctatagttcgttgatggaaattgcgggaagagcatagaaaaagggatctattctatgtaattagaataatttctaatcctaaaagagagttattgttttattttctttattactacttttgaagttttgggttaacgcaaaggacgtttccgatgtgttttggtgttggaccaagttgattaagatatttgtcgtaaaaaaaaaaaaaaaaaaaaaactcgagaacannaaggcgagccgctctagaggatccaagcttacgtacgcgtgcatgcgacgtcatactctcagctcaatc

SEQ ID NO: 118420 - DNA, 1649 bp, Arabidopsis thaliana
  unsure (1)..(1649): unsure at all n locations
gacaaaactagtaccacctaacacaaacgctgtcgttttcaagctacatttatatatctcccaccaactctttctcagatcttttgtctaagtaaaagcgaaaagggcaacaaacaaaaataaactcggagaatctcacaacaatcatggcggctacgacgaactctttccttgtcggaagcaacaacactcagattcctgctttgaaacccaaatcatcatctcaatcctttcttcacctcagcaaaccaaacaccgtcaacttcgtcagcaaaaccaagcccgtcgctgttagatgcgtcgcttcaacgactcaagttcaagatggagttagatccggctccgtcggatcccaagaacgtgtcttcaacttcgcggcgggtccagccactttgcctgagaacgttctcctaaaagctcaggcggatctatacaactggcgtggatctggcatgagtgtgatggagatgagtcacagaggcaaagagtttctctcgattatacaaaaagctgaatcggatcttcgtcagcttctcgagattcctcaggaatattccgttttgttcttacaaggtggtgccactactcaattcgctgctttacctctcaatctctgcaaatcggatgatacagtcgatttcgttgttactggttcgtggggtgataaagctgtcaaggaagcgaagaagtattgcaagactaatgtgatttggtctgggaaatctgagaaatacacaaaggttccatcttttgaggagttggagcaaactccggacgctaagtatttgcatatatgcgccaatgagactattcatggagttgagtttaaagattaccctgttcctaaaaatgggttcttggttgctgatatgtcttctaacttctgttcgaaacctgttgatgtatctaagtttggtgtgatttacggtggtgcacagaagaacgttggtccatctggtgtcacaattgtgatcattcgtaaagatttgattgggaatgctcaagatattactcctgtgatgcttgattacaagattcatgatgagaatagttcgttgtacaacacgcctccttgctttgggatttacatgtgtggtcttgtgtttgaagatctgttggagcaaggtggattgaaagaagtggagaagaagaaccagaggaaagctgatttgctttacaatgctattgaagaaagcaatggctttttcagatgtcctgttgagaaatcagtgaggtcgttgatgaatgtgcctttcacattggagaagtctgaattggaagctgagtttatcaaggaagctgctaaagagaagatggtgcagctcaaaggacatagatcagtgggaggtatgagagcttctatttacaatgcaatgcctttggctggtgttgaaaagcttgttgctttcatgaaagatttccaggctaagcatgcttagttttaagggtttttgcattttggttatgtttgttgaaagatgataagctttaaagatgataagctttaaagcttatgatttgtttttttttcttcttttcagaatgaataatgtttaacaatgtatcaaaatctttctccatcaattggaaaaacaagtttgttaacaaaaaaaaaaannnnnnnnnnnnnnnnnnnnnnnnnnnnnnna

SEQ ID NO: 118421 - DNA, 360 bp, Arabidopsis thaliana
ccaacgcgtccgcggacgcgtgggcggacgcgtgggcggacgcgtgggcgaaaagggcaacaaacaaaaataaactcggcgaatctcacaacaatcatggcggctacgacgaactctttccttgtcggaagcaacaacactcagattcctgctttgaaacccaaatcatcatctcaatcctttcttcacctcagcaaaccatacaccgtcaacttcgtcagcaaaaccaagcccgtcgctgttacatgcgtcgcttcaacgactcaagttcaagatggagttagatccggctccgtcggatcccaagaacgtgtcttcaacttcgcggcgggtccagccactttgcctgagaacgttctc

SEQ ID NO: 118422 - DNA, 1314 bp, Arabidopsis thaliana
accacgcgtcagcccacgcgtccgttcctcagaacaattacatttcgattcgattcgattctcttatcatcttgatctctgtgtgttcatctgtggtggatctccacacgttggatttgagaattttgtcgcaagtaacccgcaacgcgggcatacgcacatctctatctgccgtcactcttccggcgaggaatcaaacgcctgatttctcgagccggtttcactacggaccccacgatttctcgcataagcttgttccagctcagatgtctatgatggattcgtttgcactgcaaaggttcaatttttcttcctctacctcgcctgaatcagatgagaagaagacccacactgaggcctcaaagacaagtgaagagaaacctacagctgaggcaaaccaaccaggtcttgactctgaatctaaagattctgtgacagattctgcaaaaagaaagcggaaaggtgctaaaggagctgcatcttcatcttctgaatcagattctgagagtgatgatgatgaattgtcagccgatgatttggtgaagctcgtagctgagaaggaagagctactgtctgagaaggaagaagagattaagcagttgaaagacaaagttcttcgcacttatgctgagatggagaatgtcatggacagaacaagacgtgatgctgaaaacaccaaaagtatgccgtacagaattttgcaaagagcctattggatgtggcggataatcttggaagagcttcttcggttgtcaaagaaagcttctcaaagcttgaactcagaagattctgctggagcagctccactattaaagacccttttagaaggagtggagatgactgagaaacagcttgctgaggtatttaagaaatttggtatggagaagtatgatcctataaacgagccatttgatccaaacagacataacgcagtgttccaagtccctgatgcttctaagccagaaggcacagttgctcatgtcttgaagtctggatacacgctgtatgaccgagttataagaccagctgaggttggtgttacccagggaggagagaaccaagaagaaaagaaagagtctgatgcttaagaagaagtcagctggttttcataaattttgttacggttctatgtttccattaacatcttctcgagtcttcgagtcatagttttcttttgtggtttggttatcattagatgaacaagatctcccataagttgctggacatggcattttcaggggaaatcctgcttctgtgtctgttttctctatccccattctataattggacgaggaaaatatcattttacatccc

SEQ ID NO: 118423 - DNA, 2259 bp, Arabidopsis thaliana
  unsure (1)..(2259): unsure at all n locations
atttctccaagtcatcaaaattctcgccgtcaaatcaaatcataaatttttgtttctccaatttgttgagaaacatcacattccgtgtttgatcatcggacaatgaaataaacccactcaaaaagacagaatcaaactcctttttgttctctttctcttaaacccattaaccattttcgtatctgctaccaacttcctgtaatttttctcgggaaaaacanaaaaacataaaacccggtactttaagcgattttttcatggcgtttctgatggaggtcgatgaagaagaagagatatgatttagtcgttcttcaaattgagaatcttggggtggttgttttttattggtagtcatgattattaccacacacaaaagagatataaacttgttggtgcttcaattaggagcagctcttgctgtatcttttgctggatttctctttgcccgatttagaaagaatacaaaaagaattggacctactttgcctcctcttccacctcactcttctgataatggatacagagactattccaacaaatccattgatagacgagatgagggcacggagaagacggatgaagagactttaattggtgtttcgccacgaagggaatgtgatcttgatgaaaaagatgtgtttcttttaccggagtttgaagaggaagctaaaaagttagatttgttggtttgtgatgactgtgaaacaccgaggtcagatataactgctcctttagcatttcctagcgaagaggaagctgatcatgagaatgagattaaccggttgagaaacacggtgagagcgctccgtgagagagagaggtgtcttgaggataagttgttagaatactacagccttaaggagcagcaaaagattgcaatggaactgagaagtagattgaagctaaaccagatggagactaaagttttcaattttaagatcaagaagttgcaagcagagaacgaaaaacttaaggctgaatgttttgagcattctaaagttttgttggagctggatatggctaagtctcaggttcaagtgcttaagaagaaactgaacatcaatactcaacaacacgtagcgcagatcttgtcgcttaaacaacgagtggcgaggctgcaagaagaagaaatcaagcctgtgttacctgatcttgaagctgataagatgatgcagaggttaagggatttggaaagtgagatcaacgagcttacggatactaacacgagattacagtttgagaattttgagctttctgagaagctggagtctgttcaaatcatagcaaattcaaaactggaggaaccagaggagattgagacattacgcgaagattgtaaccgattgaggagtgaaaatgaagagttaaagaaggatgtcgagcagcttcaaggggatcgatgtactgacctcgagcagctcgtttatctcagatggataaatgcttgcttaagatatgagctaaggacttaccagcctcctgctggtaaaactgttgctagggatcttagtactactctaagtcctacttcagaggagaaagcaaagcaactgatcctcgaatacgcacatagcgaagataacactgattatgatcgatggtcatcttcgcaggaagagtcatcaatgatcactgactcaatgtttttagatgattcttctgttgacactttgtttgcaactaaaaccctaaagacaggaaagaagaagctgatgcataagttaatgaagatcttacatggtaaagatactaaagacagcaagaagagagctggttcatcggaaccgagcagctcaaacactggtgttcattcaactcctaggcagcttagatcaacacattcaatggacttccaaatgttgatgcgtggcaaagacgaggaagaagacttcaagaatcacattgtgatgctgcgtcgtaagagtgaagcagcaggttcttccacttatggagaagaacactgtttggaaacagatcaaaacgggaagaaagagctgattaaattagcagatgcgcttacgaaatctcgttctacaaagaaactgcataagaaatctgtgtccttctttttctgaaagtaagtagaaacactaacttacttgttactgtaacacgcatcgcctaaagctacatgtatgtgtatatagatatagcttaaagtttgtaaatttgtgaacccaaacataagaaaagagtggagagaatctgatatgaagcttgagagaaatgagtaacgcttggtgaggagcattgaaactt

SEQ ID NO: 118424 - DNA, 1032 bp, Arabidopsis thaliana
cacgttctcctcgcagattcagatatcttcccctcggaatctaggccttaaaagaaggaagagtcaggcaaagaaggtggtgtgccggccccggctgcaatgaacagccgatcaagcggagaagtggttccatcggatctatgggcttggcgtaaatacggtcaaaaacctatcaaaggctctccttttccaaggggttattatagatgcagcagctcaaaaggttgttcagcaagaaagcaagtcgaaagaagccgaaccgatccaaacatgttggtgattacatatacctccgaacataaccatccttggcccatccaacgcaacgctctcgccggttccacacgctcctccacctcctcctcatctaaccctaatccttccaaaccctcaaccgcaaacgtaaactcctcatccaatgggctcccaaaacaacatcttacttgggcttcctccaccactcctcctcctcctcctcctaccctctcatcctccgccatcaaagatgaacgaggggacgatatggagttggaaaacgtagatgatgatgatgataaccagattgctccatacagaccggagcttcatgatcatcagcaccaaccagatgatttctttgcagatcttgaagagctagaaggagattctctaagcatgttgctttctcatgctgtgacggcgacgggaaggataaaacgaccgcgtccgatgggatcagcaatttcttcgggtggtcgggagataataattataataattacgacgaccaagactcaaggtcgttatagtatagtgttaattacaggtaaacaaattatattaaattaagttgagcttgtgaaaatgaagatcatatggtctggtcaggttgggggtaatgactaatgagctggtacatgacagaccgtaaacagtatttatcgtcatttgttatacatttgttttttttcggaagatccgtctgtagttaaaaaaaaaaaaacggcattttttctatgcgttgttataattcctctaaagttcttttaagag

SEQ ID NO: 118425 - DNA, 1850 bp, Arabidopsis thaliana
  unsure (1)..(1850): unsure at all n locations
aaaccacgcgtccgcttttcttatatctgctttccaaaacagagaaaccccaagaaaagaaaaagaaaagatccgggatgggaaagaagcaggaggagactttttggaatggagagacaaaagagcatggaaaaagggttactcaggaagagcttaagcatacgtgagagaaagttccctaacgaagacgctttcttagaatccggtttatcgaggaagtctccgcgagaggtcaagaaacctcaaaacgacgatggtgaatgtcgtgttaccgcctctgttttcctcagcacctttgttgccgtatcaggctccttctgtaccggttgtggcgttggtttttcatcgggtgcacaagcagggattaccaaagatttatctctctccgttgcagaatactcaatgttcgggtcgatcttgacattaggaggcttgatcggtgcagtattcagcggtaaagtcgctgatgtcttgggaagaaaacggacgatgttgttttgcgaattcttctgtatcacaggctggctttgtgtagcattggctcagaatgcaatgtggctggactgtggaagattgttacttggaatcggcgttggtatatttagctacgtgattccggtgtatatagccgaaattgcacctaaacatgtccgaggatcgtttgtgttcgccaatcagttgatgcaaaattgcggaatttcactcttcttcatcattggcaattttattccatggagactactaacagtagtcggattggtgccatgtgtgttccacgtcttttgtttatttttcatccccgaatctccaagatggctggcgaagttaggtcgtgataaagaatgccgatcttcgttgcaacgccttaggggatctgacgtcgatatttctcgtgaagcaaacacaattcgagataccattgacatgacagaaaacggtggtgaaactaagatgtctgaattgtttcagagacgatacgcatatccgttaattatcggagttggtttaatgtttttgcaacaattgtgtgggagctccggtgttacctattatgctagtagcctcttcaacaaaggaggatttccaagtgctattggcacatccgtaatagccacaattatggttccaaaagcaatgctggcaacagtcctagtcgataaaatggggaggagaacgctcctaatggcttcttgttctgcaatgggtttgagtgctttgctcttaagtgtttcttacggtttccagtcgtttggcattcttccagaactcactcccatcttcacttgcatcggcgtcttgggtcacattgtgtcatttgccatgggaatgggaggactaccatggattataatggctgagatatttccgatgaatgtgaaagtgtcagctgggaccttagttactgtaaccaattggttatttggttggattatcacatacactttcaattttatgctagaatggaatgcatcaggaatgttcctcatcttctcaatggtctccgccagttcgatcgtatttatatactttttggtacctgagacaaaaggccgatcacttgaagaaatacaagcactgctcaacaactctgtgcaataatatcatttttctttttctttttgggtaaatgatcatatatataagtcgattgttgttatttggtgtgagtttgaatgtgatccgtgtgcgtatcaaattttggatgggaaatttgaaacagtaaaaatttgtatattcctcgtttgggaaaaatgtatgttttggttagttatatgcaaaaatgttgttgaagaagtttatacataaaaagttaaatacaaaaaagggtggattggaaacccnataaaant

SEQ ID NO: 118426 - DNA, 2088 bp, Arabidopsis thaliana
cttccaaccgccaaagaaaaaaatcaaaaactccaacaaaaaaaaactcccaaaccctacccgagcagtcgccagatgggcacggaggactacacattccctcaaggagcggaggagcttcaccgccgccaccacacggtggaggctccacaacctcaaccgttcttgaagtcacttcagtactcagtgaaggaaactctgtttccagacgacccttttagacaatttaagaaccaaaatgcatcaagaaaatttgtgttaggcctcaaatacttcctcccgattttcgaatgggcaccacgctacaatctcaagttcttcaaatcagatctcatcgccggaatcaccatcgctagtctcgccatccctcagggcatcagttacgccaaacttgctaacttgcccccaattcttggcctttattcgagttttgtaccgccattggtatacgcggtgctagggagttcaagggacttagcggtgggaacggttgcggttgcgtctctgttgacaggtgcgatgctgagcaaagaagttgatgctgagaaagatcctaagctttaccttcaccttgctttcaccgccacttttttcgccggcgttctcgaagcctctcttggaattttcaggttagggttcatagtggactttctatcgcatgcaacgatagtaggattcatgggaggagcagcgacggtggtgagtctgcaacagcttaagggtattttcggacttaaacatttcacagactctaccgatgttatctctgtcatgcgttccgttttctcccaaactcacgagtggagatgggaaagtggcgttcttggatgtggttttctattctttcttctctccaccagatatttcagcatcaagaaaccaaaattcttttgggtggcggcgatggctcctttgacctcagtgattcttggaagtctcttggtttacttcactcacgctgagagacatggtgttcaagtgataggggacctgaagaaagggttgaatccactctccggttctgatctcatctttacttccccttacatgtccacagctgtcaaaactggcctcatcactggcatcattgctctcgctgaaggaatagcagtggggaggagttttgcgatgttcaagaactacaacatagacgggaacaaagagatgatagcgtttggaatgatgaacatcgttggttccttcacatcttgttacctcacaaccggaccattttcaaggtcggcagtgaactacaacgcgggttgcaagaccgcaatgtccaacatagtgatggcgattgcggttatgttcacactcctcttcctcacaccgctttttcactacacaccactcgtcgtcctctctgccatcatcatatccgcaatgctcggactcattgactatcaagctgccatccatctctggaaagttgacaagttcgacttcctcgtctgcatgagcgcctacgttggggtcgtattcggcagtgtagagattggactcgtcgtagcggtggcgatatctatagcgaggttgttgctgtttgtgtcgaggccaaaaactgcggtgaagggaaacataccaaacagcatgatctataggaacactgagcagtacccatcatcaagaaccgttcctggtattctcatcttggagattgatgctcccatctactttgctaatgccagttacttgcgtgaaagaatcataaggtggattgatgaagaggaagagagagttaaacaatcaggagagagcagcttacaatatattatactcgatatgtcagctgttggtaatatcgacacaagcggtattagcatgatggtggaaattaagaaagtcattgacaggagagcgttaaagttggtattgtcaaatccaaaaggagaggtcgtgaagaaattaaccagatccaaattcatcggtgatcatttgggcaaagagtggatgttcttaacggtaggagaagcagtggaggcttgtagctacatgcttcacacgtttaaaaccgaaccggcctccaaaaacgagccttggaacaacgtatagttcctttattttttgctgtcgttctgtgactactcg

SEQ ID NO: 118427 - DNA, 1144 bp, Arabidopsis thaliana
cacatttcttttccttattttaatcaaaacatttgtttgcatcattcacaggcaaataaaaagcctccctttttcttagattgctactacgtataaagtagagagtgcacatagatgtaattatcaaacgaggaagcatcattatcattatcattatcatcattactgcttcatagattcatattattgcttatctaaaagtttgcttttgtagtagttggtggtcaagtaggatttgatttgatcttctagaattacagatcgagaaacagcaaatctgaggttttagaaaatgggatcttcttctgggcaaagtggatacgatctgtcttttaagatcttgttgattggtgattctggtgttggtaaaagcagtttgcttgtcagcttcatttctagctccgttgaagatcttgctcctactattggtgttgatttcaagatcaaacaattgacagtaggaggcaaaaggctaaaactcacaatctgggacacagctggacaggaacggtttagaacactgacaagctcttactacagaggcgcccaaggaatcattctcgtttatgatgtgacgagaagggagacatttacaaacttagtagatgtgtggggtaaggagattgagctttactccacaaaccaagaatgtgtaaggatgctcgttgggaacaaagtcgatagagaatctgagagaggagtaagcagagaagaagggattgctctagcaaaagaactcaactgcatgtttcttgagtgtagtgctagaactcgacaaaacgtggaacagtgtttcgaagagttggctttgaagataatggaggtacctagtctcttggaagaaggatcaagtgctgtgaagagaaacatcttgaagcagaaaccagaacaccagactaatactcaatccggctgttgcagctagtgaccctagtcgatgttgcatataaaatactcgaatctttatcttgtgtattgcaaactgaacctgattcttctctctgtggttgcctcttttgtgtgtagaacataatgtagcttcaatgtaaatttgtgggattacttgtattcttcttttgcttctgaaatgagatttgtgataataacatcatataatagaataaaccccatcaagtgttttctt

SEQ ID NO: 118428 - DNA, 3229 bp, Arabidopsis thaliana
ctattcgtttagagaacacttaaacaaacgcaggaggcctggaaaaaagaaagataacgggactcgagagattgagattacggagccacccactttcatggagtctacactctcagctttctcaaccgtcaaggcaacagcgatggctcgaagtagtggtggtccttcattacctctcctcactatttctaaagcacttaaccgccactttaccggcgccagacacctccatcctttattgctcgctcgctgttctccctccgtgcgacgtcttggtgggtttcatggcagtcgatttacttcgtcgaattcagctttgagaagcttgggagctgctgttttgccggtaatccgacaccgtttagagtgtttgtcgagctcatcgccgtctttcaggagtatctcaagtggcggcggttctggatttggggggtataatggtggaagcggcggtggtggtggcggaggatcggagagtggtgattccaagtcaaaactgggtgctaatgcaagtgatggtgtctctgttccgtcgtcagatatcattattctcgatgttggagggatgacatgtggagggtgttcagcaagtgtgaagaagatactggaaagccaacctcaagttgcttcagctagtgttaatctcaccaccgagacggcaattgtgtggcctgtaccggaagctaaaagtgtacctgattggcaaaagagtttaggcgagacgcttgcaaaccatctgtccaattgcgggtttcagtctactcctcgagatttggtgacagagaatttcttcaaagttttcgaaacacagccaaaagacaagcaggctcgcttaaaagagagtggccgcgagcttgctgtttcatgggccccatgtgctgtatgcttggttggccatttaactcactttctaggggttaatgctccctggattcatgcgatccattcaacggggtttcatgtgtctttatgtttgattacgttgcttggtcctggacgcaagctagtacttgatggtatcaagagtcttttaaaaggttccccaaacatgaacacgctagttggtcttggtgctttgtcatcattttctgttagctcactggcagccatgattccaaaattgggctggaagacattttttgaggaaccagttatgttaatagcttttgtattgctgggaaggaatcttgaacagagagctaaaataaaagccaccagtgatatgactgggctgctgagtgttttggcttcaaaagctcgccttctgcttgatggtgatctgcagaattcaactgttgaggttccttgtaatagtctctctgttggtgatctagtcgtcatactaccaggagatcgagttccagcagatggtgtggtcaagtcaggtagaagcaccattgatgagtcaagtttcacaggtgaaccattgccagtgacaaaagagtcagggagtcaagtcgcagcaggatctataaacctgaacggaactcttactgtcgaagtgcatagatcagggggtgaaactgcagttggggacattattcgtctggttgaagaggctcagagtagagaagcaccagtacagcagttggttgacaaggtcgcagggcgcttcacgtatggagtgatggcactctctgcagctacatttacattctggaatctatttggtgcacatgttcttccttctgccttgcataatgggagcccaatgtctttggcccttcaactatcttgcagcgttctggttgtggcttgtccttgcgcccttgggttggctactccaacggcaatgctggttggtacatcattaggagcaagaagaggattacttcttcgtggtggtgatattcttgaaaagttttccttggttgatactgttgtcttcgacaaaactgggacactgacgaagggacaccctgttgtgactgaagttattattcctgaaaatccaagacacaatttgaatgatacttggtcagaagtagaggttttgatgttagcagctgctgttgagtcaaacactactcaccctgttgggaaagcgattgtaaaagcagcccgggctcgtaattgtcaaacaatgaaggcagaggatggaacatttactgaagaaccagggtctggtgctgttgctattgtcaacaacaaaagggttacagttgggactctagaatgggtcaagagacatggagccaccgggaactcattgcttgcattagaagagcatgaaattaacaaccagtctgttgtgtatattggggtggataatacacttgctgcagtcatccgttttgaagataaagtcagggaggatgctgctcaagttgttgagaatttgactcgccagggaattgatgtgtacatgctgtctggtgacaagaggaatgctgccaattatgtagcttctgtcgtaggaattaatcatgaacgggttatagcaggagttaaaccagctgagaaaaagaattttatcaatgaacttcaaaaaaataagaagattgttgcaatggtgggggatggaataaacgatgctgctgctctggcatcatctaatgttggagtggccatgggtggtggtgcaggagcggccagtgaggtgtctcctgttgtcttgatgggcaatcggttaacacagttgcttgatgcgatggagctaagtcggcaaaccatgaagaccgtgaagcaaaacctttggtgggcgttcggatacaacattgtaggaatcccaattgcggctggagtgttgctaccattgactggaaccatgttgactccatcaatggcgggggctctcatgggtgtaacctctctcggtgtcatgactaattccttacttctaaggtacagattcttctcgaaccgaaacgacaaaaatgtcaaaccggaaccaaaagagggaacaaaacagccacatgagaacacaagatggaagcaaagctcttagacggggaatttccacttcactgaggcactatatcatgatttttgcagagataaatctctttttagttttttacttttcattcttaacgataatttcggctcttggtcttgagagggtttgttaggacttagggtattgataatttggagaatcatctcaacgtgatttttcaaacaattgctttgagcttgtaacacagccacagtaacacatgtccaaactctgcattggctttggcatttgatactctgaaatttgattttgtgtataattatagtgaac

SEQ ID NO: 118429 - DNA, 1930 bp, Arabidopsis thaliana
  unsure (1)..(1930): unsure at all n locations
tgtgagtaatttaggaaataagatcggtggcaattaataattatgcgcaagcgaagacgtttcgtgataactgtgaacattagaggttaagtgacgacaagtgatcgagagagacagagagagccaaaaggggaaactacaaaaatggcgaaaccggaagaagtatcagtcccgatcttcacatctcttgagcctgtctacggcgaaggatctctgctccaagaagctacacaacgattcgatgttttgaaggccaatttcaacgatgtcttcggtgcttctccccaactcttcgctcgctctcctggaagagtgaatctgataggagagcacattgactatgaaggatactcagtgttgccgatggctattcgtcaggatacaattatagcgattcggaaatgtgaggatcaaaagcagcttcggattgcaaatgttaatgataagtacactatgtgtacatatcctgccgatcctgaccaggaaattgacttgaagaatcacaaatgggggcattacttcatatgcgcgtacaaaggatttcatgagtatgcaaagtcaaaaggtgtgaatcttggttcaccagttggacttgatgtgcttgttgatggaattgttcctacaggttctgggttgtcaagttctgctgcatttgtttgctcagcaacaattgctattatggctgtctttggtcataactttgagaagaaagaacttgcacagcttacatgtgaatgtgaaagacacattggaacacaatctggtgggatggaccaggcaatctctataatggctaaaactggatttgctgagcttattgacttcaacccagtccgcgcaactgatgtgaaactccctgatggagggagttttgtaattgcacattctcttgcagagtcgcagaaggcggtcacggctgctaagaattacaataacagggtcgttgaatgtcgacttgcttcggatcaatacttggtgttaagctcggaatggaaccaaaagaagcaatatcaaaagttaagactctttctgatgtggagggattatgtgtgtcattcgctggtgatcgtgggtcatctgatcctcttcttgctgttaaggaatatctgaaagaagaaccatacacggctgaggagattgagaaaatcctagaggagaaattaccatcaatcgtgaacaatgatccaacatctttggctgtactcaatgctgccacgcatttcaaattgcatcagagagctgcacacgtttattccgaagcccggagggttcatggtttcaaggacacagttaattcaaacttaagtgacgaagagaagttaaagaaacttggtgatctcatgaatgaaagccattacagctgcagtgtcctatacgagtgcagttgccccgagctagaagaacttgttcaagtttgcaaggagaatggagcacttggagcaagactgaccggagctggatggggcggttgcgctgtggccttggtcaaggaatttgacgttactcaattcattccagcagtcaaggagaagtactacaaaaagagagtagagaaaggagtggtaaaaaaagaagatatggagctttacctctttgcctccaagccttcaagtggtgctgccatcttcaacctctaaacacatctctctccctccttattaattttactcaaatccgaattgtttgcagcaattgtgcccattgaattcccagcttcatttttaataaatatttttggattaatatgtaggagttgacgacaataataaattgaagtttcattcccaactttttcttcattttttcagagttttaaactntnactancccaagnactcantttcaattttaatgtaaatcttaaatctcnnnnnnnnnnnnnnnnnnnnnnnnnnnnnnnnnnnnnnnnnnnnnnnnnnnnnnnnnnnnn

SEQ ID NO: 118430 - DNA, 1045 bp, Arabidopsis thaliana
  unsure (1)..(1045): unsure at all n locations
gttttttttttttaaaagatttagagagaaaagtgagttattaagagattccaatcaaaatgagcggagacaacggcggtggtgagaggcgcaaaggctccgtcaagtggtttgatacccagaagggtttcggcttcatcactcctgacgacggtggcgacgatctcttcgttcaccagtcctccatcagatctgagggtttccgtagcctcgctgccgaagaagccgtagagttcgaggttgagatcgacaacaacaaccgtcccaaggccatcgatgtttctggacccgacggcgctcccgtccaaggaaacagcggtggtggttcatctggcggacgcggcggtttcggtggaggaagaggaggtggacgcggatctggaggtggatacggcggtggcggtggtggatacggaggaagaggaggtggtggtcgaggaggcagcgactgctacaagtgtggtgagcccggtcacatggcgagagactgttctgaaggcggtggaggttacggaggaggcggcggtggctacggaggtggaggcggatacggcggaggaggtggtggttacggaggtggtggccgtggaggtggtggcggcgggggaagctgctacagctgtggcgagtcgggacatttcgccagggattgcaccagcggtggacgttaaaaccaacgccggttacgcggtggagaagagtgagttggttatctcacaagtgatcggttctttctcccgccgccttctatctctctattatccactttttgcttattatgatggatctctatctttgttagttggttttttcttgatggtttcggattaggactcttcttttggttttgctacttatggttggttttatttatggtacttgtgatatgggtgaaatgctctacttgttgctctgtttcaagtgttcataatatgcgaacaaatattctgggttttgtttcaaaaaaaactgtgtgttggccgtatctgatagggatacttnnnnnnnnnnnnnnnnnnnnnnnnnnnnnnnnnnnnnnnnnnnn

SEQ ID NO: 118431 - DNA, 488 bp, Arabidopsis thaliana
  unsure (1)..(488): unsure at all n locations
ttctccgccgcccttctatctctctattatccacttttggcttataataaggatcctcaatctttgtaagtgggttttttcttgatggtttcgaattagaactcttctttgggttttgctacttatggtgggttttatttatggtccttgtgatatgggtaaaatgctctccttgttgctttgtttcaagtgttcataatatccgaccaaatattctgggttttgtttcagtcttctgaatgattcgtaagatctggatacttaattcttgagagatctccgttttatggttgaattatttatggattatgtaccgattcccatagatccaaaatctatctgctcatgtttggcatttaatggcatttaagttccatggactggaaggaattgaatcctaaaaaaaaaaaaaaaaaggccgtnnnnnnnnnnnnnnnnnnnnnnnnnnnnnnnnnnnnnnnnnnnnnnnnnnnnnnnnnnnnnnnnnn

SEQ ID NO: 118432 - DNA, 807 bp, Arabidopsis thaliana
aagaagaagttttttagagggcatttttaaaaacccaaaaaaaaaaaatgggctttcccaaagccctttggggttccggtttgggggtctccccccactggttcttcctcggtcgtttcaagaagtaagccccgggccttctttttcccccagtgaattcagagagtaagccccctttataacctgatcaacgtggctccggtgtcaatgcaggaaattacaataacggaggaggttaccagggaggagggggtaattaccaaggaggaggaggtaatttccaaggagcaggaggtaattaccaaggaggaggaggaatataccaagcaggagcaggccggtaccaaggagcaggaggtccataccaaggagccggtgggcttcaaggaggagggggaagtgggggaagttactgccgccacggctgctgctacagaggttacaacggctgctcaagatgctgctcgtatgccggagaagctgttcagactcagcccggtcactaaaacaatatattaaccaatcaccaccatgcatgtattgcattatgtatgtatgattttaagtaaaccatggtgcgtttgtaatgaactgcctcaagtttttgaggcactatagattaagaagagaactatgggaataaagtttgattatgtaatgttttatgtggtttgagttgtaatacttgctgtttgcataataaaatcgtttgtagtttaaaaaaccaccccccaagggcggccgctctacaggatccaagctcacgatgcgggcgcgtgcgtcatagctcgtaccagagtgtaaagg

SEQ ID NO: 118433 - DNA, 875 bp, Arabidopsis thaliana
  unsure (1)..(875): unsure at all n locations
gaagacgacagaaggggatgcatcacttgtttctccataataagagagttttaagcatttgaaacaaaaaaaatggcttccaaggctttggttctgttgggtctctttgctgttcttctcgtcgtctcagaagtagccgcggcatcttctgccacagtgaattcagagagtaaggaaactgtgaaacctgatcaacgtggctacggtgacaatggaggaaattacaataacggaggaggttaccagggaggagggggtaattaccaaggaggaggaggtaattaccaaggaggaggaggtaattaccaaggaggaggaggaagataccaaggaggaggaggacggtaccaaggaggaggaggacgataccaaggaggcggtgggcggtaccaaggaggaggaggacgataccaaggaggcggtgggcgacaaggaggagggggaagtgggggaagttactgccgccacggctgctgctacagaggttacaacggctgctcaagatgctgctcgtatgccggagaagctgttcagactcagcccggtcactaaaacaatatattaaccaatcaccaccatgcatgtattgcattatgtatgtatgattttaagtaaaccatggtgcgtttgtaatgaactgcctcaagtttttgaggcactatagattaagaagagaactatgggaataaagtttgattatgtaatgttttatgtggtttgagttgtaatacttgctgtttgcataataaaatcgtttgtagtttaaaaaaaaaaaaaacacaacaccgaaagannnnnnnnnnnnnnntaagagattcnnnnnnnnnnnnnnnnnnnnnnnnnnnnnnnnnnnnnnnnnnnnnnnnnnnnnnnnn

SEQ ID NO: 118434 - DNA, 474 bp, Arabidopsis thaliana
tccgccataataagagagttttaagcatttgaaacaaaaaaaatggctttccaaggctttggttctgttgggtctctttcctgttcttctcgtcgtctcagaagtagccgcggcacattcttctgccacagtgaattcagagagtaaggaaactgtgaaacctgatcaacgtggctacggtgacaatggaggaaattacaataacggaggaggttaccagggaggagggggtaattaccaaggaggaggaggtaattaccaaggaggaggaggtaattaccaaggaggaggaggacgataccaaggaggcggtgggcgacaaggaggagggggaagtgggggaaagttactgccgccacggctgctgctacagaggtttacaacggctgctccaagatgctgctcgtatgccggagaagctgttcagactcagcccggtcactaaaacaattttttaaccaatcaccaccatgc

SEQ ID NO: 118435 - DNA, 461 bp, Arabidopsis thaliana
  unsure (1)..(461): unsure at all n locations
cgactcactatanggaaagctggcacgcctgcaggtaccggtccgggattcccgggtccgcccacgcgtccccccacgcgtccggagagttttaagcctttgaaacaaaaaaaatggcttccaaggctttggttccggtgggtctctttgctggtcttctcgtcgtctcagaagtagccgcggcatcttctgccacagtgaattcagagagttaggtttcttgtgaaccctgatcaacgtggctaccgtgacaatggaggaaattacaattaccgaggagggtacccagggaggagggggttattacccaggaggaggaggttattaccaaccaatgaggaggaggtaatttccaaggaggaggaggaagatccaaggaggaggaagaaccgtcccaaggagagggagacgattcccaagaagccgtgggcgaccaggaagaaggggaagtgggggaaatt

SEQ ID NO: 118436 - DNA, 447 bp, Arabidopsis thaliana
  unsure (1)..(447): unsure at all n locations
ataataagagagttttaagcatttgaaacaaaaaaaatggcttccaaggctttggttctgttgggtctctttgctgttcttctcgtcgtctcagaagtagccgcggcatcttctgccacagtgaattcagagagtaaggaaactgtgaaacctgatcaacgtggctacggtgacaatggaggaaattacaataacggaggaggttaccagggaggagggggtaattaccaaggaggaggaggtaattaccaaggaggaggaggtaattaccaaggaggaggaggaagataccaaggaggaggaggacggtaccaaggaggaggaggacgataccaaggaggcggtgggcgacaaggaggagggggaagtgggggaaagttacttgccgccacggctgcttctacataaaaggggttacaacggcttctncaanatcntnctcgtatt

SEQ ID NO: 118437 - DNA, 1724 bp, Arabidopsis thaliana
  unsure (1)..(1724): unsure at all n locations
aagatttttccctttttatatattaaaaataaagattcttaaggctcttcatattttgctttttgtcaactctttctttgccatctgttacaaacaccaaactctcctgattcatcagttttaagtcttcttcaagtcccagggatcatcaatccaatggctcagatcttagcagcttctccaacatgtcagatgagagtgcctaaacactcatcagtcattgcatcatcatccaagttatggagctctgttgtgttgaaacagaagaagcagagcaacaacaaagtcagaggctttagagttcttgctctccaatctgataacagtactgtcaatagagttgagactcttctcaatttagacaccaaaccttactctgacaggatcattgctgaatacatttggatcggaggatctggaattgaccttagaagcaagtcaaggactatcgaaaagccggtggaggatccttctgagctacctaagtggaactatgatggttcgagtaccggtcaagcacctggtgaagatagtgaagtgattctatacccgcaagctatcttcagagatcctttccgtggaggcaataacatcttggttatctgtgatacttggacaccagctggtgagccaattccaacaaacaaacgtgctaaagctgctgagatcttcagtaacaagaaggtctctggcgaggttccatggttcggcattgaacaagagtacactttacttcagcaaaacgtcaaatggcctttaggttggcctgttggagcgttccctggtcctcagggtccttactactgtggagttggagctgacaagatttgggggcgtgacatttcagatgctcattacaaagcttgtttatatgctggaattaacattagtggtactaatggtgaagttatgcctggacagtgggagttccaagttggcccgagcgtaggaattgatgcaggtgatcatgtttggtgtgctagataccttcttgagagaatcacagaacaagctggtgttgtcctaacacttgatcccaaaccgatagagggtgactggaacggtgctggttgccacaccaattacagtaccaagagcatgagagaggaaggaggatttgaagtgatcaagaaggctatcttgaacctctcgcttcgccacaaggagcacatcagtgcctacggtgaaggaaacgagagaaggttgaccggaaagcacgagacagctagtattgaccagttctcatggggcgtggctaaccgtggatgctctattcgtgtgggacgtgacaccgaggcgaaaggaaaaggttacttagaagatcgccgtccagcatctaacatggacccatacattgtgacctcacttttggcagagaccacactcctgtgggagccaactcttgaggctgaagcccttgcagctcaaaagctttctttgaatgtttaaaattagtcgaaactttcatgaatctgatgaacacacgtgtctatgtggtctctcaagttgtttaaacattcggattaagacattgtttgttgtcttttcatttgcatttttaaaactcagaattgtatggacaatgttcatccttttatattggttcttttgactgttagagcatgtccaaacgaaaaaaaaannaagggcggccgctctagaggatccaagcttacgtacgcgtgcatgcgacgtcaagctcttctatnnnnnnnnnnnnnnnn

SEQ ID NO: 118438 - DNA, 896 bp, Arabidopsis thaliana
  unsure (1)..(896): unsure at all n locations
cggaanngtaccggtccggaattcccgggtcgacccacgcgtccgctctttctttgccatctgttacaaacaccaaactcttctgattcatcagttttaagtcttcttcaagtcccagggatcatcaatccaatggctcagatcttagcagcttctccaacatgtcagatgagagtgcctaaacactcatcagtcattgcatcatcatccaagttatggagctctgttgtgttgaaacagaagaagcagagcaacaacaaagtcagaggctttagagttcttgctctccaatctgataacagtactgtcaatagagttgagactcttctcaatttagacaccaaaccttactctgacaggatcattgctgaatacatttggatcggaggatctggaattgaccttagaagcaagtcaaggactatcgaaaagccggtggaggatccttctgagctacctaagtggaactatgatggctcgagtaccggtcaagcacctggtgaagatagtgaagtgattctatacccgcaagctatcttcagagatcctttccgcggaggcaataacatcttggttatctgtgatacttggacaccagctggtgagcccatttcaacaaacaaacgtgcttaagctgctgagatcttaaaaaccaagaaggttcttggccgagggttccatggttccggcattggaacaagaagtacccctttttcttttcagccaaaaaccgtccaaatgggccccttttaagggtgggccctggttgggaacccgtctcccctgtggtcctctcgaggggcccctttacctaccgtgggggaagtgtggggcacctatcccaaaaattttgggggggccggggaccatttttccacaaaggcctctatttccca

SEQ ID NO: 118439 - DNA, 662 bp, Arabidopsis thaliana
  unsure (1)..(662): unsure at all n locations
cggaancccgggccgttcttgcttccgagcaagtcagggactatcgaaagctttttttgttccttctgagctacctaaggggaactatgatggtttgagtaccggtcaagcacctggtgaagatagtgaagtgattctatacccgtcaggctatcttcagagatcctttccgtggaggcaataacatcttggttatcggtgggacttggacaccagctggtgagccatttccaacaaacaaacgtgctaaagctgctgagatcttcagtaacaagaaggtcccttggcgaggttccatggttcggcattgaacatgagtacactttacttcagcaaaacggtcaaatggcctttaggttggcctgttggagcgtcccctggtcctcagggtccttactactgtggagttggagctgacatgatttgggggccgtgacatttcagatgctcatttacaaagcttgtttatatgctggaattaacattagtggtactaatggtgaagttattncctnggcagtggggagttccaagttggncccagcgttgggatttnatcaaggtnnccangtttgggnggctaagaaccctntttggggggtcnaggacaaactgggtntccnaaacttgnnccaaaccgangngggnccttgacggtnttc

SEQ ID NO: 118440 - DNA, 587 bp, Arabidopsis thaliana
  unsure (1)..(587): unsure at all n locations
ctagcattcttgatctgttgttcttgtcacttgttttgttttctgggatcatcaatccaatggctcagatcttagcagcttctccaacatgtcagatgagagtgcctaaacactcatcagtcattgcatcatcatccaagttatggagctctgttgtgttgaaacagaagaagcagagcaacaacaaagtcagaggctttagagttcttgctctccaatcggataacagtactgtcaatagagttgagactcttctcaatttagacaccaaaccttactctgacaggatcattgctgaatacatttggatcggaggatctggaattgaccttagaagcaagtcaaggactatcgaaaagccggtggagggtccttctgagctacctaagtgggactatgatgggttcgagtaccggtcaagcanctggtgnagatagtggaagtggntctatacccggcaagctatcttccggggtcctttccggggnggcataaaatcttggntatcggggaacttngncaccactgggggccattccacaacaaangntaaagtgngngtttcgaanaaaggnnggnngnccttt

SEQ ID NO: 118441 - DNA, 852 bp, Arabidopsis thaliana
  unsure (1)..(852): unsure at all n locations
atgatcctnnnnnnnnnnnnnnnnnnnnnnnnnnnnnnnnnnnnnnnnnnnnnnnnnnnnnnnnnnnnnnnnnnnnnnnnnnnccacgcgtccgtacggctgcgagaagacgacagaaggggggcgtgacatttcagatgctcattacaaagcttgtttatatgctggaattaacattagtggtactaatggcgaagttatgcctggacagtgggagttccaagttggcccgagcgtaggaattgatgcaggtgattatgtttggtgtgctagataccttcttgagagaatcacagaacaagctggtgttgtcctaacacttgaacctctcgcttcgccacaaggagcacatcagtgcctacggtgaaggaaacgagagaaggttgaccggaaagcacgagacagctagtattgaccagttctcatggggcgtggctaaccgtggatgctctattcgtgtgggacgtgacaccgaggcgaaaggaaaaggttacttagaagatcgccgtccagcatctaacatggacccatacattgtgacctcacttttggcagagaccacactcctgtgggagccaactcttgaggctgaagcccttgcagctcaaaagctttctttgaatgtttaaaattagtcgaaactttcatgaatctnatgaacacacgtgtctatgtggtctctcaagttgtttaaacattcggattaagacattgtttgtngtctttncatttgcatttttaaaactcagaatttgtatgggcaatgttcatcctttttaaaaaaaaaaaaaatgggncggcccgttcttagnnggntnccaagttttcggacnggggnaantncggcggnaa

SEQ ID NO: 118442 - DNA, 1711 bp, Arabidopsis thaliana
cccctgcgaaattatcctcctccgccgtcgcataaccggcgcacattagtgaaatcggaaaaatccgtctctcctccttcgtaatggcgtcgacagtctcagttcaaccgggtcggatccggatcctaaagaaaggctcatggcaaccgtcggatcaaacggtgggtcccgtcgtttactggatgttcagagatcaacggttgaaagataactgggcgttaatccacgccgttgatctggcaaacagaaccaacgcgccggtggccgtcgttttcaatctgttcgatcaatttctggacgcaaaagcgaggcaattagggtttatgttaaagggtttgcgtcagcttcaccaccaaatcgattctctccaaattccgttttttctcttacagggagatgcaaaggagacaatccctaatttcctcacagaatgtggagcttcacatctggttactgatttctctcctttacgggaaatccggcgttgtaaagatgaggttgtcaagagaacgagtgattcattagcgatacatgaagttgatgctcacaatgtagttccaatgtgggctgcttcgagtaaattggagtacagtgctagaacaattaggggtaagatcaacaagctactacctgattacctcattgagtttcctaaacttgagccgccgaagaagaaatggacggggatgatggataagaagcttgttgattgggatagcctcattgataaagttgtaagggagggtgcagaagttcctgaaattgaatggtgtgtgcctggagaagatgcagggattgaagtattgatggggaataaagatggttttttgacgaagaggttgaagaattattcaactgaccggaataatcctataaagccgaaagcactctctggtctctctccttatctacatttcgggcaggtatcagctcagcgttgtgccttggaggcgcgtaaagtccggagtacttcccctcaggcggtagatatattcttggaagaattgattgtgcgaagagaactctccgacaatttttgctattatcaacctcattatgattctttgaagggagcttgggagtgggcacgcaagtcactaatggatcatgcttcagataagagggaacacatttactcgttggagcagttagagaagggactgacagcagatcctctatggaatgcttcacagttagagatgctttatcaagggaaaatgcacggtttcatgcgaatgtattgggcaaagaagattctagaatggaccaagggacctgaagaggctctctcaatatccatctatctaaataacaagtatgagattgatggtcgtgacccgagtggatatgttgggtgcatgtggtctatatgtggcgttcatgatcagggatggaaagagaggccggtttttgggaagatacggtacatgaactacgcgggttgcaaacggaaattcaatgtggatagttacatctcttatgtcaagagtttggtgtcagtaacaaagaagaagaggaaagctgaagaacagctcaccagagactctgttgatcccaagataactattgtttaggttaactttgaatgccttggtattgttacttgttagactactttgccctgtgttgggcatttttatattcaacgtattcagattcaaaaaaatctaattgaaaaacttatataagagaagattctgaaaaaaaaaaa

SEQ ID NO: 118443 - DNA, 1291 bp, Arabidopsis thaliana
  unsure (1)..(1291): unsure at all n locations
ctagctctctacgactcacttagggaaagctggtacgcctgcaggtaccggtccggaattcccgggtcgacccacgcgtccgcccacgcgtccgcccacgcgtccggacgacagaaggggaccctaacatagcccttgcaaaccataaccaaaccatcatcatcatcatctcttggtgacagaagaaaagagttgaggaacagagaaaatggcagcacaagcacttgtgtcttcttcacttacctcctctgttcagacagctagacagatatttggctcaaaaccagttgcgtctgcctcacagaagaagagttcctttgttgttaaagctgctgcaactccacctgtcaagcaaggagccaacagaccattgtggtttgcttcatcgcagagtctctcttacttggatggcagcttacctggtgactatggattcgaccctcttggtctttcagacccagaaggtactggaggattcattgagccaagatggctagcatacggagagatcatcaacggacggttcgccatgttgggtgcagctggagctattgctcctgagattttaggaaaggctggtctgattccagcagagactgctctttccttggttccaaaccggtgtgattccaccagcagggacatacacttactgggcagacaattacacactctttgttctcgagatggctctgatgggattcgctgagcaccggaggttacaggactggtacaacccaggatctatgggaaaacagtacttcttggggttagagaagggtttggccggttcaggtaacccggcttaccccggtggacctttcttcaaccctcttgggtttgggaaagatgagaagtcactgaaggagttgaaactcaaggaggtcaagaacggtagactggctatgctcgccatcctcggttactttatccaaggactagtgaccggtgtgggaccttatcagaacctgcttgatcacttggctgatcccgtcaacaacaacgtcttgaccagcctcaagttccactgaggtgatcatcatctcatgtgtttttatgtctcttgtatcgtacaatatttccatctttcgctaccattggcttcttcgtattgtaacaccctgtgtaaacatattcgtgttttgtaagaaatgacaatgtcaatggccaaacgaaaaaaaaaaaaaaanaaaggnnnnnnnnnnnnnnnnnnnnnnnnnnnnnnnnnnnnnnnnnnnnnnnnnnnnnnnnnnnnnnnnnnnnnnnnnnnnnnnnnnnnnnnnnnnnnnnn

SEQ ID NO: 118444 - DNA, 756 bp, Arabidopsis thaliana
  unsure (1)..(756): unsure at all n locations
agaatttaccccaaggttttaataccgcctcaacaatagggaaaaagttgaaccgctggcaggtaaccggtccgaaaattcccgggttgaacccacgcgtccgatagtccaagatcgttgcctctgtctccaacttcagtgttatctccattgatgaagaacagattgctgcaaaccttgtcaagaacggacctcttgctgtagccatcaacgctggctatatgcagacttacattggaggagtctcatgcccttacatatgcaccaggaggctcaaccacggtgtcttattggttggctatggagcggcaggttacgctccggctaggttcaaggagaagccttactggatcatcaagaactcgtggggagagacttggggtgaaaatggtttctacaaaatctgcaaaggccgtaacatttgtggtgttgacagtatggtctccactgttgcagccaccgtctcaaccaccgcccattaagcatctcgtcaataagttttaattactttggtgatttgtatgagcgagctctctttgcgctgctgactctctctatttatctctgcttcttgcttgtaaataaaatgcgttctattgagcaaaaccgtacaatgctcattagcaatgagcccactttaacaagtatcagtttatggcccaatatatgaaagttaaattgagtctgggccgtttaatgagcctttttatcnnnnnnnnnnnnnnnnnnnnnnnnnnnnnnnnnnnnnnnnnnnnn

SEQ ID NO: 118445 - DNA, 1578 bp, Arabidopsis thaliana
tgtcaactttatcttttaaaattatcttaaaagaaaccgaaagctaatctccaaagggaaaaagacgtgtagcagagacctatacatacacctatacattcacgttgcgtgtgataatctactgagggttctatctatattaatccttctctgcttccttcaatctaattgcaaatcaaatggatcgtcttaagctttatttctccgttttcgttttgtctttctttatcgtctcggtttcgtcgtctgatgtcaacgacggcgatgatctcgtgatccgtcaggtggttggtggagccgagcctcaggttttgacctcagaggatcacttttctctcttcaagcggaagttcgggaaggtctacgcttccaacgaggagcatgactatagattctcggttttcaaagcgaatctcaggcgagcgaggcgtcaccagaagttggatccgtcggcgactcatggtgttacgcagttctcagatctgactcggtctgagttccgtaagaagcacttgggggttagaagtggctttaagcttcctaaagatgccaacaaggctccgattctccctaccgaaaatctccctgaggattttgattggagagatcatggcgccgttactcccgtcaaaaatcagggatcttgcggctcttgctggagtttcagcgccactggagctttggaaggtgctaacttcctcgctaccggcaaactcgtcagcctcagcgaacaacagctcgtcgactgtgatcacgagtgtgatcccgaggaggcagattcctgcgactctggttgcaatggtgggctaatgaacagcgcttttgaatacacccttcaaaaccggagggctcatgaaagaagaagactatcccttacaccggaaaggacggcaagacctgcaagctagacaagtccaagatcgttgcctctgtctccaacttcagtgttatctccattgatgaagaacagattgctgcaaaccttgtcaagaacggacctcttgctgtagccatcaacgctggctatatgcagacttacattggaggagtctcatgcccttacatatgcaccaggaggctcaaccacggtgtcttattggttggctatggagcggcaggttacgctccggctaggttcaaggagaagccttactggatcatcaagaactcgtggggagagacttggggtgaaaatggtttctacaaaattgcaaaggccgtaacatttgtggtgttcccagtatggtttccctgttgaagcccccgtttcaacccaccgccctttaagcttctgggcaaaaagttttaattaccttgggtgatttgaataagcaagctctttttgcggggctgaccccctcaaaaaaaatccgctttttgcttgtaaaaaaaaggggttctattaagcaaaaccgtacaatgttcataaacaaagagcccccttttccggggttaagaaaaaaaaaaaaaaaaaaaaaaaaacaaaaaaaaaaaaaaaaaaaaaaaaaaaaaaaaaaaaaaaaaagggcggccgctctagaggatccaagcttacgtacgcgtgcatgcgacgtcata

SEQ ID NO: 118446 - DNA, 716 bp, Arabidopsis thaliana
  unsure (1)..(716): unsure at all n locations
actcgtgggtcgacgcaagactctatactgattcgtaataacagaagggggcaaatcaaatggatcgtcttaagctttatttctccgttttcgttttgtctttctttatcgtctcggtttcgtcgtctgatgtcaacgacggcgatgatctcgtgatccgtcaggtggttggtggagccgggcctcaggttttgacctcagaggatcacttgtctctcttcaggcggaagttcgggaaggtctacgcttccaacgaggagcatgactatagattctcggttttcaaagcgaatctcaggcgagcgaggcgtcaccagaagttggatccgtcggcgactcatggtgttacgcagttctcagatctgactcggtccgagtttccgtaagaagcacttgggggttagaagtggctttaagcttcctaaagatgccaacaaggctccgattctccctaccgaaaatctccctgaggattttgattggagagatcatggcgccgttactcccgtcaaaaatcagggatcttgcggctcttgctggagtttcagcgccactggagctttggaaggtgctaacttcctcgctaccggcanactcgtcagcctcagcgaacaacagctcgtcgactgtgatcacgagtgtgatcccgaggagggctcatganagaagaagactatccttacaccggaaaggacggcaagacctgcaagctagac

SEQ ID NO: 118447 - DNA, 474 bp, Arabidopsis thaliana
  unsure (1)..(474): unsure at all n locations
ctagtccaagatcgttgcctctgtctccaacttcagtgttatctccattgatgaagaacagattgctgcaaaccttgtcaagaacggacctcttgctgtagccatcaacgctggctatatgcagacttacattggaggagtctcatgcccttacatatgcaccaggaggctcaaccacggtgtcttattggttggctatggagcggcaggttacgctccggctaggttcaaggggaagccttacttggatcatcaaggactcggtgggggagagncctttggggctgaaaatgggttttccaaaaatctttcaaagggccgaaacatttttggggggttacaagattgggccccccccttttacaagccagccgtttttaaaccancggccnttttaaggaatttcgggcaanaaaggttttaaatnancttttgggggnnttttntttgnccggggccnctttttttgcgggn

SEQ ID NO: 118448 - DNA, 941 bp, Arabidopsis thaliana
  unsure (1)..(941): unsure at all n locations
tatccgtttcactatagggaaagctggtacgcctgcaggtaccggtccggaattcccgggtcgacccacgcgccccaaagacttatcgatcatgaagatcagacttagcataaccatcatacttttatcatacacagtggctacggtggccggacaacaatgcggtcgtcaaggcggtggtcgaacttgtcccggtaacatctgctgcagtcagtacggttactgtggtaccaccgcggactactgttctccgaccaacaactgtcagagcaattgttggggaagtgggcctagcggaccaggggagagcgcgtcgaacgtacgcgccacctaccatttctataatccggcgcagaataattgggatttgagagccgtgagtgcttattgctccacgtgggatgctgataagccgtacgcatggcggagcaagtatggctggaccgccttctgcgggccggcaggacctcgtggtcaagcttcttgcggcaagtgtttaagggtgaagaacacaagaacaaatgctgcagtaactgtgagaatagtggaccaatgcagcaacggaggcttggatttggatgtagcaatgttcaatcaaatagacaccgatggttttggctatcaacaaggccatctcattgttgactaccaatttgtcgactgtggcaatgagctcattgggcagcctgattccagaaacatgcttgtttcggccattgatcgcgtttgatattatgtaatgattttgaggtcaatatcgatcggtctacataaaaataataaagaccgctatatatgtattgtcgagggatatatgtttcgtatcaataaggaaattttaaatattattatcattcgttaaaaaaaaaaaaaaaaagaaaaaaaaannagcggcagctctagaggatccaagcttacgtacgcgtgcatgcgacgtcata

SEQ ID NO: 118449 - DNA, 512 bp, Arabidopsis thaliana
ccggcactaatacgactcacttagggaaagccggtacgcctgcaggtaccggtccggaattcccgtgtcgacccacgcgtccgcggacgcgtgggcggacgcgtgggcggctgcgaggggacgactgaaggggaccaagaaaacaaagacttatcgatcatgaagatcagacttagcataaccatcatacctttatcatacacagtggctacggtggccggacatcaatgcggtcgtcaaggcggtggtcgaacttgtcccggtaacatctgctgcagtcagtacggttactgtggtaccaccgcggactactgttctccgaccaacaactgtcagagcaattgttggggaagtgggcctagcggaccaggggagagcgcgtcgaacgtacgcgccacctaccatttctataatccggcgcagaataattgggatttgagagccgtgagtgcttattgctccacgtgggatgctgataagccgtacgcatgggcggagcaagtgtggctgga

SEQ ID NO: 118450 - DNA, 2899 bp, Arabidopsis thaliana
  unsure (1)..(2899): unsure at all n locations
atacgactcaccttaggggaagcacgtacgcctgcaggtaccggtccggaattcccgggagtaatttagaacacacatattttacgaattcgaatttcaagtttccgattctctaaatccaattgatttcactcttcctcaaatgaaaaagccctaattttgatcgtctaaatttcatacatgggtgcgaacgagtttcgtttcttcctctcctgcgatatcaattcgccggtcacttttcgtatcgagaagcttgatggaaacctccccgtcaagaaatcgtctgattcgggagttgtctccatcgcagaggagaaaaaaccagagctttacattgagtgtgcattgtacattgatggagctccttttggccttcccatgagaacaagattgaaaactacaggaccaccatactgctggaacgaactcatcactctcagttctaaataccgggacttgactgcccattcacaacttgcgattacagtatgggatgtttcgtgtggtaaaactgagggactgattggtggggcaacagtccttcttttcaacagcaagatgcagatgaaatcaggaaagcagaaactaaggctctggcaggggaaagaagcggatggttcatttccaacctctactcctggaaaggttccacggcatgagcgtggagagctagagcgtttagagaagctcatgaataagtatgagagggggcagattcaaagcattgattggctggatcgacttatgttgaaatccttggatacgattaaggagcaagaaagcaccaaacatggaagctcacatctgtttgtggtcattgatttctgtagttttgaacatcgggttgtatttcaggagtctggagccaatttgttcataactgccccaataggttcaacaaatgaatttgttactgtctgggatacagaactgggaaagactaatccttcagagaacaagcaactaaagctggcaaggagcttggatcgtggcattatcgacagggatctaaagccaagtaatatcgagcggaaatccattcaaagagttttgaaatatccgccaacaaggacattgagtggagatgaaagacaacttctttggaagtttcgtttctctctaatgtctgaaaagagagctctaacaaagtttcttcgctgtgtggagtggagtgatgttcaggaagcaaagcaagcaattcaactgatgtacaaatgggaaatgatagatgtatgtgatgctttggagctattgtctcctctttttgagagtgaagaggttcgagcttatgctgtgagtgtcctggaaagagctgatgatgaagagcttcagtgttacttgcttcaactggttcaggctcttcgttttgaacgctctgatagatcttgcctttctcaattccttgtccagagggcattacagaatattgagttggccagttttcttcggtggtatgttgctgtggaacttcatgaccatgtctatgccaagagattttacagtacatatgagttactcgaggagaatataatcaactggccgcctggtgttaacggcgaagatggatatcaattgtggcaaagtttggtgcgccaaacagaattgactgctcagttatgttccattacacgagaagtgaggaatgtacgtggaaacacccagaaaaaaattgagaagctcaggcagcttttaggtggactgcttagcgaacttacctacttcgaagagcctattcgatcaccgcttacccctaatgttctcataaaggggattgtggcaggagaatcatcactctttaaaagtgcattgcatcctctgcgccttactttccgaacaccagaagaaggaggaagttgcaaacttatatttaagaagggagatgatctccggcaagaccaactggttgttcaaatggtttggctcatggatagactacttaagctggaaaatcttgatctgtgcctaacgccttataaggtgttagcaactggacatgacgaagggatgttggaattcataccgtcccgttctttggctcagattctctcagagcaccgaagcataacaagttatctgcagaagtttcatcctgatgagcatgcacctttcgggataacagccacttgtcttgatacatttataaaaagctgtgcgggctattctgtgatcacatatatacttggcattggagacagacacctggacaacctcctcctaacagatgatggtcgtcttttccacgtcgatttcgcttttattctcggtagagatcctaaaccattccctccacctatgaaactctgcaaagaaatggtggaagccatgggcggagcagaaagccaatactacacaaggttcaaatcctactgttgcgaagcctacaacattctgcggaaatcgagcaaccttattttgaatctgtttcatctcatggcgggttcaactattcccgatatagcttcagacccagaaaagggcattctcaaactccaagaaaagtttaggcttgacatggatgatgaagcatgcatccatttctttcaagacctgattaatgaaagcgtaagtgcgctgttcccgcaaatggttgaaaccatacacagatgggctcaatactggcgttgaacccacagggtttaacaacacaaccatgttaactcctccagtttagccgaaaattgtagatgcattatacttttctcacgttaataacactgaaatgtttgattactgttctatgcttttacatctgcgacatctgcggtgataacattatctgtaaataacgttaacgttgaaactagatacgttttatcttcattcatatatttgcgaaattaaaaaaaaaaacaaaagggcgaccgctctagaggatccaagcttacgtacgcgtgcnnnc

SEQ ID NO: 118451 - DNA, 868 bp, Arabidopsis thaliana
  unsure (1)..(868): unsure at all n locations
aacactactcactatagggtatgctggtacgcctgcaggtaccggtccggaattcccgggtcgacccacgcgtcagaaaacaagtagaaactttaaaacgagagagagagaaagaaatggcgacatcgggaacgtacgtgacggaggttccgttgaaaggatcggcggagaaacactacaagagctggaagagcgagaaccatgtcttcgctgacgccattggccaccacatccaaaatgtcgttgttcacgaaggcgaacatgactctcacgggtctatcaggagttgggactacacatatgatggaaagaaggagatgttcaaagagaagagagagatagatgatgagaataaaacattgacgaaaagaggactggatggtcacgtgatggagcatctcaaagtatttgatatcatctacgaatttattcccaaatctgaggatagctgcgtctgcaaaatcactatgatatgggagaagcgcaacgatgactttcccgaaccaagcggctacatgaaattcgtcaagcaaatggttgttgacattgaaggccacgtcaacaaagcttaaccacaaccatcaccgtcatcactatctcgatcgatattgtattattatggtgtcttttcgataatcaatataataaagggggtcttgtggagtttctattctctgtaactgtttggttttggaatatgctgtgatatgttgttatgctcatcatatatcggtttcgatataatgagtattaaataaagtacgttcagttatctaaaaaaaaaaaaaaaaaagccgccgccnnnnnnnnnnnnnnnnnnnnnnnnnnnnnnnnnnnnnnnnnnnnnnnnnnnnnnnncccnnnnnnn

SEQ ID NO: 118452 - DNA, 1001 bp, Arabidopsis thaliana
ggattccagaaagaaagaaaaaaaagaaacaaataattccaaaaccttctctcttaatcaaaatcaagaaacttacaagatctggtgaaaaccatggaagaaggagattttttcaactgctgtttcagcgagattagtagtggcatgaccatgaataagaagaagatgaagaagagcaataaccaaaagaggtttagcgaggaacagatcaagtcacttgagcttatatttgagtctgagacgaggcttgagccgaggaagaaggttcaggtagctagagagctagggctgcaaccaagacaagtggctatatggtttcaaaacaagagggctcgatggaaaactaagcaacttgagaaagagtataacactcttagagccaattacaacaatttggcttcacaatttgaaatcatgaagaaagaaaagcaatctctggtctctgagctgcagagactaaacgaagagatgcaaaggcctaaagaagaaaagcatcatgagtgttgtggtgatcaaggactggctctaagcagcagcacagagtcgcataatggaaagagtgagccagaagggaggttagaccaagggagtgttctatgtaatgatggtgattacaacaacaacattaaaacagagtattttagggtccagggagagactgatcatgagctgatgaacattgtggagaaagctgatgatagttgcttgacatcttctgagaattggggaggtttcaattctgattctctcttagaccaatctagcagcaattaccctaactggtgggagttttggtcataaaagcatataagaaaaaaacagaacataagcgaagagaaagagtgtgaatagtttgtaaattatgtgttaagaaaataaatttagtttagtttaaatcttgtttcgatctatgtatctactatgttcaatactctttgtagctaattagtagcttataatgagactagaaaagttttgaagtcaaaaaaaaaaaaaaaaaa

SEQ ID NO: 118453 - DNA, 1150 bp, Arabidopsis thaliana
  unsure (1)..(1150): unsure at all n locations
acgcgtccgcaacgcgtccggaaaacaagtagaaactttaaaacgagagagagagaaagaaatggcgacatcgggaacgtacgtgacggaggttccgttgaaaggatcggcggagaaacactacaagagctggaagagcgagaaccatgtcttcgctgacgccattggccaccacatccaaaatgtcgttgttcacgaaggcgaacatgactctcacgggtctatcaggagttgggactacacatatggtatacatttagtcatttacttatactttctctctatatatttatcacttttacggcctatgtgcgtccgaaactatggttttggtggtctactgccaaatggaaaatcccaaagaattcccaaaacttttttaggaagaaaaaaaattgaataacctttttgaaatccgaaattcggtggtggatttgctttttccccccaccaggtaatttttgggttttggggaataatcgaaaaaaaaaagccgcccgggaattccgcggccgcgcgagaaccatgtcttcgctgacgccattggccaccacatccaaaatgtcgttgttcacgaaggcgaacatgactctcacgggtctatcaggagttgggactacacatatgatggaaagaaggagatgttcaaagagaagagagagatagatgatgagaataaaacattgacgaaaagaggactggatggtcacgtgatggagcatctcaaagtatttgatatcatctacgaatttattcccaaatctgaggatagctgcgtctgcaaaatcactatgatatgggagaagcgcaacgatgactttcccgaaccaagcggctacatgaaattcgtcaagcaaatggttgttgacattgaaggccacgtcaacaaagcttaaccacaaccatcaccgtcatcactatctcgatcgatattgtattattatggtgtcttttcgataatcaatataataaagggggtcttgtggagtttctattctctgtaactgtttggttttggaatatgctgtgatatgttgttatgctcatcatatatcggtttcggcggccgannnnnnnnnnnnnnnnnnnnnnnnnnnnnnnnnnnnnnnnnnnnnnnnnnnnnnnnnnnnnnnnnnnnnnaaaccgttag

SEQ ID NO: 118454 - DNA, 662 bp, Arabidopsis thaliana
  unsure (1)..(662): unsure at all n locations
aaacaagtanaaactttaaaacgagtttgatttaaagaaatggctacatctttaacgtgcgggacatatgtttcgttggaaggatcgtcttataaacactacaagagctggaagagcgagaaccatgtcttcgctgacgccattggccaccacatccaaaatgtcgttgttcacgaaggcgaacatgactctcacgggtctatcaggagttgggactacacatatgatggaaagaaggagatgttcaaagagaagagagagatagatgatgagaataaaacattgacgaaaagaggactggatggtcacgtgatggagcatctcaaagtatttgatatcatctacgaatttattcccaaatctgaggatagctgcgtctgcaaaatcactattgatatttgggagaagcgcaccgatgactttcccgaaccaagcgggtaccatggaattcggccaagcaaattggttgttgaccatttgaanggccaccggccaacaaaagnctttacccacaaccatcaccggncatcncnatccccgntccgggaattggattnttangggggccttttccgngaacccnttttantnaagggggncttttggggttccaatcccnggaaccgnttgggtttggaaaccgggaangtggnnccccccna

SEQ ID NO: 118455 - DNA, 760 bp, Arabidopsis thaliana
aaaaaccgggccgacccacgcaaccataaaaaacaagtggaagctttaaaacgagagggagagagcaaaaatggcgacgtcgggaacgtacgtgacggaagttccgctaaaaggatcggccgagaaatactacaagaggtggaagaacgagaaccatgtcttccctgatgctatcggccaccacatccaaaatgttaccgttcacgaaggcgaacatgactctcacgggtctatcaggagttggaactacacatgggatggaaaggaggaggtgttcaaggagagaagagagatagacgatgagaccaaaacgttgacgttaagaggacttgagggtcacgtgatggagcagctcaaagtgtacgacgtcgtctaccaattcattcccaaatctgaggatacctgcatcggcaaaatcactttaatatgggagaagcgcaacgatgattccccagaaccaagcgggtacatgaaattcgtcaagagcttggttgctgacatggggaaccacgttagcaaaacttaatcatcattcccacagtcgtcgtcgtgatcatcatcatcatcatcatcactatctcgatttataagttatgatgttttcagtattaataaatggggtcttggtggttcgttaatttttatgtgttaacccgctttgggttcctgtactgactgctccggtattatttgttattgttcatgggtccctatgtccgggtgccggtataatgattcttaagattaatttacttcacat

SEQ ID NO: 118456 - DNA, 635 bp, Arabidopsis thaliana
tgacgtcgcctgcacgcgtacgtaagctcggaattcggttcgaggaagaaacacgagtggaagcttttaaacaaaattaaaaaagagagagagaaatggcgacgtcgggaacatacgtgacgcaggtgccgttaaaaggaacggtggagaaacacttcaagaggtacaggaacgagaactatctcttccctgacactatcggccaccacatccaaagtgttactgttcacgatggcgaatgggacactcaaggaggcatcaagatttggaactacacactcggagatggaaaggaggaggtattcaaggagaggagagagatagacgatgacaataagatagtgaaggttgtaggattggaaggtcacgtgatggagcagttcaaggtgtatgagattgacttcccatttatttcccaactctgaaggaagattgcggtctgcaaaatcactatggatttgggagaagccgcaaccggtggtttccccgaaccaagcaggttcatgcaactcccccagggtttggttttttgttttgggggcccgcctttagattattatttcccaaccccccctttttcacaacccctttcctacctttctttttaattgttccttttttattgcttggttttc

SEQ ID NO: 118457 - DNA, 733 bp, Arabidopsis thaliana
  unsure (1)..(733): unsure at all n locations
gacccacgcgtccggcactatgaaatgatttaaagaaacggtagaaaccttgtttttaaccgtcacggtccctatataaacctatgagctagcgacgacaagtattcagtataatcaatcagaaaacaagtagaaactttaaaacgagagagagagaaagaaatggcgacatcgggaacgtacgtgacggaggttccgttgaaaggatcggcggagaaacactacaagagctggaagagcgagaaccatgtcttcgctgacgccattggccaccacatccaaaatgtcgttgttcacgaaggcgaacatgactctcacgggtctatcaggagttgggactacacatatgatggaaagaaggagatgttcaaagagaagagagagatagatgatgagaataaaacattgacgaaaagaggactggatggtcacgtgatggagcatctcaaagtatttgatatccttctacgaatttattcccaaatctgagggtagctgcgtctgcaaaatcactatgttatggggagaagcgaaaccggttgcctttccccgacccaagcgggttccatgaaattcggccaacgcaaatggtttttgccattttaggccccggtaaccaaggttttcccccccccttccccgatcacttttttggcccggttttgttttttatggggcttttcggnaaccaattnaaanggggctttngggtttttcnnaacctttgtttnta

SEQ ID NO: 118458 - DNA, 748 bp, Arabidopsis thaliana
  unsure (1)..(748): unsure at all n locations
gaaccccccccagggcgactgnatcgataagcttgatatcgaattcgcggccgcggcgacgtcgggaacatacgtgacgcaggtgccgttaaaaggaacggtggagaaacacttcaagaggtacaggaacgagaactatctcttccctgacactatcggccaccacatccaaagtgttactgttcacgatggcgaatgggacactcaaggaggcatcaagatttggaactacacactcggagatggaaaggaggaggtattcaaggagaggagagagatagacgatgacaataagatagtgaaggttgtaggattggaaggtcacgtgatggagcagttcaaggtgtatgagattgacttccaatttattcccaactctgaagaagattgcgtctgcaaaatcactatgatatgggagaagcgcaacgatgatttccccgaaccaagcagctacatgcaactcctcaagagtatggttattgatatggaggaccacgtccttaaagcttaatcaatatcacaaccaccaccatcatcacaaccaccatcaccatcatcctatatatttattaaattgttttcatttatatataatagactagataagaacctgtataatgtgcgggataaaatgattgaaataaattattatgtataaaattattatatgagatatcatatatgtttgtatacaagaaaatatgtaactaaagttttcgttttatttaaatttacgtttatttcgtat

SEQ ID NO: 118459 - DNA, 622 bp, Arabidopsis thaliana
  unsure (1)..(622): unsure at all n locations
aaaacaagtagaaactttaaaacgagagagagagaaagaaatggcgacatcgggaacgtacgtgaccggaggttccgttgaaaggatcggcggagaaacactacaagagctggaagagcgagaaccatgtcttcgctgacgccattggccaccacatccaaaatgtcgttgttcacgaaggcgaacatgactctcacgggtctatcaggagttgggactacacatatgatggaaagaaggagatgttcaaagagaagagagagatagatgatgagaataaaacattgacgaaaagaggactggatggtcacgtgatggagcatctcaaagtatttgatatcatctacgaatttattccccaaatctgaggatagcttgcgtctgcaaaatcactattgntattgggggaagcgcaccgattgacctttccccgacccagcgggttcacatgaaattcggccacgccaaatggggtgttgcattnaaggcccggcaccaagcctttccncaccatcncngnatcccatnccggtcgnatggatatatgggccttcggaaccnttataaggggctttgngtcttcccgaacgttggttggatnccggnatnntgtccccccngc

SEQ ID NO: 118460 - DNA, 1042 bp, Arabidopsis thaliana
  unsure (1)..(1042): unsure at all n locations
cagctctctacgactcacttagggaaagctggtacgcctgcaggtaccggtccggaattcccgggtcgacccacgcgtgcgcccacgcgtccggaaaacaagtagaaactttaaaacgagagagagagaatgaaatggcgacatcgggaacgtacgtgacggaggttccgttgaaaggatcggcggagaaacactacaagagctggaagagcgagaaccatgtcttcgctgacgccattggccaccacatccaaaatgtcgttgttcacgaaggcgaacatgactctcacgggtctatcaggagttgggactacacatatggtatacatttagtcatttacttatactttctctctatatatttatcacttttacggcctatgtgcgtccgaaactatggttttggtggtctactgccaaatatgaaatactacatatgatcattaattaaggaatttgttctataagaccaaaaacatatataataatcatattttgcatttatgtttacatatgaaaacggaagtcatatgtttaaaagtaaaaagtattttcatatttgagaataattttgaaaaatataaacggaaaaacatggtggccggatattaatccttatggtataactagctagtgggatgttggaaattgtaactaataaacacatgtgtgtaagatggaaagaaggagatgttcaaagagaagagagagatagatgatgagaataaaacattgacgaaaagaggactggatggtcacgtgatggagcatctcaaagtatttgatatcatctacgaatttattcccaaatctcgaggatagctgcgtctgcaaaatcactatgatatgggagaagcgcaacgatgactttcccgaaccaagcggctacatgaaattcgtcaagcaaatggttgttgacattgaaggccacgtcaacaaagctttaccccaaccatcaccggcatcactttctcggtccgtattggntttntanggggctttttcgggaanccnttnnatnaggggggcttttgggggntnt

SEQ ID NO: 118461 - DNA, 440 bp, Arabidopsis thaliana
  unsure (1)..(440): unsure at all n locations
attccaggngaggagntagtggccggtgngaatacccccatgaaggtttttaggactggcaaggtccccgtgatggagccagctccaaggtgtatgagatccgatttccaattttattccccagtctggaagaagattgcgtctgcaaaatcactatgatatgggagaagcgcaacgatgattcccccgaaccaagcagctacatgcaactcctcaagagcatggttattgatatggaggatcacgtccttaaagcttaatcaacatcaccatcatccctatatgtttattaagttgttttcaattatatctaataaagtgtgtttcctttcggaatactatattttcaattatatagaataaagtgtgtttcctttcggaatactatatacgtaccatgtggtttcttaaatcaatatataagaaaatgggttttgtgg

SEQ ID NO: 118462 - DNA, 406 bp, Arabidopsis thaliana
aaacttacaagatctggtgaaaaccatggaagaaggagattttttcaactgctgtttcagcgagattagtagtggcatgaccatgaataagaagaagatgaagaagagcaataaccaaaagaggtttagcgaggaacatgactctcacgggtctatcaggagttgggactacacatatgatggaaagaaggagatgttcaaagagaagagagagatagatgatgagaataaaacattgacggaaaagaggactggatggtcacgtgatggagcatctcaaagtatttggtatcatctacggatttcattccccaaatcttgagggttagctcgcggtctgcaaaattcacttattgatttgggggggaagcgcaacgatgactttcccgaaccaagcggctacatg

SEQ ID NO: 118463 - DNA, 350 bp, Arabidopsis thaliana
attccccagaaccaagcggctacatgaaattcgtcaagagcttggttgctgacatgggaaacctcgttaccaaaacttaatcatcattcccacagtcgtcgtcgtcgtcatcatcatcatcatcatcatcatcatcatcatcatcatcatcatcatcatcatcatcactatctcgatttataagttaagatgttttcagtataataaatggggtcttgtggatcgttcatttctatgtgtaaaccgtttggttctgtatgatgcttcgatatattgttatgttcatgatcatatgtcgggttcgatataatgattcttaagattaaaatactacaccatttcagattttc

SEQ ID NO: 118464 - DNA, 3126 bp, Arabidopsis thaliana
cgccgccggttgccgccaatccgctttcccgccaaattcgacaccataaatttcttctagtcgctttcgattccagttccactgaaaaaccacgaaagaagaacatttgcaccgtagttgcagaaggtaggtgaaggatttagctttctctatcttccaatggagggtaatttcgaggaacagaacaagcttccggagctgaaattggatgcaaagcaagctcaagggtttctctcgttctacaaaaccctaccaaatgatacgagagctgttagattctttgatcgcaaggattattatacagctcatggtgaaaattcagttttcattgcaaagacttattatcatacaaccactgctctacgtcagctcgggagtggttcaaatgctctttcaagcgtaagcattagtaggaacatgttcgaaacgattgctagggatcttctcctggagcgtaatgatcatactgtagaactttatgagggaagcggatcgaattggagacttgtgaaaacaggttctcctggaaacattggaagctttgaagatgttttgtttgcaaacaatgaaatgcaggacacaccagttgttgtctccatatttccaagttttcacgatggcagatgcgttattgggatggcctatgttgatctgactaggcgagttcttggactagctgagtttcttgatgatagccgcttcaccaatctggagtcttcgttgattgctctaggcgcaaaagaatgcatttttccagctgaatccggcaaatccaatgaatgcaaaagcctgtatgattccctggagaggtgtgccgtgatgataacagagaggaagaaacacgagttcaaaggaagagatttagattcagatcttaagagattggtgaaggggaatattgagcctgttagagatttggtatccgggtttgaccttgcgactcctgctctaggtgcattactctcgttttctgaacttctctcaaatgaggataactatgggaacttcacaatccgcagatatgatattggcggattcatgagacttgactctgcagctatgagggctttgaatgtgatggagagcaaaactgatgctaataagaatttcagtttgtttggtctcatgaacagaacatgtaccgcagggatgggtaagagactgcttcatatgtggctgaagcaacccctcgtggatttgaatgagattaagacgagattagatatagttcagtgctttgttgaagaagctgggttaaggcaggatcttagacagcatctgaagcgaatctcagatgttgagaggcttttgcgcagtctcgagagaagaagaggtgggttacagcacattattaaactctatcagtcaactataaggcttcccttcatcaaaacagctatgcaacagtacaccggagaattcgcatcactcatcagcgagagatacctgaaaaagcttgaggctttatcagatcaagatcaccttggaaagttcatcgatttggttgagtgctctgtagatcttgaccagctagaaaatggagaatacatgatatcttcaagctacgacaccaaattggcatctctgaaagatcagaaagaattgctggagcagcagattcacgaattgcacaaaaagacagcgatagaacttgatcttcaggtcgacaaggctcttaaacttgacaaagcagcgcaatttgggcatgtcttcaggatcacgaagaaggaagagccaaagatcaggaagaagctgacgacacagtttatagtgctggagactcgcaaagacggagtgaagttcacaaacacaaagctaaaaaaactgggggaccagtaccaaagtgttgtggatgattataggagctgtcaaaaggagctcgttgatcgtgtagttgagactgttaccagcttctctgaggtatttgaggacttagctgggttactttctgaaatggatgttttgttaagctttgctgatttggctgccagttgccctactccatactgtaggccagaaatcacctcttcggatgctggagatattgtactagaaggaagcagacatccatgtgtagaagctcaagattgggtgaatttcataccaaatgattgcagactcatgagagggaagagttggtttcaaatagtaacagggcctaacatgggagggaagtccactttcatccgccaggttggtgtgattgtgctgatggctcaagttggttcctttgttccttgtgataaagcatcaatttccataagagactgcatctttgcccgtgtaggagcaggcgattgccaactgcgtggagtgtcaacttttatgcaagaaatgcttgaaaccgcatcgatattgaaaggcgctagtgataagtcactgataattatcgatgaacttggtcgtggaacatcaacttatgatggttttggtttagcttgggctatatgtgagcatctggttcaagtgaaaagagcaccaactctgtttgctactcacttccatgaacttactgccttggctcaagcaaactctgaggtctctggtaacactgttggtgtggcaaacttccatgtcagcgctcacattgacactgaaagccgcaaactcaccatgctttacaaggttgaaccaggggcctgtgaccagagctttgggattcatgtggcggaatttgccaacttccctgaaagcgtcgtggccctcgcaagagagaaagctgcagagctggaagatttctctccctcctccatgataatcaacaatgaggagagtgggaagagaaagagcagagaagatgatccagatgaagtatcaagaggggcagagcgagctcacaagtttctgaaagagtttgcagcgataccacttgataaaatggagcttaaagattcacttcaacgggttcgtgagatgaaagatgagctagagaaagatgctgcagactgccactggctcaggcagtttctgtgaagaacccttgacgttttttggtttttggttttgtaaatagcttaaatcggttcttgtagttgtggtcgttgcttgggatgaaactaaatgaagggcaaaaacataattctacaatttttgttagtaaagctcgtttaatttaaaaaaaaaaaa

SEQ ID NO: 118465 - DNA, 2350 bp, Arabidopsis thaliana
ccaaggcatcgtttaataaatcctcccgtttcttttctgcatctttcttctcttctaatccagatgggaccgcgacagtgtttggtagtctggttggttctgtcaaacagcaatggcccaaactagttcttgggcttgctcttcttggagcaggactgacattatactccaatggagtaggggggaacaaccagttgcttcaacagccagatgttaccagcactagtacagaagatgtctcttcaagtacgaagccactgatccggcaagtgcagaaacttcccaagagaattaagaaactacttgagatgatccctcaccaggaggtcaatgaggaagaagcttccctctttgactttttgtggttactgctagcaagcgtcatatttgtgcctctatttcagaaaattcctggaggcagccctgttcttgggtatttggcagctggaattctgattggtccgtatggtctttcgataatccgtaatgtgcacggaaccagggccatcgcagaatttggagtagttttgttgcttttcaacatcggccttgagctatctgttgaaagactgagttccatgaagaaatatgtttttggattaggctcagctcaggttctggtgacggcagcagtagttggattgcttgcccattatgttgctggtcaggctggtccagcagcaatagtgattggaaatggcctggctctgtcgtccactgctgttgtccttcaggttctacaagaacgaggcgagagtacatctagacatggaagggcttcattttccgtcttgcttttccaggatctagctgtagttgttttactgattctcatcccacttatttcacctaattcatcgaaaggagggattggatttcaagccattgctgaagctcttgggcttgctgcagtcaaagcagcagtggctattactgcaataattgctggtggccgtctacttcttcgaccaatctacaagcaaattgcagaaaatcgaaacgccgagatattctctgccaacacgcttctcgttattcttgggactagtttactgacagctagggctggactttccatggcattaggagcgtttttggctggtctactccttgcagagacagaattttcgttgcaagtagaatcagatattgctccatatcgtggtcttctgttgggactcttcttcatgacggttggaatgtcaattgatccgaaattacttctctccaacttccctgtcatagtgggaactttgggactcttgatagtgggcaaaactatgttagtcgtgattatgggaaaattgttcggcatatcaataatatctgcaattcgggtcggtctactattggccccaggcggagagtttgcatttgttgctttcggagaagctgttaatcagggtataatgtctcctcagttatcttcgttgctattccttgtcgtgggaatctcaatggctatcacaccctggttagctgctggtggccagttaattgcatctcgttttgagttgcatgatgttcgaagtttattgcccgtcgagagtgagacagatgatttgcagggtcacataattatttgtggatttggtcgagttggtcagataattgctcaacttctctcggaaagacttatcccatatgttgcccttgatgtcagcagtgatagagtgactatcgggcgttccttggatcttcctgtttatttcggagacgctggtagtaaagaggttctccacaaaattggagctgggagagcatgtgctgctgtggttgccttagacgcaccaggagcaaactacagatgtgtttgggctttgagcaagttttaccccaatgtcaaaacttttgtccgtgctcacgatgttgttcatggtcttaatctagaaaaagccggtgctactgcagttgtcccggagactctggagcctagtctacagttggcagctgctgttcttgctcaggcaaaattaccgacatcggaaattgcaaacacgattaacgagttcagaacccgtcacttgtctgaactgaccgagctatgtgaagcaagcggaagctctctaggctatgggtactctaggacgagtaagcctaaacctcaaccatcggatgcatctggcgataaccagataatcgaaggaggcacagtcgtaatctgatgacgttctccattctggtgagaaaaagaagagtatttctcctttggtgttcttcttaaaccaccatcaccaacttgggttgcagtgcgtggtgaagtgatggatccatcagatgatgtgtagtgtgactaatatattcattatatgttcagtacatatctctcatttaaaaaaaaaaaaaaaaa

SEQ ID NO: 118466 - DNA, 2525 bp, Arabidopsis thaliana
  unsure (1)..(2525): unsure at all n locations
agctggtacgcctgcaggtaccggtccgttattcccgggtcgacccacgcgtccggaaacgcaaataaacaaaagtcgctttctagccacgtgatctttcgtcgacttttcttcttcttcttcttcttcctcttcctcatctcgtatctctaacttttgtcgaagttcttttgatgaaactagggtttattatcttctccttctttttcccatcaccatagaaaaggcagagacctttttcttcatcatttttattctccttcttcttctgctgttcatttctccaggttacaatgatgtttaatgagatgggaatgtgtggaaacatggatttcttctcttctggatcacttggtgaagttgatttctgtcctgttccacaagctgagcctgattccattgttgaagatgactatactgatgatgagattgatgttgatgaattggagaggaggatgtggagagacaaaatgcggcttaaacgtctcaaggagcaggataagggtaaagaaggtgttgatgctgctaaacagaggcagtctcaagagcaagctaggaggaagaaaatgtctagagctcaagatgggatcttgaagtatatgttgaagatgatggaagtttgtaaagctcaaggctttgtttatgggattattccggagaatgggaagcctgtgactggtgcttctgataatttaagggagtggtggaaagataaggttaggtttgatcgtaatggtcctgcggctattaccaagtatcaagcggagaataatatcccggggattcatgaaggtaataacccgattggaccgactcctcataccttgcaagagcttcaagacacgactcttggatcgcttttgtctgcgttgatgcaacactgtgatcctcctcagagacgttttcctttggagaaaggagttcctcctccgtggtggcctaatgggaaagaggattggtggcctcaacttggtttgcctaaagatcaaggtcctgcaccttacaagaagcctcatgatttgaagaaggcgtggaaagtcggcgttttgactgcggttatcaagcatatgtttcctgatattgctaagatccgtaagctcgtgaggcaatctaaatgtttgcaggataagatgactgctaaagagagtgctacctggcttgctattattaaccaagaagagtccttggctagagagctttatcccgagtcatgtccacctctttctctgtctggtggaagttgctcgcttctgatgaatgattgcagtcaatacgatgttgaaggtttcgagaaggagtctcactatgaagtggaagagctcaagccagaaaaagttatgaattcttcaaactttgggatggttgctaaaatgcatgactttcctgtcaaagaagaagtcccagcaggaaactcggaattcatgagaaagagaaagccaaacagagatctgaacactattatggacagaaccgttttcacctgcgagaatcttgggtgtgcgcacagcgaaatcagccggggatttctggataggaattcgagagacaaccatcaactggcatgtccacatcgagacagtcgcttaccgtatggagcagcaccatccaggtttcatgtcaatgaagttaagcctgtagttggatttcctcagccaaggccagtgaactcagtagcccaaccaattgacttaacgggtatagttcctgaagatggacagaagatgatctcagagctcatgtccatgtacgacagaaatgtccagagcaaccaaacctctatggtcatggaaaatcaaagcgtgtcactgcttcaacccacagtccataaccatcaagaacatctccagttcccaggaaacatggtggaaggaagtttctttgaagacttgaacatcccaaacagagcaaacaacaacaacagcagcaacaatcaaacgttttttcaagggaacaacaacaacaacaatgtgtttaagttcgacactgcagatcacaacaactttgaagctgcacataacaacaacaataacagtagcggcaacaggttccagcttgtgtttgattccacaccgttcgacatggcgtcattcgattacagagatgatatgtcgatgccaggagtagtaggaacgatggatggaatgcagcagaagcagcaagatgtatccatatggttctaaagtcttggtagtagatttcatcttctcttatttttatcttttgtgttcttacattcactcaaccatgtaatattttttcctgggtctctctgtctctatcgcttgttatgatgtgtctgtaagagtctctaaaaactctctgttactgtgtgtctttgtctcggcttggtgaatctctctgtcatcatcagcttttagttacacacccgacttggggatgaacgaacactaaatgtaagttttcataatataaatataaaaaaaaacaaagcnnnnnnnnnnnnnnnnnnnnnnnnnnnnnnnnnnnnnnnnnnnnnnnnnnnnnnnnnnnnnnnnnngtcccaa

SEQ ID NO: 118467 - DNA, 2245 bp, Arabidopsis thaliana
ctctctctctctctttcatcttcaaactctacaaacccagaaaccaccacacagtaattaatgtctctttctttcttcccatgtgatctttaacagacttttcttcttattctccatctctgaagttgtggggattcatcaagacttccttatctgtttcttttataaaacaagagagagataccacttttggtgttctttatttgcaactctttcaggttaaagaaatcgataggctctgttcttgattgtggtggaagagacatgatgatgtttaacgagatgggaatgtatggaaacatggatttcttctcttcctccacatctctcgatgtgtgtccattaccacaagctgaacaagaacctgtagttgaagatgtcgactacaccgatgatgagatggatgtggatgagcttgagaagaggatgtggagagacaaaatgcgtttgaaacgtctcaaggagcaacagagtaagtgtaaaggaggcgtcgatggttcgaaacagaggcagtcgcaagagcaagctaggaggaagaaaatgtctagagcccaagatgggatcttgaagtatatgttgaagatgatggaagtttgtaaagctcaaggctttgtttatggtattattcctgagaagggtaagcctgtgactggtgcttcggataatttgagggaatggtggaaagataaggttaggtttgatcgtaatggtccagctgctattgctaagtatcagtcagagaataatatttctggagggagtaatgattgtaacagcttggttggtccaacaccgcatacgcttcaggagcttcaggacacgactcttggttcgcttttatcggctttgatgcaacattgtgatccaccgcagagacggtttcctttggagaaaggagtttctccaccttggtggcctaatgggaatgaagagtggtggcctcagcttggtttaccaaatgagcaaggtcctcctccttataagaagcctcatgatttgaagaaagcttggaaagtcggtgttttaactgcggtgatcaagcatatgtcgccggatattgcgaagatccgtaagcttgtgaggcaatcaaaatgcttgcaggataagatgacggcgaaagagagtgctacttggcttgccattattaaccaagaagaggttgtggctcgggagctttatcccgagtcatgccctcctctttcttcttcttcatcattaggaagcgggtcgcttctcattaatgattgtagcgagtatgacgttgaaggtttcgagaaggaacaacatggtttcgatgtggaagagcggaaaccagagatagtgatgatgcatcctctagcaagctttggggttgctaaaatgcaacattttcccataaaggaggaggtcgccaccacggtaaacttagagttcacgagaaagaggaagcagaacaatgatatgaatgttatggtaatggacagatcagcaggttacacttgtgagaatggtcagtgtcctcacagcaaaatgaatcttggatttcaagacaggagttcaagggacaaccaccagatggtttgtccatatagagacaatcgtttagcgtatggagcatccaagtttcatatgggtggaatgaaactagtagttcctcagcaaccagtccaaccgatcgacctatcgggcgttggagttccggaaaacgggcagaagatgatcaccgagcttatggccatgtacgacagaaatgtccaaagcaaccaaacgcctcctactttgatggaaaaccaaagcatggtcattgatgcaaaagcagctcagaatcagcagctgaatttcaacagtggcaatcaaatgtttatgcaacaagggacgaacaacggggttaacaatcggttccagatggtgtttgattcgacaccattcgatatggcagcattcgattacagagatgattggcaaaccggagcaatggaaggaatggggaagcagcagcagcagcagcagcagcagcaagatgtatcaatatggttctgaatattacacaatctctgtaatattcattctttcataataactctgttacctacttacctgacttgggtatgtattctattgcaccaaacactcatctatattgttgatgatgatgaagccatctattttttttttgtgtctgaaagtcatttaactcgcttcattgttttaataatgtcactatccattgaacatcattctcatgctacaagtttgattctttgag

SEQ ID NO: 118468 - DNA, 2089 bp, Arabidopsis thaliana
ccacaattcgcagccattttttactctcttcttcccctgagaacgacaggagaaagaataaaaaccctaaatttctttaatttcggcgcttcagattatcgttgttaaaggtttttgattgattttgtttaaatgggcgatcttgctatgtccgtagcagacatcaggatggagaatgagcctgatgatttagctagtgataatgttgctgagattgatgtgagtgatgaagagattgatgctgacgaccttgagagacggatgtggaaagatcgtgtcaggcttaaaagaatcaaagagcgacaaaaagctggctctcaaggagctcaaacgaaggagacacctaagaaaatctctgatcaagctcagaggaagaaaatgtctagagctcaagatggtatccttaagtacatgttgaagcttatggaagtctgcaaagttcgcgggtttgtctatggtataataccggaaaagggcaagcctgtgagtggttcctctgacaatataagagcttggtggaaagagaaagtgaagtttgataagaacggtcctgctgctattgctaaatacgaagaggagtgtttagcgtttgggaaatctgatgggaataggaattcacagtttgttctccaggatttgcaagatgctactttagggtctttgttatcttctttgatgcaacattgtgatcctcctcaaaggaagtatccgttggagaaagggacgcctccgccttggtggccaacggggaatgaagaatggtgggtgaaactcggtctgcctaaaagccagagtcctccttaccgaaaacctcatgatctcaagaagatgtggaaggttggagttttaacggcagtgatcaatcatatgttacctgatattgcaaagattaagaggcatgttcgtcagtcgaaatgtttacaggacaagatgacagctaaagagagtgcgatttggttggcggttttgaaccaagaggaatctttgattcagcagcctagcagtgacaatggaaactccaatgtgactgagacacatcgtaggggtaataacgctgacaggaggaaacctgtggtcaacagtgacagtgactatgatgttgatgggacagaggaagcttcaggttcagtttcatctaaagacagtagaagaaatcagattcaaaaagaacaaccaacagccatctcacattcagtaagagatcaagataaagcagagaaacatcgcagaaggaaaagacctcgaattagatccggaactgtcaatcgacaagaggaagaacaacctgaagctcaacaaagaaacatcttacctgatatgaatcatgttgatgcccctctgctagaatataacatcaacggtactcatcaagaggacgatgttgtcgacccaaatattgccttaggaccagaggataatggtctggaactagtggttcctgagttcaataacaactatacttatcttccacttgttaatgaacaaactatgatgcctgtagacgaaaggccaatgctttatggaccaaaccctaaccaagagcttcaatttgggtcagggtacaacttctacaatccctctgcagtgtttgtacataaccaggaagacgacattctccatacacagatagaaatgaatacacaagcaccacctcacaacagtgggttcgaggaggccccaggaggagtacttcaaccccttggtttactcggaaatgaagacggtgtaacagggagtgagttgcctcagtatcagagtggcattctgtctccattgactgacttggactttgactatggtggttttggtgatgatttctcatggtttggagcttagtgtcttgccattttttttgggagattacatagttcaaaaggacatggcaatagtctggctagtacagttactttctcttcttcatttcttctgatcttatattcttcctctttttttcttataatattttcttagatttgttaagagaaacaattttccttttgaataagttgccagaagaactgctttgcccgttgtaatggtctctagggaaagcagttagcgtatcatcatttgtaaatttacctgtgag

SEQ ID NO: 118469 - DNA, 1464 bp, Arabidopsis thaliana
agcgtatcttctttccaaaagttagcgttttcgtctccgtccccaaatctctcagctaccttaaatcagaattctagggttcttccgattagggtaaaatcgaatccagatttcccaaaattctgatctttgatttataaaagatgtctcaaaacgggaagataatcccaaatctggaccaaaacagtacgaggctcctcaatctcacagttctccagcggatcgatccatacatcgaggaaatcctcatcacagccgctcatgtcactttctatgaattcaacattgagctcagccaatggagtcgtaaggacgttgaaggatctttgtttgttgtcaaaagaagtacacaacctcgatttcagtttattgtgatgaatcgtcgtaatacagataatctggtggagaatctcctgggagattttgagtatgaagtacaaggtccatatttactttaccgtaatgcatctcaagaagtaaatggcatttggttctacaataaacgtgaatgcgaggaggtagcaactcttttcaacagaatactcagtgcatattccaaggttaaccagaagccaaaggcctcatcttcaaagagtgagtttgaggaattggaagctaagcctacaatggcagttatggatggtcctcttgaaccatcatcaactgctagggatgcccctgatgatcctgcttttgtcaacttctttagctcaacgatgaatcttgggaacactgcgagtgggtcagcaagtggaccttaccaatcatcagcgattcctcaccaacctcaccagcctcaccaacctcaccaacccaccattgctcctcctgtagcggcagcagcacctccacagatacaatcaccaccgcctctacaatcctcctctcctctgatgactctctttgacaacaaccctgaagttatcagcagcaactccaacattcacacagatttggtgacgccgtctttctttggccccccacgaatgatggcacagccacacctcattcctggtgtatctatgcccagtgctcctcctctcaatcctaataatgcgagtcaccagcagcggtcatatggtactccggtgctccagcctttcccacccccaactccaccaccatcactcgctcctgcacccactggtccggttatcagcagagacaaagtgaaggaagcccttttatccctgttgcaggaggatgaattcattgacaagattacccgaactttacaaaatgcacttcaacaatgaagctgcgctggtcagcatctacgtgtgggatagtggctgtttgatctagaatgtgtagttaaaatgtagttttgttccctctgaaagtgttgttggaaccttataagatactgcactgccccctttgtttaactcttggaattactttttcattttatctactttcaagtttttaaaaaaaaaaaaaaaaaaaaaaaaagagcggccg

SEQ ID NO: 118470 - DNA, 1436 bp, Arabidopsis thaliana
  unsure (1)..(1436): unsure at all n locations
ctctcttttctcctcaccttctctctctcaacatctctctctttctctgtcttctctctgtctcaacgagaatatgactaaccagaatgtcatcgtttccgacaggaaacccatcttgggtttgaaaaccatcactgtctctgtctctaactctcctctgttctctaattcctttcccacttactttaacttccctcgtcgaaagctcttgaaacttcttgaagcagccgacaaaaacaacttagttgttgctccaaagattacgtctatgatcgattccatgcgtgattcttcccctacacgtctcagatcctcttcctatgactctgattcagataacgacgacaaaacatcttggatcgttcgttttccttcggctttaaatatgtttgatgagattgtgaatgctgcgaaagggaaacagattgtcatgtttcttgattacgacggaactctttctcccatagttgaagatcccgacaaagctttcataacccatgagatgagagaagtcgtaaaagacgtggcttcgaatttcccgactgctattgtcaccgggagatccattgagaaggttcgtagttttgtccaagtaaacgagatttactacgccggaagccacggcatggacattgaaggtccgaccaacgaaaatagtaacggccagagtaatgaaagagtgctattccaacctgctcgtgaatttttaccgatgatcgagaaggtggttaatattttagaggaaaaaacaaaatggatccctggggctatggtggagaacaacaagttttgtctgtccgtacattttcgacgtgttgatgagaagagatggcctgcattagctgaagtagtaaaatcagttcttattgattatccaaagctgaaactaacccaaggtagaaaggtacttgaaatccgccccacaatcaaatgggacaagggccaggcactcaattttttactaaaatcattaggatatgaaaattcggatgatgttgtgccggtgtatatcggggatgaccgtactgacgaagatgcgtttaaggttttacgtgaaaggggacaaggttttgggattcttgtctcaaaagtaccaaaggacaccaatgcctcttattctcttcaagacccttctcaggttaacaagtttctggaacgtttagtagaatggaagaggaagacagtgggagaagagtgaaagacatgcaacataattacacaaataacacctgagttttgagtagattattaatttatataaacaccctttttaaattagtagatgcctggagggtgtttcggccagaagttttcttttaatctacatcgaaccgaaaattgtaaatttcgtgtaacgatttagaaatggaaaaatatattaataatttactcattcttatttgaccnnnnnnnnnnnnnnnnnnnnnnnnnnnnnn

SEQ ID NO: 118471 - DNA, 5661 bp, Arabidopsis thaliana
  unsure (1)..(5661): unsure at all n locations
aaaaatctccaggtaaagcttctccctttttctctgttttctctgttttgttattctcccctttctccattgcagctttttcctgtaaagtgggattgatagttttgtttcatggatttcaaatttgtgttatttgactcgataccatcttaaatgcagagtcttttcgtgataataaaattatggattcgtttcaaagtttttttttttcgtatggaaaacacttgagctctctcaatcttgtagtcttgactcttgatgattcttctatgttctcgttgtgattgcttgtcactgttctatcttttatatatgattaaatgcaattttgcccctttttacgcgcgaatgtatttattatctttcgcactctgggtccatttcttgtcacttgagcacataatgattgatttatgactttttaaagttatgaaaatttattatttttgttgctatggttttttggaattagaagctcatttcaaagttgttgattttctttgcagggtagggaattggtgtggtagcttgtgatgcactgtgtttgagggaaaggaaaggataacgatggggtttgagtttattgaatggtattgtaagccggtgcctaatggtgtgtggactaaaacaagtggctaatgcatttggtgcatacacgccttgtgctactgactcttttgtgcttggtatctctcaactggttctgttggttctgtgcctgtatcgtatatggctcgccttaaaggatcacaaggtggagaggttctgtttgaggtcgagattgtataactatttcctggctttgttggctgcgtatgctactgctgagcctttgtttagattgatcatggggatttcagttttagattttgatggacctggacttcctccttttgaggcattcggattgggtgtcaaagcttttgcttggggcgctgtaatggtcatgattttaatggaaactaaaatttacatccgtgaactccgttgctatgtcaggtttgctgtcatatatgctcttgtgggggatatggtcttgttaaatcttgttctctcagtcaaggagtactatagcagttatgttctgtatctctacacaagcgaagtgggagctcaggttctgtttggaattctcttgtttatgcgtcttcccaatttggatacttaccctggctacatgccagtgcggagtgaaactgtggatgattatgagtatgaagagatttctgatggacaacaaatatgccctgagaagcatccaaatatatttgacaaaatcttcttctcatggatgaatcccttgatgactttgggatctaaaaggcctctaacagagaaggatgtgtggtatctagacacttgggatcagactgaaactctgttcacgagtttccagcattcctgggataaggaactacaaaagccgcaaccgtggctgttgagagcattgaacaatagcctgggaggaaggttttggtggggaggattttggaagatcgggaatgattgctcacagtttgtgggacctcttttactgaatcaactcttaaagtcaatgcaagaggatgcgccagcttggatgggttacatctatgcgttctcaatctttggtggagtggtgttcggggtgctatgtgaagctcaatatttccagaatgtcatgcgtgttggttaccgactgagatctgctctgattgctgctgtgtcccgcaaatcgttgaggttaactaatgaaggtcgtagaaagtttcaaacaggaaagataaccaacttaatgacgactgatgccgaatctcttcagcaaatatgccaatcacttcataccatgtggtcggctccatttcgtataattatagcactgattctcctctatcagcaattgggtgttgcctcgctcattggtgcattgttgttggtccttatgttccctttacagactgttattataagcaaaatgcagaagctgacaaaggaaggtctgcagcgtactgacaagagaattggccttatgaatgaagttttagctgcaatggatacagtaaagtgttatgcttgggaaaacagtttccagtccaaggtccaaactgttcgtgatgatgaattatcttggttccggaaatcacagctcctgggagcgttgaatatgttcatactgaatagcattcctgttcttgtgactattgtttcatttggtgtgttcacattacttggaggagacctgacccctgcaagagcatttacgtcactctctctctttgctgtgcttcgtttccctctcttcatgcttccaaacattataactcaggtggtaaatgctaatgtatccttaaaccgtcttgaggaggtattggcgacagaagaaagaattctcttaccaaatcctcccattgaacctggagagccagccatctcaataagaaatggatatttctcttgggattctaagggggataggccgacgttgtcaaatatcaacttggatgtacctcttggcagcctagttgctgtggttggtagtacaggcgaaggaaaaacctctctaatatctgctatccttggtgaacttcctgcaacatctgatgcaatagttactctcagaggatcagttgcttatgttccacaagtttcatggatctttaatgcaacagtacgcgacaatatactgtttggttctcctttcgaccgtgaaaagtatgaaagggccattgatgtgacttcactgaagcatgacctagagttactgcctggtggtgatctcacggagattggagaaagaggtgttaatatcagtggaggacagaagcagagggtttccatggctagggccgtttactcaaattcagatgtgtacatctttgatgacccgttaagtgcccttgatgctcatgttggtcaacaggtttttgaaaaatgcataaaaagagaactggggcagaaaacgagagttcttgttacaaaccagctccacttcctatcacaagtggacagaattgtacttgtgcatgaaggcacagtgaaagaggaaggaacatatgaagagctatccagtaatggccctttgttccagaggctaatggaaaatgcagggaaggtggaagaatattcagaagaaaatggagaagctgaggcagatcaaacagcggaacaaccagttgcgaatgggaacacaaatggtcttcaaatggatggaagtgacgataaaaaatccaaggaaggaaataaaaaaggagggaaatctgtcctcatcaagcaagaagaacgtgaaaccggagttgtaagttggagagtcctgaagaggtaccaggatgcacttggaggggcatgggtagtgatgatgctccttttatgttacgtcttaacagaagtatttcgggttactagcagcacgtggttgagtgagtggactgatgcaggcactccaaagagtcatggaccccttttctacaatctcatatatgcacttctctcgtttggacaggttttggtgacattgaccaattcatattggttgattatgtccagtctttatgcagctaagaagttacacgacaatatgcttcattccatactgagggccccgatgtccttcttccataccaatccgctaggacggataatcaatcgattcgcaaaagatctgggtgatattgatcgaactgtggccgtctttgtaaacatgtttatgggtcaagtctcacagcttctttcaactgtagtgttgattggcattgtaagcactttgtccttgtgggccatcatgcccctcctggtcttgttttatggagcttatctttattatcagaacacagcccgtgaggttaagcgtatggattcaatttcaagatcgcctgtttatgcacagtttggagaggcattgaatggcttatcaactatccgtgcttacaaagcatatgatcgtatggctgatatcaacggaagatcaatggataataacatcagattcactcttgtcaacatgggtgccaatcggtggcttggaatccgtttagaaactctgggtggtcttatgatatggctgacagcatcgtttgctgtcatgcagaatggaagagcggagaaccaacaggcatttgcatctacaatgggtttgcttctcagttatgccttaaatattactagcttgttaacaggtgttctgagacttgcgagtttggctgagaatagtctaaacgcggtcgagcgtgttggcaattatatagagattccgccagaggctccgcctgtcattgagaacaaccgtccacctcctggatggccatcatctggatccataaagtttgaggatgttgttctccgttaccgccctcagttaccgcctgtgcttcatggggtttctttcttcattcatccaacagataaggtggggattgttggaaggactggtgctggaaagtcaagcctgttgaatgcattgtttagaattgtggaggtggaaaaaggaaggatcttaatcgatgattgtgacgttggaaagtttggactgatggacctacgtaaagtgctcggaatcattccacagtcaccggttcttttctcaggaactgtgaggttcaatcttgatccatttggtgaacacaatgatgctgatctttgggaatctctagagagggcacacttgaaggataccatccgcagaaatcctcttggtcttgatgctgaggtctctgaggcaggagagaatttcagcgtgggacagaggcaattgttgagtctttcacgtgcgctgttacggagatctaagatactcgtccttgatgaagcaactgctgctgtagatgttagaaccgatgccctcattcagaagactatccgagaagaattcaagtcatgcacgatgctcattatcgctcaccgtctcaataccatcattgactgtgacaaaattctcgtgcttgattctggaagagttcaagaattcagttcaccggagaaccttctttcaaatgaaggaagctctttctccaagatggttcaaagcactggagctgcaaatgctgagtacttgcgtagtttagtactcgacaacaagcgtgccaaagatgactcacaccacttacaaggccaaaggaaatggctggcttcttctcgctgggctgcagccgctcagtttgctctggctgcgagtcttacttcgtcgcacaacgatcttcaaagccttgaaattgaagatgacagcagcattttgaagagaacaaacgatgcagttgtgactctgcgcagtgttctcgaggggaaacacgacaaagagattgcagagtcgcttgaggaacataatatctctagagagggatggttgtcatcactctatagaatggtagaagggcttgcagtgatgagcagattggcaaggaaccgaatgcaacaaccggattacaatttcgaaggaaatacatttgactgggacaacgtcgagatgtagataagttcatgttaaactaggaatcattgtctcttccgtaagaaacatatatttatcttaaccaaaattattagtttggtttccatttcataaacttaattttcacctgcaaagaaaatcaaaccctgttgtgttcttcgtgataagtagagaaattacttgagtatccttctaactcnnnnnnnnnnnnnnnnnnnnnnnnnnnnnnnnnnnnnnnnnnn

SEQ ID NO: 118472 - DNA, 5319 bp, Arabidopsis thaliana
tggcgcgcctgcaggtaccggtccggcctacccggggcgacccaccgtccgcgcatccatttatcatcatctccttataaatctcgaatctgccacagagagagcgtgtgacaaaatgagttcataagattccggtatcgtcttcctgattcctccaaatctccggcgaatttgcactctttacctctctttgactccgtgagattcgaggattgttagtttcttgtgatgtgtagtctttgaagcaggggatttttattgtattgaggaagaagatggggtttgagccgttggattggtattgcaagccggtgccgaatggtgtgtggactaaaactgtggattatgcgtttggtgcatacacgccttgtgctattgactcttttgtgcttggtatctctcatctggttctgttgattctgtgtctttatcgcttgtggctcatcacgaaggatcacaaagtggataagttctgcttgaggtctaaatggtttagctattttctggctcttttggctgcttatgctactgcggagcctttgtttagattggtcatgaggatctctgttttggatttggatggagctgggtttcctccctatgaggcgtttatgttggtccttgaggcttttgcttggggttctgctttggtcatgactgttgtggaaactaaaacgtatatccatgaactccgttggtatgtcagattcgctgtcatttatgctcttgtgggagacatggtgttgttaaatcttgttctctctgttaaggagtactatggcagttttaaactgtatctttacataagcgaggtggcagttcaggttgcatttggaaccctcttgtttgtgtatttccctaatttggacccttaccctggttacacaccagttgggactgaaaattccgaggattacgagtatgaagagcttcctggaggagaaaatatatgtcctgagaggcatgcaaatttatttgacagtatcttcttctcatggttgaacccattgatgactctgggatcaaaacgacctctcaccgagaaggatgtatggcatctggacacttgggataaaactgaaactcttatgaggagcttccagaagtcctgggataaggaactagaaaagcccaaaccgtggcttttgagagcactgaacaacagccttgggggaaggttttggtggggtggcttttggaagattgggaatgactgttcacagttcgtggggcctcttctactgaatgagctcttaaagtcaatgcaacttaatgaaccagcgtggataggttacatctatgcaatctcaatctttgttggagtggtattgggggttttatgtgaagctcagtatttccaaaatgtgatgcgtgttggttaccggcttaggtctgcactgattgctgctgtgttccgaaaatctttgaggctaactaatgaggggcggaagaagtttcaaacaggaaaaataacaaacttaatgactactgatgctgagtcgctgcagcaaatctgccaatcacttcataccatgtggtcggcgccatttcgtataattgtagcactggttctcctctatcaacaattgggtgttgcctcgatcattggtgcattgtttcttgtccttatgttccccatacagactgttattataagcaaaacgcagaagttaacaaaagaagggttgcagcgtactgacaagagaattggcctaatgaatgaggttttagcggcaatggatacagtgaagtgttacgcttgggaaaacagttttcagtccaaggttcaaactgtacgtgatgatgaattatcttggttccggaaagcacaactcctgtcagcgttcaatatgttcatactaaacagcatccctgtcctcgtgactgttgtttcatttggtgtgttctcattgcttggaggagatctgacacctgcaagagcgtttacgtcactctctctattttctgtgcttcgcttccctttattcatgcttccaaacattataactcagatggtaaatgctaatgtatccttaaaccgtttggaggaggtactgtcaaccgaagagagagttctcttaccgaatcctcccattgaacctggacagccagctatctcaataagaaatggatacttctcctgggattcaaaggcggataggccaacattgtcaaacatcaacctggacatacctcttggcagcctagttgcggtagttggcagcacaggagaaggaaaaacctccctgatatctgctatgcttggggaacttcctgcaagatctgatgcgactgttactcttagaggatcagtcgcttatgttccacaagtttcatggatctttaacgcaacagtacgtgacaatatattgtttggggctccttttgaccaagaaaaatatgaaagggtgattgatgtgacagcactccagcatgaccttgagttactgcctggaggtgacctcacggagatcggagaaaggggtgttaacatcagtgggggacaaaagcagagggtttctatggctagggccgtttactcaaattcagacgtgtgcatcttagatgaaccattgagtgcccttgatgcgcatgttggtcagcaggtttttgaaaaatgcataaaaagggaactagggcagacaacgagagtacttgttacaaatcagctccacttcctatcacaagtggataaaatcctacttgtccatgagggaacagtaaaagaggaaggaacatatgaagaattatgccatagtggcccgttgttcccgaggttaatggaaaatgcagggaaggttgaagattattccgaagaaaatggagaagctgaagtacatcaaacatctgtaaaaccagttgaaaatgggaacgctaataatctgcagaaggatggaatcgagacaaagaattccaaagaaggaaactctgttcttgtcaaacgagaagaacgtgaaactggagttgtgagttggaaagtcctggagaggtaccagaatgcacttggaggtgcatgggtagtgatgatgctcgttatatgctacgtcttgactcaagtatttcgggtttcaagcatcacttggttgagtgagtggactgattcaggaaccccaaagactcatggacccctattctataatattgtctatgcgcttctttcgtttggacaggtctctgtgacattgatcaattcatattggttgattatgtccagtctatatgcagctaaaaagatgcatgatgctatgcttggttccatactaagggctccaatggtgttctttcaaaccaatccattaggacggataatcaatcgatttgcaaaagatatgggagatattgatcgaactgtggcagtctttgtaaacatgtttatgggttcaatcgcacagcttctttcaactgttatcttgattggcattgtcagcactctgtccctgtgggccatcatgcccctgttggtcgtgttctatggagcttatctgtattaccagaacacatctcgggaaattaaacgtatggattccactacaagatcgccagtttatgctcaatttggtgaggcattgaatggactatctagtatccgtgcttataaagcatatgacaggatggctgaaattaatggaaggtcaatggacaataacatcagattcacacttgtaaacatggctgcaaatcggtggctgggaatccgtttggaagttttgggaggtctcatggtttggtggactgcttcattagccgtcatgcagaacggaaaggcagcgaaccaacaagcatatgcatctacgatgggtttgcttctcagttatgcgttaagcattaccagctctttaacagctgtactgagactcgcgagtctagctgagaatagtttaaactcggttgagcgtgttggaaattatatcgagataccatcagaggctccattggtcattgaaaacaaccgtccacctcccggatggccatcatctggatccataaaatttgaggatgttgttcttcgttaccgccctgagttacctcctgttcttcatggagtttcgttcttgatttctccaatggataaggtgggaattgttgggaggacaggcgctgggaaatcaagcctcttaaatgccttattcaggattgtggagctggaaaaaggaaggattttaattgatgaatgcgacattggaagatttggactgatggacctacgtaaagtggtcggaattataccgcaagcgccagttcttttctcaggtaccgtgagattcaatcttgacccatttagtgaacacaacgacgccgatctctgggaatctcttgagagggcacacttgaaagatactatccgcagaaatcctcttggtcttgatgctgaggtaactgaggcaggagagaatttcagtgttggacagagacagttgttgagtcttgcacgtgcattgttacgaagatctaagatacttgttcttgatgaagcaactgctgcagttgacgtaagaactgatgttctcatccaaaagaccatccgagaagaattcaagtcatgcacaatgctaatcatcgctcatcgtctcaatactatcatcgactgtgacaaagttcttgtccttgattctggaaaagttcaggaattcagttcaccggagaatcttctttcaaatggagaaagttctttctcgaagatggttcaaagtacaggaactgcaaacgcggagtacttacgtagtataacactagagaacaaacgtaccagagaagctaacggtgatgattcacaacctttagaaggtcaaaggaaatggcaagcttcttctcgttgggctgcagctgctcaatttgcattggctgtgagcctcacttcatctcacaacgacctccaaagccttgaaatcgaagatgataacagtattttgaagaaaacaaaggacgccgtcgtcactttacgcagtgtccttgaagggaaacatgataaagagattgaagactctctaaaccaaagtgacatctctagagagcgttggtggccatctctttacaaaatggtcgaagggcttgccgtgatgagcagattggcgaggaacagaatgcaacacccggattacaatttagaagggaaatcgtttgactgggacaatgtcgagatgtaaacgatgaaaggcttacactaatagacctaaaactcccattttgatggaacttttatttgtattgcttgggatacacgtaacaaaatgcccattaatcgtggtgtaactatataggctatgcttcttttgggaaaaagagagtttgattacagaggatgtgatgataacacaattg

SEQ ID NO: 118473 - DNA, 981 bp, Arabidopsis thaliana
  unsure (1)..(981): unsure at all n locations
cagcaacattcgactcacattagggaaagctcggccgcctgcaggtaccggtccggaattcccgggtcgacccacgcgttcgcaatctcaaaagccatttttcaaatttcaaactcagagagagagagatgtgtccttctggtagaatcgcgattccgataaccaccaccgcgaatccaaatttccgaccagctttcgaaatcatcgacacagatcacgacggtaaaatcagcagcgacgatctccgtgcattctacgccggaatcccttccggtgaaaacaacgacgagacgatgatcggaacgatgatatcagtagcggacgcgaacaaagacggattcgttgagttcgatgaattcgagaaagttctagaaacgacgccgttttctagatctggtaacggaggagacgatggattgatgaaagatgtgtttaaggtgatggataaagacggagatgggagactgagttacggagatctgaagagttatatggattcggctggtttagctgtaaccgacgatgaaatcaaatctatgattcgattagccggtggtgatttaaacgacggcgtttcgttcgacggtctgcttaagatctttgggtgttgaaaaaaaaagttcgttttttttgacaccgcacattttccaactttattttgtttctcagttttgtttgtttgtttgcagaagtgtatttgtgtccacccagattttgttttatgttgttataaaaatgtgagaaaactaatgttggaacactattcatatattttgtgatttacagcaacggctctcaaaagttttttgggcccaacccaccaacgaatgatacatatcttgtttgatgttgatactatgtttttaagcagagcaatcaaaaactagttgtacatctttcttcactatcattgaaaactatgtttttaataccaaacattgcaaacattttagaggnnnnnnnnnnnnnnnnnnnnnnnnn

SEQ ID NO: 118474 - DNA, 758 bp, Arabidopsis thaliana
tgtgtccttctggtagaatcgcgattccgataaccaccaccgcgaatccaaatttccgaccagctttcgaaatcatcgacacagatcacgacggtaaaatcagcagcgacgatctccgtgcattctacgccggaatcccttccggtgaaaacaacgacgagacgatgatcggaacgatgatatcagtagcggacgcgaacaaagacggattcgttgagttcgatgaattcgagaaagttctagaaacgaccgcccgttttcctagatctggtaacggaggagaccaatggattcgatgaaagccgcgcgtccggtgatggataaagacggagatgggagactgagttacggagatctgaagagttatatggattcggctggtttagctgtaaccgacgatgaaatcaaatctatgattcgattagccggtggtgatttaaacgacggcgtttcgttcgacggtctgcttaagatctttgggtgttgaaaaaaaaagttcgtttttttttgacaccgcacattttccaactttattttgtttctcagttttgtttgtttgtttgcagaagtgtatttgtgtccacccagattttgttttatgttgttataaaaatgtgagaaaactaatgttggaaccctaaaaaaaaaaaaaaaaaaaaaagaaaaaaaaaaggggcggccgttttaaaggatccaagtttacttccccttgcttgcaacgtattagttttcgttttgcaacccaaccgggggggcgg

SEQ ID NO: 118475 - DNA, 1734 bp, Arabidopsis thaliana
cccacgcgtccgcgcattcgacccacgcgtccgcttcgtcgtcgtcttcttcctttgctccgtcgtcgagatctcgtcgaacctcaaatctcaaatctcctgtaaccagatcgtctaattatccgatctgcgtttcgaatctcagatcgaagatgccggtggctgcttccgccatctattttctgaatctccgtggcgatgtactcataaatcgcacctaccgagatgacgtcgggggaaacatggtggatgcatttcgtacgcatataatgcagacgaaagagttagggaattgtcctgtgcgtcagattggtggctgctcctttgtttatatgcgaatcagcaatgtctacatcgtcattgttgtcagtagcaatgctaacgttgcttgtggattcaaattcgttgttgaggctgttgctttgttcaaatcatactttggtggagcttttgatgaagacgctattagaaataactttgttctgatttatgaattgttggacgagattatggactttggctatccacaaaatctctcccctgaaattttgaaactttatatcactcaggaaggtgtacggtcaccattttcatcgaagccaaaggacaagcctgttccaaatgcaacattacaagttacgggtgctgttggttggagaagagagggccttgcttataaaaagaatgaggtgtttctggatattgtggaaagtgtaaaccttctgatgtcctctaaaggcaacgttcttcggtgtgatgtgacggggaaggttttaatgaaatgtttcctttcgggaatgcctgatttgaagttggggttgaatgataaaattggtcttgagaaggaatcagaaatgaaatctcgcccagctaagagtggtaaaaccattgagcttgatgatgtcacatttcaccagtgtgtgaacctgaccagattcaactccgagaagactgttagttttgtaccaccggatggagagtttgaactgatgaagtatcgaataacagagggtgtaaatctgcctttccgtgtattaccaacaatcaaagaacttggtcgtacacgtatggaagtaaatgtcaaggtcaaaagtgtgtttggtgctaaaatgtttgcccttggggtcgtcgttaaaattccagtgccaaaacaaacagccaagaccaatttccaagtgacaactggtcgcgctaaatacaatccatcaatcgattgcttggtttggaagataagaaaattcccagggcaaacagagtccacgctaagtgcagaaattgagttgatctcaacaatgggagagaagaaatcttggacaagaccaccaatccaaatggaatttcaggtgccaatgttcacagcatctggtctgcgagttcgttttctcaaggtttgggagaagagcggttacaacacggttgagtgggttcgatacataacgaaagcgggatcttacgagatcagatgctgaacattaaacacagttcaggttcagtgacatcagacttaaaaagtttcatggcttctagttttttgttccttatgcaaaacaaacacaaaagagttaaatatgttttataccttgttttatgtttgtttgtcgattagagatatctgtgttaatatgatttcttatgtcttaatttggtattgaattctgtttttctaaaaaaaaaaaaaaaaaagggcggccgctctagaggatcccagcttacgtacgcgtgcatgcgacgtca

SEQ ID NO: 118476 - DNA, 398 bp, Arabidopsis thaliana
agattatgttgcttcttcactagatatgtttgcattcatttgcttcttttcattacagccaaaagacaaacctgttccaaatgcaacattacaagttacaggtgctgttggttggagaagagagggccttgcttacaaaaagaatgaggtgtttctggatattgcggaaagtgtaaaccttctgatgtcctctaaaggcaatgttcttcggtgtgatgtgacggggaaggttttaatgaaatgttttccttttccgggaatgccctgattcgaaagttcggggttgcatgatcaaaattggtcttgtggagggggctgaaatgaaatctcgcccagctaagagtggtaaaaccattgagcttgatgatgtcacatttcaccagtgtgtgaacctgacc

SEQ ID NO: 118477 - DNA, 2709 bp, Arabidopsis thaliana
ccccccctcgattacggacggtatacataagcttgatatcgaattcgcggccgcggatatgagaatggcatgtgcgtgaatgtggcctactttgttctcttccttctaatttgagaacagagtttggctgtcctatttattgctactttgtaagattcactcttttcgacattacttttcaattgcttcagattcataaatctatcttcttctttctttttttgttcagctttagcgtgttacgctgaacatttaagaaccatggatctcaatctcggaaaatgctgtggttctcgttcttctaagaaggaatcatggaggtcggttttgcttcttgcttatcagagtcttggtgttgtctatggagacttgagtatctctccgctttatgtctttaagagcacttttgctgaagacattcagcattcagagaccaatgaagagatctacggtgttatgtcttttgttttctggactctaactttggttcctttgctgaagtatgtcttcattgtcctccgagctgatgataacggagaaggtggaacttttgctttgtactcattgatctgccgtcatgtcaaagttagcctcctcccaaaccgacaagtctctgatgaggcactgtccacttataagctggagcatccaccggagaagaaccatgactcgtgtgtgaaaagatatctggagaaacacaagtggttacacactgctttgctgcttcttgttcttcttgggacttgtatggttattggagatggacttctcactccagctatctccgttttctctgctgtgtcaggtcttgagctgaatatgtctaaagaacatcaccaatatgcagtaattcctattacctgcttcatactagtctgccttttctcgcttcagcattttgggacacatcgtgttgggtttgttttcgcgcctattgtcctcacttggctgctctgtataagtggtattggcttgtacaatataatacagtggaatcctcatatatacaaagctctttctcctacatacatgttcatgttcttgagaaagacgagagtaagcggatggatgtctctaggcgggatcttgttgtgcataactggtgctgaggccatgtttgctgatcttggtcacttcaattacgcagcaattcagattgcgtttaccttcctggtttatccggctcttatattggcatacatggggcaagctgcttacttatcccggcatcaccattctgctcatgcaattgggttttacgtctctgtaccaaaatgtttgcactggcctgtgcttgctgtagcaattcttgcttctgttgtgggaagccaagcgatcatcagtgggactttctcaatcataaaccagagccagtctctcggatgcttccctcgagtcaaagtcattcacacgtccgataagatgcatggtcagatttacataccggagattaactggatgctcatgattctctgcatcgctgttactatcgggtttagagatgtcaaacacctgggaaatgcatcaggtttggctgtaatggcggttatgctagtgacaacatgtcttacctcattagtcattgttctttgctggcacaagcctccaattctagcgctagcgttccttctctttttcggttcaatagaacttctctacttctcggcctcactcaccaaatttcgtgaaggcgcttggcttccgatcctcttatctctaatattcatgatcatcatgttcgtttggcactacaccaccattaagaaatacgagtttgatctccagaataaagtctcgcttgaatggcttcttgcattgggtccaagcctcggaatttctcgagttccaggtatcggtttagtcttcacggatttaacctctggaatccccgccaatttctcccggttcgtcaccaacctccctgccttccaccgtgttcttgtctttgtctgcgtgaaatctgtccctgtcccgttcgttccacctgctgagagatacctcgtgggtcgtgttggtcccgttgaccaccgctcttacagatgcatcgttcggtatggataccgtgacgtccatcaagacgtggactcattcgaaacagagctcgtaagcaagctggcggatttcatccgttacgattggcacaaaagaacacaacaagaagacgacaacgctcgttctgtccagtccaacgaatcctcaagcgagtcaagactagccgtgatcggaacagtagcttacgagatcgaagacaatctccaaccagagagtgtctccatcggattctccacagtcgaaagcatggaagacgtcatacaaatggccgaaccagccccaaccgccaccataagacgggtgaggtttgcggttgaggaaaacagttacgaggacgaaggatcaacatcgtcagcagaagcagatgcggaactgagaagcgagctgagggatttgctggcagcgcaagaagcaggaactgcgtttatattgggacattcacatgtgaaagcgaaacaaggatcatcggtgatgaagagattagcagttaatttcggttataatttcttgagaaggaactgtagaggacctgacgtggctcttaaggttccacctgtttctcttttagaagtcggcatggtttatgttgtttgaacttatgaaaaaaactaaatatatgaaaacctaattcctctgttgtaaatcgtcagttagata

SEQ ID NO: 118478 - DNA, 2706 bp, Arabidopsis thaliana
acccacgcgtccgcccacgcggcttgattaattcggcacgaggtcttctcttctccacgaacttaattttttcaaaaccctagcaactttgattcattcaaaatccgatccaacgatgactattgaagaagtttccggtgagactcctccgtctacgcctccttcttcttctacgccttctccgtcttcctccaccaccaacgccgcgccgttgggatcctctgtgattccgattgtaaacaagctacaagacatattcgctcagctcggaagccagtctacgatcgcgcttcctcaggttgttgttgttggaagccaaagcagtggcaagtctagcgtccttgaagcactcgtcggccgtgactttctccctcgtggtaatgatatctgcacacgtcgtcctcttgttctccagctcctccagactaaaagccgcgctaatggcggatccgatgatgagtggggggagtttcgtcaccttcctgaaactcgtttctatgatttctctgagattcgtcgagaaattgaggctgagacgaatagattagttggagagaacaaaggtgtagcagatacacagattcgtcttaaaatttcttcacctaatgtattgaacatcacgcttgtggatctgcctggtattaccaaggtgccagttggtgaccagccatccgacattgaagcacgtataagaacgatgatcttgtcttacatcaagcaagatacttgcttgatattggctgttacccctgctaataccgatctagcaaactctgatgcccttcaaattgctagcattgtagatcctgatggtcacagaacgataggtgtaatcacaaagttggatattatggacaaaggtactgatgctcgaaaactccttcttggaaatgttgttcctcttcgacttggatacgtgggagttgtaaatcgttgccaggaggatattttgctaaaccgcacagtcaaggaagcacttctcgcagaggagaagttcttccggagtcacccggtttaccatggtcttgccgatcgtttgggtgttcctcagctagcaaagaagttaaatcagatccttgttcaacatatcaaggtcttgcttccggatctgaagtcgcggataagtaatgctttggttgctacagcaaaagagcatcagagctatggtgaattaacagaatcaagggctgggcaaggagctcttctcctcaactttctctccaaatactgtgaagcatactcttcattgctggaagggaaaagtgaagaaatgtctacgtcagagctctctggaggagcaagaattcactatattttccagtcaatctttgttaagagtttggaggaggttgatccatgcgaggacttgacagatgatgatattcggactgcaattcagaatgcaactggtccaagatctgcattatttgttccagatgttccatttgaagttcttgttaggaggcagatatctcgtttgttagatcctagccttcagtgtgcccggttcatttttgaagagctaataaagattagccatagatgtatgatgaatgagttacaacgatttccagtcctacgaaagcgcatggatgagttatcggggagggatttcctgcgagaaggtcttgaaccctcagaaacaatgatcggggatatcattgatatggagatggattacataaacacttcacatccaaattttattggtggaaccaaggccgtggaagctgcaatgcatcaagtgaagtcttcgaggattccccatcctgtggcacgaccaaaggacactgtggagcctgatagaacatcttcttccacgagtcaagtgaaatctagatcgtttctcggcaggcaagctaatggagttgttactgatcagggagttgtatctgcagatgctgaaaaagctcaacctgctgcaaatgcgaatgatacaaggtggggtatcccttcaattttccgagggggtgatactagagcagttactaaagatagcttattaaacaaaccattcagcgaagctgttgaagatatgtctcacaacttatccatgatctatctaaaggagcccccagctgtcttgaggccaaccgaaacccattcagaacaggaagcagttgagattcagataacaaagctgttactaagatcatactatgacattgtaaggaagaatattgaggattcggtaccaaaagcaatcatgcatttcctggtaaaccacacaaaacgtgagctgcataacgtcttcatcaagaagctttacagggagaacttgtttgaagaaatgttgcaagagccagatgagatagcagttaagaggaaacgcacacaagagactctccacgttcttcagcaagcttacaggacactagatgagttgccactggaagcagattcggtgtcagcaggaatgtcaaaacatcaggagttactgacatcttcaaagtattcgacaagcagctcatactcggcatctccaagtacgacaagaagatcgagaagagcaggagatcaacaccaaaatggatacggattctaacaggatccaaatatcttgcatatctctcgactgtgataacgcatttcattcatttaatggctctttcaggttttggtattaaattatgtgttggtcatatgaagaatttatataggaaaccagtacacagtgtgggttttggtcaaagaaaaaaaaaaaaa

SEQ ID NO: 118479 - DNA, 588 bp, Arabidopsis thaliana
  unsure (1)..(588): unsure at all n locations
cccccccctgaatgtggagggaatcaataggctggatatcgaattcggggccgcgcgaagcatcttcctctaccctggaagggaaaagtaaagaaatgtcaacatctgagctctcgggtggagcaagaattctctacattttccaatcagtatttgttaagagcttagaggaggttgatccatgtgaagacttaacagctgatgatattcggactgcaatacaaaatgcaactggtcccagatctgcattatttgttccagatgttccatttgaagttcttgtcaggaggcaaatatctcgtttattagatcccagccttcagtgcgctaggttcatcttcgatgagctagtaaagattagtcatcagtgtatgatgaaagagttacagcggtttccagtcctgcaaaagcgcatggatgagggtattgggaactttctgcgagaaggtcttgaaccttcgcaggcaatgatccgagatcttattgaaatggagatggattatataacaccccacacccaattttatcggggggccaagccgggggncagcatgcaaccgccaatctctaggtccgatctgtgngggc

SEQ ID NO: 118480 - DNA, 2675 bp, Arabidopsis thaliana
gaaactttttgttttcttcttgtctccttttgctcttaaaagagaagctttttcaatggaatttgacttgaatactgagattgcggaggtggaagaggaggagaatgatgatgtaggagtaggagtaggaggaggaacaagaattgacaagggtaggcttggaatttcaccatcttcttcttcttcatgctcttccggatcatcatcgtcatcatcttctacaggctctgcatcttccatttactctgagctttggcatgcttgtgctggtcctctcacttgtcttcccaagaaaggcaatgtagttgtctatttccctcaaggtcatttggagcaagatgctatggtttcatattcgtctcctcttgaaatccccaaatttgaccttaatccccaaatcgtctgcagggtggttaatgtccagttgcttgctaataaggacaccgatgaggtctacactcaagtcactctgcttccacttcaagagttttcgatgctaaatggggaggggaaagaggtcaaggagttaggaggggaggaagagaggaacggaagctcatccgtcaagcggacacctcatatgttctgtaaaaccttaacagcgtctgacacaagcacacatggaggcttctctgtacctagaagagccgctgaagattgttttgctcctcttgactacaaacaacagaggccatctcaagagctcattgcaaaggacctccatggagtagagtggaagtttcgccatatctatagaggtcaaccaaggaggcatctactcaccactggttggagtatctttgtcagtcaaaaaaatctcgtctctggtgatgcggttctctttctgagagacgaaggaggagagctgagattaggaatcagaagagcagcacggccaagaaatggacttcctgactcaatcattgagaagaattcatgttcaaacattctgtctcttgtggctaatgctgtatctacaaaaagcatgtttcatgtgttctacagtccacgagcgacgcatgcagagtttgtgattccttatgagaagtatatcacaagcatcaggagtcctgtttgcataggcacaagatttagaatgcgatttgaaatggacgattctcctgagagaagatgcgctggtgtagtgactggagtctgtgacttggacccgtataggtggccaaactctaaatggaggtgcttgttggtgcgatgggatgagtcttttgtgagtgatcatcaagaaagagtttcaccttgggagattgatccctcggtttctctcccacacttgagcattcagtcatctccaaggcctaaaaggccatgggcaggtttactggatactaccccacccggaaaccccataacaaaaaggggtggttttttggactttgaggagtcggttagaccctctaaggtcttgcaaggtcaagaaaatataggttctgcatcaccctcacaggggtttgatgttatgaaccgccggatactggattttgcgatgcagtctcatgcaaatccagttcttgtgtcgagtagagtcaaggatcgatttggtgagtttgtagatgctactggcgtgaacccagcttgttcaggtgttatggacctggataggtttccaagggtcttgcaaggtcaagaaatttgctcgcttaaatcattcccgcaatttgctggtttcagtccagctgctgctcctaatccctttgcttaccaagccaacaagtcaagttactatccgctagctttgcatgggattaggagcactcatgttccgtatcagaatccatacaatgcgggaaaccaatcctcgggtcccccttcacgtgcaataaactttggtgaagagactagaaagtttgatgcacaaaatgaaggtggcctaccaaataatgttacagctgatttgccattcaagattgatatgatgggaaaacagaaaggcagtgagttgaatatgaatgcttcatcaggatgtaaacttttcggattctccttaccagtggagacacctgcatctaagccgcaaagctcgagcaaaagaatctgtacaaaggtccacaagcaaggaagccaagtggggagagctattgatttgtcgcgacttaacgggtatgatgatctccttatggagcttgaacggctgttcaacatggaagggcttctcagggatcctgaaaaaggatggaggatcttatatactgatagtgagaacgatatgatggtcgttggcgatgatccatggcatgatttctgcaatgtggtgtggaagatacacttatacacgaaagaggaagtggagaatgcgaatgacgataacaagagttgtttagagcaagctgctctcatgatggaagcatcaaagtcatcttctgtgagccagcctgattcttctcctacaatcactagggtttgatacccataaagaagcttatttcctatgttttaaagtgtgttttgctcacaaaagaacttcaactttatctttgtctttgaatccatttatgtgtttgtttgtgtttcttctggtctccatggatgtctcatgtgtaccgttttactcgagagatatgtgagtttatgggatgtgtaaagcatgccattggattttaaggttttcaaaattacaatatatatattagttttgaagttaaaaaaaaaaaaaaaaa

SEQ ID NO: 118481 - DNA, 3832 bp, Arabidopsis thaliana
  unsure (1)..(3832): unsure at all n locations
gtaaaatttagcagagagaagaatgaaacaaataattatagcaccgtcacgtcgccgccgtatttcgttaccggaaaaaaaaaaatcattcttcaacataaaaataaaaacagtctctttctttctatctttgtctatctttgattattctctgtgtacccatgttctgcaacagttgagcaagtgcatgccccatatctctctgtttctcatttcccgatctttgcattaatcatatacttcgcctgagatctcgattaagccagcttatagaagaagaaacggcaccagcttctgtcgttttagttagctcgagatctgtgtttctttttttcttggcttctgagcttttggcggtggtgggtttttctggagaaacccaaacgactatcaaagttttgttttttacaattttaagtgggagttatgagtggggtggattaagtaagttacaagtatgaaggagttgaagattcgaagaagcggttttgaagtcggcgagaccaagattgcgagcttatttggctgatgatttatttcagggaagaagaaataaatctgttttttttagggtttttagatttggttggtgaatgggtgggaggtggagggaaacagttaaaaaagttatgcttttagtgtctcttcttcataattacatttgggcatcttgaaatctttggatctttgaagaaacaaagttgtgttttttttttgttctttgttgtttgctttttaagttagaataaaaaatgagattatcttcagctgggtttaatcctcaacctcatgaaggagagaaaagagttcttaattctgagctctggcatgcttgtgctggtcctcttgtctcactacctcctgttggaagcagagttgtgtattttcctcaaggtcacagtgaacaggttgctgcttcgaccaacaaagaagtagatgctcatataccaaattatccgagcttgcatccgcagcttatctgtcagcttcataatgttacaatgcatgctgatgtggagactgatgaagtctatgcacagatgactttgcaaccgttgaatgcgcaagagcaaaaagatccttaccttcccgcggaattaggtgtcccaagtagacagcctacaaactatttctgtaaaactctgactgctagtgatacaagcactcacggaggtttttctgtacctcgccgagctgctgagaaagttttccctcccttggattactcgcagcagccaccagctcaagagttaatggcgagggatctgcatgataatgaatggaagttcaggcatattttccgaggccaaccaaagagacatctccttaccacgggttggagcgtatttgtgagtgctaaaaggcttgttgctggtgactctgttcttttcatctggaacgataagaatcaattacttcttggtataagacgagccaaccgaccacaaactgtcatgccttcatctgttttgtcaagtgacagtatgcatttaggccttcttgctgcagcagctcatgctgccgctacaaacagccgattcaccatcttctataacccgagggcgagtccatcagagtttgttatacccctggctaagtatgtgaaagcggtttatcacactcgcgtctctgttggtatgcggtttaggatgctgtttgaaactgaagaatctagtgttcgtcggtacatgggtacaataactggcatttgtgatctagatcctactcgttgggctaattcgcattggcgatctgtcaaggttgggtgggacgaatctactgcaggagagagacagccaagggtttcattgtgggagattgagcctttaacaacattccctatgtatccatctccttttcctctcaggcttaaacggccgtggcctcctggtctcccatctttccatggccttaaagaagatgatatgggtatgagtatgagttcaccgcttatgtgggatcgaggactccaatctctaaactttcaaggtatgggagtaaacccgtggatgcagccgagacttgatacgtcgggcttgcttggtatgcaaaatgatgtgtaccaagcaatggctgcagctgcccttcaagacatgagaggcattgatcctgcaaaagctgctgcttcacttcttcagttccaaaattcgccggggttctcaatgcaatctccgtccttagtgcagccgcagatgctgcagcagcaactctctcagcagcagcaacaactctctcagcagcagcagcagcagcaacagctctcccaacagcagcagcaacagctctctcaacagcagcagcagcagctctctcaacagcagcagcaacaactctctcagcagcagcagcaacaggcgtatcttggcgttcctgaaacccaccagcctcagtctcaggctcaatcacagtcaaacaatcatctttctcagcagcagcagcaagtagtggataatcataatccgtctgcgtccagtgctgctgttgtttccgctatgtctcaatttggttctgcttctcagcccaacacgtcaccactccagtccatgacctctctgtgtcatcagcaaagcttctccgataccaacggaggaaacaatcctatttctccacttcacactcttctcagtaacttctctcaagacgaatcttctcaactgctccacctcactagaacaaactctgcaatgacttcatccggttggccatcaaagcgtcctgcagttgattcatcgttccagcactctggagccggtaataataacactcaatccgtattggagcaactgggacagtcccacacaagcaacgttcctccaaacgctgtctcgttgcctccatttcccggtggtagagagtgctcgatcgagcaagaaggaagcgcctcagacccgcatagccatcttctctttggagtcaatatagattcatcttctcttttgatgccgaacggaatgtcaaaccttagaagcattggtattgaaggtggtgactccacgactttacccttcacatcatctaatttcaacaatgatttctcgggtaatcttgcaatgacaacaccttctagttgcatagatgaatcgggttttctacaatcctcagaaaacctcggttccgagaacccacaatctaacacctttgtgaaggtgtacaagtcagggtcttttggaagatcgttagatatatcaaagtttagcagctaccacgagctgcgaagcgagcttgctcgcatgtttggcctcgaaggccaattagaagaccctgtgagatcaggctggcagcttgtatttgttgaccgagagaacgacgttcttctcctcggcgatgacccttggccggagtttgtgagcagcgtgtggtgcattaagatactgtcaccacaagaagtgcaacaaatgggaaaaagaggccttgagcttctcaactccgcgccatcttccaacaatgtcgataagctcccgagcaacgggaactgtgacgactttgggaaccggtcagacccgaggaatctcggtaacggtatcgcatcagttgggggttcattcaactactagaagtagatggaaacctccctttttattcaagttaagtttcaatcttataaattagtagtgagatcatcttagtttaattactagcaaaaatctctctttattacttataaaaaagggagatttgcctttgcctttgatggaaacaaaaactatataatccctctgtcgactcgtaatactgtaattataagatcttttggtctttttcttatatgaatatttttactgaactctatatatgtcactttccttnnnnnnnnnnnnnnnnnnnnnnnnnn

SEQ ID NO: 118482 - DNA, 1417 bp, Arabidopsis thaliana
ggccccccctcgggtcgactgtatcgataagcttgatatcgaattcgcggccgctccgcgccatcttccaacaatgtcgataagctcccgagcaacgggaactgtgacgactttgggaaccggtcagacccgaggaatctcggtaacggtatcgcatcagttgggggttcattcaactactagaagtagatggaaacctccctttttattcaagttaagtttcaatcttataaattagtagtgagatcatcttagtttaattactagcaaaaatctctctttattacttataaaaaagggagatttgcctttgcctttgatggaaacaaaaactatataatccctctgtcgactcgtgagaaccaaatccggaatacaaagtcagacatatatataaacaactatgtcttttagaaaccctaacaaccagaaagcacaataagtcaataacagaggataatctaaacctaaactaacaaaggtcagggcacaaaatgtcatttattcataatgaaaactctctcctactctgtaacctagatctttcactcaatttctcttaatctcctgtacaggtagcactatcctattacattaatcccaagctaggagtctggttcatccgttcttgttgcttcatccttcaccatggtccggttaatgtccttctcaagcattgccttttgctgccccacggtcgcttcgacgtttctttcagctcattcttctgcatttccaccatttcagcctgttttttctgcagttcttgattcgttttcttgagcttttcaatttcggcttccagttccaatgtataagcctgctttcgagctcttgatctagcagctgattcccgattcttgatcattctcctttgcctcctctcgataaccttctctagacctgtattgcttcttcgtcctcgattaagcacatacggaactggtgataaagaattattttctgcgctgcttgttcctggagaagttgctgcaacagtgaccccggttcctccgtaactagctaatccattattattgttgatagaattatttgcagccccagcaaaacccttgttggttatattcacaggcgcagaaaatgctacgtttgcttgtttaggaaaaatggtttgaggcagccgctgctgtggatgaggctgattcagcgcggccgtctgctgttgttgctgctgaagcaactgctgttgttgttgttgctgctgcattgttccacccattttgagccctaaaccaggtggctgattcaagatcatagaatcattagtaccattgaatgttatgctgttttgatttggctgaccaaatccaaaacctaagccgcacagcagcagtgctgttaccataaaacccattgttattgtttcccggacgcgtgggtcgacccggaaattccg

SEQ ID NO: 118483 - DNA, 572 bp, Arabidopsis thaliana
  unsure (1)..(572): unsure at all n locations
tttttnccgggaaccgcgtttncccccggggtgccctggccggtttntgaccncgttggccattaggtactgccccccaaggagtgcaccaaatgggaaaaagaggccctggagcttctcaaccccgcgccatcttccaccaatgtcgataagctcccgagcaacgggaactgtgacgactttgggacccggtcagaccccgaggaatctcggtaacggtatcgcatcagttgggggttcattcaactactagaagtagatggaaacctccctttttattcaagttaagtttcaatcttataaattagtagtgagatcatcttagtttaattcccacgcaaaaatctctctttattacttataaaaaagggagatttgcctttgcctttgatggaaacaaaaactatataatccctctgtcgactcgtaatactgtaattataagatcttttggtctttttcttatatgaatatttttactgaactctatatatgtcacttgggcggccgctctagaggatccaagcttacgtacgcgtgcgtgcgacgtcataatcttctatagttgtcct

SEQ ID NO: 118484 - DNA, 1528 bp, Arabidopsis thaliana
  unsure (1)..(1528): unsure at all n locations
aggtacggtccggaattcccgggtcgacccacgcgtccgcatctctctcatttcgaaaccatggttgagccggcgaatactgttggtcttccggtgaacccgactccgttgctgaaagatgagctcgatatcgtgattccgactatcagaaacctcgatttcctcgagatgtggaggccttttcttcagccttaccatctgatcatcgtccaggacggagatccatcgaagaagatccatgtccctgaaggttacgactacgagctctacaacaggaacgacattaaccgaatcctcggacctaaggcttcttgtatctcgtttaaggattctgcttgtcgatgctttgggtacatggtgtctaagaagaagtatatcttcaccattgatgacgattgcttcgttgccaaggatccatcaggcaaagcagtgaacgctcttgagcaacacatcaagaaccttctctgcccatcgtctccctttttcttcaacaccttgtacgacccataccgtgaaggtgctgatttcgtccgtggataccctttcagtctccgtgagggtgtttccaccgctgtttcccacggtctgtggctcaacatccctgattacgatgcccctacccaacttgtgaagcctaaggaaaggaacacaaggtatgtggatgctgtcatgaccatcccaaagggaactcttttccctatgtgtggtatgaacttggcctttgaccgtgagctcattggtccggctatgtactttggtctcatgggtgatggtcagcctattggtcgttacgacgatatgtgggctggttggtgcatcaaggtgatctgtgaccacttgagcttgggagtgaagaccggtttaccgtatatctaccacagcaaagcgagcaacccttttgttaacctgaagaaggaatacaagggaatcttctggcaggaggagatcattccgttcttccagaacgcaaagctatcgaaagaagcagtaactgttcagcaatgctacattgagctctcaaagatggtcaaggagaagttgagctccttagacccgtactttgacaagcttgcagatgccatggttacatggattgaagcttgggatgagcttaacccaccagcagccagtggcaaagcttgagagcagtatgagccaaaaagaaaaagccaccaaagttttggttatttttagctcaaattatcgttacttttaaatttctgattttacgaacctttcttgctttttttacacatttgagtagttttcatcatcagtactttctcattgtccggttatggtttttgcatttggtttaaatatcaccggtttatttataaacagtggtggattagtagtactattttctgagtttttttctttgtttcattaataaaaaggccttttcataggtgtttgcaattaaaaaaaaaaaaaaannnnnnnnnnnnnnnnnnnnnnnnnnnnnnnnnnnnnnnnnnnnnnnnnnnnnnnnnnnnnnnnnnnnnnnnnnnnnnnnnnnnnnnnn

SEQ ID NO: 118485 - DNA, 1553 bp, Arabidopsis thaliana
  unsure (1)..(1553): unsure at all n locations
nnnnnnnnnnnnnnnnnnnnnnnnnnnnnnnnnnnnnnnnnnnnnnnnnnnnnnnnnnnnnnnnnnnnnnnnnnnnnnnnngacccacgcgtccgctcaaatctccacaatcttttctctccaaattctcttctctctgaatcaatccaatcatggttgagccggcgaacaccgttggaattccggtgaaccacatcccattgttgaaggatgagctcgatatcgtgatccccacgatccgtaacctcgatttcctggagatgtggaggccttttcttcagccttaccatctgattatcgtccaagatggagatccatcgaagaccattgctgtccctgaagggttcgattacgaactctacaacaggaacgacatcaaccgtatccttggtcctaaagcttcctgcatttccttcaaggactctgcttgtcgttgcttcggctacatggtctccaagaagaagtacatcttcactattgatgacgattgcttcgttgctaaggatccatctggaaaagctgtgaacgctcttgagcaacacatcaagaaccttctctgcccatcaactccatttttcttcaacaccttgtacgacccataccgtgaaggtgctgacttcgtccgtggataccctttcagtctccgtgagggtgtttccaccgctgtttcccacggtctgtggctcaacatccctgattacgatgcccctacccaacttgtgaagcctaaggaaaggaacacaaggtatgtggatgctgtcatgaccatcccaaaggggactcttttccctatgtgtggtatgaacttggcctatgaccgtgagctcattggtccggctatgtactttggtctcatgggtgatggtcagcctattggtcgctacgacgatatgtgggctggatggtgtatcaaggtgatctgtgaccatttgggattgggagtgaagacaggtttgccctacatttaccacagcaaagccagcaacccgtttgtgaacttgaagaaggagtacaagggaatcttctggcaggaggatatcattcctttcttccagagcgcaaagctcacgaaagaagctgtgacagttcaacaatgctacatggagctgtccaagttggtgaaggagaagctaagccccattgatccttactttgacaagcttgcagatgctatggtcacttggattgaagcttgggatgagcttaacccacccactaaagcttgagcagcaaaaaaaccaccaccgcagttttggttattagctcaacatatcatctatcttctccgttttgtttttgttttgtcttttctcaaattttccggcgattcttcagttcgtttttaagttgccggagtttatttaaatagtgaatggtgtagttctatttatgaccgagacaatctctcttttgaggtttttcgtttttgtttcaataataaaaaatcatatcccttaaaaaaaaaaaaaaaaaaaaaaagggcggccgctctagaggatccaagcttacgtacgcgtgcatgcgacgtcaagactcttctatagtggtcctaa

SEQ ID NO: 118486 - DNA, 778 bp, Arabidopsis thaliana
  unsure (1)..(778): unsure at all n locations
aggtgcactatagaagagctatgacgtcgcatgcacgcgtacgtaagctcggaattcggctcgagcaggaacgacattaaccgaatcctcggacctaaggcttcttgtatctcgtttaaggattctgcttgtcgatgctttgggtacatggtgtctaagaagaagtatatcttcaccattgatgacgattgcttcgttgccaaggatccatcaggcaaagcagtgaacgctcttgagcaacacatcaagaaccttctctgcccatcgtctccctttttcttcaacaccttgtacgacccttaccgtgaaggtgctgacttcgtccgtggataccctttcagtctccgtgagggtgtttccaccgctgtttcccacggtctgtggctcaacatccctgactacgatgccccgacccaactcgtgaagcctaaggagaggaacaccaggtatgtggatgctgtcatgaccatcccaaagggaactcttttccctatgtgtggtatgaacttggcctttgaccgtgagctcattggcccggctatgtactttggtctcatgggtgatggtcagcctattggtcgctacgacgatatgtgggctggttggtgcatcaaggtgatctgtgaccacttgggcattgggagtgaagaccggtttgccctacatctaccacagcaaagccagcaaccggttgtnacttaagaaggggncaagggatctctgcagggganacatccttctccagangaaagccacgaaaaactgtncagtcaanagc

SEQ ID NO: 118487 - DNA, 641 bp, Arabidopsis thaliana
  unsure (1)..(641): unsure at all n locations
cagccacacagggaacnngtaaccncattcagttgtcgtaccantgacaccaatttcacaaacttgtcggacgcgtgggtcgaccaacgcgtccgcgacgatatgtgggctggatggtgtatcaaggtgatctgtgaccatttgggattgggagtgaagacaggtttgccctacatttaccacagcaaagccagcaacccgtttgtgaacttgaagaaggagtacaagggaatcttctggcaggaggatatcatncctttcttccagagcgcaaagctcacgaaagaagctgtgacagttcaacaatggctaacatgggagctggtccaagtttggtgaaagggagaagctaaagcccccatttgatccttaacttttgacaagcttgcagatgctatggtcacttggattgaagcttgggatgagcttaacccacccactaaagcttgagcagcaaaaaaaaccaccaccgcagttttggttatnaagctcaacattatcatctatcttccnccgttttgtttttgttttngctttcnccaaatttnccgggcgtncngccaggtccggtttnaagnngcccgggnggtttanttaaaaaagtgnantgggggagccccanttnncggcccgggncaanc

SEQ ID NO: 118488 - DNA, 550 bp, Arabidopsis thaliana
  unsure (1)..(550): unsure at all n locations
ttttgaatggttggaccgaggcgtccgcccacgcgcccgccaaattctcttctctctgaatcaatccaatcatggttgagccggcgagcaccgttggaattccggtgaaccacatcccattgttgaaggatgagctcgatatcgtgatccccacgatccgtaacctcgatttcctggagatgtggaggccctttcttcagccttaccatctgattatcgtccaagatggagatccatcgaagaccattgctgtccctgaagggttcgattacggaactctacaacaggaacggcatcaaccgtatccttggtcctaaagcttcctgcatttcctttcaaggactctgcttgtcgttgcttcggctacatgggctccaagaagaaggacatcttcactattggtggcggttgcttcgttgctaaggatccatctggaaaagctgtgaacgctcttggaacaaatcagancctttttgccataaatcatttttttaaaactntcgccanccggaaggnctgcttggccggggaccttnaggtcggnggnntt

SEQ ID NO: 118489 - DNA, 476 bp, Arabidopsis thaliana
tgcttaatcataaactactctttcttccttgtcgtttcaaatggcgcaattgtattcttccgtgaaacccacgccaatgttgaaagatgagctagacattgtgatacctacgattcgaaacctcgacttccttgagatgtggcgacctttctttgagcagtatcatttgatcattgttcaagatggtgatccttcgaaagtcatcaacattccagtagggtttgactacgagctctacaacaggaacgacatcaatcgaatcttgggtcccaaggcctcttgcatttccttcaaggactctgcttgtcggtgcttcgggtacatgggctccaaaaagaagtacatctacaccattgatgatgattgctttgttgcaaaggatccaacagggaaagagatcaatgcgcttgagcagcatatcaagaacctcttatctccatcaactccgcatttctttatcacaacttatgatccat

SEQ ID NO: 118490 - DNA, 533 bp, Arabidopsis thaliana
accacacgtccgcccacgcgtccgcggacgcgtgggcggacgcgtgggcggacgtctcagaagctttgcgctccaagttctggtctctgtgagtgaatcaaatcatggttgagcgggcgaacaccgttggaattccggtgaaccagatctcattgttgaaggatgagctcgatatcgtgatccccacgatccgtaatctcgatttcctgtagatgtggtggccttttcttcagccttaccatctgatcatcgtccaggacggagatccatcgaagaagatccatgttcctgaagggtacgactacgagctctacaacaggaacgacattaaccgaatcctcggacctaaggctttttgtatctcgtttaaggattctgctcaagactactggtggctaccaggagaatggcccggacccccatccccccctttgaaattgctctgatgatgttgggcttgatgctgacaaatgcaaagtgctagttaacattgagcaacagaacctttctgcccattgcttcctttttttcac

SEQ ID NO: 118491 - DNA, 1534 bp, Arabidopsis thaliana
aaaagggactgtaatccttgacccacgcgtccgtacaggcgtgctctctctcctctctccatctatctccctctcttcgccggagatcgcccttcaccaattccactatagtagcaaaaacaagtgaagcacaatggggatcatcgaaaggattaaagaaatcgaggccgagatggctcggactcagaagaataaagctacagagtatcatcttggtcagctcaaggcaaagattgcaaaactcaggacacaactgttggagcctccaaaaggtgctagtggaggcggggaaggttttgaagttaccaagtatggtcatggacgtgttgcacttataggatttcctagtgtcggaaagtccacgcttttgactatgttaactggaacacattctgaagcagcctcatatgaatttacaacacttacatgcatccctggtgtaattcactacaacgacacaaagattcagcttctcgatcttcctgggattattgaaggtgcttcggaaggaaaggggcgaggaaggcaggttattgctgttgcaaagtcttccgaccttgtattgatggttcttgatgcctcaaaaagcgaaggccacaggcaaatattgactaaggaacttgaggcagtgggcttgcgactaaacaaaactcctccgcagatatactttaaaaagaaaaagactggtggaatctctttcaacactacagcacccttgactcacattgatgagaagctctgttatcaaatcctgcatgaatacaagattcacaatgctgaggtgctatttcgtgagaatgccacagtggatgactttattgatgtcattgaaggcaaccgcaagtatattaagtgtgtttatgtctacatcaaaatagatgttgttggaattgatgatgtggatagactatcccggcagccaaattccattgttattagctgcaatcttaagcttaacttagacagactacttgctaggatgtgggacgaaatgggccttgtgagagtttactcgaagccgcaaggccagcaaccagatttcgatgagccttttgtcctctcatctgatcgaggtggctgcacagtggaagacttctgtaaccacgtccacaggactctggtgaaggatatgaagtatgcactcgtttggggcacaagcacaaggcacaatccacagaattgtggtctttctcaacatcttgaagacgaagatgttgttcagatcgtcaagaaaaaggagagagacgaaggaggaagaggccggttcaagtcacactcaaacgcccctgctagaattgcagacagagagaaaaaagctcctcttaagcaataagcttttagctgataagtcatctccatacatccatctccaccatcatagtcgtggatggtttcacctgagtaagatttactatgttgtatctgaatccgttttgttgttttctctcacaatataagttttggaacaattttacttttttgagatacaaatggaagtacgagttcctatttaaaaaaaaaaaaaaaataaaaa

SEQ ID NO: 118492 - DNA, 418 bp, Arabidopsis thaliana
cggacgcgtggggtcgacgcggccgcgctaagattttgatttattgttaaatcacttatatttaaatgattcctgcatttcgagctcgtctaatggaattcatgtttggaatcgatgtctcgacatacgtttttttgttcgattagacatagtagcaaaaacaagtgaagcacaatggggatcatcgaaaggattaaagaaatcgaggccgagatggctcggactcagaagaataaagctacagagtatcatcttggtcagctcaaggcaaagattgcaaaactcaggacacaactgttggagcctccaaaaggtgctagtggaggcggggaaggttttgaagttaccaagtatggtcatggacgtgttgcacttataggatttcctagtgtcggaaagtccacgcttttgactatgt

SEQ ID NO: 118493 - DNA, 1975 bp, Arabidopsis thaliana
  unsure (1)..(1975): unsure at all n locations
ccccccctcgatgtcgacggtatcgataagcttgatatcgaattgaaagcaaagcagagagcagctcccttcccctcggcgaggaggaaggaagaagaaagccagagagagagagagagatcatcgcagcttctcctccgaccatttgactgcgactgtgattacaacacaccgttgatcctacgaaaaagaggtaatggatactggcggcaattcgctggcgtccggacctgatggtgtgaagaggaaagtttgttatttctatgaccctgaggtcggcaattactactatggccaaggtcatcccatgaagccccatcgcatccgcatgacccatgccctcctcgctcactacggtctccttcagcatatgcaggttctcaagcccttccctgcccgcgaccgtgatctctgccgcttccacgccgacgactatgtctcttttctccgcagcattacccctgaaacccagcaagatcagattcgccaacttaagcgcttcaatgttggtgaagactgtcccgtctttgacggcctttattccttttgccagacctatgctggaggatctgttggtggctctgtcaagcttaaccacggcctctgcgatattgccatcaactgggctggtggtctccatcacgctaagaagtgcgaggcctctggcttctgttacgtcaatgatatcgtcttagctatcctagagctccttaagcagcatgagcgtgttctttatgtcgatattgatatccaccacggggatggagtggaggaggcattttatgctactgacagggttatgactgtctcgtttcataaatttggtgattactttcccggtacaggtcacattcaggatataggttatggtagcggaaagtactattctctcaatgtaccactggatgatggaatcgatgatgagagctatcatctgttattcaagcccatcatggggaaagttatggaaattttccgaccaggggctgtggtattgcaatgtggtgctgactccctatctggggatcggttaggttgcttcaatctttcaatcaaaggtcatgctgagtgcgtcaaatttatgagatcgttcaatgttcccctactgctcttgggtggtggtggttacactatccgcaatgttgcccgttgctggtgctacgagactggagttgcacttggagttgaagttgaagacaagatgccggagcatgaatattatgaatactttggtccagactatacacttcacgttgctccaagtaacatggaaaataagaattctcgtcagatgcttgaagagattcgcaatgaccttctccacaatctctctaagcttcagcatgctccaagtgtaccatttcaggaaagaccacctgatacagagactcccgaggttgatgaagaccaagaagatggggataaaagatgggatccggattcagacatggatgttgatgatgaccgtaaacctataccaagcagagtaaaaagagaagctgttgaaccagatacaaaggacaaggatggactgaaaggaattatggagcgtggaaaaggttgtgaggtggaggtggatgagagtggaagcactaaggttacaggagtaaacccagtgggagtggaggaagcaagtgtgaaaatggaagaggaaggaacaaacaagggtggggcggagcaggcgtttcctcctaaaacataagactcggagcttctaatttcttgctactttttctgtctatcaaatgttgctagttaagtttctggagttgttgttgttgtaagcactcctctgttttagaggattgagcacggatatgtatttattcgttgcatgtctgaatgatgatatgatatgacaagcggccgtattcctttnnnnnnnnnnnnnnnnnnnnnnnnnnnnnnnnnnnnnnnnnnnnnnnnnnnnnnnnnnnnnnnnnnnnnnnnnnnnnnnnnnnnnnnnnngggagtg

SEQ ID NO: 118494 - DNA, 1369 bp, Arabidopsis thaliana
acgcctgcaggtaccggtccggaattcccggctcgacccacgcgtccgtacctttcttctctgggtttgagaattggtgtaagagaaacgattgaggttttctcttattatctaaacccaccaagtctttcaggattttagccagagaagcttgagtctttgattagggacatgtcaacctccgccgcttccttgtgttgttcatcaacccaggtcaatgggtttggtcttaggcctgaaaggtcgcttctttaccaacccacttccttttctttctccagaaggagaactcatggaattgtcaaggcctcatctcgggttgataggttttcgaaaagtgatatcattgtttctccctctattctctcggctaatttcgccaaattaggcgagcaggtaaaagcagtggagttggcaggttgtgattggattcatgttgatgtcatggacggtcgttttgttcccaacattactatcggacctctcgtggttgatgctttgcgccctgtgacagatcttcctttggatgttcatctgatgatagtggaacccgagcagagagtaccggatttcatcaaagcaggtgcagatattgtcagtgtacattgtgaacagcaatccaccatccatttgcatcgtaccgtcaatcaaataaaaagcttaggggctaaagctggagttgttctaaaccctggaaccccattgagtgcaatagaatatgtcttggatatggtggatctggtcttgatcatgtcggtcaaccctggttttggtggacagagctttattgaaagccaagtaaagaaaatctcggacttgaggaaaatgtgtgcagagaagggagtaaacccatggattgaagttgatggtggtgtcactccagcgaatgcgtacaaggttattgaggctggagcaaatgctctagtggctggatcagctgtatttggagctaaggactacgcagaagctataaaaggaattaaggccagcaaacgaccagcagctgtagctgtgtaatgtgaagcaacagcaagcgaaaagactctgttaaacttaggaacagttaaaaagtgaatgacgatcaccagaagtcccagatgttgtcgttgtgtctccattcgccataacattcacaagaatcaaactcaatatcttcaaagtaggctcctctatactattctgtaccattgtcttgtaaattgaggatatgcagattccatacattttgcaatgaaacactgtgataagaaatatgttgttacatatgtgtttttgacttataataaagcatttcatttgtcttgaataaaaaaaaaagggttaacaaaacccagacgaaccgctctagaggatccaagcttacgtacgc

SEQ ID NO: 118495 - DNA, 873 bp, Arabidopsis thaliana
tggttgaaaaaggacatattccccaccacattcccatttttggccatttggacaccccgttcctatttcaaatattaaagaaaggctttaaggggggctttacaaaactgggaaagttttgttttattaaaaaccccgtggggaacccccccatttaagagtgccaaataaaaaaattttgttctttggatataagggggggaatcttgggttcttgaatccaaggtcgggtccaaacccttggtttttgggtgggacaaaagcttttatttaaaagcccaaggtaaagaaaatcctgggactttaggaaaaatgtgtgcacaaaagggagtaaacccatggattcaagttgatggtggtgtccactccagcgaatgcgtacaaggttattgaggttggagcaaatgctctagtggctggatcagctgtatttggagctaaggattacgcagaagctataaaaggaattaaggccagcaaacgaccagcagctgtagctgtgtaatgtgaagcaacagcaagcgaaaagactctgttaaacttaggaacagttaaaaagtgaatgacgatcaccagaagtcccagatgttgtcgttgtgtctccattcgccataacattcacaagaatcaaactcaatatcttcaaagtaggctcctctatactattctgtaccattgtcttgtaaattgaggatatgcagattccatacattttgcaatgaaacactgtgataagaaatatgttgttacatatgtgtttttgacttataataaagcatttcgtttgaaaaaaaaaaaaaaaaacaaagggcggccgctctagaggatccaagcttacgtacgcgtgcatgcgacgtcatagtggtctatagt

SEQ ID NO: 118496 - DNA, 620 bp, Arabidopsis thaliana
  unsure (1)..(620): unsure at all n locations
caacattactatcggacctctcgtggttgatgctttgcgccctgtgacagatcttcctttggatgttcatctgatgatagtggaacccgagcagagagtaccggatttcatcaaagcaggtgcagatattgtcagtgtacattgtgaacagcaatccaccatccatttgcatcgtaccgtcaatcaaataaaaagcttaggggctaaagctggagttgttctaaaccctggaaccccattgagtgcaatagaatatgtcttggatatggtggatctggtcttgatcatgtcggtcaaccctggttttggtggacagagctttattgaaagccaagtaaaggaaatctcggacttggggggaaatntgtgcagagaagggagtaaacccatggattggaaagtttgatggtggtgtcactccagcggattcgtacaagggtatttaggcttggggcaaatcctctagtggctggttcacctgtctttggggctagggccttcggagagctttaaagggctttaggcccgcaacggcccccactttcnttttcatttttnaccccaagcgaaggcctttttaaccttggccgtaaggttcgccnngccatttngtttncttc

SEQ ID NO: 118497 - DNA, 553 bp, Arabidopsis thaliana
  unsure (1)..(553): unsure at all n locations
atattctctcttttncttctttacccggaaaaataaagtttctntnctnctttttncttctctgggtttnagaattggtgtaagagaaacgattgaggttttctcttattatctaaacccaccaagtctttcaggattttagccagagaagcttgagtctttgattagggacatgtcaacctccgccgcttccttgtgttgttcatcaacccaggtcaatgggtttggtcttaggcctgaaaggtcgcttctttaccaacccacttccttttctttctccagaaggaggactcatggaattgtcaaaggccccatctcggggtttgatagggtttcggaaaagtggtatcaatggnttcncccccctaattcctctcggggttaaatttcggccaaaattaaggggnggcaaggtaaaaagccagntggaagtttggcaaaggttnttgaattttgggatccaatgtttaanggtcnantgggncggggccggttttttttncccaaaaantnacntttnngggccccttcgggggggtaaangccttttggg

SEQ ID NO: 118498 - DNA, 927 bp, Arabidopsis thaliana
  unsure (1)..(927): unsure at all n locations
ttttgggagaggngaaagaaaaagaaaatgggaagagggagagtagaattgaagaggatagagaacaagatcaataggcaagtgacgtttgcaaagagaaggaatggtcttttgaagaaagcatacgagctttcagttctatgtgatgcagaagttgctctcatcatcttctcaaatagaggaaagctgtacgagttttgcagtagttcgagcatgcttcggacactggagaggtaccaaaagtgtaactatggagcaccagaacccaatgtgccttcaagagaggccttagcagttgaacttagtagccagcaggagtatctcaagcttaaggagcgttatgacgccttacaaagaacccaaaggaatctgttgggagaagatcttggacctctaagtacaaaggagcttgagtcacttgagagacagcttgattcttccttgaagcagatcagagctctcaggacacagtttatgcttgaccagctcaacgatcttcagagtaaggaacgcatgctgactgagacaaataaaactctaagactaaggttagctgatgggtatcagatgccactccagctgaaccctaaccaagaagaggttgatcactacggtcgtcatcatcatcaacaacaacaacactcccaagctttcttccagcctttggaatgtgaacccattcttcagatcgggtatcaggggcagcaagatggaatgggagcaggaccaagtgtgaataattacatgttgggttggttaccttatgacaccaactctatttgaatctttctcacttaattaatctctcttttttttgacatttttaagatgatgtttctattttattacctctctcacgttttctgtcttgtgtgcatgtgtctgtgtaatgtttattgcccttctattattcaatgatttctcgac

SEQ ID NO: 118499 - DNA, 1411 bp, Arabidopsis thaliana
gcggccgcgcaaccctctctcattttacaagtctcacatcaaagcaattcaaatacacaacttgtaacttcaaatagattactttcaaagaagagagagagaaagaaagatggagaagaacatgaagtttccagtagtagacttgtccaagctcaatggggaagagagagaccaaaccatggctctaatcaatgaagcttgtgagaattggggcttctttgagatagtgaaccatggattaccacatgacttaatggacaagatcgagaagatgacaaaggaccattacaagacatgccaagaacaaaagttcaatgacatgctcaagtccaaaggtttggataatcttgagacagaagtcgaagatgtcgattgggaaagcactttctacgttcgtcacctccctcaatccaatctcaatgacatttcagatgtgtctgatgaatacaggacggccatgaaagactttggtaagagactggagaatcttgctgaggatttgttggatctactgtgtgagaatctagggttagagaaagggtatttgaagaaagtgtttcatggaacaaaaggcccaacctttgggacaaaggtgagcaattatccaccatgtcctaaaccagagatgatcaaaggtcttagggcccacactgatgcaggaggcatcatcttgttgtttcaagacgacaaggtcagtggtctccagcttcttaaagatggtgactggattgatgttcctcctctcaaccactctattgtcatcaatcttggtgaccaacttgaggtgataaccaacgggaagtataagagtgtgctgcaccgtgtggtgactcaacaagaaggaaacaggatgtcggttgcatcgttttacaacccgggaagcgatgcggagatctcaccagctacttcgcttgtcgagaaagattccgagtacccgagtttcgtctttgatgactacatgaagctttatgcaggggtcaagtttcagcccaaggagccacggttcgcagcaatgaagaatgcttctgcagttacagaactgaatcctacagcagccgtagagactttctaaaaatggatttgagattcaagtgaagcagagaaagaaagatgagtttgtgttgtgtgttatggcaataagttaaaacttgtattagtgttgattaattgttggtcaattggtgtgttttaaagtgtggggtgtttatgtagtataaactaaaaagccttacatcattctaaaatatcatcactcaagtggcttcgtatttgggatcagcagttacgtagtgataagcaattaccaatgcgaagatgaagatgccaagaaagttggcaataaaccccaagtcctgatcatcgatcatcgttttatcgggacggaatcggtgggaaaggataaggcggccgc

SEQ ID NO: 118500 - DNA, 680 bp, Arabidopsis thaliana
  unsure (1)..(680): unsure at all n locations
gatatnnnangaancttccatatcccaancncaattaccncccaagggaaaaaactngaccccacccggtgcgccccctaaacctagggacccccggctgcagaatccncggccccttgaggtgataaccnaacgggaagtataagagtgtgctgcacccgtgtggtactcaacaagaaggaaacaggatgtccggttgcatcgttttacaacccgggaagcgatgcggagatctcaccagctacttcgcttgtcgagaaagattccgagtacccgagtttcgtctttgatgactacatgaagctttatgcaggggtcaagtttcagcccaaggagccacggttcgcagcaatgaagaatgcttctgcagttacagaactgaatcctacagcagccgtagagactttctaaaaatggatttgagattcaagtgaagcagagaaagaaagatgagtttgtgttgtgtgttatggcaataagttaaaacttgtattagtgttgattaattgttggtcaattggtgtgttttaaagtgtggggtgtttatgtttatggaagatgataataattataaaaatcaaaaaaaaaaaaaaaagnnnnnnnnnnnnnnnnnnnnnnnnnnnnnnnnnnnnnnnnnnnnnnnnnnnnnnnnnnnnnnnnnnnnnnnnnnnnnnnnnnng

SEQ ID NO: 118501 - DNA, 1004 bp, Arabidopsis thaliana
  unsure (1)..(1004): unsure at all n locations
gtagattgtatcgataagcttgatatcgaattcgcggccgccaagctcaatggggaagagagagtttaaactatggctctaatcaatgaagcttgtgagaattggggcttctttgagatagtgaaccatggattaccacatgacttaatggacaagatcgagaagatgacaaaggaccattacaagacatgccaagaacaaaagttcaatgacatgctcaagtccaaaggtttggataatcttgagacagaagtcgaagatgtcgattgggaaagcactttctacgttcgtcacctccctcaatccaatctcaatgacatttcagatgtgtctgatgaatacaggacggccatgaaagactttggtaagagactggagaatcttgctgaggatttgttggatctactgtgtgagaatctagggttagagaaagggtatttgaagaaagtgtttcatggaacaaaaggcccaacctttgggacaaaggtgagcaattatccaccatgtcctaaaccagagatgatcaaaggtcttagggcccacactgatgcaggaggcatcatcttgttgtttcaagacgacaaggtcagtgggctccagcttcttaaagatggtgactggattgatgttcctcctctcaaccactctattgtcatcaatcttggtgaccaacttgaggtgataaccaaccgggaagtataagagtgttgctgcaccgtgttggtgactcaacaagaaaggaaacagggatggccggttgcatcgttttacaanccggggaagcgatgcggagatctcaccaagctaacttcgcttgtcgagaaagattcccgagtaccccgagtttcggctttgatgccacatgaagctttatccaggggcaagttcagccaaggggcacggnncnagcaatgaanatgctctnagtacagactgatccnnagancgangcttcnaaaatgggttggntcagtancnggnaaaanntggtttggttggggntc

SEQ ID NO: 118502 - DNA, 449 bp, Arabidopsis thaliana
  unsure (1)..(449): unsure at all n locations
cagaatacccggggggtcccacgcgtgcgcaaatacacaacttgcaacttctatatatattactttcaaagaagagagatggtgttaaagatggagttgggcatgaagtttccagtagtagacttgtccaagctcaatggggaagagagagaccaaaccatggctctaatcaatgaagcttgtgagaattggggcttctttgagatagtgaaccatgggttaccacatgacttaatggacaagatcgagaagatgacaaagggcccttacaagacatgcccagaacaaaagttcaatgacatgctcaaagtcccaagggttttggataatcttgaggacagaagtcgaaggatgtcggatttgggaaagcaccttttcttccggttcggcaacctccctcaaatcccattcctcaaattggcatttcaanatggtgncttnatngattt

SEQ ID NO: 118503 - DNA, 984 bp, Arabidopsis thaliana
gtaaatattttattgttaaaacccatttaataattattattttacttaaaagtaacttgagacttgcatagtgaagcataagtgatgtcttttttgggaaatattatgtaatatattctgatttggcaggacggccatgaaagactttggtaagagactggagaatcttgctgaggatttgttggatctactgtgtgagaatctagggttagagaaagggtatttgaagaaagtgtttcatggaacaaaagggcccaacctttgggacaaaggtgagcaattatccaccatgtcctaaaccagagatgatcaaaggtcttagggcccacactgatgcaggaggcatcatcttgttgtttcaagaccacaaggtcagtggtctccagcttcttaaagatggtgactggattgatgttcctcctctcaaccactctattgtcatcaatcttggtgaccaacttgaggtgataaccaacgggaagtataagagtgtgctgcaccgtgtggtgactcaacaagaaggaaacaggatgtcggttgcatcgttttacaacccgggaagcgatgcggagatctcaccagctacttcgcttgtcgagaaagattccgagtacccgagtttcgtctttgatgactacatgaagctttatgcaggggtcaagtttcagcccaaggagccacggttcgcagcaatgaagaatgcttctgcagttacagaactgtatcctacagcagccgtagagactttctaaaaatggatttgagattcaagtgaagcagagaaagaaagatgagtttgtgttgtgtgttatggcaataagttaaaacttgtattagtgttgattaattgttggtcaattggtgtgttttaaagtgtggggtgtttgcggccgcgaattcaaacagccaaggggatccactagttctagagcggccgccaccgcggtggaggtccagcttttgttacctttagaagggttgttg

SEQ ID NO: 118504 - DNA, 542 bp, Arabidopsis thaliana
  unsure (1)..(542): unsure at all n locations
cgaacgcaaatacacaactngttactttaaatttttttttttcaacgaagagagagagaaaggcacgccgtgatgaacatgaaggggccggcagtagacttgtccaagctcaatggggaagagagagaccaaaccatggctctaatcaatgaagcttgtgagaattggggcttctttgtgatagtgaaccatggattaccacatgacttaatggacaagatcgagaagatgacaaaggaccattacaagacatgccaagaacaaaagttcaatgacatgctcaagtccaaaggtttggataatcttgagacagaagtcgaagatgtcgattgggaaagcactttctacgttcgtcacctccctcaatccaatctcaatgacatttcagatgtgtctgatgaatacaggacggccctgaaagactttggtaagaggcttggggatcttcctggggttttttggtntcctnttttggatntngggtttgngangggttttntgaanttttttttggccaaangccccctttggccaangtggga

SEQ ID NO: 118505 - DNA, 429 bp, Arabidopsis thaliana
gcttaaagaaaaaaattcaaagtttcatcaaacattcggaacaacataattggaggggacatatatatgcacatgcatataaaattgagaagatgtgaaatggattaggaacatcttgaaaacattatcatctcaacaaagactgttattatctcttctcagtttgaaacacagataatactagtataaactaaaaagccttacatcattctaaaatatcatcactcaagtggcttcgtatttgggatcagcagttacgtagtgataagcaattaccaatgcgaagatgaagatgccaagaaagttggcaataaaccccaagtcctgatcatcgatcatcgttttatcgggacggaatcggtgggaaaggatgagatctccagactccagggaccagaagcgcggacgcttgggcggacgcctggtcga

SEQ ID NO: 118506 - DNA, 707 bp, Arabidopsis thaliana
ggaaaaaaaaaaaaaagaggcagaaccaaaaaactttagggttcgatttcgctccttggtaatcaccatgtccggagaagaagaagagaacgccgccgaactcaagatcggagatgagtttttgaaggcaaagtgcttaatgaactgtgaagtctctttgattcttgagcacaagtttgaacagcttcagcaaatctcagaggatcctatgaatcaagtttctcaagtgtttgagaagtccttgcaatatgtgaagcgattcagccgctacaagaatccagatgctgttagacaagttcgagaaatactaagcagacatcaactcactgagtttgagctatgtgttcttggcaatctctgtcctgaaactgttgaagaagcagtggcaatggttccttctcttaagacaaaaggaagagctcatgatgatgaagctattgagaagatgctcaatgatctctcacttgtcaagagattcgagtagtgcagaagattctcaagatctaagattctgaacatttagcaggatgctttacttgccttctagctgatctggagttaattcgccacgtctgaaattataaagctttaatgcctagaatttctggaatgataccttcatgttaaatgaatgtaatttacaacggatgatccaagcttttaatgaaatataccatctctttttcactaaaaaaaaaaaaaaaaaa

SEQ ID NO: 118507 - DNA, 1194 bp, Arabidopsis thaliana
  unsure (1)..(1194): unsure at all n locations
nnnnnnnnnnnnnnnnnnnnnnnnnnnnnnnngagtaatttagcatctatccacgcctgaacccgaaaaactctgaaagctgagctctggtaatggcgggtttagcaatttcacctcctctcggtctttccttctcttctcgaactcgaaaccctaaacccacttcctttctatctcacaatcaaaggaatcctataagacgtatagtttctgctctacagagtccatatggagattctctgaaagctggactttctagtaatgtttctggatccccaataaagattgacaacaaggctccaagatttggagtgatagaggcgaaaaagggaaaccccccagtaatgccttcagtgatgacccctggaggacctttagacctctcttctgtgttattccgtaaccgcataatcttcatcgggcaaccaattaacgcacaggttgctcagcgagtcatatctcagcttgtaacccttgcatctattgatgataaatccgacatcctgatgtacttgaattgtcccggtggcagtacttactccgtcctaacaatttatgactgtatgtcttggataaagcctaaagttggaacagtggcgtttggagtagctgcaagccaaggagcattttttcttgctggaggtgaaaaaggaatgcgttatgcaatgccaaatactcgtgtcatgatacatcaaccacaaactggatgcggaggacatgtagaggacgtgaggagacaggtcaatgaagccatcgaagcccgacaaaaaattgacaggatgtatgcagctttcactggacaacctctggagaaagtgcagcaatacactgaaagagatcgtttcttatcagcatctgaggcgcttgagttcgggctcattgatggtctattggaaacagaatactgaagcagcatacaggacaatgcacaacaacagctcattgcaatgttcaaagcttccattttcatttgaatatgaacggttgtaactgatatttgtgcataaatcagtttggttttcttggttttattgtctactaaacagaatgagaaaactaaactgtttatttttttactgaaaaatctgaaagttgtgttctaaacccccccaacaaaaaagaacaaagnnnnnnnnnnnnnnnnnnnnnnnnnnnnnnnnnnnnnnnnnnnnnnnnnnnnnnnnnnnnnnnnnt

SEQ ID NO: 118508 - DNA, 521 bp, Arabidopsis thaliana
gctcattgcaatgttcaaagcttccattttcatttgaatatgaacggttgtaactgatatttgtgcataaatcagtttggttttcttggttttattgtctactaaacagaatgagaaaactaaactgtttatttttttactgaaaaatctgaaagttgtgttctatttttgtttacacacgataaccaagcaaaccggaactttatggaaaaaccggattggttaggtccagcttgttactacttaatcctatacaatgtcaatgcatatgttgctttggtacatagaattgccggaaattgggaacagtagtggctgcactgactcaaaagctctccaataatctctcctttagaattcattgcaaatatgtgaatcacaaaccaaaaatcgatctctgaaactctgctctctagtcaccgttaagttccatagttttggtggactcctgtgaacttgtgaattgccttcaaaagggaaccatatctcatatacttcaaagttcccatatgtactatctc

SEQ ID NO: 118509 - DNA, 1545 bp, Arabidopsis thaliana
gaagtttcttacaatttgtaaagagatctgttttagggttttgccttgttcttgtggcgggaataacaaagacatcgccgatatggggaaagacgaagaggaaatgcgaggtgagatcgaggagcgactaatcaatgaagagtacaagatctggaagaagaacactcctttcctctacgatctcgttattactcacgctctcgagtggccttcacttactgttgaatggcttcctgaccgtgaagaaccttccggtaaagactactccgttcagaagatgattctcggtacccatacctccgagagcgagcccaattacttgatgctagcccaagttcagcttcctcttgacgataccgagagtgaagctcgtcagtacgatgatgaccgctctgaatttggtggctttggctgtgcaactggaaaggtacaaattatccagcagataaatcatgatggtgaggttaatcgagctcgctatatgcctcaaaaccctttcataattgctaccaagacagttaatgcggaggtctatgttttcgattacagtaagcatccatctaagcctcctcttgatggggcttgtaatcctgatttaaagcttagaggtcacagctctgagggatatggtctctcttggagtaagttcaagcagggtcatttgcttagtggctctgatgatgctcagatctgcttgtgggatattaacgctactcctaaaaacaaatctctggacgctcagcagatttttaaggctcatgaaggggttgtggaagatgttgcatggcatctgagacatgagtacctgtttggatcagttggagatgaccaataccttctcatatgggatctgcgttctccatctgccagtaaaccagtacagtctgtggttgctcattcgatggaggttaactgcttagccttcaatccatttaatgagtgggttgtggcaacaggatcaactgacaagactgttaaattattcgatctacggaagctaagcaccgctcttcacacatttgatagccacaaagaggaggtttttcaagttggttggaacccaaagaacgagactattttagcttcatgttgccttggtagaagacttatggtttgggaccttagcaggatcgatgaggaacagacagtggaggacgcagaagacggcccacctgagctgctgtttattcacggtggtcacactagcaaaatttcagatttctcgtggaacccttgtgaagattgggttatttccagtgttgctgaggacaacatactccaaatatggcaaatggctgaaaacatctatcatgatgaggatgacgctccaggggaagaaccatcaaaagcttcttagcttgttatttagtatccaaagcgcactgatcttatgggacagtatttatttatacatctctgctattgtttagttcaagtatttagtgttcattgtgtaaaatgaggcatgagaggatggtagcaagtgggaatttttctttataacatgaaggagttgattctaatctcactaaaaaaaaaaaaaaa

SEQ ID NO: 118510 - DNA, 1620 bp, Arabidopsis thaliana
  unsure (1)..(1620): unsure at all n locations
atgatttgccggcactaatacgactcacttagggaaagccggtacgcctgcaggtaccggtccggaattcccgggtcgacccacgcgtccggagagagagagaagtagattgagaggcgagagagataatggcagatgaaggtaaggaggagacaggaatgggtcaggtcgaggaagatttttctgtgtggaagaagaacacaccatttctctacgatcttttgatctctcacccactcgaatggccatctctcaccgtccattgggttccatcgacgccaaatccttacgtagcagactcttacttcggtgtccacaagcttatactcggtactcatacttccggtagtgctcaagattttctcatggtcgccgacgtcgttaccccgacaccaaacgcagaacctgggataggcggcgctaatcaggatccctttattcctaaggtggagattaggcagaggatacgtgttgatggagaagtgaacagagcgcggtgtatgcctcaaaagccgacgcttgtgggtgcaaagacgagtgggtgtgaggtgtttctgtttgattacgccaaacatgctgcaaagtctcaaacgagtgagtgtgatcctgatctgaggctagtgggacatgacaaggaagggtatggattgtcttggagtcctttcaaggaaggttatcttttgagtggttcacaggatcagaagatctgtctttgggatgtttcagctacaccgcaagataaggttttgaatgcaatgtttgtgtatgagggacatgaaagtgctatcgcagatgtgtcatggcacatgaagaatgagaacctttttggttctgcgggtgaggatggccgattggtgatatgggacacacggacaaaccaaatgcaacaccaagtgaaagttcacgagagagaggtcaactatctatctttcaatccgttcaacgaatgggtattggccacagcttcctcagactccactgttgctttgtttgacctccggaaacttaatgcgccattgcatgtcatgagcagccatgagggagaggtcttccaagtggagtgggatcctaaccatgaaacagtactcgcatcttcaggggaggacagaaggctgatggtctgggacctgaacagggttggagaagagcagcttgagatagagttggatgcagaagatggtccaccagagttactcttctctcacggaggccacaaggctaagatatcagactttgcttggaacaaaaacgagccttgggtcattgcaagtgtagctgaagacaacagtcttcaggtgtggcagatggcagaaagcatctatcgcgatgaagaggatgccgaggacatcaaagaagatattacacaacaatcatgaaaattaagaaacgatttggtctctccattacttaaagtgtcttatcttgctttagccagtttctgaaagacaagctttgcgtctgtattaggattaacatgaatcatctctgtttgttaatgtaaccatgttggattttgttggtttcctatcaaaaaaaaaaaaaaaaaaannnnnnnnnnnnnnnnnnnnnnnnnnnnnnnnnnnnnnnnnnnnnnnnnnnnnnnnnnnnnnnngtcctaaa

SEQ ID NO: 118511 - DNA, 1673 bp, Arabidopsis thaliana
aagaagaacgatcgagagcgagagagagagtgatggcggcagaagagggtaaagatgaggcgggattggatcaggtggaagaagagttctctatttggaaaaggaacacaccttttctctacgatcttatgatctctcacccactagaatggccttctcttactctccactgggttccttcgacgccgattccgtactcgaaagatccttactttgccgtccataagcttatccttgggactcatacctccggtggtgcccaagattttctaatggtcgccgatgtcgttattccgacacccgacgctgaaccaggattaggtggaagagatcaggaacctatcgtccctaaggtggagattaagcagaagatacgtgttgatggagaagtgaacagagcgaggtgtatgccacaaaagccaactcttgtgggtgctaaaacaagtggctctgaggtgtttctgtttgattacgccagactctctggaaagccccaaacaagtgagtgtgatcctgatctgaggctaatgggacatgaacaagaaggttatggattggcttggagttcctttaaggagggttatcttttgagtggctcacaagatcagagaatctgcctttgggatgtctcagcgactgccactgataaagttttgaacccaatgcatgtgtatgagggacatcaaagtatcatcgaagagttagcatggcacatgaagaatgaaaacatattcgggtctgcgggtgatgattgtcaattggtgatatgggacttacggactaaccaaatgcaacaccaagtcaaagttcacgagagagagataaactatctttctttcaatcccttcaatgaatgggtactagccacagcttcctcagactcaactgtcgccttgtttgaccttcgtaagctgactgcgccattacatgtcctgagcaaacacgagggagaagttttccaagtggagtgggatcccaaccatgaaacagtgcttgcatcttctggcgaggacagaagactcatggtctgggatatcaacagggttggggatgagcagcttgaaatagagttggatgcagaagatggtccacctgagctgctcttctctcatggaggccacaaggccaagatatcagactttgcctggaacaaggacgagccttgggtcatctcaagtgtagctgaagacaacagtcttcaagtctggcaaatggcggaaagcatctaccgcgaagatgacgaggatgaggatgatgatgatgaaggcaaccaaaatgcacaacattccaatgaaaaccagaaatgattcaagtctttggcggatgatgatgacttacaattgttgttgttaacgtgtttgagccaatatataataaacaagtttggtgtatgtgctaccctaagtatgaaacgctcgtttattccaggacgtctgttatgattcttgagtttaataatagttcagtaaaccctaaaaaaaaaaaaaaaaatgagattggttcaagtaaaagttaagctatattatcacatttaagtcaacaaagcaacttgggatcacaattgtgagaacgttgcaatgttacagtaaggctagatcagagacagcccctcaagctcaatgtacaaaacagtgtgcttaatgggcatacctggttctcaccaagcaacatga

SEQ ID NO: 118512 - DNA, 665 bp, Arabidopsis thaliana
ttgggagattaaagtctgaactttttagatctcaaagcttctccatctctccctcaactcaagctcctgatggcgagcaatatcatcttgttcgaggatatcttcgtggtcgatcagttagaccctgatggcaaaaagttcagattaaagttacatcagcagttcaagctacagagccacaacttggaaatgtttatgcatttagatgttaatacagaggtttatccattggctgttggtgataagttcacacttgcgttggctcctacgctgaatctcgatggaacccctgataccggttattttactccgggagcaaagaaaacacttgccgataagtatgaatacataatgcacgggaagctttacaagatctctgagcgtgacggcaaaactccaaaagcagagctatatgtttcgtttggcggcctcctgatgttgcttaagggagatccagctcatcatttctcacttcgaactcgaccagaggctcttccttctcatgaggaagctgtgcggtgccattttttctggataaaaactgaattaatagagagcttgatctaatgtttaacttttactactttcaactcttgcaattttcatgaagcaactcttgtgcaaaagcaagtttttccgttccaaacaaaaaaaaaaaaaaaaaa

SEQ ID NO: 118513 - DNA, 528 bp, Arabidopsis thaliana
actcaagctcctggttcggaactatttacttttctatgcgattggttgtttataagttgatttcagagttcggattcttgtactcattagatgtccatataggtcttgtttactggtttaattggggttttatcaaggaaataaagagtgtttagggtttgaatttccgtgtcgtcttttctatctcctttgcagatggcgagcaatatcatcttgttcgaggatatcttcgtggtcgatcagctagaccctgatggcaaaaagttcgataaagttactgcgcgttcaagctacgagccacaactttggaaatgtctatgcatttagatgttaacactgaggtttatccattggctgttggtgataagttcacgctggctatggctcccacgcttaatctcgatggaactcctgataccggatactttactcccggagcaaagaaaacacttgcagattagtatgaatacatcatgcacgggaagctttacaagatctctgagcgtgacggcaaaaactcaaaagcag

SEQ ID NO: 118514 - DNA, 1036 bp, Arabidopsis thaliana
  unsure (1)..(1036): unsure at all n locations
nnnnnnnnnnnnnnnnnnnnnnnnnnnnnnnnnnnnnnnnnnnnnnnnnnnnnnnnnnnnnnnnnccacggtgtgagtaatttaggccgcttcttcttcttcttcttccactgtcgttctctctgtaaatcgcttcttcaatcatctctgtggatttgtctctattcataacttggtgaagaagatgttgacggaagaggagctcaaaagattgtacagaatccagaagacgttgatgcagatgttaagggatcgtggatattttatcgcggattctgaacttacgatgactaaacaacagtttattaggaaacatggtgataacatgaaaagagaggatcttgttactcttaaggctaagcgaaatgataatagtgatcagctctatatattcttccctgatgaggcgaaagttggtgtgaagacgatgaaaatgtacacgaacaggatgaaatcagagaatgtgttcagagctattttggttgtgcaacagaacttgaccccgtttgctcgaacttgcattagtgagatctcttctaagtttcatctggaagttttccaggaggcggaaatgctagtgaacattaaagaacatgttcttgttcctgagcatcaagttcttaccactgaagagaagaaaactttactggagagatacacagtgaaggagacacagcttccaaggatccaagtgactgatccaatcgcaagatactttggactaaaacgtgggcaagtcgtgaagatcattcgtccgagtgaaacggctggtcgttatgttacctatcgttatgttgtataagccaaagcaaaaggcttttgtggattgtaatgcgaattgaacgctgagagttgtgaaacataagagtaatgcttttgtactaaaccaaactgatgactgtgttttatttttgtttgtccgataggagaaattaaagcttgaaacaacttatttgctaaattactcacactgnnnnnnnnnnnnnnnnnnnnnnnnnnnnnnnnnnnnnnnnnnnnnnnnnnnnnnnnnnnngtc

SEQ ID NO: 118515 - DNA, 1726 bp, Arabidopsis thaliana
caaagctttggactctcaggccaggaagactatgggattgggcggcgatcaatcctttgttcccgtcatggattccggccaagtccgcctcaaggagctcggctacaagcaagagctcaagcgcgatctctcggtcttctccaatttcgccatctccttctccatcatatcggtgctcactggtatcaccaccacctacaacaccggtttaagattcggcggcactgtcactctggtctacggatggttcctggccggctccttcacaatgtgcgttgggttatctatggccgagatctgctcctcttaccctacctccggtggtctctactactggagtgctatgctcgctggccctcgttgggctcctcttgcctcttggatgactggctggttcaacatcgttggtcagtgggcagtgacggccagcgttgacttctctctggcacagttgattcaggtgatcgtccttctctccaccggcggtagaaacggcggcggttataaaggatcagactttgttgtgattggtatccatggtgggatcctcttcatccacgctcttctcaacagcctccccatctccgtcttgtctttcattggacagcttgctgctctttggaatctcctcggggttttggtgctcatgattctgattcctttggtttctacggaaagagcaaccactaagtttgtctttaccaatttcaacactgataatggccttggcatcaccagctacgcttacatattcgttttgggactcctcatgagccagtacaccattacagggtatgatgcctctgcccacatgacagaagagacagtcgacgcagacaagaacgggcccagaggaataatcagtgcaattggtatatcaattctgtttggatggggttatatattgggcataagctatgccgtcacagacataccttctcttctgagtgagaccaacaactctggtgggtatgccattgctgagatcttctacttagctttcaagaataggtttgggagcggtactggtggaatcgtgtgcttaggcgttgttgcggttgctgtgtttttctgtggcatgagctctgtcaccagcaattccaggatggcgtatgcgttttcgagagatggagcgatgccaatgtcgccgttatggcacaaagtgaacagcagagaggtccccattaatgcggtttggctctctgctctcatatcattttgtatggccctcacctcactggggagcatagtggcgttccaagcaatggtgtcgatcgcaacgattggactgtacatagcatacgcaatcccgattatattgagagtgacgcttgcgcgcaacaccttcgtacctggaccattcagcctgggaaaatacggaatggtagtcgggtgggtggcagtcctgtgggttgtaaccatatcagtcctcttctccttacccgtggcatatcccataacagcagagacactcaactacactccggtggcagttgctggtttggtggccataaccctctcatattggcttttcagtgcccgccactggtttacgggtcccatctccaacattcttagctgaaacaacgtttcaggggttgatttatagtaaagccattgttagctagctgatatttacccttttatacattcaacaagcaacaacacatctgtcacatttttatttcatcgccaaaactttaaactttaaaaaaaaaaaaaaaaa

SEQ ID NO: 118516 - DNA, 1575 bp, Arabidopsis thaliana
cccacgcgtccgcccacgcgtccggcagaaagagagatgcgagcgattcatatcgtgacgacgcgattgagctcgagctttagacctattcttcttcttgacttggtttcttcttgttcgcctcctcgacagttctctatccctaggcgcctaatctgtgccgccgccaatggaggaggcaggtcaggttccattgttgctcctttggtgactgaagaagactttcacaagaagatcgatgtcaatcctcctaaaggaactcgtgattttcctcctgaggatatgcgtctccgcaattggctctttaaccacttcaaagaggtctcacggttatatgggtatgaggaagtggattatccagtactggagacggaggcattgttcatcagaaaagctggggaagagattagagaccaactttactgctttgaagatagaggaaatcggcgtgtagcattgaggcctgagcttacaccttctttagccaggcttgtcatacagaaaggaaaatctgtttcccttccattgaagtggtttgcaattgggcagtgttggcgatatgagagaatgacaagaggaaggcgacgtgagcattaccaatggaatatggatattattggtgtgcctcaagtaactgctgaagcagaactaatttcatctatagtcaccttcttcaagcgaattggaatcactgcgtcagatgtgggttttaaggtttcaagccgcaaggttttacaagaattgctaaaaaagtatggtgtacccgaagacctgtttggaagagtttgtatcattatagacaagatagaaaagataccaattgatgaaataaaaaaggaacttgggttcacggggatatcagaagatgctattgaacaattactgcaagtgctttctgtgaagtccttggatgatttggaagatataattggtggagcaggagaagccattgcagatttgaaacaactcttctcacttgctgaaaagtttggttattcagagtggatacagtttgatgcatctgttgtgcgcggtcttgcttattacactggtatcgtcttcgagggatttgatcgaaaagggaagctgcgagctatatgtggtggtgggagatatgataggttactctctacttatggaggtgatgactttcctgcttgtggttttggtttcggcgatgctgtaatagttgaattgctcaaagagaaggatttgttgccagaactgggacaagaagtagagaacatagtgtgtgcgttggacaaagatctccaaggagctgcagccacagttgcaacagctctcagagacaaaggccaaaccgttgatttggtattagagagtaaaccgctgaaatgggtgttcaagagagcagctcgggtaaacgcaagaaggctggttctggttgggaaaacagagtgggaagatggttcggtcagtgttaaggtgttgtcttcaggtgagcagttccaagtcaaactcagtgacttagagtagtatcttaaggctttattaacatgatgaaccattgtttcattctcttacggcttactatagtaaaagaaccaatcattc

SEQ ID NO: 118517 - DNA, 566 bp, Arabidopsis thaliana
  unsure (1)..(566): unsure at all n locations
aacctggtccccctccaggtcccggcccggatncccggtcgnccccacgcgtccgcgatgcagtaattgttgatttgctcaaggagaaggatttgttgccagaattgggacaagaagtagagaacatcgtgtgtgctttggacaaagatctccaaggagctgcaaccaccattgcaaccgctcttaaagacaaagggcaaaccgttgatttagtattggagagtaaaccgctgaaatgggtgttcaagagagcggctcgggtaaacgcaagaaggccggttctggttgggaagttggttcggtcagtgtcaaggttttgtcttcaggtgagcaatttcaagtcaaacttaatgacttggagtagtagtatctaaggcttgaacaaattgttcaattgtcctttttttcaaaagcaattgatttgagattggatttttattttgtcctcaaaggtttcattaagaattttattgatggatcttcaatactcaaaaaaaaaaaaaaaacaaagggcggccgctctagaggatccaagcttacgtacgcgtgcatgcgacgtcatagtt

SEQ ID NO: 118518 - DNA, 515 bp, Arabidopsis thaliana
catacgactcactttagggaaagctgctacgcctgcaggtaccggtccggaattcccgggtcgacccacgcgtccgcccacgcgtccggctgaagaagcaaacaacaatagaaaagagatgcgagcaattcacatcgtgacgacgcgattgagctccagctttattaggcctgttcttcttgacttcgtttcttgttcgcctctacgccagttctctacccctaggcgctttatctgtgccgcgagcaaggtcaatggaggaggcaggtcaggttcgattgttgctccattggtagtgaatgaagaatttcagaacatcgatgtcaatcctcctaaaggaactcgtgatttccctcctgaggatatgcgactccgcaactggctcttcaaccacttcaaagaggtctcacggttatttgggtatgaggaagtggattttccagtactggagacggaggcattgttcatcagaaaagctggggaggagattagagaccaagtttgtctttctacgt

SEQ ID NO: 118519 - DNA, 784 bp, Arabidopsis thaliana
  unsure (1)..(784): unsure at all n locations
cactggtatcgtcttcaaggttagattttctccatacatgaatactggtctatagttttgtaatagcaactgatagacaacgttttgtgatagggatttgatcgaaaagggaagctgcgagctatatgtggtggtgggagatatgataggttactctctacttatggaggtgatgactttcctgcttgtggttttggtttcggcgatgctgtaatagttgaagtaagttaaatttgcttctggtcactattataacccgcagcgaatagttatgtgtctctgaatatctggttcttatttttgccactttcatttagttgctcaaagagaaggatttgttgccagaactgggacaagaagtagagaacatagtgtgtgcgttggacaaagatctccaaggagctgcagccaccgttgcaaccgctctcaaagacaaagggcaaaccgttgatttagtattggagagtaaaccgctgaaatgggtgttcaagagagcggctcgggtaaacgcaagaaggccggttctggttgggaagttggttcggtcagtgtcaaggttttgtcttcaggtgagcaatttcaagtcaaacttaatgacttggagtagtagtatctaaggcttgaacaaattgttcaattgtcctttttttcaaaagcaattgatttgagattggatttttattttgtccgcgaaggtttcaaaaaaaactaacatgatggatcttcaatactccgatttaggtaatnnngnaaaaaaaaaaaaacaacaaaaaagggcggccgc

SEQ ID NO: 118520 - DNA, 1235 bp, Arabidopsis thaliana
gatacataaatcttcaacacaactctttaattatctagtttaatacaaatggcggcgatagaggacagtccaacgttttcctctgtggtaactccggcggcttttgagataggcagcctcccgacaaccgagataccggtggatccggtggaaaatgattcaacagcaccgccaaaaccggtgagaatcacctgtccaacagtcgccggaacttatcccgtcgttttattcttccatggcttttatcttcgcaactacttctactctgacgttcttaaccacatcgcttcgcatggttacattcttgtagccccacagttgtgcaaattattgccgccgggagggcaagtggaagtggacgatgctggaagtgtgataaactgggcatcggaaaacctcaaagctcacctaccaacttcggtaaatgctaatggaaaatacacctcactcgtgggccacagccgcggtgggaaaacggcgtttgcggttgcgctaggccatgccgcaacattagacccatccatcacgttttcagctctaataggaattgatccagtcgcaggaactaacaaatacattagaaccgatccgcatatcttaacgtataaaccggaatctttcgagctggacataccggttgcagtggtgggaaccggactcggaccgaagtggaacaacgtgatgccaccatgcgcaccaacggacttaaaccatgaggagttttacaaagagtgtaaggcgacgaaagcccatttcgtggctgcggattacggacatatggatatgttggacgatgatttgcccggttttgttgggtttatggccggttgtatgtgtaagaatgggcaaagaaaaaagtctgagatgaggagctttgtaggtggaattgtggttgcgtttctcaagtatagtttgtggggtgaaaaagcggagattcgattgattgtgaaggatccttccgtttctccggccaagcttgatccttcacctgagttggaagaagcttctggtatcttcgtctagatttgtgttatgtactattatcagaggggtcttgaatatttgaaaaacctatcaatgttttctagctccaagctagctattgttcatgtcctaagttgcatgtgtatttttattaaactcgatcaaaacatttgttatagttttaccccaaaaaaaaaaaaaaaacgcccgctctagaggatccaagcttacgtacgcgtgcatgcgacgtc

SEQ ID NO: 118521 - DNA, 1122 bp, Arabidopsis thaliana
  unsure (1)..(1122): unsure at all n locations
gctctctacgactcactatatnggaaagctggcacgcctgcaggtaccggtccggaattcccgggtcaccaacgcaaacctccaaaacagggccggggcgattcattcacaatctcggcgattctctcttccgtctcgagtcgctgagatccatcagtaaaaggtctgcaaaatggttgctcagggattcactgtggatcttaaaaagccccttgtatttcaggttggtcatcttggagaagattatgaggaatgggttcaccaacctatcgcgaccaaggaaggccctcggttttttcagagtgacttttgggagttcttgacacttacagtttggtgggcagttcctgtcatttggttgccagttgtagtctggtgcatatcaaggtcagtaagtatgggatgttcactttccagaaatcgtcccaattgttgtcatgggaatattcatctggacattttttgaatacgttcttcaccggttcgttttccacataaaaacgaagagttactgggggaaacactgcacactatcttattcacggatgccatcataagcacccgatggaccaccttcggctcgtctttcctcctactgcaacagcgattttatgctttccgttctggaacattgcgaaggctatctcaactccttcaaccgcacctgcattgtttggtggaggcatgctcggatatgtgatgtacgatgtcactcattattaccttcaccatgcccaacctactagaccagtgaccaaaaatctcaagaagtaccatttgaatcatcacttcaggattcaggacaaaggatttggtataacttcgtcgttatgggacatagtctttgggacacttcccaccacaaaagcccccagaaaagagcaatagtagtaaaaggcaaaaactaaaaagatgtttgtaatacatttaatttaatcttaagttattaatcatccttctgaattttgagatgtttaatctgaggtttcatttggatccctgtcttttgtagtttgtaaatcaatacttcccaatcctaatataatatttttctgcaaagccctaaaaaatctactnnnnnnnnnnnnnnnnnnnnnnnnnnnnnnnnnnnnnnnnnnnnnn

SEQ ID NO: 118522 - DNA, 426 bp, Arabidopsis thaliana
gttgttttttttgaatatattgacgattcgttggcctccgagatctaaggcatctctcacaatcaacggtccagattccatctagaagatatattacaccgaccttgttttctctatctaattctcacacacacaccaacgcaaacctccaaaacagggccggggcgattcattcacaatctcggcgattctctcttccgtctcgagtcgctgagatccatcagtaaaaggtctgcaaaatggttgctcagggattcactgtggatcttaaaaagccccttgtatttcaggttggtcatcttggagaagattatgaggaatgggttcaccaacctatcgcgaccaaggaaggccctcggtttttcctgagtgactttttatgaggtatttactatctctcaattctttactttttttcatcctact

SEQ ID NO: 118523 - DNA, 1799 bp, Arabidopsis thaliana
gtcgacccacgcgtccgctcatctctcatcgttccgggagaagagaagagagacccatccctcacttcaaagttcaaagtctcgaaggatcttctccaactctctctaaacaagattccaaattttcaaaggtgaatttgtttgatagaatcaagaacaaacctttaaaatggcgcatctactttcagcttcatgcccttcagttatctcacttagcagcagcagcagcaagaattcagttaagccgtttgtttcagggcagaccttcttcaatgctcagcttctttcaagatcttctctcaaaggacttctcttccaagagaagaaaccgagaaaaagctgcgttttcagagcaactgctgtacctataacccaacaagcaccacccgaaacatctaccaataactcatcctctaaaccaaagcgtgttatggtcattggtggagatggttattgcggttgggctactgctctccacttgtccaagaagaattacgaagtttgcattgttgacaaccttgtaagacgtcttttcgaccaccagcttggacttgagtcattgactcctattgcctccattcatgaccgaatcagccgatggaaggctttgacagggaaatcaattgagttgtacgttggtgatatctgtgatttcgaattcttagctgagtctttcaagtcttttgagccggattcagttgtccactttggggaacagagatccgctccttactcgatgattgaccggtccagagcagtttatacacagcacaacaatgtgattgggactctcaacgttctctttgctataaaagagtttggagaggagtgtcatcttgtaaaacttgggacgatgggtgagtatggaactccaaatattgacatcgaggaaggttatataaccataacccacaacggtagaactgacactttgccataccccaagcaagctagctccttttatcatcttagcaaagttcatgattcgcacaacattgcttttacttgcaaggcttggggtattagagccactgatctcaaccaaggagttgtttatggagtgaagactgatgagacagagatgcatgaggaactccgtaaccgactggattacgatgctgtgtttggtacagcacttaaccggttctgtgtgcaagctgctgttggtcacccacttacagtttatggtaaaggtggtcagacgagaggctacctcgatataagagacacggttcaatgtgttgagatcgctatagcaaacccggcaaaagctggtgagttccgggtcttcaaccaatttacagaacagttttcagtcaatgaactggcttcactcgtcactaaagcgggttcaaagcttgggctagacgtgaaaaagatgacggtgcctaacccgagagtggaggcagaagaacattactacaacgcaaagcacactaagctgatggaacttggacttgagcctcactatctatctgactcacttcttgattcgttgctcaactttgctgttcagtttaaagatcgtgtggacacgaaacaaatcatgcctagtgtttcctggaagaagattggcgtcaagactaagtccatgaccacataaagtgcagaccaatattacacataaggagagattatgaaagagatgatgtgttgtttggtatcttcaaacttcatttctgcaaaagacttgctaggcttaagaggttttgtccatattacattgtgcaggttctttaatgttagatcttaatttcgatgaaaaaaaaaaaaaaaaaaaaaaaaaaaagggcggccgc

SEQ ID NO: 118524 - DNA, 4370 bp, Arabidopsis thaliana
gcgtccggaagaaaaagctgttcctgtgctttagcagaccttttggtagttgtcctggtcgctgatcatccctttccgacaactctgttgctctttctctcacgtttgagtcttaatcttcgattgtccttggtcatccttaagttttgtttttctctttcgattcattttccagatttctttttatagaaacccgtctctttgatttgattccccccaagaaaggaaagcaaaacaaagaagagcagctgaatcaagtaactttgtgggtgtttttgaattatctgactcgagataaagagcttcgttaaaaacggaatcttttttaaggtcgtatgctttgtttgtctctccggagattccgcgtgtgaaaagtcgtggtttttgatctctttgagatacttaaaatttccgagaaattggcggctctgtcggagataaaaagctgagatcttggagttccccatttctgattaacgattctctctgctgttacttgagctaggaagctattaacaacttgagtgaaagtttagggcttttgatgaagctctcacgcaaagagcttagctttgtataagctcagattcagattatttattgggtttattcttcagagaaagtaaagttgagtgatcatgaaagctccttcatcaaatggagtttctcctaatcctgttgaaggagaaaggagaaatataaactcagagctatggcacgcttgtgctgggccattgatttcgttgcctccagcaggaagtcttgttgtttacttccctcaaggtcacagtgagcaagtcgcggcttcaatgcagaagcagactgatttcataccaagttacccgaatcttccttccaagctcatatgcatgctccacaatgttacactgaatgctgatcctgagacggatgaggtctatgcgcagatgactcttcagccagtaaacaaatatgacagagatgcattgcttgcttctgacatgggtcttaagctaaacagacaacctaatgaatttttctgcaaaaccctcacggcgagtgacacaagtactcacggtggattttctgtaccccgacgagctgctgagaaaatctttcctgctctggatttctcgatgcaaccaccttgtcaggagcttgttgctaaggatattcatgacaacacatggactttcagacatatttatcgaggtcaaccaaaaaggcacttgctaactacaggctggagtgtgtttgtcagcacgaaaaggctctttgctggagactctgttctttttataagagatggaaaggcgcaacttctgttggggataagacgtgcaaatagacaacagcctgcactttcttcatctgtaatatcaagtgatagcatgcacatcggagttcttgcagctgcagctcatgctaatgctaataacagtcctttcaccattttctacaacccgaggtgggctgctcctgctgagtttgtggttcctttagccaagtataccaaagcgatgtacgctcaagtttccctcggtatgcggtttagaatgatatttgagactgaagaatgtggagttcgtcggtatatgggtacagttaccggtatcagtgatcttgatccagtgagatgggaaaactctcagtggcggaatcttcagattggatgggatgagtcagctgctggtgataggcccagtcgagtttcagtttgggacattgaaccggttttaactcctttctacatatgtcctcctccatttttccgacctcgcttttctggacaacctggaatgccagatgatgagactgacatggagtctgcactgaagagagcaatgccatggcttgataatagcttagagatgaaagacccttcgagtactatctttcctggtctgagtttagttcagtggatgaatatgcagcagcagaacggccagctaccctctgctgctgcacagccaggtttcttcccatcaatgctttcgccaaccgcggcgctgcacaacaatcttggcggcactgatgatccctccaagttactgagctttcagacgccgcacggggggatttcctcctcaaatctccaatttaacaaacagaatcagcaagccccaatgtctcagttgcctcagccaccaactacgttgtcccaacaacagcagctgcagcaattgttgcactcctctttgaaccatcaacaacagcaatcgcagtctcaacaacagcaacaacaacaacagttgctgcagcagcaacaacaattgcagtctcaacaacacagcaacaacaatcaatcgcagtctcagcaacaacaacaattgctccagcagcaacaacaacaacaactgcagcaacaacatcaacaaccgttacagcaacagactcagcagcagcagctaagaacacagccattgcaatctcactcgcatccacagccacaacagttacaacaacataagttgcagcaacttcaggttccacagaatcagctttacaatggtcaacaagcagcgcagcagcatcaggcgcaacaagcatctacacatcatttgcaaccacatttagtttcgggatcaatggcaagcagtgtcatcacgcctccgtccagctcccttaatcaaagctttcaacagcaacaacaacagtctaagcaacttcaacaagcacatcaccatttaggtgctagcactagccagagtagtgtaattgaaaccagcaagtcttcatccaatctgatgtccgcaccgccgcaagagacacagttttcacgacaagtagaacagcagcagcctcctggtctcaacgggcagaatcagcaaacacttttgcagcagaaagctcaccaggcacaggcccaacagatattccagcagagtctcttggaacagccgcatatacagtttcagctgttacagagattacaacagcaacagcagcagcaatttctttcgccgcagtctcagttaccacaccatcaattgcaaagccagcagttgcaacagctgcctactctctctcaaggtcatcagtttccgtcatcttgcactaacaatggcttatcgacgttgcaaccacctcaaatgctggtgagccgacctcaggaaaaacaaaacccaccggttgggggaggggtcaaagcttattcaggcatcacagatggaggagatgcaccttcctcttcaacgtcgccttccaccaacaactgtcagatctcttcttcaggctttctcaacagaagccaaagcgggccagcgatcttgatacctgatgcagcgattgatatgtctggtaatcttgttcaggatctttacagcaaatccgatatgcggctaaaacaagaactcgtgggtcagcaaaagtccaaagctagtttaacagatcatcaactagaagcatctgcctctggaacttcttacggtttagatggaggcgaaaacaacagacaacaaaatttcttggctccaacttttggccttgacggtgattccaggaacagcttgctcggtggagctaatgttgataatggctttgtgcctgacacgctactctcgaggggatatgactcccagaaagatcttcagaacatgctttcaaactatggaggagtgacaaatgacattggtacagagatgtctacttcagctgtaagaactcaatcttttggtgtccccaatgtgcccgccatttcgaacgatctagctgtcaacgatgctggagttcttggtggtggattgtggccagctcagactcagcgaatgcgaacttatacaaaggtgcaaaaacgaggctcagtggggagatcaatagacgtcaaccgttacagaggttacgatgagctgaggcatgatctagcgcgcatgtttgggatcgaaggacagctcgaagatcctcaaacatctgactggaaacttgtttatgtcgatcatgaaaatgacatcctcctcgtcggcgatgatccatgggaagaattcgtaaactgtgttcagagcattaagatcctttcatcagctgaggttcagcagatgagcttagacgggaactttgccggtgtaccagttactaatcaagcttgtagtggcggtgacagtggcaatgcttggagaggtcattatgatgataactcagccacttcgtttaaccggtgatggcagaagagttctctcacagacaaagattcttttttcttcgttttgtaatataacttctcgttgataacatgtctcaagtttccactgggcactgtagagcatttacctgtaaaatatcttccactaagtttacacggagattttatttgctgtgagtcactgtttctaccaagtttaactgatcaactgaaaccgcttgtaaccaaaaagagaaggaaaaacatgaaatca

SEQ ID NO: 118525 - DNA, 938 bp, Arabidopsis thaliana
  unsure (1)..(938): unsure at all n locations
ctttcttctcaatttagaacttagtagctagtcttcaagataatggcacttgaaactcttacttctccaagattatcttctccgatgccgactctgtttcaagattcagcactagggtttcatggaagcaaaggcaaacgatctaagcgatcaagatctgaattcgaccgtcagagtctcacggaggatgaatatatcgctttatgtctcatgcttcttgctcgcgacggagatagaaaccgtgaccttgacctgccttcttcttcgtcttcacctcctctgcttcctcctcttcctactccgatctacaagtgtagcgtctgtgacaaggcgttttcgtcttaccaggctcttggtggacacaaggcaagtcaccggaaaagcttttcgcttactcaatctgccggaggagatgagctgtcgacatcgtcggcgataaccacgtctggtatatccggtggcgggggaggaagtgtgaagtcgcacgtttgctctatctgtcataaatcgttcgccaccggtcaagctctcggcggccacaaacggtgccactacgaaggaaagaacggaggcggtgtgagtagtagcgtgtcgaattctgaagatgtggggtctacaagccacgtcagcagtggccaccgtgggtttgacctcaacataccgccgataccggaattctcgatggtcaacggagacgaagaggtgatgagtcctatgccggcgaagaaactccggtttgacttcccggagaaaccctaaacataaacctaggaaaaactttacagaattcattttataggaaattgttttactgtatatacaaatatcgattttgattgatgttcttcttcactgaaaaattatgattctttgttgtataattgatgtttctgaaaaagatataactttttattnnnnnnnnnnnnnnnnnnnnnnnn

SEQ ID NO: 118526 - DNA, 3173 bp, Arabidopsis thaliana
gggtccacccaaacgtccgcacacgcgtccgaaaataagcacacaccattatccatctgttttttttttcatctctctctctctcttttcttcttcgattcgtgttttctccatttcattctctgttacgcttcaatcgaactcggaagtcatggctatggccacaagggtgttggctcaatcgactccaccgtctttagcttgttaccagaggaatgttccttcacgtggatctggaagatcgagaagatcggtgaaaatgatgtgtatcatttttaatgtctggttaccaatgcaagggtttatgggattacgtggtaacaatgctttagacactcttggaaaaagtcgtcaagattttcattcgaaggtgcgacaggcaatgaatgtgcccaaggggaaagctagccggtttacggtgaaagcaatgtttgaaagatttacggagaaagctatcaaagttattatgcttgctcaggaggaagctagaagactaggccacaattttgtgggaaccgaacaaattcttcttggtcttattggtgagggtactggaatcgctgctaaagttttgaaatccatggggattaacttaaaagatgcacgtgtggaggttgaaaaaattattggaaggggaagtggctttgttgctgttgaaatcccattcactcctcgtgccaagcgtgttcttgaactctctcttgaggcaactcgccaacttggtcacaattacattggatccgagcaccttttgcttgggttgctacgtgaaggtgaaggagttgcagctcgagtccttgaaaatttaggtgcagatcctagtaatattcgcactcaggtgatacgcatggtgggtgaaaacaatgaagtaactgctaatgttgggggaggaagcagcagcaataagatgccaactcttgaagagtacggaacaaacttgacgaaactggctgaggagggtaaattggacccagttgttggaaggcagccgcagatagaacgtgtggtgcaaattcttggcaggagaaccaagaacaacccttgtcttattggagaacctggtgttggtaagacagctattgctgaaggacttgcacagcgtattgccagtggcgatgtccctgaaactattgaagggaagaaggttataacactcgacatgggtcttctagttgctggaacaaaatatcgtggagagtttgaagagagattgaaaaagcttatggaggaaattagacagagcgatgagataatcttatttatcgacgaagtgcatactttgattggggctggagcagcagaaggtgcaattgacgcagctaacattttaaaaccagctctcgctagaggtgaattgcagtgcattggagcgacaacattagatgaataccgaaagcacattgagaaagaccctgccttggaaagaagattccagccagtgaaagtacctgaacctaccgtggatgaaactattcagatccttaagggtctgcgagagcgatatgaaattcaccacaagcttcgttacacagacgaatctttagtagcagctgcacagttgtcataccagtatataagtgatcgtttccttcctgacaaggcaattgacttgattgatgaagctggttctcgggttcgacttcgtcatgcacaggtccctgaggaagctagggagcttgagaaggagcttaggcagataacaaaggagaagaatgaagctgtccgtggccaggactttgagaaggctgggacacttcgggatagagaaattgaactcagagctgaggtatctgcaatccaagcgaaaggcaaggagatgagcaaagcagagagtgagaccggtgaggaaggccctatggtcacggagtcagacatccaacacattgtgtcttcatggactggtattcctgttgagaaagtatcaaccgatgagtctgaccgtctcctcaagatggaagaaaccctccacaaacgtatcataggccaagacgaagctgtgaaagccataagccgagccattcgccgtgcacgtgttggactcaagaatcctaaccgtccaatcgctagtttcatattctcgggtccaaccggtgttgggaaatctgagcttgccaaagctttagcagcttactacttcggttccgaagaagccatgattcgtctagatatgagtgagttcatggagaggcacactgtctccaaactcatcggttcacctcctggatatgtcggatacaccgaaggaggtcagttaacagaagcggttagacgtcgcccttacaccgtcgttctattcgatgagattgaaaaagcccatccagatgttttcaacatgatgcttcaaatccttgaagatggtagattaacagacagcaaaggaagaacagttgacttcaaaaacacacttctcatcatgacatcaaacgtcggaagcagcgtgattgagaaaggaggaagacgtatcggattcgacttagactacgacgagaaagacagcagttacaacagaatcaagagccttgtaacagaggagctgaaacaatacttcagacccgagttcctaaacaggctagacgagatgattgtgttcagacagctaacaaagctggaagtgaaagaaattgctgacatactgttgaaggaagtgttcgagaggttgaagaagaaagagattgagcttcaggtgaccgaaagattcaaagagagagtagtagacgaaggttataacccgagctatggagcaagaccgttgagaagagccatcatgaggcttttagaggatagtatggcagagaagatgcttgcgagagagatcaaagaaggagactcggtgattgtggacgttgacgctgaaggtaacgtcacggtgctaaatggtggaagtggcactccaactacttccttggaggagcaggaagattctctccctgttgcttaaataaaaaaagcaaagtgcgtgcgtttctctcttcttttgctttggcccttaaatgaattatggcaagagaaggttatgaattgagatacatgggggctttcttaatatacattttctaaatatatgaaaaatgtaatgtatagatgacattgtgtagcttctttttcttccatgctttttaaggcctttagttctagagcggccgccaccgcggtggagctccagcaactgttac

SEQ ID NO: 118527 - DNA, 875 bp, Arabidopsis thaliana
ttaggacacactatagaagatctatgacgtcgcatgcacgcgtacgtaagctcggaattcggctcgagaacagacagcagaggaagaacagttgacttcaaaaacacacttctcatcatgacatcaaacgtcggaagcagcgtgattgagaaaggaggaagacgtatcggattcgacttagactacgacgagaaagacagcagttacaacagaatcaagagccttgtaacagaggagctgaaacaatacttcagacccgagttcctaaacaggctagacgagatgattgtgttcagacagctaacaaagctggaagtgaaagaaattgctgacatactgttgaaggaagtgttcgagaggttgaagaagaaagagattgagcttcaggtgaccgaaagattcaaagagagagtagtacacgaaggttataacccgagctatggagccaagacccgttgagaagagccatcatgaggcttttagaggatagtatggcagagaagatgcttgcgagagagatcaaagaaggagactcggtgattgtggcgtttacgctgaaggtaacgtcacggtgctaaatggtggaagtggcactccaactacttccttggaggagcaggaagattctctccctgttgcttaaataaaaaaagcaaagtgcgtgcgtttctctcttcttttgctttggcccttaaatgaattatggcaagagaaggttatgaattgagatacatgggggctttcttaatatacattttctaaatatatgaaaaatgtaatgtataaaaaaaaaaaaaaaaaaaaaaaaagggcggccgctctagaggatccaagcttacgtacgcgtgcatgcgacgtcatagtaaatctatagg

SEQ ID NO: 118528 - DNA, 3330 bp, Arabidopsis thaliana
  unsure (1)..(3330): unsure at all n locations
ctaacgattatcattttcgatgagacattgttttacagagatatttttgttgcaatgatatctctgtatcaaatattggccgagaagaagaagaagaagaaaaatgatcttaacatctttgcatttcctgtttttgccatcatttgcttcaaattttatagtgtaaatgctatcaaattaccgcagcaagaagtcgatgctctgcagcaaatcgctaccacattgggctcgaaattctggaaattcgatgctgaaaattgtaagattgaaatggtggggttaactgaaactcctcctccaacagctaagcaagaaatagaatgtgaatgcagtcccactaacgacactgattgtcatgttgtcaaatttgcattcaaggaccataatcttccaggaactcttcctcaaatagtcaagcttccctaccttcgggagatagacttggcctacaactacatcaatgggaccttacctcgtgaatgggcttcttcaaatttaacttttatttctcttcttgtgaatcggttgtctggagaaattccgaaggagtttggaaactcttctctaacatacttggatctcgagtcaaatgcgttttctggaactattcctcaggagcttgggaacttagtccacttgaaaaaactgttgctttcctctaacaaattgaccggaactttgccagcttcactagctagactacagaatatgacagatttcaggattaacgatcttcaactcagtggaacgatacctagttacatacaaaattggaagcaactcgagagacttgaaatgattgcatctggtctcactggtccaatcccatcggtcatctcagttctgagcaatcttgttaatctgaggatcagtgatatacgtggaccagtccaaccattcccttcgttgaagaacgtgacaggtctaactaaaattatattgaagaactgtaacatttctggacaaattcctacttatctttcacatttgaaggagttggagacactggatttgagttttaacaagttggttgggggaattccgtcgtttgcacaagcagaaaatttacggtttataattttggctggaaatatgctcgagggagatgctccagatgaattactaagagatggaatcacagtagatctttcatataacaatctcaagtggcagagtcctgaaagtcgtgcttgtcgcccaaatatgaatctgaatctaaacttgtttcagagcacttcgacaaaaaatcgagcaaatttctgccgtgtatcaagattcaaatgtcctcgatattctagctgcttgcatgtgaactgcggtggaagcgatatgtatgttaaggagaaaaaaccaaaagaattatatgaaggagatggaaatgttgaaggtggtgctgctaagtattttttgaagcctgacgctaattggggatttagcagcacaggggacttcatggacgataacaatttccaaaacactagattcaccatgtttgtcccggcatctaaccagtctgatctctacaaatcggcacgaattgctccagtatctctaacttacttccatgcctgcttggaaaatggaaattacactataaatctagacttcgctgagatacggttcaccaatgatgaaaactataaccggcttggaaggcgtctgtttgacatttacattcaggagaaattagtggcaaaggactttaacatcatggatgaagcaaagggagctcaaacacctataatcaaaccacttactgcctatgtgacaaaccactttttaaccatccggttgagttgggccggtaaaggaactaccaggattcccactagaggggtttatggtcctatcatatcggctatttccatagtttcagattccaagccgtgcgaacgtccgaaaactggaatgagccctggagcatatattgcaattggaattggagcaccatgtcttattatctttatactgggatttctgtggatatgtggctgcctcccaagatgtggtcgacaacgaaaagatccgtatgaagaagagttgccttctggaacttttacattgaggcaaatcaaattcgctacggatgacttcaatccaactaacaagattggagaaggtggtttcggtgctgtctttaagggtgtgttagcagatggaagagttgtagcagttaagcaactctcatctaaatcgagacaagggaaccgagaatttctaaacgagataggcgcaatttcttgtcttcaacatccaaatctcgtcaagcttcatggtttctgcgtcgagcgggctcagctattactggcgtacgaatacatggaaaataacagtttatctagcgcgttattcagtccaaagcataaacagataccaatggactggcctactaggtttaagatttgctgcgggatcgcaaagggtctcgcgtttctccatgaggaatcaccgttgaagtttgtacatagagacatcaaggccacaaatattttattggacaaggacttaactcccaagatatctgatttcggattggctaggcttgacgaagaggagaaaacacacatcagcaccaaagttgctgggactataggatatatggcaccagaatacgcactgtggggctacctaactttcaaagcagatgtctacagcttcggtgttttggttctagaaatcgtcgccggcataaccaacagtaatttcatgggggcaggagattccgtttgcctcttagaatttgctaacgagtgcgtagaatcggggcacttgatgcaagtagtggatgagaggttgaggcctgaagtggatagaaaagaagcagaggccggtataaaagtggctctcgtgtgctcgagcgcttctccaacagatcgtcctttaatgtcagaggtcgttgctatgctagaaggtctatatccagtgccagaatcaacaccaggagtaagcaggaacgcaggggatataaggtttaaggcatttaaagatttaaggagaggcatggagaacaatagtaagacgcagtgttctgttaaaagctatccgtcttcttcttcgacttcttctggggcaggacaagcagttcaagaaagaaagaaagaagagtcaaggccttgaagaggttttgaatccttccctctcttttttttttttttgtaaaatgtctgtctttagtaaaatgtttatgagtttattctgtgattagtcatttactgtaattccccatatctgtatttaggttctgttagttggggattgaatgttgtgaaaactcaaaactcaaatgatatataatcagtgatctttcnnnnnnnnnnnnnnnnnnnnnnn

SEQ ID NO: 118529 - DNA, 2160 bp, Arabidopsis thaliana
cagaaacagaggattcatcgatgttatactctatcaaaaattgcagatttgcatatggaaagacttcttcttcacgattcatgatcacacgtcgtccgatttctgatgcaaatttgtgcttcgatcgctcaattcctcgcttgggtttcattccttgtactattagcgacggtgggctcttcttcttcttcggaatctctcctaaattgtcaacctttagatcaccaccttgtaaaccctagtcgtctgcttggtttcctcagagcaatgtcttccgtcaatgatttcataaccaacgacaagctttgggtcgtttcttccatcaccgatgtatctccacctatctatgtgtttctacagtgcagagaagatctctctgtttccgattgtcgacattgcttcaacgagagcagattggagctcgagagaaatgttcgggttccggttggtcgaatccatagtgatagatgcttcttacggtttgatgatcgagatttctctgaggaatttgttgatcctacatttgataaagctaactgtgaggaaacagggacagggtttggagaattttggagatttcttgatgaggctttggtgaatgtaactttaaaggctgttaaaaatggagggtttggtgcagcttcagtgattaaaaccgaggccgtgtatgcattggctcagtgttggcaaacacttgatgagaacacgtgtcgagagtgtttggttaatgctagatcgagcttgagagcttgtgatggacatgaagctagagctttttttactgggtgttacttgaagtattctacacacaagttctttgatgatgatgctgcagaacataaacctgacgctgatcagagaaactttataaggtcatcgttttttccacatttgagtgatcgtgatgttacgagattagcaattgctgcgatttcgttgtcgattcttacttctcttggagcctttatcagttacagacgggtttcaaggaaaagaaaagctcaagttccatcgtgtgtaaatttcaaatacgagatgcttgagaaagcgaccgagtctttccatgactctatgaaactaggccaaggaggggccggttctgtatacaaagggattcttccagatggcagaatcgttgcagtcaaaaagctcttctttaacacacgtgaatgggcagatcaattcttcaacgaagtgaatctgatcagcggagttcaacacaagaaccttgtgagactacttggttgcagcattgaaggtcccaaaagtcttcttgtctatgaatatgttcataacagaagccttgatcaaatccttttcatgaagaacacagtccatattttgagctggaagcaacggtttaacatcattataggaatatcagaaggtctagaataccttcacagaggatctgaagtaaaaatcatccatagagacatcaaaaccagcaatattctccttgatcgaaacctaagtcccaaaatagctgattttggactcatacgttccatgggcactgacaaaacgcaaaccaatactggaattgctggaacacttggttatctggctcctgaatatctgatcaaaggccaattaacagagaaagctgacgtttacgcatttggagttcttatcatcgagatagtaactggcaagaaaaataacgcattcacgcaaggaactagctcggttttatactctgtatgggaacattttaaagcaaacactttagatcgctctatcgatcctcggttgaaagggagtttcgtagaggaagaggccttgaaggttcttcaaatcggattgttgtgtgttcaatcttctgtagagttgagaccgtcgtcaatgtctgagatagtcttcatgttacagaacaaagatagtaaatttgaatatccgaaacagcctccgttcttgagtgccagtgttctaatgccagatgaggagactagagtctgatattatcagtttcttaggattgttaatgttcttctgtaaatgctcaaaaatggattttacaccatttctttctccttttcaaatcttttatcgttcatattttattatgaaggtcaacaaaaatggaaccaaggctagattctaaaagttttgattcgtttacatcattattcattttacaatctaaaaaaaaaaaaaaaa

SEQ ID NO: 118530 - DNA, 2266 bp, Arabidopsis thaliana
agcgctacacgactcactatatggaaagctggtccgcctgcaggtaccggtccggaattcccgggtcgacccacgcgtccgaacaaagagagagagagagagagtgttatgttatgtctttattgtcaattagtaattttcttcgaattagatgttgtttctccgtcgaatcgccgtcgtcttctttgtcttcacctctttctccgccgctcagaactccacgtgtcctctggacttttccgtccttgaaccgttccggcgtccgaaacccgatggcgccaccacctgccagtacctcctccaagggctacgcctcctctactctcaccatctccgtcagacgggttcctttctcccgccacctgagtctgctgcttcttgctgggctgctctccagtcttccgtcgccggtttcctccctcgctttgacgtccgatccacctgcggtttccagacgccgtggatttcgcaggggtgcatggacatcaccaccaggtctcaattcgaatcccttatccctaactcctccctcgccaccaccgccatgcgctgtaacacctctctcgagagcaataccccttgcgcctcctgcactcagagcctctccgcgtttcagccctatctctccggtccatccctcggtaatgtctccgactgtgcttcttttccctctatctacgccgctgctttcgccaattccttgggccccaccgacaaaggcaccgccaaatgcttgtttcagctcgatttggcttctcccactagctccggtgctaacaaagtcaaagttctagtttcttctttctctgttttgctcgtcgcctctgttctggttatcaccgcttggttctggtactgccggaggaagaaaagcaagcttctcaagcctcgggatactagtttagaagctggcacgcagtctagacttgattccatgagcgagagcaccactcttgtcaaattcagcttcgacgagatcaagaaagccaccaacaatttctcacgccacaacatcattggccggggaggttacgggaacgtcttcaagggcgccctgccagacggcacccaggttgccttcaagaggttcaagaactgttctgctggaggggacgccaacttcgctcatgaggtcgaggtcatcgccagcatccgccacgtcaatctccttgccctcagaggctactgtactgcaaccacgccctatgaaggtcaccagaggatcattgtctgtgatcttgtcagtaacggtagccttcatgaccatctctttggcgacttggaggctcagcttgcctggcctcttaggcagaggatcgcccttggcatggccagaggactggcttatctacactacggcgcacaaccctccatcatccacagggatatcaaggccagcaacattctcttggacgagaggtttgaggccaaggttgcggatttcgggctggccaagttcaaccccgaaggaatgactcatatgagcacgcgggtcgcaggcactatgggatacgttgctccagagtacgcactgtacgggcaactgactgagaaaagcgacgtgtacagctttggggtggtgcttctagagcttctgagcaggagaaaggcgattgtgacagacgaggaggggcagcctgtgtcggtggcagactgggcgtggtcgctggtaagagaaggccagacattggatgtggtggaagacgggatgccagagaagggacccccagaggttctggagaagtatgtgctgatagcagtgctgtgctctcaccctcagctccacgcaaggccaacaatggatcaagtggtgaaaatgctggagagtaatgagttcactgttatagccatacctcaacggccaatccctctggtggcttgtagggaagagattgaccgctctgttagtagcagcagtggctcagggaagctcactagccccacgggatatcaggccttctcattcggaggtgatggcccctcagggaacacgaataccacttagatgagatatgtatgttgtagatattaatttagtgtgcattcatttcattctttgatgcttcttctgtcacttatgtaagtacagttgctttttccaataaactcatcttgttgtaacagctttggaaaaaaaaaaaaacaggcttagaaatatatatatccccctaaaaaaaaaaaaaaaaaaaaaaaaaaaaaagggcggccgctctagaggatccaagcttacgtacgcgtgcatgggacgtcatagctaatctatagt

SEQ ID NO: 118531 - DNA, 1247 bp, Arabidopsis thaliana
catttcttcgatacttcccaagttcaccgcaatggccaccgcttcaatcttcgccgccgccgtgaccgtcaccagagatgtgacatctcttcttaatccatcttctctgataatcggaaaatcattatctccttcaaagttcagctcaatcaaatcctccgtttcattttcccgcaaaaccctaactccaattcgatactcttcatctcccgccgatcactcacccgccaccgccgtggaagcgatcacgaatcgatccaaaacctccttgaaatctcgtctccgtggaggagaaactctctacggtctctttttactctccttctcgccgacattagccgagatcgctgctcacgccggttacgattacgtcgtcgttgatatggaacatggtcccggaggtataccggaagctttggattgtattcgagctcttaacgccgccggaacatcagccattctccgattaccggaaaactcaccaacctgggctaaaaaagctctagatctaggtccacaaggaatcatgttcccaatgatcgaatctcgtaaagacgctaccaaagcggtgtcgtattgccggtttcctcccgacggtatccgtggatcggcgcacacggtggtgagagcttctaactacggaatcgatgaagggtatttaagtaattacgcagaggagattctgattatgtgccaggtggaatcaggtgaaggagtgaagaaagctgatgaaatcgcagccgttgatggtgttgactgtgtgcaaatgggaccgttggatcttagtgcgagtttagggtatttgtgggatcctggacataagaaagtgagagagatgatgaagaaggctgagaaatctgtgctgaccactgatccggcgaaaggcggggcttacttgtcgggtttcgcgatgccgcacgacggagctggtgagattcggggacgtggttaccatatggtcgccggagctgttgatgttggattgtttaggaatgctgctgttgaagatgtgaggagattcaagatgggtttggtcaatgaatcggacagtgaggattcgtcggaacatgataaagatgttgatgatgagaagtactggagcgataagcaaaatttcaaatttcgttaatgttgtttccttttaactttccataaagatttacaaaatcatgatgccacaaatgtttcaaaaacgaaagcaacatgaatccaacaaagctgagacatttggctttaaaaaaaaaaaa

SEQ ID NO: 118532 - DNA, 1250 bp, Arabidopsis thaliana
  unsure (1)..(1250): unsure at all n locations
gtcgacccacgcgtccgctccaagaggagagagagagaaagagattcaattatatgcagagagaaaaagaagccaattggttctctctctctctctctctctctctgattgattgatccagcgattcgtctggctggctcggtttccgcgggaaaaccttcttcttcgttgaccttacacgagttttgttgattcggcagggggatcgacgacggagatggcgattctgtacgccctcgtggctcgtggcacggtggttctttctgagttcaccgccacctctacgaatgcgagcaccatcgccaaacagatcctcgagaaggtccctggagacaacgacagcaacgtctcctactctcaggatcgttacgtcttccacgttaaacgcaccgatggcctcaccgttctctgtatggccgaagaaaccgccggaaggagaattccttttgcctttttggaggatattcaccagagattcgtacggacttatggcagggctgttcatacagcactagcttatgcaatgaatgaggaattctctagagttctcagtcagcagattgactattactctaatgatcctaatgccgataggattaatcgtattaagggtgaaatgaatcaggtgcggggtgtcatgatagaaaacattgacaaagtcctagatagaggtgaacgtttggagcttcttgtcgataaaaccgccaatatgcaggggaatacattccggttcagaaagcaagctcgtcgttttagaagcaacgtctggtggagaaactgcaagctcacggtcctcttaatactactactactggtgatcatatacattgcagtggcctttctctgccacggacctactctaccatcttgcatttaagtgcatctgtctcttaaggaatccatcccgattctgcgcgttgccacgactttttatctcctcatctgattgtaaaccttgtgttttcctgagcattttcatgtggcttaaaaagcttatgtttccaactcacgtatatgaaaaagtatacttatttatagagcaatgtaaaagctcattgctttgcgaagtgtgtgaatctttgttgacatcatgttctataaattacatacatagtggaaaagtgaacaggcttgctttgtctgatatgttcatacaaaaaaaaaaaaataagaagggcgggcgctctataggannnnnnnnnnnnnnnnnnnnnnnnnnnnnnnnnnnnnnnnnnnnnnaacggatttac

SEQ ID NO: 118533 - DNA, 693 bp, Arabidopsis thaliana
  unsure (1)..(693): unsure at all n locations
taggtgcactatagaagagctatgacgtcgcatgcccgcgtacgtaagctcggaattcggctcgagtcctaatgccgataggatcattagagttaagggtgaaatgaatcaggtgcggggtgtcatgatagaaaacattgacaaagtcctagatagaggtgaacgtttggagcttcttgtcgataaaaccgccaatatgcaggggaatacattccggttcagaaagcaagctcgtcgttttagaagcaacgtctggtggagaaactgcaagctcacggtcctcttaatactactactactggtgatcatatacattgcagtggcctttctctgccacggacctactctaccatcttgcatttaagtgcatctgtctcttaaggaatccatcccgattctgcgcgttgccacgactttttatctcctcatctgattgtaaaccttgtgttttcctgagcattttcatgtggcttaaaaagcttatgtttccaactcacgtatatgaaaaaggatacttatttatagagcattgtaaaagctcattgctttgcggaaaaaaaaaaaaaaaaaaaaaaaaaaaaaaaaggnnnnnnnnnnnnnnnnnnnnnnnnnnnnnnnnnnnnnnnnnnnnnnnnnnnnnnnnnnnnnnnnnnnnnnnnnnnnnnnnnnnnnnnnngagacgctgaagtatca

SEQ ID NO: 118534 - DNA, 734 bp, Arabidopsis thaliana
  unsure (1)..(734): unsure at all n locations
gttcgagcgattgttactgaatggcttggtcacattgcgtggaaaactctctctagatctacacgctacacgagttttgttgattcggcagggggatcgacgacggagatggcgattctgtacgccctcgtggctcgtggcacggtggttctttctgagttcaccgccacctctacgaatgcgagcaccatcgccaaacagatcctcgaggaaggtccctggagacaacgacagcaacgtctcctactctcaggatcgttacgtcttccacgttaaacgcaccgatggcctcaccgttctctgtatggccgaagaaaccgccggaaggagaattccttttgcctttttggaggatattcaccagagattcgtacggacttatggcagggctgttcatacagcactagcttatgcaatgaatgaggaattctctagagttcttcagtcagcagatttgactattactctaaatgnttcctaatgccgntaggattaaatcgtattaaggggtgaaattgaattcagggtncgggggtgtcaatggnttaggaaaaccatttggccaaaagtccctaggatangagggttgaaccggttttggnnccttcttttttcgggtaaaaccccgnccaatttttccagggggnatnacaattccngtttnaagnaagcaaagctccnnncggtttttgnaagcaaccgncttggttgggaaacttcaaagtcangggncc

SEQ ID NO: 118535 - DNA, 580 bp, Arabidopsis thaliana
  unsure (1)..(580): unsure at all n locations
taggtgccactactagaagagctatgacgtcgcatgcacgcgtacgtaagctcggaattcggctcgagaaaaagaagccaattggttctctctctctctctctctctctctgattgattgatccagcgattcgtctggctggctcggtttccgcgggaaaaccttcttcttcgttgaccttacacgagttttgttgattcggcagggggatcgacgacggagatggcgattctgtacgccctcgtggctcgtggcacggtggttctttctgagttcaccgccacctctacgaatgcgagcaccatcgccaaacagatccttcgagaaggtccctggagacaacgacagcaacgtctcctactctcaggatcgttacgtcttccacgttaaacgcaccgatggcctcaccgttctctgtatggccagaagaaaccgccggaaggagaaattccttttgcctttttgggggttttcaccagagattcgtacgggctttttgcaagggnttttcannanagaactagcttttnaatnaatggggatttttagngttnttagtaaganntngcttttcntatgc

SEQ ID NO: 118536 - DNA, 3461 bp, Arabidopsis thaliana
  unsure (1)..(3461): unsure at all n locations
cagagagccaaacaaaaaagccattgaagctggaagacaaaaaaaacagaggagattgaagaagaagagggagtaagaagatggagagttacctaaacgagaatttcgatgtgaaagcgaagcattcttcagaggaagtgcttgagaaatggcgtaatctctgtggcgttgttaagaaccctaaacgtcggtttcgtttcaccgctaatctctctaaacgctatgaagccgccgcgatgcgtcgcaccaaccaggagaaattaaggatcgctgttcttgtttccaaagctgctttccaatttatctctggtgtttctccaagtgactacactgtccctgaagatgtcaaagctgctggctttgagatttgtgctgacgaattaggatcaattgttgaaagtcatgatgttaagaagctcaagttccatggtggagttgatgggcttgcaggtaagctcaaggcatctcccacagatggcctttctactgaggctgctcagttatcccaaaggcaagagcttttcggaatcaacaagtttgcagagagcgaaatgaggggtttctgggtgtttgtatgggaagctcttcaggatatgactcttatgattcttggtgtttgtgctttcgtgtctttgattgttgggatagctactgaaggatggcctaaaggatcacatgatggtcttggcattgcggctagtattctcttggttgtgtttgttacagctactagcgattaccgccagtctttgcagttccgtgatttggataaagagaagaagaagatcactgttcaggtgacaaggaacgggtttagacagaaactgtcgatttacgacttgcttcctggtgacattgttcatctggcgattggagatcaggttcctgctgatggtcttttcctctcgggattctctgtggtgatagatgaatcgagtttgactggtgaaagtgagcctgtgatggtgaatgcgcagaatcctttccttatgtctggaaccaaagtgcaagatggatcttgtaagatgatgattactacagttgggatgaggactcaatggggaaagctaatggcgactttgaccgaaggaggggatgatgaaactccactgcaggtgaaactcaatggagttgctaccatcattggcaaaattggtcttttctttgcggtggttactttcgcggttctggtgcaaggaatgtttatgaggaagctttcaacgggaactcactgggtctggtctggtgatgaagcattggagctcttggaatactttgctattgctgtgacaatcgttgtggttgcggttcctgaaggattgcctttagctgtgactctaagtcttgcgtttgccatgaagaaaatgatgaacgataaagctcttgtgaggcatttagcagcatgtgagactatgggatctgcaacgacgatttgcagtgacaagactggtacactcacaaccaatcacatgaccgttgtgaagtcttgcatttgcatgaatgtgcaagatgtagcaaataaaggttctagcttgcaatcagaaatcccggaatctgcggtgaagttgttgattcaatcgattttcaataacacaggaggcgaagttgttgtcaacaaacatgggaaaaccgagcttttggggacgccaacagagactgctatattagagttggggttatctcttggaggtaagttccaagaagagaggaagtcttacaaagtgatcaaagttgagcctttcaactccacaaagaagcgaatgggagttgtaatcgagcttcctgagggaggacgtatgcgtgctcacacgaaaggagcttccgagattgttttagctgcttgtgacaaagttgtaaactcgagcggtgaggttgttccacttgatgaagaatcaatcaagtatctgaatgttacaatcaacgagtttgctaatgaagctcttcgaactctttgccttgcttatatggatattgaaggcgggttttcgccggatgatgcaatcccggcttctggatttacttgcgtagggattgtgggaatcaaagatcccgtacgtcctggagttaaagaatctgttgagctttgtcgccgtgctggaatcactgtgaggatggttacaggagataacattaacaccgcgaaagcaattgctagagaatgtgggattttaactgatgacggtatagccatcgaaggtcccgtattcagagagaagaatcaagaagagttactagaactgattccaaagattcaggtgatggctcgttcttcaccaatggataagcatacacttgtgaaacagttaaggacaacgtttgatgaagttgttgctgtcactggagatggaacaaatgatgcacctgcacttcatgaagctgatattggactagcaatgggaattgctggaactgaagtggcgaaagagagcgctgatgtcatcattctcgacgataacttcagcacgatcgtcacagttgctaaatggggacgttctgtttacataaacatccagaaattcgttcagtttcagcttaccgttaatgttgttgcactggttgttaacttctcttcagcttgtttaaccggaagtgctcctttaactgctgttcaattgttgtgggtgaacatgatcatggacacacttggagctcttgctttagctacagagccaccaaacgacgagctgatgaagcgtttacctgttggaaggagaggcaatttcatcactaatgcgatgtggaggaacattttaggacaagctgtttaccaattcatcgtaatttggattctccaagccaaagggaaggctatgtttggtctcgacggtcctgactcaactctcatgttaaacactcttatcttcaactgcttcgtcttctgtcaggtgtttaacgagataagctcgcgagagatggaagagatcgatgttttcaaaggaatactggacaattacgtctttgtggttgtgatcggtgcaacggttttctttcagatcataatcatcgagttcttgggcacatttgcaagcacaacaccactcacaataacacaatggatcttcagtatcttcataggtttcttgggtatgccaatcgccgctggactgaagacgattcccgtttgatcgttccatcaaaattggctcgaaaccactctttaaagatctctatattagaccagttacttcaaagtttagaacggacaagtcttctaacaaagtttttgcattatgcaatgactctgttttttattcttgacttttatttttcagtttgattagtgctattaaggacaaatatctgatttcctccatttttgtaaaactctctgtatctttgaaatgacacttctcttttctttctnnnnnnnnnnnnnnnnnnnnnnnnnnnnnnnnnnnnnnnnnnnnnnnnnnnnnnnnnnnnnnnnnnnnnnnnnnnnnnnnnnnnnnnnnnnnnnnnnn

SEQ ID NO: 118537 - DNA, 1071 bp, Arabidopsis thaliana
cttcaagtcttcttctcttgccttttctttcttcttctttatccattaaggtttgatcctctcacttaaattaggattatatatggctacatctgctagaagagcatatggattcgggagagctgacgaggcgactcacccggactccattagagccactttggctgagtttctttccacgttcgtcttcgtctttgctggagaaggctcaatcctcgctctagacaagttgtattgggacacggcggctcacacggggacaaacacgcctggagggttagttctggtggcgttagctcatgcattggccttgttcgcggctgtttctgcagccatcaatgtctctggtggccacgtcaaccccgctgtcacttttgctgctctaatcggaggcaggatctcggtcattcgagctatctactattgggttgctcagcttataggtgctatcctcgcttgtctcttgttgaggcttgccactaatggcttgagaccagtaggtttccatgtagcatcaggagttagtgagcttcatgggctactgatggagatcatacttacatttgctttggtttatgttgtctactcgaccgcaatcgatccaaagagggggagtattgggatcatagcgccactagccatcgggctcatagttggggcaaacattttggtgggaggacctttcgatggagcctctatgaatccggctagagcctttggtccagcattagtgggatggaggtggagtaaccattggatctattgggttggaccgttcattggtggtgcactcgccgcactgatctatgagtacatgatcatccccagcgtgaacgaacctcctcaccacagtacccaccaaccattggctccggaagattactagaccggagcagtcttcatgtagagggttctctctttgtataaatagtctctgtgtttgcttgtgttgtttgtctctttacttgttttgttttcctgccatttcctatgtataattgagtccacaccaaaatctgttttcttgtattgtatatcttacagaataataaagattttcaatgatcggat

SEQ ID NO: 118538 - DNA, 3771 bp, Arabidopsis thaliana
  unsure (1)..(3771): unsure at all n locations
gaattcgcggccgcgtcgatacggctgcgagaagacgacagaaggggattgtcgattcggtttatttcgtctccttcgtcttccactcttactagtgcatgctctgaatctgtatgtaatgggagttcaacagtctggatccattatcctagccgggtcgggtcaaggtctttgagtaagagagacaattcgttttgattcggtgtagaagacatcatgaatactggtggtcggctcattgctggctctcacaacagaaacgaattcgttctcattaacgccgatgagagtgccagaatacgatcagtacaagaactgagtgggcaaacatgtcaaatctgtggagatgaaatcgaattaacggttagcagtgagctctttgttgcttgcaacgaatgcgcattcccggtttgtagaccatgctatgagtatgaacgtagagaaggaaatcaagcttgtcctcagtgcaaaactcgatacaaaaggattaaaggtagtccacgggttgatggagatgatgaagaagaagaagacattgatgatcttgagtatgagtttgatcatgggatggaccctgaacatgccgctgaagccgcactctcttcacgccttaacaccggtcgtggtggattggattcagctccacctggctctcagattcctcttttgacttattgtgatgaagatgctgatatgtattctgatcgtcatgctcttatcgtgcctccttcaacgggatatgggaatcgcgtctatcctgcaccgtttacagattcttctgcacctccacaggcgagatcaatggttcctcagaaagatattgcggaatatggttatggaagtgttgcttggaaggaccgtatggaagtttggaagagacgacaaggcgaaaagcttcaagtcattaagcatgaaggaggaaacaatggtcgaggttccaatgatgacgacgaactagatgatcctgacatgcctatgatggatgaaggaagacaacctctctcaagaaagctacctattcgttcaagcagaataaatccttacaggatgttaattctgtgtcgcctcgcgattcttggtcttttctttcattatagaattctccatccagtcaatgatgcatatggattatggttaacgtcagttatatgcgagatatggtttgcagtgtcttggattcttgatcaattccccaaatggtatcctatagaacgtgaaacatacctcgatagactctctctcaggtacgagaaggaaggaaaaccgtcaggattagcacctgttgatgtttttgttagtacagtggatccgttgaaagagccacccttgattacagcaaacacagttctttccattctagcagttgattatcctgtggataaggttgcgtgttatgtatcagacgatggtgcagctatgcttacatttgaagctctctctgatacagctgagtttgctagaaaatgggttcctttttgtaagaagtttaatatcgagccacgagctcctgagtggtatttttctcagaagatggattacctgaagaacaaagttcatcctgcttttgtcagggaacgtcgtgctatgaagagagattatgaggagtttaaagtgaagataaatgcactggttgctactgcacagaaagtgcctgaggaaggttggactatgcaagatggaactccttggcctggaaacaacgtccgtgaccatcctggaatgattcaggtgttcttgggtcatagtggagttcgtgatacggatggtaatgagttaccacgtctagtgtatgtttctcgtgagaagcggcctggatttgatcaccacaagaaagctggagctatgaattccttgatccgagtctctgctgttctatcaaacgctccttaccttcttaatgtcgattgtgatcactacatcaacaacagcaaagcaattagagaatctatgtgtttcatgatggacccgcaatcgggaaagaaagtttgttatgttcagtttccgcagagatttgatgggattgatagacatgatagatactcaaaccgtaacgttgtgttctttgatattaacatgaaaggtcttgatgggatacaaggaccgatatatgtcgggacaggttgtgtgtttagaagacaggctctttatggttttgatgcaccaaagaagaagaaaccaccaggcaaaacctgtaactgttggcctaaatggtgttgtttgtgttgtgggttgagaaagaagagtaaaacgaaagccaaagataagaaaactaacactaaagagacttcaaagcagattcatgcgctagagaatgtcgacgaaggtgttatcgtcccagtgtcaaatgttgagaagagatctgaagcaacacaattgaaattggagaagaagtttggacaatctccggttttcgttgcctctgctgttctacagaacggtggagttccccgtaacgcaagccccgcatgtttgttaagagaagccattcaagttattagctgcgggtacgaagataaaaccgaatggggaaaagagatcgggtggatttatggatcggtgactgaagatatcctgacgggtttcaagatgcattgccatggatggagatctgtgtactgtatgcctaagcgtgcagcttttaaaggatctgctcctattaacttgtcagatcgtcttcatcaagttctacgttgggctcttggctctgtagagattttcttgagcagacattgtccgatatggtatggttatggtggtggtttaaaatggttggagagattctcttacatcaactctgtcgtctatccttggacttcacttccattgatcgtctattgttctctccccgcggtttgtttactcacaggaaaattcatcgtccctgagataagcaactacgcaggtatactcttcatgctcatgttcatatccatagcagtaactggaatcctcgaaatgcaatggggaggtgtcggaatcgatgattggtggagaaacgagcagttttgggtaatcggaggggcctcctcgcatctatttgctctgtttcaaggtttgctcaaagttctagccggagttaacacgaatttcacagtcacttcaaaagcagcagacgatggagctttctctgagctttacatcttcaagtggacaactttgttgattcctccgacaacacttctgatcattaacatcattggagttattgtcggcgtttctgatgccattagcaatggctatgactcatggggacctctctttgggagacttttcttcgctctttgggtcattgttcatttatacccattcctcaagggaatgcttgggaagcaagacaaaatgcctacgattattgtggtctggtctattcttctagcttcgatcttgacactcttgtgggtcagagttaacccgtttgtggctaaagggggaccagtgttggagatctgtggtctgaattgtggaaactaagatcctcagtgaaagaagagcaaaggagtttgtgttggagctttggaagcaaatgtgttgatgatgatgcaagtgtgtttgtagacgaagatgtgcagtttttactttttacgacttgttaaaccttttttgttacccctaaattaattcttttgttatcatggttatactaatagaattgtttgtttttcttttttacatgtacttttagttattccgtagttattgtataatactgataacgatcatatatacacactttgttnnnnnnnnnnnnnnnnnnnnnnnnnnnnnnnnnnn

SEQ ID NO: 118539 - DNA, 592 bp, Arabidopsis thaliana
  unsure (1)..(592): unsure at all n locations
cccccctcgaggtcgacggtatcgctaagcttgatatcgaattcgcggccgcgctttagttgcgactgcacagaaagtgcctgaagaaggttggactatgcaagacggtactccttggcccggtattaacgtgcgagatcaccctggcatgatccaggtattccttggaaataacggtgtccgcgatgtagaaaacaacgagttgcctcggctggtttatgtttctcgtgagaagagacccggatttgaccatcacaagaaggctggagccatgaactccctgatacgagtctctggagttctatcaaatgctccttatcttctaaatgtcgattgtgatcactacatcaataatagcaaagctcttagagaagcaatgtgtttcatgatggatcctcagtcgggaaagaaaatttgttatgtccaattccctcaaagattcgatgggattggataaaggtggcaggtactcttaatccgtattgttgtattcttccgatattaatttgaaagggtttggttgggttaaagggcctttttcggtgggaccnggtttnttttnngggnaagnccttttnggttngtncgngta

SEQ ID NO: 118540 - DNA, 554 bp, Arabidopsis thaliana
  unsure (1)..(554): unsure at all n locations
cccctcgatgtcgacggtatccataagcttgatatcgaattcgcggccgctaaagatcaatgctttagtagcaacagcacagaaagtgcctgaggatggttggactatgcaagacggtacaccttggcccggtaatagtgtgcgagatcatcccggcatgattcaggtcttccttggaagtgacggtgttcgtgatgtcgaaaacaacgagttgcctcgattagtttacgtttctcgtgagaagagacccggatttgatcaccataagaaggctggagctatgaattccctgatacgagtctctggggttctatcaaatgctccttaccttctgaatgtcgattgtgatcactacatcaacaatagcaaagctcttagggaagcaatgtgtttcattggatggatcctcagtcaggaaagaaaatctgttatggtcagttccctcaaagggtcgatggggttgttttggcacgttccggactcaaatcgcaatgttgggttttttgaaaccaatnttaaagggttnggggggcaaaagggcntttnncggggga

SEQ ID NO: 118541 - DNA, 526 bp, Arabidopsis thaliana
atctccaggtctctacgactcactatagggaaagctggcacgcctgcaggtaccggtccggaattcccgggtcgacccacgcgtgcggaagtgggttcctttctgcaagatatattgtattgagcctcgtgctcccgaatggtatttctgccataaaatggactacttgaagaataaagttcatcccgcatttgttagggagcggcgagccatgaagagagattatgaagaattcaaagttaggatcagtgctttagtagcaacagcacagaaagtgcctgaggatggttggactatgcaagacggttcaccttggcccggtcatagtgtgcgagatcatcctggcatgattcaggtcttccttggaagtgacggtgttcgtgatgtcgaacacaacgagttgcctcgattagtttacgtttctcgtgagatgagacccggatttgatcaccataagaaggctggagctatgaatggcctgatacgagtctctggggatctatcaaatgctccttaccttctgaat

SEQ ID NO: 118542 - DNA, 3756 bp, Arabidopsis thaliana
  unsure (1)..(3756): unsure at all n locations
ggactcgcgcgcctgcaggtcgacactagtggatccaaagaattcgcggccgcgtcgactacggctgcgagaagacgacagaaggggatcccaagattctcctcttcgtcttccttataaactatctctctgtagagaagaaagcttggatccagattgagagagattcagagagtcacatcaccacactccatcttcagatctcatgatttgaactattccgacgtttcggtgttggaagcaactaagtgacaaatggaatccgaaggagaaaccgcgggaaagccgatgaagaacattgttccgcagacttgccagatctgtagtgacaatgttggcaagactgttgatggagatcgttttgtggcttgtgatatttgttcattcccagtttgtcggccttgctacgagtatgagaggaaagatgggaatcaatcttgtcctcagtgcaaaaccagatacaagaggctcaaaggtagtcctgctattcctggtgataaagacgaggatggcttagctgatgaaggtactgttgagttcaactaccctcagaaggagaaaatttcagagcggatgcttggttggcatcttactcgtgggaagggagaggaaatgggggaaccccagtatgataaagaggtctctcacaatcatcttcctcgtctcacgagcagacaagatacttcaggagagttttctgctgcctcacctgaacgcctctctgtatcttctactatcgctgggggaaagcgccttccctattcatcagatgtcaatcaatcaccaaatagaaggattgtggatcctgttggactcgggaatgtagcttggaaggagagagttgatggctggaaaatgaagcaagagaagaatactggtcctgtcagcacgcaggctgcttctgaaagaggtggagtagatattgatgccagcacagatatcctagcagatgaggctctgctgaatgacgaagcgaggcagcctctgtcaaggaaagtttcaattccttcatcacggatcaatccttacagaatggttattatgctgcggcttgttatcctttgtctcttcttgcattaccgtataacaaacccagtgccaaatgcctttgctctatggctggtctctgtgatatgtgagatctggtttgccttatcctggattttggatcagtttcccaagtggtttcctgtgaaccgtgaaacctacctcgacaggcttgctttaagatatgatcgtgaaggtgagccatcacagttagctgctgttgacattttcgtgagtactgttgaccccttgaaggagccaccccttgtgacagccaacacagtgctctctattctggctgttgactacccagttgacaaggtgtcctgttatgtttttgatgatggtgctgctatgttatcatttgaatcacttgcagaaacatcagagtttgctcgtaaatgggtaccattttgcaagaaatatagcatagagcctcgtgcaccagaatggtactttgctgcgaaaatagattacttgaaggataaagttcagacatcatttgtcaaagatcgtagagctatgaagagggaatatgaggaatttaaaatccgaatcaatgcacttgtttccaaagccctaaaatgtcctgaagaagggtgggttatgcaagatggcacaccgtggcctggaaataatacaggggaccatccaggaatgatccaggtcttcttagggcaaaatggtggacttgatgcagagggcaatgagctcccgcgtttggtatatgtttctcgagaaaagcgaccaggattccagcaccacaaaaaggctggtgctatgaatgcactggtgagagtttcagcagttcttaccaatggacctttcatcttgaatcttgattgtgatcattacataaataacagcaaagccttaagagaagcaatgtgcttcctgatggacccaaacctcgggaagcaagtttgttatgttcagttcccacaaagatttgatggtatcgataagaacgatagatatgctaatcgtaataccgtgttctttgatattaacttgagaggtttagatgggattcaaggacctgtatatgtcggaactggatgtgttttcaacagaacagcattatacggttatgaacctccaataaaagtaaaacacaagaagccaagtcttttatctaagctctgtggtggatcaagaaagaagaattccaaagctaagaaagagtcggacaaaaagaaatcaggcaggcatactgactcaactgttcctgtattcaacctcgatgacatagaagagggagttgaaggtgctggttttgatgatgaaaaggcgctcttaatgtcgcaaatgagcctggagaagcgatttggacagtctgctgtttttgttgcttctaccctaatggaaaatggtggtgttcctccttcagcaactccagaaaaccttctcaaagaggctatccatgtcattagttgtggttatgaggataagtcagattggggaatggagattggatggatctatggttctgtgacagaagatattctgactgggttcaaaatgcatgcccgtggatggcgatccatttactgcatgcctaagcttccagctttcaagggttctgctcctatcaatctttcagatcgtctgaaccaagtgctgaggtgggctttaggttcagttgagattctcttcagtcggcattgtcctatatggtatggttacaatgggaggctaaaatttcttgagaggtttgcgtatgtgaacaccaccatctaccctatcacctccattcctcttctcatgtattgtacattgctagccgtttgtctcttcaccaaccagtttattattcctcagattagtaacattgcaagtatatggtttctgtctctctttctctccattttcgccacgggtatactagaaatgaggtggagtggcgtaggcatagacgaatggtggagaaacgagcagttttgggtcattggtggagtatccgctcatttattcgctgtgtttcaaggtatcctcaaagtccttgccggtattgacacaaacttcacagttacctcaaaagcttcagatgaagacggagactttgctgagctctacttgttcaaatggacaacacttctgattccgccaacgacgctgctcattgtaaacttagtgggagttgttgcaggagtctcttatgctatcaacagtggataccaatcatggggaccactctttggtaagttgttctttgccttctgggtgattgttcacttgtaccctttcctcaagggtttgatgggtcgacagaaccggactcctaccattgttgtggtctggtctgttctcttggcttctatcttctcgttgttgtgggttaggattgatcccttcactagccgagtcactggcccggacattctggaatgtggaatcaactgttgagaagcgagcaaatatttacctgttttgagggttaaaaaaaacacagaatttaaattatttttcattgttttatttgttcacttttttacttttgttgtgtgtatctgtctgttcgttcttctgtcttggtgtcataaatttatgtgtagaatatatcttactctagttactttggaaagttataattaaagtgaaagccaatatttttttgttaaaaaaaaaaaaaaagnnnnnnnnnnnnnnnnnnnnnnnnnnnnnnnnnnnnnnnnnnnnnnnnnnnnnnnnnnnnnnnnnnnnnnnnnn

SEQ ID NO: 118543 - DNA, 679 bp, Arabidopsis thaliana
  unsure (1)..(679): unsure at all n locations
tgattcgccagctctattcgactcttatagggaaagctggtacgcctgcaggtaccggtccggaattcccgggtcgaccggggcgtgcgctcttcgtcttccttataaactatctctctgtagagaagaaagcttggatccagattgagagagattcagagagtcacatcaccacactccatcttcagatctcatgatttgaactattccgacgtttcggtgttggaagcaactggggggcaaatggaatccgaaggggaaaccgcgggaaagccgatgaagaacattgttccgcacacttgccagatctcgagtgacaatgttggcaagactgttgatgggagatcgtgttgggggcttgtgatatttggtcattcccaggttgtcggccttgctacgaagtatgagaggaaagatgggaatcaatcttgtcctcagtgccaaaccagatacaagaggctcaaagggaagtcctgctattcctggtgntaaagacgaggatggcttagctggatgaaggactgttgagtccaacaacccccgaaggggaaatttctnaacgggtccttggttggnccttaccngngggaaggggngaaatggggacccccnntnaaaaaagggcccccaaanaantccccggccccgggggananaacttccggggnttntggncnnc

SEQ ID NO: 118544 - DNA, 4119 bp, Arabidopsis thaliana
  unsure (1)..(4119): unsure at all n locations
gaattcgcggccgccccttcgtttcctcccaccttcttcttcacaaaaatctgagatttcatataaatttgcccatatttttagatctccatttgatctgagtttgtattatcacaaagttttatcttcttttttttcactcttcagtcttgatctctcgattattgcccaccaagtgatcgatcttttgtctcactgaactcggttagcccaccaagtgatcgatctttgtctcactgaactcaggttacgctgagattgatctaacagctgaaagtttctgactttttgggtttttgatttcgattttcatggcgtatcatccggcttatactgagactatgtctatgggaggagggtcaagccatgggggcggccagcaatacgtgccgtttgctacgagtagtggctctttgagggtcgaattgttacatggtaacttagacatttgggttaaggaagctaaacatcttcctaatatggatggttccataacagacttggtgggatcgttgtctgggttaggtcggaagaaagtggaaggtcgagagtcttctaagatcactagtgatccttatgttactgtctctatctctggtgctgtgattggtagaacttttgttattagcaatagtgagaatcctgtgtggatcgagcattttgatgtaccggttgctcatagtgctgctgaagtacattttgttgtgaaagatagtgatattattggatcacagatcatgggagctgttggaatcccaacggagcagctgtgttcggggaataggatcgaagggctctttccgatacttaatagtagtgggaagccttgtaaacaaggtgctgtgttgggtttgtctattcaatacactccaatggaaagaatgagactttaccaaatgggtgttggttctggtaatgagtgtgtaggagttcccggtacatacttccctttgaggaaaggcggtagggttactctgtatcaggatgctcatgttgatgacggtacccttccgagtgtacatcttgatggtgggattcagtatagacatggaaagtgctgggaggatatggctgatgcaataaggcaaggcagaaggttgatttatatcacaggttggtcagttttccatccggttaggctggttcgtcgtaccaatgatcccaccgaaggtacattaggggagttgcttaaagtcaaatctcaagaagagttagagtgttggttttggtgtggaacgatccaaggagtcttctgggattcgaaaacacaaggagttatgaacacaagcgatgaggagactcgccgttttttcaagcattcgtcggtgcaagttctcctttgtcccagatctggagggaaaggtcacagcttcataaaaaaatctgaagttggaacaatctacacgcatcatgaaaaaactgtgattgtagactctgaagcagctcagaaccgaagaaagatcgtagcatttgttggagggctagatttgtgcaacggacgatttgatactcccaagcatcctctcttcaggacattaaagacactccataaagatgacttccacaacccaaattttgtgactactgcggatgatggaccaagagaaccatggcatgatcttcacagcaagattgatggtccagctgcatatgatgtacttgctaatttcgaggaacgctggatgaaggcttcaaaactcgcggaattgggaaacgaaaatacttcttctgatgattctttgcttaggatagacagaattcctgacatcgtgggactttctgaagcttcttctgctaatgataatgatccagagtcttggcatgttcaggttttccgttccattgattcaagttcagtcaaagggtttccaaaggacccaaaggaagctactggaagaaatcttctatgtgggaagaatattctcatagatatgagcatacacgcagcttatgttaaggccatacgatctgctcagcacttcatttacattgagaaccaatattttcttggatcttcattcaactgggattcaaacaaggacttgggtgctaataatctaatcccgatggaaatcgcgcttaagattgctaacaaaattagagcaagggagaagtttgctgcttatattgtcattccaatgtggccagaaggtgctccaacaagtaaccctattcaaagaattctctactggcagcacaagacaatcgaaatgatgtatcaaaccatctacaaggcacttgtggaagttggtcttgatagccagtttgagccacaagactttttgaactttttctgtcttggaaccagagaagttcctgttggaacagttagcgtatataatagtcctcggaagccacctcagccaaacgcaaatgcaaatgctgcacaggtacaagctttgaagagtcgaagattcatgatatatgttcattccaaaggtatggtagtggatgatgagtttgtcttaattggttccgcgaatatcaaccagagatccttggaaggaactagagatactgaaatcgccatgggagggtatcagccacactattcatgggctatgaaaggttctcgactcatggtcagatcttggtatagaatgtcgttatgggcagaacatctagggtttctagagcaaggtttcgaggaaccagagaacatggaatgcgtgagacgagtaaggcaattgagtgagctgaattggagacagtatgcagcagaggaagtcacagagatgtcaggtcatcttcttaagtatccagttcaagttgatagaacaggcaaagtgagttctcttcctggatgcgagacattcccagatctgggtggcaagatcataggatcgttccttgcactacaagaaaacctcaccatatgaaacttaccttgtaggcttgttagtgatcaacatttgttctttatttcttccacttcaagaaatctctctcagtgtgatctgattgaaagtgtgcctttagggtctagttgtgcttttcaaatttatgagccggtaaatctatttattacaaaatttcaattgatctatcagagcacaatgttcagcctccccagtggttactgatcaaagaaagaatgttgcagcaagtcaagatgataacattgtgctaatgaaccaatacaatacatctgaaccgcctccaaatgctccaagaagaaacgacaccagcttttacactggagctgattactaaacggtgggcggccgtgaattcctgaattcttggccgggacagagttcataccctacgatgaactctgtcaacaatatacagttcagagatcccaacacagcttatacatctgcaatggctcctgcttcactctccccaagccctagttccgttagcccgcatgagtacagttccatgtttcacccattcaacagtaaacccgaggggttacaagaccgggattgttccatggatgtagatgagaggagatacgtctcttctgcaaccgaacatagtgcaataggcaatcacattgatcagcttattgagaagaagaacgaagatggctattcattatccgtcgggaaaattcagcaatctcttcaacgagaagccgctttaaccaaattccgaatgaagcgaaaggacagatgttatgagaaaaaggttcgttacgagagccggaagaaattagcagagcaacgaccacgaatcaaaggccaattcgttcgtcaagtccaatccacacaagctccatagtgatccaacaaattgatatattatatacagttcaattttgtatcatcaactagaggaattttgttttctccgatgcagaagctgttctttgtacaactaattccacatacgttagatttggtgacacatttgtgtgtacatacacatctttcgagcttgttgttgagttttagttagaatctacgttagatctgtaactacatacatttggattacgtttctgtaacttgcaagacgaattagaaagattgacaaaaaaaaaaccaaagggcggccgctctagaggatccaagcttacgtacgcgtgcaggtgacgtcatagatcttntatagtgtgtaccccattattatcccccccccgcggcggcgccttctaccccgctctga

SEQ ID NO: 118545 - DNA, 981 bp, Arabidopsis thaliana
  unsure (1)..(981): unsure at all n locations
atgannnnnnnnnnnnnnnnnnnnnnnnnnnnnnnnnnnnnnnnnnnnnctgcaggtaccggtccggaattcccgggtcnacccacgcgtccgcgctggatggcttcaaaacctcggggaatagggaaaggaagaacttcttttgacgattctttgcttaggataaacagaattcctgacatcatgggactttctgaagcttcttctgctaatgataatgatccagagtcttggcatgttcaggttttccgttctattgattcgacttcagtcaaagggtttccaaaggacccagaggaagctactggaagaaatcttctatgtgggaagaacattctcatagatatgagcatacatgcagcttatgttaaggcgatacgatctgctcagcacttcatttacattgagaaccaatattttcttggatcttcattcaactgggattcaaacaaggacttgggtgctaataatctaatcccgatggaaatcgcgctgaagattgctaacaaaattagagcatgggaaaagtttgctgcttatattgtcattccaatgtggccagaaggtgctccaacaagtaatcctattcaaagaattctctactggcagcacaaaaccatgcaaatgatgtatcaaaccatctacaaggcacttgtggaagttggtcttgatggccagcttgagccacaagactttttgaactttttctgtcttgggaccagagaggttggaaccagagaggttcctgatgggacctgttagcgtatataatagtccccggaaggccacctcagcagctaaatgctgcacaggtacaagctttgaagagtcggggattcatgatatatgtccattccaaagggntggtagngggtgatnagttntcnttaattggtncccggattttaancccngggtnntttggnggnccttggggcccctttaaacccttttggggggggtttnnccccccccttttgc

SEQ ID NO: 118546 - DNA, 526 bp, Arabidopsis thaliana
  unsure (1)..(526): unsure at all n locations
ancccccaggccaacttgggtatngattccttttggcngannnctnggnttctaggcaaggttcgaggaccggnnaccatggaatgcntgagacgagtaaggcaattgagtgagctgaattggagacagtatgcagcagaggaagtcccagagatgtcaggtcatcttcttaagtatccagttcaagttgatagaacaggcaaagtgagttctcttcctggatgcgagacattcccagatctgggtggcaagatcataggatcgttccttgcactacaagaaaacctcaccatatgaaacttaccttgtaggcttgtagtgatcaacatttgttctttatttcttccacttcaagaaatctctctcagtgtgatctgattgaaagtgtgcctttagggtctagttgtgcttttcaaatttatgagctgtaaatctatttattacaaaatttcaattgatctatcaaagtgtgtgttttggatttttactatatgatttaatttagtattgtggtcatatctttagt

SEQ ID NO: 118547 - DNA, 2079 bp, Arabidopsis thaliana
  unsure (1)..(2079): unsure at all n locations
gtcgacccacgcgtccgcatgactagtcataacctttaaatcacttctgctttttttctgtttctcttttgatttattcaaagacaacaaagttttgtttttgacaaaaaatctgatctttgtttgttcgtttgtttgttacatggggatgaagaaacaatggcaaccggagaaaacagaacggtgccggacaatctaaagaaacagctcgcagtttcagttcgaaacattcaatggagttatggaatcttctggtctgtctctgcttctcaaccaggagtgttggagtggggagatggatattacaatggagacataaagacaaggaagacgattcaagcagcagaagtcaaaattgaccagttaggtcttgagagaagtgagcagcttagagagctttatgaatctctctccctcgctgaatcctcagcttccggtagctctcaggtcactagacgagcttccgccgccgctctctcaccggaggacctcaccgacaccgagtggtactacttagtatgcatgtctttcgtcttcaacatcggtgaaggaatccccggaggagcgttatccaatggagaaccaatatggctttgtaacgctgaaaccgccgatagcaaagtcttcactcgttctcttctagctaaaagtgcttcgcttcagacagtggtttgcttcccgtttcttggaggagtccttgagattggcacgaccgaacatattaaagaggacatgaacgtgatacaaagtgttaagacgttgttccttgaagctcctccatatactacaatatcgacaagatcagactatcaagaaatttttgatcccttaagtgacgataaatacactccggtgtttataaccgaagcttttccaacaacttctactagcgggtttgagtaagaacctgaggatcatgattcgttcatcaacgatggtggtgcgtctcaggtacaaagctggcagtttgtgggtgaagaaatcagtaactgcattcaccaatcgttaaattcaagcgattgcgtttcccaaacgtttgttggaacaaccgggagacttgcttgcgatccaaggaagagtaggattcaacggttaggtcagattcaagaacagagtaaccatgtaaatatggacgacgatgttcattaccaaggcgtgatatcgacgattttcaaaacaacgcatcagctaatactcggaccgcagtttcagaacttcgataagcggtctagcttcacaaggtggaagcgatcatcatctgtgaaaacattgggagagaaatcgcagaagatgataaagaagatactcttcgaggttcctttgatgaacaagaaagaagagttgttaccggacacaccagaggaaaccgggaaccatgccttgtccgagaagaaacgccgcgagaaattgaatgaacggtttatgacattgagatcaatcattccctcaattagtaagattgataaagtgtcgattcttgatgatacaattgagtatcttcaagatttacagaaacgggttcaagagttggaatcttgtagagaatctgctgatacagagacacggataacgatgatgaagaggaagaaaccggatgatgaggaggaaagagcatcagcgaattgtatgaacagcaaaaggaaggggagtgatgtgaatgtaggagaagatgaaccagctgatatcggttatgctggtctaacggataacttaaggatcagttcattaggtaacgaggtggttattgagcttagatgcgcttggagagaagggatattgcttgagataatggatgtgattagtgatctcaacttggattctcactcggttcagtcgtcaaccggagacggtttactctgcttaactgtcaattgcaagcataaagggacaaaaatagcaacaacaggaatgatccaagaggcacttcaaagggttgcatggatatgttaaggattcaaggtttagatttgacaaaattagctttttctctggtttggtttcccaattttcggtaatcagtgattctaaccgagtttttgtgattttggnnnnnnnnnnnnnnnnnnnnnnnnnnnnnnn

SEQ ID NO: 118548 - DNA, 711 bp, Arabidopsis thaliana
  unsure (1)..(711): unsure at all n locations
ccggcccgtaatcccggtcgccacgcgtccgaatctctctctctcacactcactgtaataaacacaaatgacgagttcttctgaatcaactcgcaagggtctgaccaaaatcgccacgaaccggttgcagaaagagttcatggagtggcaaaccaatcctccttctggtttcaagcacagagtctctgataatctccaacgatggatcattgaagtgcatggagttccaggaactctttacgccaatgaaacttaccaacttcaagttgagttccctgagcattatcctatggaagctccacaggttatctttcagcatccagctccacttcatcctcatatttacagcaacggtcacatttgtttagatgtcttgtatgattcgtggtcaccggcgatgaggctaagttccatctgtctcagcattctctcaatgctctccagctcatccgtgaagcaaaagccgaaagacaatgaccattacttgaaaaactgcaaacatggaagatctcccaaagaaactaggtggcgtttccatgacgataaagtataacatctcctataatattgtgatttcaaacgaattgtaagatctcaggtcgagttcttgatctgttgctatctttaaaacaagaacagcttctttctncagttttaaaaaaaaaaaaaaaaaaaaaaaaaaaaaaaaaaaaaaaaaactcgctcgtgccg

SEQ ID NO: 118549 - DNA, 1920 bp, Arabidopsis thaliana
  unsure (1)..(1920): unsure at all n locations
atgatctannnnnnnnngcgtccgcccacgcgtctgggaaaatggagagcgacgaagcagcagcagtgtctcctcaagcaacgacaccgagcggaggaaccggagcttctgggccgaagaagagaggtcggaaacctaaaaccaaggaagattctcagacgccgtcgtctcagcaacagagcgatgttaaaatgaaagaaagtgggaagaaaacgcagcagtcgccgagtgttgacgagaagtactctcagtggaaaggtctcgtccccattctctacgactggctcgctaaccataacctcgtctggccttcactctcttgcagatggggtccgcagcttgagcaagcaacctacaagaatcgccagcgtctgtacctctcagagcaaactgatggaagtgtgcccaatactttggtcatagcaaattgtgaagttgttaagccaagggttgctgcagcagagcacatttctcagttcaatgaagaagcacgttctccatttgtgaagaagtacaagaccatcattcaccctggagaggttaacagaatcagggaactcccacagaatagtaagattgttgctactcacaccgacagtcctgatgttctcatttgggatgttgaaacccaaccaaaccgtcatgctgtgcttggagctgcaaattcccgtccagatttgatactaactgggcaccaagataatgctgaatttgctcttgccatgtgcccaacggaaccctttgtgctctccggaggcaaggacaagtcagttgttttgtggagtatccaagatcacatcacaacgattgggacagattccaaatcatctggatctatcatcaaacagactggtgaaggtactgataagaatgagagtcctactgttggcccacgaggtgtatatcatggccatgaagatacagttgaagatgtggcattcagcccgacgagtgcacaagaattctgcagtgttggtgatgattcttgccttatactatgggatgcgagaactggcacaaaccctgtcacgaaggttgaaaaagcgcatgatgctgatcttcattgtgttgattggaatcctcatgacgacaatctgatcctgacagggtcagcagacaacactgtccggttgtttgatcgtaggaagcttaccgctaatggagttggttcgcctatttacaaatttgagggacacaaagctgctgttctttgtgttcagtggtctcctgataagtcatccgtctttgggagctctgcagaagatggtctcttgaacatctgggattatgacagggtcagtaagaagtctgatcgtgcagctaaaagccccgctgggctcttcttccagcatgctggtcacagggacaaagttgttgatttccactggaatgcttcagacccttggactattgtcagtgtttctgatgactgtgagactactggtggaggtggaacattgcagatatggcggatgagtgacttgatttacagaccagaagaagaagtcgtggcagaattggagaagttcaagtcgcatgttatgacttgtgcctccaagccttaagagtaaagaaaacccattgtctatctatctatcgcctatggtaaactaatgcgggttttagcgaggagtcttggtttttgtaaggctggtttgtcttttgagatattggtggtagcttttaggacctttccatatcagttaggggtacatggttctggttcatgatcctgtttcatcagactcttaggtgctgttttgttcaactgagatgttaatcaaatcggaccaactttatgtgttttggtttaaggtttcaatacttggcctgaacctnnnnnnnnnnnnnnnnnnnnnnnnnnnnnnnnnnnnnnnnnnnnnnnnnnnnnnnnnnnnnnnnnnnnnnnnnnnnnnnnnn

SEQ ID NO: 118550 - DNA, 1132 bp, Arabidopsis thaliana
  unsure (1)..(1132): unsure at all n locations
nnnnnnnnnnnnnnnnnnnnnnnnnnnnnnnnnnnnnnnnnnnnnnnnnnnnnnnnnnnnnnnnnnnccacgcccacgcgtccgtctttcttcttcctgattggaattttagggcttttgaaagcacgaacgcgtgaagctctaatcgagaaaaaaatggaggttttggataggagagacgatgagatcagggactcgggaaacatggacagcatcaagtcacactatgttaccgactctgtttccgaggaacgccgctctcgtgagctcaaggatggtctccatcctttacggtacaagttttcgatatggtacactcgtcgcacaccaggggttcggaaccagtcttatgaagataacatcaagaagatggtagaattcagcacggttgaaggattttgggcctgctactgtcaccttgctcgttcttctctcttgcctagtccaacagatcttcatttctttaaggatgggattcgtccattgtgggaggatggtgccaactgcaatggaggaaagtggatcatacgtttctcaaaagttgtatctgctcgcttctgggaggatctgcttcttgcgttggtaggcgaccagcttgatgatgctgataacatatgtggggcagtactgagtgtccgtttcaacgaggacatcattagtgtatggaatcgcaatgcttctgaccatcaggcagtgatgggtttgagagactcaatcaagcggcatttgaagttgcctcatgcatatgtcatggaatacaagccacacgatgcttctctccgcgacaactcttcctacagaaacacatggctgagaggataggcccaaagtcgatgattgtatcatgtaatgtggagaagatttgggaagctcatctgcaacctgggaagatatctggattgaaccctgtatccaataccatactgtaccggaggcttacaatatcagaaaaacaaaatccgggctacttctgtgtcagtatgtgttcatttcgtttttcttttacagtacatcttgttaacttcaatggtttgactcttgatcaaaactataagggttaattttcaaaaaaaaaaaaaaaagggcggccgctctagaggatccaagcttacgtacgcgtgcatgcgacgtc

SEQ ID NO: 118551 - DNA, 1588 bp, Arabidopsis thaliana
  unsure (1)..(1588): unsure at all n locations
cccacgcgtccgactaaatggcgacgacgacgagttgttcgcttctccttcactctcctccttcttctcagctctcaaattcaacctccttcttcaatctctcttcttcacgatcctctccagtttctctctacccaatccgatccaaacgctacttccgaattctctcgaagcttccactaaacgacaacaacggtgacgatgatggagatactcttcttcttactccgttctccgccgttaaacctttcttcctcctctgtacctccgtcgcgttatcgttttcactcttcgccgcttctcctgccgttgaatctgcatcggcgtttgtagttagtactccgaagaaacttcagactgatgagctcgcgacggttcgtttgtttcaagagaacactccttccgttgtttacatcactaatctcgccgtgaggcaggacgcgtttacattggacgttcttgaggtacctcaaggctctggttcaggatttgtgtgggataagcaaggtcatattgttaccaattatcatgttattcgtggtgcttctgatctcagggtcactcttgctgatcaaacaacatttgatgcaaaagttgttggatttgaccaagataaggatgttgcagtattacgtattgatgcaccgaaaaacaaattaagacctatacctgttggagtctctgctgatctgcttgttggccagaaagtctttgccattggcaatccttttggacttgatcatactctcacaactggtgttataagtggtttgcgaagagaaattagttctgctgcaactggtcgtccaattcaagatgtgatacagacagatgcagccattaaccctggtaacagcggaggacctcttctagatagctcaggaacgttaattggtataaacacagccatttattctccttctggtgcatcttctggagtgggcttttcgatcccagttgatacagttggtggtatcgttgatcagctggtgagatttggtaaagtcaccagaccaatcttaggtatcaaattcgcaccggaccaatctgttgagcaattgggagtgagcggtgtgctcgtcttggatgctcctccaagtggtccagccggcaaagccggacttcagtcaacgaaacgtgatggttacgggagactaatactaggagacataatcacgtcggtgaacggtacaaaagtctctaacgggagtgatctgtaccggattctcgatcaatgcaaagtcggtgatgaggtgaccgtagaggttctaagaggcgatcacaaggagaaaatctctgtaactctcgaacctaagccggacgagtcttagaaacgtcgttgaaagaagtaaatatataacgtgtagtaaaaaagaaagtccggtgggttatttctgtatatcaattgttcggaaaatagatcgtccaattgtgtacataaaaaatcagtttacatttgcatacatgcgaaaggtaaccggaaataaccaaaaaaaaaaaaaaaaaagggcggccgctctagaggatccaagcttacgtacgcgtgcatgcgacgtcatagnnnnnnnnnnnnnnnnnnnnnnnncaa

SEQ ID NO: 118552 - DNA, 341 bp, Arabidopsis thaliana
atggcgacgacgacgagttgttcgcttctcctttcttccactctcttccttcactctcctccttcttctcacctctccttcttcaatctcgcttcttcacgatcctctccaatttctcgttacccaatccgatccaaacgctatttccgaatcctctcgaagctttcactaaacgacaacaacagagacgacgatgatgatactcttcattttactccgttctccgccgttaaacctttcttcctcctctgtacctccgtcgcgttatcgttttcactcttcgccgcttctcccgccgttgaatctgcctcggggtttgtagttagtactccgaagaaact

SEQ ID NO: 118553 - DNA, 1394 bp, Arabidopsis thaliana
  unsure (1)..(1394): unsure at all n locations
aagcccacttagtttcctttttctgcatacgacgccgttttgcgattccaccctaaccatttctcagtgacgaacagtctcagaagtttctagaccaaaccacactcttcttcgtcttctccgttctctctatatttctcctcaccttcaacgcagctttctcgttctcgtctcagatcgtgttactaacaaacaccgtttctccggcgaaaagctctctgttactaaaaactcacagaacctaaaaatggcggatcaagctatgacggatcaagatcaaggagctgttactctctacagcggcacagccattaccgacgcgaagaaaaaccatccgttctctgttaaggtcggattagctcaggtacttcgtggcggcgccattgttgaagtttcctcggttaaccaagctaagctcgctgaatccgccggcgcatgttctgtaatcgtctcagatccggttcgatctcgcggcggtgttcgtcgtatgccggatccggttctcatcaaagaggtaaaacgagctgtgtctgtacctgtgatggcacgagctcgcgttggtcattttgttgaggctcagatcttggaatctcttgcggttgattacattgacgagagcgagattatctctgttgcggatgatgatcatttcatcaacaaacataatttccgatctccgttcatttgtggttgccgtgatacaggagaagctttgaggagaatcagagaaggtgctgctatgattaggatccaaggagatttaaccgcaacaggtaacattgcagagactgtgaagaacgttaggtcattgatgggtgaagttagagtcttgaacaacatggatgatgatgaggtgttcacgtttgctaagaagatttcagcaccgtatgatcttgtggctcagactaagcagatgggtagggttccggttgttcagtttgcatcaggtgggatcacgactcctgctgatgcagctttgatgatgcagctaggttgtgatggggtttttgtgggttctgaggtttttgatggtcctgatccgtttaagaaacttaggagcattgttcaagctgttcaacattacaatgatcctcatgtgttggctgagatgagttctggattggagaatgcaatggagagcttaaatgttcgtggtgacaggattcaagactttggccaaggcagtgtttgatgaaaaggttcgaagctgcaaactttttgggacttctaaagtcgtaatcttttttggttttgagtctcaaaatatcggttgttttttgttaatgctggtgcatatgatccgtttggtttaatcgaaacttgcaacaactaaaacctcaatgaaaagttgcagaatttttgaaaaaaaaaaaaaaaaaannnnnnnnnnnnnn

SEQ ID NO: 118554 - DNA, 551 bp, Arabidopsis thaliana
  unsure (1)..(551): unsure at all n locations
gcctgcaggtaccggtctcggaattcccgggtcgacccacgcgtccgcgtcttctccgttctctctatatttctcctcaccttcaacgcagctttctcgttctcgtctcagatcgtgttactaacaaacaccgtttctccggcgaaaagctctctgttactaaaaactcacagaacctaaaaatggcggatcaagctatgacggatcaagatcaaggagctgttactctctacagcggcacagccattaccgacgcgaagaaaaaccatccgttctctgttaaggtcggattagctcaggtacttcgtggcggcgccattgttgaagtttcctcggttaaccaagctaagctcgctgaatccgccggcgcatgttctgtaactcgtctcagatccggttcgatcttcgcggcgggtgttcgtcgtatgccggatccgggttctcatcaagggggtaaaacgagctgggtctgtccctgtgatggcacgagctcgcgttgggcattttttgaggccaattttgaatccttnggtgttantggnggggnattt

SEQ ID NO: 118555 - DNA, 1054 bp, Arabidopsis thaliana
  unsure (1)..(1054): unsure at all n locations
nnnnnnnnnnnnnnnnnnnnnnnnnnnnnnnnnnnnnnnnnnnnnnnnnnnnnnnnnnnnnnnnncagtgccacgcgtctgcgttgaccagaaaaacacacagagaaaggagaaaaacatggaggagttggcgcatccgtacgttccgagagatctgaacctacccggatacgtaccaatctcaatgtcaatgtcctccatcgtctctatctacctcggttcttccctccttgttgtctccctcgtctggcttctcttcgggaggaagaaagctaaacttgataagttgcttatgtgttggtggacattcactggtctcactcatgttattctcgagggctatttcgttttctcccctgagtttttcaaggacaacacttctgcttatcttgctgaagtttggaaagaatatagcaaaggtgattcgagatacgtaggtagagattctgcagttgtatctgttgaagggatcactgctgttatcgttggcccagcttctctcctagctatttatgccattgctaaggagaagtcgtatagctacgtgcttcagcttgcgatttcggtttgccagctctacggatgtttggtttatttcattactgctatcttggaaggagacaactttgccacaaactctttctactattactcctactacatcggggctaactgttggtgggtcttgataccttcactcatttctttccgttgctggaaaaagatttgtgcagctgctgccattgccaacaacaacgtcgagacaaagacgaagaagaaaacccgttgaagcaaggatcaaactctcttttatctcttcaggttactgctgctatagcaaatgaacatgagtctccttttgcggataatttatccattttaaaaactttagctatgttgtctgtctctcttacagcaataaacttgtgaggataatttatccatttttcatatgatatttgcgcttttgttaaaaaaaaaaaaaaaggactcacactnnnnnnnnnnnnnnnnnnnnnnnnnnnnnnnnnnnnnnnnnnnnnnnnnnnnnnnn

SEQ ID NO: 118556 - DNA, 582 bp, Arabidopsis thaliana
  unsure (1)..(582): unsure at all n locations
anccgcagtgactttgagggacccgctgtaccgtgcccngntntcncctngctattaggccatgctaggagagtcgtatagctacgtgcttcagcttgcgattccggttgcccagctctacggatgtttggtttattccattactgctatcttggaaggagaccaactttgcccacaaactctttctactattactcctactaccatcggggctaactggtggtgggtcttgataccttcactcatttctttccgttgctggaaaaagatttgtgcagctgctgccattgccaacaacaacgtcgagacaaagacgaagaagaaaacccgttgaaccaaggatcaaactctcttttatctcttcaggttactgctgctatagcaaatgaacatgagtctccttttgcggataatttatccattttaaaaactttagctatgttgtctgtctctcttacagcaataaacttgtgaggataatttatccatttttcataaaaaaaaaaaaaaaaaaaagggcggccgctctagaggatccaagcttacgtacgcgtgcagtcgacgtcataattcttctatagt

SEQ ID NO: 118557 - DNA, 764 bp, Arabidopsis thaliana
  unsure (1)..(764): unsure at all n locations
aaaagagagaagcaaaaaagaatttttatagaaagaaaggaaaaatcagaaaaggagagaaaaattaaaaaagtctctcttttctctttttcttcttcgtctcccatattctccgatcaaaaatatatttctctctcactttccttggttttctcggcggcttcttcttctcctatttctccctcaaatcgttttctccagttttcttgggataaatcttcctcctttctgcagacgccatgtcggacaaaggtcgtcccttgccaaaatttggtgaatgggatgtgaatgatccagcatcagcagaaggttttacagtgatattcaacaaagctagggatgagaaaaagaccggtggcaaaccgggatcacccggtaaatccagtgagggtcatgttaaatctggaggaggagatcctagtaaacctcagcctaaaaaatggctctgctgcatgcaagctccagctgtggactcttgacagacacaaagatggatttgcttgctgctaaaaaaaaagtcacagtgcttacacatctaaaagcaatgggtctttttatgttttattgtcgtctttcttgaaattacccacacacccaaaaaaaaaagggttcctaagatgatttggagctcacccaccctttggtatcaccgatttgagtccctctcctttgaagtggttctnctctaaatnntgnaaatcgggccccatttttttgggaaaaaanggggnaaccgnnaaaaccagtccgngcnanganggtnc

SEQ ID NO: 118558 - DNA, 3356 bp, Arabidopsis thaliana
  unsure (1)..(3356): unsure at all n locations
gtcgacggtatcgataagctagatatcgaattcgcggccgggaaaaatcgaaggataatctgtttcttccagcacaagttaacttgcaagagagagctcaaagatggaaccaacagaaaaaccatcgaccaaaccatcttctcggactctacctagagacactcgtggctctctcgaagtattcaacccgtcaactcagctgacccgacccgataacccggtgttccgtcctgaaccaccagcgtggcaaaacttgagtgatccacgtggcaccagtcctcaaccccgaccacaacaagaaccagctccatccaaccctgttcggtctgatcaagaaatcgctgtcacgacctcatggatggctctgaaagacccatcaccggagacaatctccaagaagacgatcaccgccgagaaaccacagaagtcggcggtggcggctgagcagagagcggcagagtggggattggttttgaagaccgatacaaagacgggaaagccacaaggagtaggcgtgaggaactctggtggaactgagaatgatcctaacgggaaaaagactacatcgcagagaaactcgcaaaactcttgccggagctccggtgagatgtcggacggagatgttcccggcgggaggagtgggattccaagagtatcggaagatctaaaagatgcgttgtcgacgtttcaacaaacgtttgtggtctcagatgctacaaaacctgattatccgattatgtatgcaagtgctggtttcttcaatatgactggttacacttccaaagaagtcgtcggcagaaactgccgatttttacaaggatcaggtacagatgcagatgagttagcaaagataagagagacattagctgctggtaacaattattgtgggcgtatattgaattacaagaaagatgggacctctttttggaatcttctcacgattgctcccattaaagacgagagtggcaaagtcctcaaatttatcggaatgcaagtggaggtgagcaagcacactgaaggggccaaagaaaaggctttgaggcccaatgggcttccggaatctctgattcgatacgatgcccgccaaaaagatatggcgacaaactcagtgacagagctagtagaggcggtgaagagacctcgggcactaagcgaatcgacgaatctccatcccttcatgacaaaatcggagagcgatgaacttccgaaaaaaccagctcggcgaatgtccgaaaatgttgttccgtcaggccgaagaaactctggcggcggaagaagaaactcgatgcagcgaatcaacgaaattcccgagaaaaaatctagaaaatcttccctttccttcatggggatcaagaagaagagcgaatctttggatgaatctatagacgatggatttatagagtatggagaagaagacgatgagattagtgatagggacgagagacctgagagtgtggatgataaagtgagacaaaaggaaatgagaaagggtattgatctagctactacactcgaacgtatcgagaagaatttcgtcatcactgatcctaggcttcccgataatcccattatttttgcatctgatagtttcttggagctcacggaatatagccgtgaagaaattcttggaagaaattgcaggtttctacaaggtccagagactgatctaaccacagtgaagaagattcgaaatgctattgataaccaaaccgaagtgacagttcagctcatcaactacaccaagagcggaaagaagttctggaacattttccacttgcaacctatgcgtgatcagaagggagaagtacaatactttattggagttcaactagacgggagcaagcacgtagaaccagttcgcaatgtcattgaagaaaccgcagtgaaagagggagaagacctggtgaaaaaaacagctgtgaatatcgatgaagcggttcgagaacttcctgatgccaacatgacaccagaggatttatgggcaaaccactcaaaggttgttcattgtaagcctcacaggaaagattcaccaccatggatagctatccaaaaggtgttggaaagtggtgaaccgattggtttgaagcatttcaaaccggtgaaacctttgggttctggtgacacaggaagtgtgcatctagtggaactcgttggaacagatcagttgtttgcaatgaaagcaatggacaaggctgttatgcttaaccgaaacaaagtacatagagctagagctgagagagagatcctagatttgcttgaccatccttttcttcctgcactctacgcttcttttcagacaaaaacacatatatgtcttataacagattactatccaggaggagaactcttcatgctcctagatcgacaacctaggaaggttctcaaagaagatgctgtaagattctatgctgctcaagttgtcgttgcactcgagtatcttcactgtcaaggaataatttaccgagacttgaaaccggaaaacgttttaatccaaggcaatggcgatatctctttgtcggattttgatctgtcttgcttgacatcttgcaaacctcagctgttgattccgagtatagacgagaagaagaagaaaaagcaacaaaagagtcaacaaactccaatcttcatggctgaaccaatgcgtgcatcaaactcatttgttggcactgaagagtacattgctccggaaattatatccggagcaggacatacgagtgcagtagactggtgggctcttggtatacttatgtatgaaatgttatacggatacactccttttagaggaaaaacaagacagaagactttcaccaatgttcttcaaaaagatctcaagtttccagctagcattcctgcaagtcttcaagtgaaacagctgatttttaggctgttacaacgagatccgaagaaaagactaggttgttttgaaggagcaaatgaagtcaagcaacattctttcttcaaaggcataaattgggctctgattcgatgcacgaaccctccagagctcgagactccgatattttctggtgaagctgaaaacggagagaaagttgttgatcctgagctagaagatctgcaaacaaatgttttttgagatttggactaaacgtttatcgttttcttttcaagaattgtttgaaactctttgttctccaaaaatctcgtttttaattattttcattttaccattatctttatttatttataatgccaagtgtttctaataatttgtgtgagtttcttaagaatatgttttttatatatgtcaataaaattaatcaagttttnnnnnnnnnnnnnnnnnnnnnnnnnnnnnnnnnnnnnnnnnnnnnnnnnnnnnnnnnnnnnnnnnnnnn

SEQ ID NO: 118559 - DNA, 772 bp, Arabidopsis thaliana
  unsure (1)..(772): unsure at all n locations
agaacttggtcatgtgtccatttttagaaatcaataaaatattataccatatatttatagtatctaactttaagagaataaatatttttatttgccgattcatagacacacacatgcgtgtggtatctatgtctatccattaaactaattatatataaacttattttctggccacaatttttgtttcgtgtatagagagagctcaaagatggaaccaacagaaaaaccatcgaccaaaccatcttctcggactctacctagagacactcgtggctctctcgaagtattcaacccgtcaactcagctgacccgacccgataacccggtgttccgtcctgaaccaccagcgtggcaaaacttgagtgatccacgtggcaccagtcctcaaccccgaccacaacaagaaccagctccatccaaccctgttcggtctgatcaagaaatcgctgtcacgacctcatggatggctctgaaagacccatcaccggagacaatctccaagaagacgatcaccgccgagaaaccacagaagtcggcggtggcggctgagcagagagcggcagagtggggattggttttgaagaccgatacaaagacgggaaagccacaaggagtaggcgtgaggaactctggtggactgagaatgatcctaacgggaaaaggtncatcgagngnactcgnaaantttgccggngctccggtgaattttggcgngatgttcggnggtggntgggttcagggttggngtttaantngtntgcgttanaagngc

SEQ ID NO: 118560 - DNA, 1234 bp, Arabidopsis thaliana
aaagaaaaagcaaagattttcctcattcttttgccattattatctctcatcgatttggcttgctacttttgaatttacccgtgttctactacgattcgggattagggttttttcttgagttagaaaagattgtttcttgattcttgggaatggctgggatttgaggaagaagaagtgcaaaagggttctttttttgagtttgtgaatttgctgcggagatgagtgcttcgaggtttataaagtgtgtcaccgtcggcgatggtgccgtcggaaaaacttgtatgctgatttcttacacaagcaacactttccctacggactatgttccaactgttttcgacaacttcagtgctaatgtggttgtagatgggaacacggtgaatcttggattgtgggatacagctggtcaagaagactataacaggttaagaccgttgagttaccgtggtgccgatgtcttcattcttgcattctcgcttattagcaaagctagctacgagaatgtagccaagaagtggattcctgagcttaggcattatgcccctggtgttcctataatcctcgttggaacgaaactcgatcttcgagatgacaagcaattcttcatagaccatcctggtgcagtgcctattactacaaaccagggagaggaactaaagaaactgataggatcaccaatctacattgaatgtagttcaaagactcagcagaatgtgaaagcagtctttgacgcagccataaaagtggtgcttcagccaccgaaacagaagaagaagaaaaagaacaagaaccgctgcgtgttcttgtgatcgaacatctcttaaaacgaaaaaaggtttaggtaacaaaagaagctgaaggaaaacgaacacctgcaacattgtatagttgttgaatccggcttgtttcggtctttactcttctttttgctggtgaatctaatgagtgaactgaggccaagaggaggattctgggtaagagaaggggatgtgttcttttcttggtgtgttgttgttgttgttgtacttttgctatgtagactaatctcttaatactatgttgtctttgtttttgctgttggggtccattttgtattttctttaacagaaatcttaattaattttttagtgacttttttaaagcttccgttgatcttatggtcttgtattggtatgtaattagattcagacaacgaagaacatcttgagatagatctctatatacaataagatta

SEQ ID NO: 118561 - DNA, 1199 bp, Arabidopsis thaliana
  unsure (1)..(1199): unsure at all n locations
cagagttctttttctactagtcccctcctcctataggctcctctcaaagtcatctatcaaccgccaaatcaaccttcttcttcttcttttccttctctcttcgattctttttcgaatttgggtgattctcagattcacaagcttttagagctcgaatttgattggcgagctagaaatgtcgaggttttgaggaagaagcaaccacaaaagaggattgattttaagggcttttttgtttgtttccgatcttgcggcagagatggcgtcaaggtttataaagtgtgtgaccgtcggagatggtgccgtcggaaaaacttgcatgctcatttcttacactagcaatacttttcctactgattatgtgccaactgttttcgacaacttcagtgctaatgtggttgttgatggcaacactgtcaatcttggattgtgggatactgctggtcaagaggactacaacaggttacgacctttgagttaccgtggtgctgatgttttcattcttgctttctctcttattagcaaggctagctatgagaatatagccaagaagtggattcctgagctcaggcattatgctcctggtgttcccattatccttgttgggacaaaactcgatcttcgagatgacaagcaattctttatagatcatcctggtgctgtgccaattactacaaaccagggagaggaactgaagaaactgattggatctgctgtctacattgaatgtagttcaaagacacagcagaacgtgaaggcagtgtttgatgcagctataaaagtggtgcttcagccaccaaagcagaagaagaagaaaaagaataagaaccgttgcgcgttcttgtgataagaaaaacctctaagactaggtaaaaccaactaaagaaagaagcagaagatgatttcaactatttgattcggcccattttaatatgataatttcgacgtgaagggagacatttctagtagcttttttgtatagttgctaaaacgagctttgttgttgttgtgtcttttactctttgctggtgaatctttcgagtccacagactaagagaccgtgtgttgtactcttgctatgtagactaatctctgtctctcttctcttttgttcttgaggatcattttgtattaacaaatgaatctaattaatatttgcaaaaaaattttttgtttttaacaaaaaaaaanaaaaaggg

SEQ ID NO: 118562 - DNA, 1407 bp, Arabidopsis thaliana
  unsure (1)..(1407): unsure at all n locations
ctcgttgcaagagtagattagtgatctgcaaggtttttgctttttggattcaggtgtagattttaggtcatggagctgtatactagaaattgatcaatttcgttacaacttttttttgttttaagactttgagaatctaggccaaagtattgatcttgaagctactgtgttttgtttttgctttttataaaggatgattttgattataaggtgtaaatctgtgacttgtgattggtgtttcaggattatgtgccaactgttttcgacaacttcagtgctaatgtggttgttgatggcaacactgtcaatcttggattgtgggatactgctggtcaagaggactacaacaggttacggccttttgagttaccgtggtgctgatgttttcattcttgctttcctctcttattagcaaggctagcctatgagaatatagccaagaagtggattcctgagcccagggcattaatgctcctggtgttcccattatcccttggtgggccaaaaactcgatcttcgagatgacaagcaattcttcatagaccatgctggggcagggcctatttctacaaaccagggagaggactaaaaaaactgatggcgtccaccacctttgcaagattggagnnnnnngggggcccnncaaaaaaaaaaagcccggggcgggttggtggctggcttaccccccccgcgtctcccccacaaaagatttctaatttgactatgaaaaacaccggcccctgatattcttcaaatttctcgggtggggggagccggcaccacctgtgcggcctccccaccggcgggcttctaccctcccattaacccccaccggggggggagggccggaggaaacccctctttctccgtcgcttctgtctcctgccgtttattcgtaagaaacacactctcagcgtcctcatacttgtgcggccccataatttcatccccacggacaactacctgcctccgccccctcttattatgctctctcccgccctctcgccctcttcttgcacgttttccctcccctccccttctaccccatttcgtcccccctctctggtttttcctctcccctccgccccgctcgctgctgtctgcagagctgattcttgcttgcttcttcccaccttgctctctcagtggcgctgtcttttatgcccgccccccccccgacaccgggcctgcacctccccccgtcgctgagtaccccttctctgcatctctgacattcaaggtacaactctccctcccccgtcacctctctcagatttcgcccgctttctcttcgcctatccatcctggtgtttccgttcgtatctgctcctcttgatcccacgcccccgcctctcctcctctaatacctcacccagggtatgtggtctgtccctttttccgcctttt

SEQ ID NO: 118563 - DNA, 1290 bp, Arabidopsis thaliana
  unsure (1)..(1290): unsure at all n locations
gtgtgagtaatttaggcacaacacaaacaaacaataactaaaatggctttgtcttccaaaaccctaaagtcaactctcgtcttcctctctattattttcctctgtttctccttgatcctagctcacggcggcatagacgacggcgacgaagaagaggagaccaaccagccacctccggccaccggaacaaccaccgtcgtgaatctccgatccaaaggcttggtgcttgtgaagatctactgtattataatactcttctttagcacattcttagccggaatttcaccttacttttaccgatggaacgagtcgtttctcctcctaggaactcaattctccggtggtatattcctcgcgaccgctctaatccatttcctcagcgacgctaacgagactttccgagggttaaaacacaaagagtatccttacgctttcatgttagcagccgctggatattgccttacaatgctggcagatgtggcggttgcgtttgtagcggctgggagtaataacaaccacgtcggagctagcgtcggagagtcgagggaggatgatgacgtggcagtgaaagaggaaggacgtcgtgagataaagagtggtgttgatgtgagtcaagcgcttatacgaactagtggatttggagacacagctttgctgatttttgctctttgttttcactccatctttgagggaatcgccattggtctctcagacactaaaagcgacgcttggagaaacctatggacaatatcgttgcacaaggtctttgcggccgtagcaatgggaatagctcttctcaagctaatccctaaacgtccattcttcctcactgtcgtctactccttcgcctttgggatatcgagtcccataggtgtcgggattggcataggaatcaatgccactagccaaggagctggtggtgactggacctacgcgatctctatgggccttgcgtgtggagtttttgtgtacgttgcggttaaccatctcatctcaaaagggtataagcctcgtgaggaatgttacttcgacaagccaatctacaagtttattgccgtcttcctcggtgttgctttgctctctgttgtaatgatttgggattgatttttggtgatatatacttagtttcaataattagtttttttttcccaatccctttgttcatgttcttcggttttattaattttgcagaatttcacaattcaatgtaacagttgtcaaaaaggatgtaacatttatgataccgntgtggtaatgaatgtantgngcncccagcnccncangggtngg

SEQ ID NO: 118564 - DNA, 1676 bp, Arabidopsis thaliana
  unsure (1)..(1676): unsure at all n locations
gtggatctgcgataatgaatcgtttctagtcagatttggttattggttcattgtaatttgtttacgtagatgagaaacccaaatcgacggaggagaataagagttctaagccggaatcagcttctggttcggcccacctctgaaggttccagatcgatagtgaattcgtgtttaaaaaaaaaagattatctgtatttcaagtttcatgagcgtttgccaccacaacattgtcttttcggggttttagtcatacttaatggcttccaattcggagaaaaatcctcttctttcagatgagaaacccaaatcgacggaggagaataagagttctaagccggaatcagcttctgggagttcaacttcatcagctatgcctggcttgaatttcaatgcttttgatttctctaatatggctagtattctcaacgatcctagcatcagagaaatggctgagcaaatagctaaagatcctgcgtttaaccaattggctgagcagcttcagagatctattcctaacgctggccaggaaggtggtttccctaactttgatcctcaacagtatgtcaatacaatgcaacaggttatgcataaccctgagtttaagacaatggccgagaaacttggtaccgccttagttcaggatccacaaatgtctccttttttggatgctttctcgaatcctgaaacagcagaacactttactgagcgtatggcgcggatgaaagaagatccagagttgaaacctatactagatgagattgatgctggtggtccttctgccatgatgaagtactggaatgatccagaagtgctgaaaaagctgggtgaagcaatgggtatgcctgttgctggcttaccagaccagactgtttcagctgaacctgaggtagcagaagaaggtgaagaagaagagtctattgttcaccaaactgccagtcttggtgatgttgagggtttgaaagctgccttggcatctggtggtaacaaagatgaagaagattctgaaggaaggacagcattgcattttgcttgtggatacggcgagttgaaatgtgctcaagttcttatcgatgctggagcaagtgttaatgcggttgacaaaaacaagaacacacctctgcattatgctgctggttacgggaggaaagagagtgtaagccttctcctggagaatggtgctgcagtcactctgcaaaacctagacgagaagacgccaattgatgtagcgaagctcaacagccagctggaggtggtgaagctgcttgagaaggatgctttcctttgagctctgctggttaaaggaaagctctaagctcatattgtctttgaggcatttgtcttgtgtgtgtcctgaaccagtttcacaggctttttgtgtacactttttattagttcctctcttcttctaaatttgtctcttatgttgttttaaaagtcaataaagaaagaaatagcaatcaatgatttaatttatgattatattctttatttcgtcgacctctacagaatgattcaatttggaagaatcattctggtttggaggatatgtaagaaaaactacttgatctccaagttattccattcttctgttgaaaaaaaaaaaaaaaaaaagnnnnnnnnnnnnnnnnnnnnnnnnnnnnnnnnnnnnnnnnnnnnnnnnnnnnnnnnnnnnnnnn

SEQ ID NO: 118565 - DNA, 1491 bp, Arabidopsis thaliana
aatacgactcactttagggaaagctcgtacgcctgcaggtaccggtccggaattcccgggtcgacccacgcgtccgcccacgcgtccgtgtatttcaagtttcatgagcgtttgccacgcacgaagctcgtgccgaattcggcacgagcttcttcttccttttcttactaaattctcttagggttttagtcatattaatggcttccaattcggagaaaaatcctcttctttcagatgagaaacccaaatcgacggaggagaataagagttctaagccggaatcagcttctgggagttcaacttcatcagctatgcctggcttgaatttcaatgcttttgatttctctaatatggctagtattctcaacgatcctagcatcagagaaatggctgagcaaatagctaaagatcctgcctttaaccaattggctgagcagcttcagagatctattcctaacgctggccaggaaggtggtttccctaactttgatcctcaacagtatgtcaacacaatgcaacaggttatgcataaccctgagtttaagacaatggccgagaaacttggtaccgccttagttcaggatccacaaatgtctccttttttggatgctttctcgaatcctgaaacagcagaacactttactgagcgtatggcgcggatgaaagaagatccagagttgaaacctatactagatgagattgatgctggtggtccttctgccatgatgaagtactggaatgatccagaagtgctgaaaaagctgggtgaagcaatgggtatgcctgttgctggcttaccagaccagactgtttcagctgaacctgaggtagcagaagaaggtgaagaagaagagtctattgttcaccaaactgccagtcttggtgatgttgagggtttgaaagctgccttggcatctggtggtaccaaagatgaagaagattctgaaggaaggacagcattgcattttgcttgtggatacggcgagttgaaatgtgctcaagttcttatcgatgctggagcaagtgttaatgcggttgacaaaaacaagaacacacctctgcattatgctgctggttacgggaggaaagagtgtgtaagccttctcctggagaatggtgctgcagtcactctgcaaaacctagacgagaagacgccaattgatgtagcgaagctcaacagccagctggaggtggtgaagctgcttgagaaggatgctttcctttgagctctgctggttaaaggaaagctctaagctcatattgtctttgaggcatttgtcttgtgtgtgtcctgaaccagtttcacaggctttttgtgtacactttttattagttcctctcttcttctaaatttgtctcttatgttgttttaaaagtcaataaagaaagaaatagcaatcaatgatttaattaaaaaaaaaagggcggccgctctagaggatccaagcttacgtacgcgtgcatgcgacgtcatagctcgtctgatagtta

SEQ ID NO: 118566 - DNA, 801 bp, Arabidopsis thaliana
ggggggccccttctcgcctaagaatagaaggtctcggaatattgttaaaaaattttttttggcccaaaagctggggttaaaacccattggggttataagccttttgggacccaacccaagacttgttgccagctgaaaccttaaagagggcgaaaaaaggggaaaagggaaaagttttttttttccccagccccgctattctttggttaatgtcgagggtttgaaaacccgcctgcgcattgggtgggaaccaagattaaagaagcctctgagggaaggactgctttgcatttggcatgtggatacggcgaggtgagatgtgctcaggttcttctggatgctggagcaaatgcaaatgcgattgacaaaaacaagaacacaccattgcactatgctgctggttatggaaggaaagagtgtgtaagcctcctcctagagaatggtgctgcagtaactcagcaaaacatggacaataaaaatcccattgatgtggccaggctaaacaatcagctagatgtggtgaaactacttgagaaggacgctttcctctgagctgctttgactcttgaaggatatgtttcttctctgtcatgtaatagtgtcacagagtctgattgcaaccttgtcttctgtgggggttttcatcattaaatctggaaaaaaaagatggagaaaatggatgtttattatggttttgtaatgaattattttcttcttgaattggttttttcttttggaaaaaaaaaaaaaataagggcgtccgctctagaggatccaaggttgcggaggcgtgcaagccaa

SEQ ID NO: 118567 - DNA, 840 bp, Arabidopsis thaliana
  unsure (1)..(840): unsure at all n locations
ggtacgcctgcaggtaccggtccggaattcccgggtcgacccacgcgtccgcatgaaggaggtctacctaactttgatccacaacagtatatgctgactttgcagcaggttatggagaatcctgagtttagaacaatggctgagcgtcttgggaacgctttggtgcaggatccacaaatgtctccctttttggaggctcttggtaaccctgcagcatcagagcagtttgcagagcgtatggcgcaaatgaaagaagatcctgaattgaaacctatactagctgagattgatgctggtggtccttctgctatgatgaagtactggaatgataaagatgtgttggcaaagctgggtgaagcaatgggtatagctgttggagcagaccagactgttgcagctgaacctgaagaggccgaagaaggggaagaggaagagtctattgttcaccagaccgctagtcttggtgatgtcgagggtttgaaagctgccttggcatctggtgggaacaaagatgaagaagactctgaaggaaggactgctttgcattttgcttgtggatacggcgaggtgagatgtgctcacgttcttctcgatgctggagcaagtgctaatgcggttgacaaaaacaagaacacacctctgcactatgctgctggttacgggaggaaagagtgtgtaagccttctcctggagaatggtgctgcagtcactctgcaaaacctagacgagaagccgcaatgatgtgcgacncaacagccagctggaggtggtnaccccttaaaaggtcctcccttagccnccngtaaggaanccaanccaatgccttaggttgcttngngc

SEQ ID NO: 118568 - DNA, 739 bp, Arabidopsis thaliana
  unsure (1)..(739): unsure at all n locations
aaaagaatatccgttttctttgccacaaaaacattttcatttgggggttttcataatttttggttcttcagctcctcaagcttcgatagggttttagtaattttccgatggcttcaagctcagagaaaacacctcttattccttcagatgagaaaaacgataccaaggaagagagtaagagtactactaaaccagaatcaggctcaggagctccaccttcaccttcaccgactgatcctgggcttgatttcaatgcttttgatttctccggcatggctgggatcctcaatgatccaagtatcaaggaattggctgagcaaatagctaaagatccttcatttaaccagttagctgagcagcttcagagatctgtgccaaccggatctcatgaaggaggtctacctaactttgatccacaacagtatatgcagacaatgcagcaggttatggagaatcctgagtttagaacaatggctgagcgtcttggtaacgctttggtgcaggttccacaaatgtctcccctttttggaggctcttggtaaccctgcaagcatcagagcagtttgcagagcgtatcggcgcaattgaagggaggttccggattttgaaccctttacttacttggggttttactcctggggggcccntcctcctgatgattnagggncctgggaattgttnaaagattttttttggaaaaacctgggnaaaaaaaatggggttnancttttnggggaaa

SEQ ID NO: 118569 - DNA, 1240 bp, Arabidopsis thaliana
  unsure (1)..(1240): unsure at all n locations
gaannnnnnnnnnnnnnnnnnnnnnnnnnnnnnnnnnnnnnnnnnnnnnnnnnnnnnnnnnnnnnnnnnnnnccacgcgtccgctcaatgatccaagtatcaaggaattggctgagcaaatagctaaagatccttcatttaaccagttagctgagcagcttcagagatctgtgccaaccggatctcatgaaggaggtctacctaactttgatccacaacagggtatgcagacaatgcagcaggttatggagaatcctgagcttagaacaatggctgagcgtcttggtaacgctttggtgcaggatccacaaatgtctccctctttggaggcttcttgtaaccctgcagcatcagagcagtttgcagagcgtatggcgcaaatgaaagaagatcctgaattgaaacctatactagctgagattgatgcctgggggccttctgctatgatgaagtactggaatgataaagatgtggtggcaaagcctgggtgaagcaatgggtatagctggtggagcagaccagactgttgcagctgaacctgaagaggccgaagaaggggaagaggccccaagagtctattgttcaccagaccgctagtcttccggtgatgtccacgcgtccgggtttgaaagctgccttggcatctggtgggaacaaagatgaagaagactctgagggaaggactgctttgcattttgcatgtggatacggcgaggtgagatgtgctcaggttcttctggatgctggagcaaatgcaaatgcgattgacaaaaacaagaacacaccattgcactatgctgctggttatggaaggaaagagtgtgtaagcctcctcctagagaatggtgctgcagtaactcagcaaaacatggacaataaaaatcccattgatgtggccaggctaaacaatcagctagatgtggtgaaactacttgaggaggacgctttcctctgagcttgctgctttgactcttgaaggatatgtttcttctctgtcatgtaatagtgtcacagagtctgattgcaaccttgtcttctgtgggggttttcatcattaaatctggaaaaaaaagatggagaaaatggatgttattatggttttgtaatgaattattttcttcttgaattgggtttttcttttggctcttaaagtcttttttggcaaaaaaaaaaaaaaaaaaagggcggccgctctagaggatccaagcttacgtacgcgtgcatgccgacgcatagctct

SEQ ID NO: 118570 - DNA, 476 bp, Arabidopsis thaliana
  unsure (1)..(476): unsure at all n locations
atttctttgtcttcctcatcgcttatcttcgttgaatctcttgtttacaccttttcctgaaaacaaaattgtgttttttgtagggttttagtcacacttaatggcttccaattcggagaaaaatcctcttctttcagatcagaaacccaaatcgacggaggagaataagagttctaagccggaatcagcttctgggagttcaacttcatcagctatgcctggcttgaatttcaatgcttttgatttctctaatatggctagtattctcaacgatcctagcatcagaggaaatggctgagcaaatagcttaaagatccctgcgtttaaccaattggctgagcagcttcagagatctatttcctaacggtggccagggaggtggtttccccaactttgatccccaacagtatgtcatacatgcaacaggtatgcataacctgagtttagacanggccgggaactggaccgctagtcag

SEQ ID NO: 118571 - DNA, 470 bp, Arabidopsis thaliana
  unsure (1)..(470): unsure at all n locations
cgatcgcgtccgccgacgcgtgagctgtggttcgggttgcgtcggcgtttgccaccacaccattgtcgtttcggggttttagtcatacttaatggcttccaattcggagaaaaagccgcgtctttcagatcagaaacccaaatcgacggcggagaataagagttctaagccggcatcagcttctgggacgttcaacttcatcagctatgcctggcttgaatttcaatgcttttgatttctctaatatggctagtattctcaacgatcctagcatcagagaaatggctgagcatatagctaaagatcctgcggtttaaccaattgggctgagcagcttncagagntctattcctaacggttggccangnaagggtnggtttccctaaacttttnatnccnnaacaagtnatgtcaattncaaattccaacanggtttttgnattancccttnggnttaaggccaaattgcc

SEQ ID NO: 118572 - DNA, 271 bp, Arabidopsis thaliana
cccacgcgtccgtgtatttcaagtttcatgagcgtttgccaccacaacattgtcttttcgggttaatttcttcttcttcttccttttcttactaaattctcttagggttgtggtcatacttaatggcttccggggcggacaaaaatcctcttctttcagatgagaaacccaaatcgacggaggagaattagagttctaagccggaatcagcttctgggatgttcaacctcatcagctttgcctggcttgaatttcaatgcttttgatttct

SEQ ID NO: 118573 - DNA, 1813 bp, Arabidopsis thaliana
ggcacgagctgcatactggtcattgattggttaatcagagctctctcttttcttttcctatctctagagactagagaaatggctctctatctctcttcttcacgactcatcacctttctctctttcatcttgcttctctccaatggcttctcgtcctcttcctctcgccctagcatccaccatcgtcaccacctggacaaccacaattacaaagacgctctctccaaatccattctcttcttcgaaggtcaaagatccggaaagcttcctccaaaccagagaatgacttggagaagcaactctggtctctctgatggctctgctctcaacgtggatttggtgggaggatactacgatgcaggggacaatatgaagtttggattcccaatggcattcacaaccacaatgctctcatggagtttaattgagtttggtggtctcatgaaatctgagttaccaaacgcaaaagacgctattcgttgggctactgactttctcctcaaagccacttcacatcctgataccatttatgttcaggttggtgatcctaacatggaccatgcttgttgggagagaccagaagacatggacacaccaagaagtgtgtttaaagtcgacaagaacaatcctggttctgatatcgccggtgaaatcgccgccgctcttgccgctgcttcaattgttttcagaaaatgtgatccttcttactccaatcacctcctccaacgagccattacggtttttacatttgcggacaaatacagaggaccctacagtgcaggtctggccccagaagtttgtccattctactgttcttactctggatatcaggatgaattgttatggggagctgcttggttacaaaaagcaacaaataacccaacatatctcaattacatcaaagctaatggacaaatccttggagctgatgagtttgataacatgtttagttgggataataagcacgttggtgctagaatccttctctccaaggagtttctgattcagaaagtgaagtcacttgaagaatacaaagagcatgctgatagtttcatttgctctgttatacctggagcatcctcttcccaatatacaccaggtgggctattgttcaagatgggtgagagcaacatgcaatacgtgacgtctacatcgttcttgctcttgacctacgccaaatacttaacctctgctcgcaccgtcgcttattgcggtggctccgtcgtcacccctgcccgcctccgctccatcgcaaagaaacaggtggattatctacttggaggcaacccgttgaagatgtcatacatggttggttatggtctgaaatatccacgtcggattcaccaccgtggctcatctctcccctccgttgcagtccacccgaccaggatccagtgccacgacggcttctccttgtttacctctcaatctcctaatcctaacgacctagtcggtgcagtagtcggtggtccggaccagaacgatcaattccctgacgaacggtccgactacggacggtcagagccagcaacttacattaacgctccacttgttggagctttggcttatcttgctcgatcctaaggccaactttaactaagcttaaaccgcatttaattgttggtttacaatgttaattagtagtaatgattttataaatgaatggccaagattgtccgatccggctgaatgaatgttttagatgatgtggtatttgattttaattttctaaaaaaaaaaaaaaaaaagggcgaccgctctagaggatccaagcttacgtacgcgtgcgtgcgacgtcataactcttctatag

SEQ ID NO: 118574 - DNA, 801 bp, Arabidopsis thaliana
tcgtgtctctattttgcacactatctctcgaaatcgtcctacatttctttcttcacattcattactgagcttcgcattctgggtttctatctaaaaattttccagatttcgtgtgtgaagaatcatttcaagccatgtctccggctaaagttgatactaccaagaaggctgatcctaaggccaaggccttgaaggcggcaaaggctgtgaagtctggtcaagccttcaagaagaaggacaaaaagattaggaccaaggtcaccttccacaggccaaagactcttaccaagcctagaactggtaagtacccaaaaatcagcgctactccaaggaacaagttggatcactaccaaatccttaagtacccactcaccactgaatctgcgatgaagaagattgaagacaacaacactcttgttttcattgttgacattcgtgctgacaagaagaagattaaggatgctgttaagaagatgtatgacatccagaccaagaaagtgaacacactcatcaggcctgatggaaccaagaaggcttacgtgaggcttacaccagactatgatgctttggatgttgctaacaagatcggcatcatctaagtctatctatctctgcagttataaagactattgtggttttgtctcttgtagtctcagttttgcttttaagatatttattattactatcatctggtaattgtagtattttggagcaaaaacgttttacaatacattcatgttgcagtttattgttgaattcaagttctatgtttttgacttaaaaaagaaaaaaaaaaaaaaa

SEQ ID NO: 118575 - DNA, 2506 bp, Arabidopsis thaliana
cgtcagtcatcaaggctaattcgtcgcgagttgctacgacgccgtttcggttgcttctggtttctttatgtctatcaaccttcgctcctccggttgttcgtctccgatctcagctactttggaacgaggattggactcagaagtacagacaagagctaacaatgtgagctttgagcaaacaaaggagaagattaggaagatgttggagaaagtggagctttctgtttcggcctacgatactagttgggtagcaatggttccatcaccgagctcccaaaatgctccacttttcccacagtgtgtgaaatggttattggataatcaacatgaagatggatcttggggacttgataaccatgaccatcaatctcttaagaaggatgtgttatcatctacactggctagtatcctcgcgttaaagaagtggggaattggtgaaagacaaataaacaagggtctccagtttattgagctgaattctgcattagtcactgatgaaaccatacagaaaccaacagggtttgatattatatttcctgggatgattaaatatgctagagatttgaatctgacgattccattgggctcagaagtggtggatgacatgatacgaaaaagagatctggatcttaaatgtgatagtgaaaagttttcaaagggaagagaagcatatctggcctatgttttagaggggacaagaaacctaaaagattgggatttgatagtcaaatatcaaaggaaaaatgggtcactgtttgattctccagccacaacagcagctgcttttactcagtttgggaatgatggttgtctccgttatctctgttctctccttcagaaattcgaggctgcagttccttcagtttatccatttgatcaatatgcacgccttagtataattgtcactcttgaaagcttaggaattgatagagatttcaaaaccgaaatcaaaagcatattggatgaaacctatagatattggcttcgtggggatgaagaaatatgtttggacttggccacttgtgctttggctttccgattattgcttgctcatggctatgatgtgtcttacgatccgctaaaaccatttgcagaagaatctggtttctctgatactttggaaggatatgttaagaatacgttttctgtgttagaattatttaaggctgctcaaagttatccacatgaatcagctttgaagaagcagtgttgttggactaaacaatatctggagatggaattgtccagctgggttaagacctctgttcgagataaatacctcaagaaagaggtcgaggatgctcttgcttttccctcctatgcaagcctagaaagatcagatcacaggagaaaaatactcaatggttctgctgtggaaaacaccagagttacaaaaacctcatatcgtttgcacaatatttgcacctctgatatcctgaagttagctgtggatgacttcaatttctgccagtccatacaccgtgaagaaatggaacgtcttgataggtggattgtggagaatagattgcaggaactgaaatttgccagacagaagctggcttactgttatttctctggggctgcaactttattttctccagaactatctgatgctcgtatatcgtgggccaaaggtggagtacttacaacggttgtagacgacttctttgatgttggagggtccaaagaagaactggaaaacctcatacacttggtcgaaaagtgggatttgaacggtgttcctgagtacagctcagaacatgttgagatcatattctcagttctaagggacaccattctcgaaacaggagacaaagcattcacctatcaaggacgcaatgtgacacaccacattgtgaaaatttggttggatctgctcaagtctatgttgagagaagccgagtggtccagtgacaagtcaacaccaagcttggaggattacatggaaaatgcgtacatatcatttgcattaggaccaattgtcctcccagctacctatctgatcggacctccacttccagagaagacagtcgatagccaccaatataatcagctctacaagctcgtgagcactatgggtcgtcttctaaatgacatacaaggttttaagagagaaagcgcggaagggaagctgaatgcggtttcattgcacatgaaacacgagagagacaatcgcagcaaagaagtgatcatagaatcgatgaaaggtttagcagagagaaagagggaagaattgcataagctagttttggaggagaaaggaagtgtggttccaagggaatgcaaagaagcgttcttgaaaatgagcaaagtgttgaacttattttacaggaaggacgatggattcacatcaaatgatctgatgagtcttgttaaatcagtgatctacgagcctgttagcttacagaaagaatctttaacttgatccaagttgatctggcaggtaaactcagtaaatgaaaataagactttggtcttcttctttgttgcttcagaacaagaagag

SEQ ID NO: 118576 - DNA, 2137 bp, Arabidopsis thaliana
gaagatctgaaagtgaacgcgaaatcacttcgccagcgttattgttaacaagaatcatcagattagtcgccgtagatctgaatcaacgtcgtaacagtagcagaattttgcggtgaaacgatggttttggttacgtctgtgcgtgattacattaaccggatgcttcaggacatctccggcatgaaggttctcatactcgactccgaaacggttagcaatgtaagcattgtgtattcacagtcagagctgcttcagaaagaagtgtttctggtggagatgatagattcaatatctgtgtcaaaagaatcgatgtcacatctgaaagctgtttatttcatccgtccaacttcagataatattcagaaattacgataccagcttgcgaatcctagatttggagaataccatttatttttctccaatctgttgaaggatactcagattcatattttggctgattccgatgagcaggaagttgtacagcaagttcaggagtattatgcagactttgtttctggtgatccatatcatttcacattgaatatggcatcaaatcatctatatatgatccccgcagttgtcgatccctctggtttgcaacgcttttccgatcgggttgttgatggaattgcggcagtgtttctggcgttgaaacgaagacctgtcatcagatatcagaggacctctgatactgcaaaaaggattgcacacgaaacagctaaattgatgtatcagcatgaaagcgctctttttgactttagacggactgaaagctctccgttgctacttgtaattgacagaagagatgacccggttaccccattgctgaatcagtggacatatcaggcaatggtgcacgaactcataggacttcaagataataaagtggacttgaaatccattggaagtcttccaaaagatcagcaagtggaggtggttttatcatcagaacaagatgcatttttcaaatctaacatgtatgaaaattttggggatattggaatgaacatcaagcgaatggtagatgactttcagcaggtggccaagagtaaccaaaatatccagacagtagaggatatggccagatttgttgacaactaccctgagtacaaaaagatgcaaggcaacgtttcaaagcatgtaactctggttactgaaatgagcaagctagttgaagcaaggaaactgatgacggtttcacaaatagagcaggacttggcttgcaatggtggccaaggagctgcatatgaggcagttacggatctcttaaataatgaaagtgtgtctgacatcgaccggctgcgtttggtaatgctatatgctttgcgctatgagaaagaaaatcctgttcagttgatgcaattgttcaacaaattggcttcacggtctcccaagtacaaaccagggctagttcaatttctcttgaaacaagccggtgtggagaagcgcactggtgatctatttggaaacagagatcttttgaatatagcacgtaacatggctcgtggacttaagggtgttgagaatgtctacactcaacatcagcctcttctgtttcaaacaatggagagcataactagagggagattacgagatgtggattacccatttgttggagatcattttcaacagggacggccacaagaggtggttatttttatggttggtggaacaacatacgaggaatcacgctctgttgctctacagaatgccaccaactccggggttcggtttattctcggcggcaccgcagtgcttaattccaagagatttctaaaggacttggaagaagcacaaaggatatcaagatcaggtagccatatggtgtgaagaagatccaaaagaattttgtgtaaattattttttaagtcttaagattcttccggggagcacatagaagaaagagacaaatgaaagaagaagattgtggtcaggttcgtcgaatctttcgtatacatgatgatgattaccccaccagagatttaatttttggggtttgtgtgtgtattcatcgtggtacagtttaattggaccgttcttcttacacaattatggctaatcaagaaaatgtaacctgaggaaattttactcctctatcataattgcacaaaacagaattaataaaaaaaaaaaaaaa

SEQ ID NO: 118577 - DNA, 2293 bp, Arabidopsis thaliana
  unsure (1)..(2293): unsure at all n locations
nnnnnnnnnnnnnnnnnnnnnnnnnnnnnnnnnnnnnnnnnnnnnnnnnnnnnnnnnnnnnnnnnccacgcgtccgctcttccatttttcccctttcgaatttttgcatttcatcatccttttcgtgtgcttcacaacttcatctctctctcgagagaatttgcgtcatcaattcaaatcctttacgcaaagtttcagtttttattcactttcttacataacccatcaaaccaaatcctcgatcggattatgttaatcaattgctaagagctttttcttctacttcttcgcaatccgccatggccgcagctttaaggtcgaatacgtcaagagaaaccgcttctcttacactttctcattttagatactttatcttcaaccgtatccacaccgctcgaaccgccacaagtcctcctcactgtaatcaccgttctaaatccgatgagaaattcccctataaaatttcctctcttggaacgagtttcttggataatcgaggaggaggagagagacgtaattcgactaagtgttatgctgctcagaagaagctcagcggtgttggttcttctgttgttattctgagctcacaaggagacccaccggatctatggcagcctcctggtgatggagtttccgttagggttaatgggtccagtgttaatctcggtcgtggtggtggtggtggtggaagtaatcctggtggtcctggtaacggaacagggtcgaattcgaaagaagattgttggggtggatccaatcttgggtctgattttccgacaccaaaggagatatgtaagggtttgaacaagttcgtgattggtcaggaaagagccaaaaaggtactttcagtggcagtttacaatcactacaagaggatatatcacgaatcatcacagaaacggtctgcgggagaaacagatagcactgcagcgaaaccagcagatgatgatatggtagaactagagaagagtaacattctcctgatgggaccaactgggtcagggaagacactacttgcgaaaaccttggcacgatttgtaaatgttccttttgtcattgcggatgcaaccaccctgactcaggctggttatgtgggagaggacgtcgagtctatattatacaaacttctcacagttgcagattataatgttgcagctgcacagcaagggattgtttacattgatgaagtcgacaagataacaaagaaggcagaaagccttaacatcagcagagatgtatcaggagaaggtgttcaacaagcattgctaaaaatgctggaaggaacaattgtaaatgtacctgagaaaggcgctaggaaacaccctagaggtgacaatatccagatagacacaaaggacatactcttcatatgtggtggtgcttttgtagacattgaaaagactatctcagagaggcgccatgattcttccatagggtttggtgctcctgtacgtgccaacatgagggctggtggtgttacaaccgccgctgttgcctcaaacctaatggaaactgtggaaaccagtgacctgattgcttatggtttgattcctgaatttgttggacgatttccagttctcgtcagtttgtctgctttgactgagaaccagcttatgcaggtgttgacagaacccaagaacgctcttggaaagcaatacaaaaagatgtaccagatgaatagtgtaaagctgcatttcacagaaagcgcactgcggcttatagctagaaaagcaataacgaaaaacacgggtgctcgtggcttaagagctcttctagaaagcatcctcatggactctatgtacgagattccggacgagggtacaggcagcgatatgatagaagcggttgtggtggatgaagaagcagttgaaggagaagggcgtcgaggctctggagctaagattctccgtggtaaaggagcattggctcggtatctctctgaaaccaattccaaagattccccacagacgacaaaggagggatcggatggagaaactgaagtggaggcagagattccatctgttgtagcaagtatgtaatgatcaccaccaccatcatcatcatcatcatcagaaaatgtggtgaatgtatctttgtatgcgtaatatttaccgttctttgtacataaatgaaggaaagaaaaacaaagttggataagaaaacacaaggatgcacaacttgcacattgataaatgatgatgtaacaaactttttatcgtatacaatgtaaaagggcggccgctctagaggatccaagcttacgtacgcgtgcatgggacgtcatagctaatct

SEQ ID NO: 118578 - DNA, 2304 bp, Arabidopsis thaliana
  unsure (1)..(2304): unsure at all n locations
aaatttgattccatcgtcccactttcttcttcttcctcccaatccgcctcttcttcctacgcgtgtcttcttctccctcactctctcaatctctagtcttctccgattcaccggatctttcctttcttacttctttcttctcactctggtggttatgtgtggatctgcgacctcgatttcaattcgaagtcgtcggtttcttctctaaatcgaatctttccaggattcgtttgtttttttcttttgtttttttttcgatccgatggaggatcctgatatcaagaggtgtaaattgagctgcgtcgcgacggttgatgatgtcatcgagcaagtcatgacctatataactgacccgaaagatcgcgattcggcttctttggtgtgtcggagatggttcaagattgattccgagacgagagagcatgtgactatggcgctttgctacactgcgacgcctgatcgtcttagccgtcgattcccgaacttgaggtcgctcaagcttaaaggcaagcctagagcagctatgtttaatctgatccctgagaactggggaggttatgttactccttgggttactgagatttctaacaaccttaggcagctcaaatcggtgcacttccgacggatgattgtcagtgacttagatctagatcgtttagctaaagctagagcagatgatcttgagactttgaagctagacaagtgttctggttttactactgatggacttttgagcatcgttacacactgcaggaaaataaaaactttgttaatggaagagagttcttttagtgaaaaggatggtaagtggcttcatgagcttgctcagcacaacacatctcttgaggttttaaacttctacatgacggagtttgccaaaatcagtcccaaagacttggaaaccatagctagaaattgccgctctctggtatctgtgaaggtcggtgactttgagattttggaactagttgggttctttaaggctgcagctaatcttgaagaattttgtggtggctccttgaatgaggatattggaatgcctgagaagtacatgaatctggtttttccccgaaaactatgtcggcttggtctctcttacatgggacctaatgaaatgccaatactatttccattcgcggcccaaatccgaaagctggatttgctttatgcattgctagaaactgaagaccattgtacgcttatccaaaagtgtcctaatttggaagttctcgagacaaggaatgtaatcggagataggggtctagaggtccttgcacagtactgtaagcagttgaagcggctgaggattgaacgcggtgcagatgaacaaggaatggaggacgaagaaggcttagtctcacaaagaggattaatcgctttggctcagggctgccaggagctagaatacatggcggtgtatgtctcagatataactaacgaatctcttgaaagcataggcacatatctgaaaaacctctgtgacttccgccttgtcttactcgaccgggaagaaaggattacagatctgccactggacaacggagtccgatctcttttgattggatgcaagaaactcagacgatttgcattctatctgagacaaggcggcttaaccgacttgggcttaagctacatcggacagtacagtccaaacgtgagatggatgctgctgggttacgtaggtgaatcagatgaaggtttaatggaattctcaagaggctgtccaaatctacagaagctagagatgagaggttgttgcttcagtgagcgagcaatcgctgcagcggttacaaaattgccttcactgagatacttgtgggtacaaggttacagagcatcgatgacgggacaagatctaatgcagatggctagaccgtactggaacatcgagctgattccatcaagaagagtcccggaagtgaatcaacaaggagagataagagagatggagcatccggctcatatattggcttactactctctggctggccagagaacagattgtccaacaactgttagagtcctgaaggagccaatatgatatgacccaaaaaacaggtttgtatataaagatttttagtctcgagttttggggtttccacaaactgtgtactatactactttggttctttttttgtttcatgttgtgtcgtcgatgtttttgggagattacatagagtcagtcttgtttgttgtatggtcattacttctttatttttcctcaggggtctgtttactttaatttctttaataaaaccccgaagattttgagagaaaaaaaaaaaaaaaaaactattanntnaa

SEQ ID NO: 118579 - DNA, 2504 bp, Arabidopsis thaliana
  unsure (1)..(2504): unsure at all n locations
tcgaaataaacgaaaatgaaaataggatctccttcttccccgattctcagcgttgtctccagctcaggctcattggatccgaaaattagtggatcacttggatctcgaatccttccggctactcaaagatcatccccatcggagaatcttctcctccataggaaaatgtcgtctaattccctgaggcatgtcgagtccatgtcccagctaccctcaggtgccggaaagatctctcaattaaacgccgtcgtgttaggagaatcccttgcatcggaggagaatgatctcgtctttcccagcaaggaattctccggccaggctcttgtttcctcccctcaacagtacatggaaatgcataagaggtcgatggatgaccctgctgctttttggtctgatattgcgtctgagttttactggaagcagaaatggggtgaccaagtgttttccgagaatctcgatgtcaggaagggtcctattagcatcgagtggtttaaagggggaatcaccaatatttgctacaactgtttggacaaaaacgttgaanctggtttgggcgataagacagccatacactgggaaggaaatgaacttggggtagatgcttccttaacttattctgagttgctccaacgagtttgccagcttgctaattacttgaaagataatggagtgaagaagggtgatgctgttgtaatttatttacctatgttgatggaacttcccatcgctatgcttgcatgtgcaaggatcggagctgttcattcggtcgtatttgctggattttctgcggactctcttgcccaaagaatcgttgattgcaagccaaatgtaatactgacttgcaatgctgttaaaagaggccctaagaccataaaccttaaagctattgttgatgctgcacttgaccaatcttctaaagatggagtctctgtaggcatatgcttgacctatgacaactcattagcgacaacaagggaaaacactaaatggcagaatggaagagatgtgtggtggcaggatgttatttctcaatatccaacatcgtgtgaggtggaatgggttgatgcagaagatcccctgtttttgctctacaccagtggaagtactgggaagccaaagggtgtcctacacacaactggagggtatatgatctacactgctacaacgttcaaatatgcatttgactacaaatcaacagatgtatactggtgtacagcagattgtggttggataactggccatagctatgttacttatggaccaatgcttaatggagccactgttgttgtccttgagggggctccaaactaccctgaccctggacgctgtcgggatattgttgacaaatacaaggtttcaatattttatactgccccaacattggtgaggtctctcatgcgcgatgacgataagtttgtaacacgtcactcgcgcaaatcgctgcgggtccttggaagtgttggtgagcccatcaatcctagtgcctggagatggttcttcaatgtagtcggtgattcaaggtgtcccatttcagatacgtggtggcaaactgaaactggtggcttcatgataaccccattgccaggtgcttggccccagaaacctggttcagccactttccctttctttggtgttcagcctgtcatagttgatgaaaagggcaatgaaatcgaaggcgagtgtagtggttatctttgtgtcaaaggttcatggcccggggcgtttcgaactctgtttggggatcatgaaagatacgaaaccacatactttaaaccttttgccggatattatttcagtggtgatggttgcagcagagacaaggatggttactactggcttacagggagggttgatgatgttatcaacgtcagtggccatcgaatcggaactgctgaagtagaatctgctctggttttacaccctcaatgtgcagaagcagctgttgtaggcatagaacatgaggtaaaaggtcagggaatttatgcgtttgtcactcttctggaaggtgttccttacagcgaggagcttcgtaaaagcctagtactaatggtccgaaatcagattggggcttttgcagcaccggacagaatacattgggcaccagggttgccaaagacgagaagcggaaagataatgaggagaatcttgagaaagattgcttcgaggcaattagaagaactcggagatactagcacactcgcggatcctagtgtagttgatcagcttattgcacttgccgatgtgtgatgactaaccatagcatatgagccaatggagagtaatggagttttgtgcatctatatatgttttcaggtgtcttatagagggaatggtacaaaaatctgaaacaagattcaggtgttttggagggaataaagtaagcagactatattgttgtgtttttgaataaagaaatttcagtctcatgaatttggttttggataagatggtcataggattatcaaattaattaaaagttacaaaaatataaaaaaaaaaaaaaa

SEQ ID NO: 118580 - DNA, 1204 bp, Arabidopsis thaliana
  unsure (1)..(1204): unsure at all n locations
ggaacacggaaatattggcgcccagataatcttcttctgtgaagcattttaagtcgccgactccaatcaacagagcccagttattccattttatcgaattaattagggttcagagagatgggtaggaaaaagaaatctagggcttcgacaaccgaagaagatgagattgagatggataatgctggcccatcctctgagacaagtctttacgaggttcttggagttgaaagaagagccacttcacaggaaataagaaaagcgtaccataagttggcattgaagcttcaccctgataaaaatcaggatgataaggaagctaaagacaagttccagcagctgcaaaaagttatatcaattcttggtgatgaagagaaaagggcagtctatgatcaaactggctcaattgatgatgctgatattcctggagatgcgtttgagaatttgcgggatttcttccgggacatgtataagaaggtcaccgaagctgatattgaagagtttgaggcaacctacaggggatctgagtcagagaagaaagacttgcttgagcttttcaacaagtttaagggtaaaatgaacaggctattctgctcaatgctttgctcggaccccaagcttgattcacaccgtttcaaagacatgcttgatgaggccattgcagcaggagaagtgaagtcaagcaaggcatatgagaaatgggcaaataaaatttcagaaacgaaaccgcccaccagtccattgaggaagaggaagaagaagaagtcagcacccaaggattcagagacagatctttgcttgatgattgcgaaacgacaagaggagaggaaagggaaggtggactcgatgttttcatcacttatctctaggtatggtggtgatgcggaagcagagcccactgaagaagaatttgaagcttcccagagaaggattgaaacccaaagaaaaccatccaagaagtctagaggaaagtagaggtcttaaagcagagttgtcttctagtagtatttgtgatggaacaagaatgtttattttctttccaaatttcatcaatttccaaaatcagtaaatatttcgattattgctttataaattgaggaattatcttctccaaaaaaaaaaaaaaaaaaaaaaagnnnnnnnnnnnnnnnnnnnnnnnnnnnnnnnnnnnnnnnnnnnnnnnnnnnnnnnnnnnnnnnnnnnaacg

SEQ ID NO: 118581 - DNA, 3106 bp, Arabidopsis thaliana
gattccatgaaatggctttgtctataattcctctggtttgtcctggatttatcttcttgtagcctctttgctcaatagagctctttttgtctcttcttgtattaaataaaataaaatgaagacttagtaaagaaaaagaaaaactcttgagtcttgctaaagcctagttagtgttgagtgtgggagagacaaaacagaacattgaaaaactctctgtatgatggcttcattgtcttgtgttgaagacaagatgaaaaccagttgtttggttaatggtggaggaactataacaacaacaacatctcaatctaccttgcttgaagagatgaagctgttgaaagaccagtcaggtacaagaaagccggtaataaactcggagctatggcacgcttgtgcaggccctttggtgtgtctccctcaagttgggagcttagtgtattacttctcacaaggtcatagcgagcaggttgctgtttcaaccagaagatcagcaacaacacaagttcctaattatccgaaccttccatctcagttgatgtgtcaagtccataatgttactcttcatgctgacaaagacagtgacgaaatctatgctcagatgagtcttcaacctgttcactctgagagagatgtgttccctgtaccagactttggaatgctgagaggaagtaagcacccgactgagtttttctgcaaaacacttactgcaagtgacacaagcacacatggaggtttctcagtgccacgtagagctgcagagaagctatttccaccattggattactcagcacagccgccaacgcaagagcttgtagttcgagatcttcatgagaatacttggacatttcgccatatctaccgagggcaaccaaagagacatctcctaactacaggatggagtttgttcgttggatcgaagagattgagagctggggattctgttttgttcatcagggatgagaagtcacaacttatggtcggtgttaggcgtgccaatcgccaacaaacagcacttccttcatcagttctctcagcggatagtatgcacatcggtgttcttgctgctgctgctcacgcaaccgccaaccgtactccttttttgatattctataatccaagagcttgtccagcagagttcgtgatccctctagctaagtaccgtaaggcgatatgcgggtctcagctctcagttggtatgagatttggaatgatgtttgaaactgaagattccgggaaacgaaggtacatgggaactattgttggaatcagcgatttggatccgttgagatggcctggttctaagtggcgtaaccttcaggtagaatgggatgagcctggatgtaatgataaacctactcgggtcagtccatgggatatcgaaacacctgaaagtctcttcatttttccttctctgacctcaggactcaaacgtcagctccatccatcttactttgctggtgaaactgaatggggtagcttgataaaacggccacttatacgtgttcctgattccgcgaatgggattatgccatatgcatctttccctagtatggcttcggagcagcttatgaaaatgatgatgaggcctcacaacaaccaaaatgtaccatctttcatgtctgagatgcagcagaatattgtaatggggaatggaggtttgctaggagatatgaagatgcagcaacccctgatgatgaaccagaaatctgagatggtgcagccacaaaacaagctaacagtgaacccatctgcttctaatacgagtggccaagaacagaatctttcacagagtatgagtgctcctgctaaacctgagaactctacactctctggttgcagctctggtagagtccaacatggacttgagcagtcaatggaacaggcaagccaggttactacatccacagtgtgtaatgaggaaaaggttaatcagctacttcagaaaccgggtgcttcgtcgcctgtacaagctgatcaatgtcttgacattactcatcagatttaccaaccacagtctgatccaataaatggattctctttcctggaaactgatgagctgacatcacaagtctcttccttccagtctcttgccggatcatacaagcaaccattcattctatcctcccaggattcttcagctgttgtgttaccggattccacaaactcaccgctgtttcatgatgtgtgggacactcagttgaacggtctcaagtttgaccagttcagtcccttgatgcagcaggacctttatgctagtcagaatatctgtatgagtaatagcacaaccagtaacattctagatcctccactctcaaacacagtccttgatgacttctgtgccatcaaagacactgatttccagaaccacccttctggttgtttggttggaaacaacaacactagctttgctcaagatgtccagtcgcagatcacatcagctagctttgcagactcacaggccttctctcgccaagattttccagataattctggaggcactggtacatcttcaagcaatgttgattttgatgattgtagtctgcggcaaaatagtaaaggctcatcatggcagaaaattgcgacaccccgcgtccgaacctacattaaggttcaaaaaaccgggtcagtcgggagatcaattgatgtcacaagctttaaagactacgaggagctaaaatctgctatcgaatgcatgtttggattggaaggactactaactcacccacaaagctcgggttggaagcttgtatatgttgattatgagagtgatgttctgcttgtaggagatgatccatgggaagagtttgtgggatgcgtaaggtgcataaggatattgtcgccaactgaggtccagcagatgagtgaagaagggatgaagcttttgaacagcgcaggcattaacgatcttaagacttctgtttcataaatgtaacaatataaaaatgatctcatgctgatttgtaagaagaaaaagagagtaagaaatgttcttttctccaactggtagaggagaaaccatcttgttgtaagcatttgatgtgttgttccgatttgagacctgaaactatattcatattatgtagtagagtgatgaatgaatgaatca

SEQ ID NO: 118582 - DNA, 1807 bp, Arabidopsis thaliana
gaaagaaatggcagcagatcggagcttcaactcatcgtctttccatttggattccggtgcagctgctccagcgatataaaccttccctctgttcacagaggctactagagctatgcgttcttcatctctaccaaactcgtagaagtagtaatttcttaaaccttcttcttcctttaccttgattgtacgagcagagtaaattgttgccgcacctggaacaaaaagtcttgcagctgccttcaatgatcccaaatcagatatatctttagcctctaagaaagtgatcttaagttggtacagcaggatcaacttattacatagaaataatggctcagggacaccaaggcttatgctttgggtttatcttcttactatgcttcttcagctctacttttgcactcaggattcttaaggacctccctatgatggagccaagaaagctagatctgaaccatgaaatgatgcctgggatggttatgctacagccagatcatgaggtccaacctgagcacacggtcaagcctggccatacactccagtccatgtccggtgtatcagaacatccagagcacacggttaagcctggccatacactccagtccatgtccggtgcattagaacatcctgagcacaaggaaaagcctgaccataaactccagtctatgttgggagaacatcctgagcacaaggaaaagcctgaccataaactccagtctatgttgggagaacatcctgagcacaaggaaaagcctgaccataaactccagtctatgttgggagaacatcctgagcacaaggaaaagcctgaccataaactccagtccatgtctggtgaatcaaaacatcctgagcacaaagtcaagcctgatcagataatgcagaccatggcgagtgaactggaagaggaagatcctgaccacacaagtaagcctatggggtatggtgtaggtaggggctatggaagtggtgggtctggtgttggctatggcgttggaattggctctagtggaggcagtggctttggagaaggtattggctctagtggaggcaacggctttggagaaggaattggctctagtggaggcagcggctttggagaaggaattggctctagtggaggcagcggctttggtgaaggaattggttctggtggtggtacaggtattggcattggagaaggaataggatccgggtctgcccaacccaattgcggccctgtcacgggagctccaggtagcggattcggtgaaggcataggacaaggtagtggtccaggggaagggattggtatcggtataggacagggtggacctagtgtagtagtcccaggcacaagaatccctccgatagtggttccaggcgcacagattccctccgatagtggttccaggcgcacagattcccggttttgtgattccaggtatcacagttcctggctacggtactggatgccaaacaggtggctgcaatccgaacccaccacactactatatcccaccaagctgtccccattgtccacctttcacatcaggacaagacaaacacatgtcagacaaaggagccatgaccgaagctcttgcacccacttcaccggagatacatgtttaagctttaagagtccatgaaacaccagtctaataaatcactcataatgaaatctattttggtttataaaagcttcacagaaagttgaataatacaactttcttgctcaagtaaaaagatatataagggaaatgcatataagaataagtgagaagtactcagagacagaaaaagattgattaagaaaaaaaaaaaaaaaaaa

SEQ ID NO: 118583 - DNA, 493 bp, Arabidopsis thaliana
  unsure (1)..(493): unsure at all n locations
ggttttccnacccaattgcggccttttcacggggncccaggtnccggttcggtnanggcttttggnccaggttattggtccaggggaagggatttggttacggttttgggacggggtggccctagtgtagtagtcccaggcacaagattccctccgttagtggtttccaggcgcacagattcccggttttgtgattccaggtatcacagttcctggctacggtactggatgccaaacaggtggctgcaatccgaacccaccacactactatatcccaccaagctgtccccattgtccacctttcacatcaggacaagacaaacacatgtcagacaaaggagccatgaccgaagctcttgcacccacttcaccggagatacatgtttaagctttaagagtccatgaaacaccagtctaataaatcactcataatgaaatctattttggtttataaaagcttcacagaaagttgaataatacaactttcttgctc

SEQ ID NO: 118584 - DNA, 2013 bp, Arabidopsis thaliana
  unsure (1)..(2013): unsure at all n locations
gattttctcaatcaccttcactatactgcttcgatggactctcactcttcccacctcaacgccgccaatcgttcccgcagttctcagactccttctccttctcattccgcctccgcctccgtcacttcttctctccacaaacgcaaactcgccgtccaccacggcagcgaatgcagccgcttctgaagatcacgcccctccttcttcctctttccctccttcctccttctctgccagtactcgcgacggcgctttaacctccaacgatgaactcgagagcatctccgctcgcggcgccgatacagattcagatcctgatgaatcagaggatatagtcgtggatgatgacgaggacgaatttgctcctgaacaggaccaggactcttctatccgcacattcaccgccgctcgactcgattccagctctggagtcaacggttcgagtcgcaacactaaacttaagacggaaagctccacggtgaagcttgagagctctgatggtggaaaagatggtggatccatctgtggttgggactggtgtgagtggcactgttggaggaagctcaatctcagggctcgtgccaaaggatgagtctgttaaggtattggctgagaatttccagactagcggagcttacattgccagagaagaggctttgaaaagagaggagcaagcaggacgactcaaatttgtttgttactcaaatgattccattgatgagcgtatgatgtgcttgattgggttgaagaacatttttgcaggacagttgccgaagatgccgaaggagtacattgttcgtcttctgatggataggaaacataagtctgttatggtactaagagggaatctagttgtaggtggtatcacgtatcgtccatatcacagtcagaagtttggggaaatagcattttgtgcaatcacagcagatgaacaagtaaaaggttacggtaccagattgatgaaccacttgaaacaacatgcacgtgatgttgatggattgacgcattttcttacttatgctgacaacaatgctgttggttacttcgtcaagcagggttttactaaagagatttacttggagaaagatgtatggcatgggttcattaaagactacgacggcgctctccctatggaatgcaaaattgatccaaagctgccatatacggatttgtcaagcatgatacgccagcaaagaaaggcaattgatgaaaggataagagagttatcaaactgtcagaatgtgtatccaaaaattgagtttctaaagaatgaagctggaattcctagaaagattatcaaagttgaggaaatacgtggcttaagggaagctggttggaccccagatcagtgggggcacactcgtttcaaattattcaatggttctgctgatatggtgacaaatcaaaaacagttgaatgcactcatgcgtgcgcttttaaagacaatgcaagaccgtgctgatgcttggcctttcaaagaaccagtggattctcgcgatgtccctgattactatgacatcattaaggatcccattgatctgaaggtaattgcaaagagggtagagtcggaacagtattacgtgacattggatatgtttgttgcggatgcgagacggatgtttaacaattgtagaacttacaactcccccgataccatttattacaaatgtgcaaccggttggaaacacacttccatagcaaagtacaagcaggtctccaatctggtgctaaatctcaatagaagaagatggtagaggttatattaatatcattttctagatctttcattttaagatactttcattggaactgggaatacatgtatactattttaggcccatgtatactggagcttaattgtttgtatgtttttttttcggataggtaaatatttgatttagttagattcagaatgtttaagtttttactttgtaggtttnnnnnnnnnnnnnnnnnnnnnnnnnnnnnnnnnnnnnnnnnnnnnnnnnnnnnnnnnnnnnnnnnnnnnnnnnn

SEQ ID NO: 118585 - DNA, 853 bp, Arabidopsis thaliana
atccgagtaagaaggaaacatgagaactacatgtgttcattaaactaagccatgcataataaactccaccttagaaacgaattgattgctatatatataatatatagatatagatttctgttcgtacacgaatcatatatatcaccttcgctagctagtgtactgagttcaatgaagatacatgccatattggtagtagcgttcttggtcctgatgaagaccgccgtttcccaggacaataatccgctggaacattgcagagacgtgttcgtgagtttcatgccctgcatgggcttcgtcgagggaatatttcaacaaccttctccagattgctgcagaggcgtgacccacttgaacaacgtcgtcaagtttacgtctccaggatcgaggaataggcaggatagtggagaaacagagagagtgtgtctgtgcattgagataatgggaaatgcaaatcatcttccttttcttcccgccgctattaataaccttcctctccgttgttctcttactctcagctttcccatctccgttgatatggactgttctcagttcagaaacaccaagaatcccgacgttgagaaattaaattaactaccaggatatatatctatgaatattgggaagggaagccttgtaacagttctatatagttacaaatgatatataatcgagtttattgtagatgtaatagtgactagtgttacaaaagtacgaagaattttctgtaagcgattatatatatgtatattcatcagataaaaaaaaaaaaaaagggcgcccgctctagaggatccaagcttacgtacgcgtgcatgcggcgtcatagctctactatagtgcagctaaatca

SEQ ID NO: 118586 - DNA, 1958 bp, Arabidopsis thaliana
  unsure (1)..(1958): unsure at all n locations
cccacgtttacacttcttcaagttttccatatactaatggggaggtttcataaatttcctctcctaggtttagttctgttcctcggtctgaccggctcacttatcgccgccaatgagtatgcctgttctagtaccgatatacactttactcgtgccaatttccctaaaggtttcatttttggtaccgcaactgctgcttttcaggttgaaggagctgtaaatgaaggatgtagaggtccaagcatgtgggacgtatacaccaagaaattcccacataaatgtaattatcacaatgccgacgttgctgtcgatttctaccatcgttacaaggaagatatcaagttgatgaaaaatctgaacactgatggctttagattttccattgcatggcccagaatattcccccatggtaggatggagaaaggaataagcaaagcaggtgtgcagtattaccacgatttgatcgatgagctcctcgcaaatggtataacaccattagtaactgtttttcactgggacactcctcaagacttagaagatgaatatggtggctttttaagcgaccgcataataaaggattttacggagtatgcaaacttcacattccaagagtacggagacaaagtgaagcattggatcacatttaacgaaccatgggtgttcagtcgagctggctacgacattgggaacaaagcaccgggacgttgttctaagtacatcaaagaacatggagagatgtgtcacgatggtcggtcaggacacgaagcttatatcgttagtcataacatgctcttggcacatgccgatgccgttgatgcctttaggaaatgcgacaagtgcaaagggggtaaaattgggattgctcacagtccagcttggtttgaggctcatgagctctcggatgaagagcacgaaactcctgtaactggcctgattgacttcatattgggatggcatttgcatccgaccacatatggagattatccacaatcaatgaaggatcacatcggacatcgactgccgaaattcacagaggcacagaaagagaagttgaaaaattcagctgattttgtaggaatcaactattacacatcagtgtttgcattgcacgacgaagagacagatccttcgcagccaagttggcagagtgattctctcgtggactgggaaccaaggtatgtggataaattcaatgcttttgctaacaagcctgatgttgctaaagtggaagtctacgcaaagggtttgaggagcctcttgaaatatatcaaggacaaatacggcaatcctgaaatcatgatcaccgagaatggatacggagaggatctaggtgagcaagacacaagccttgtagtggcgctgtcagatcagcacagaacatactatatccagaaacatctcttgagcttgcacgaagcaatttgcgatgataaagtaaacgttacagggtattttcattggtcattgatggacaattttgaatggcaagatggatacaaggcgagatttgggctctactacgtcgattacaaaaataatttgacgcgccacgaaaaattatcagcccagtggtactcgagtttcctccacgatggatcaaaagagttcgaaatcgagcacgagttcgaacacgatgagttgtagagtgaattctctacaaacagactttgaaaatttgagtcatatatatattatatattcataaactatttgtttacagtttgctgcagtgaatgcatttccatattcaagtaaataaatcagatactcaatatacagacaagtaaagtttggattgtgttgtagtaagtatttggatagttgaatattgagatcaagggtattcacgaagattccgtactagttattgatattttctattaaaaaaagnnnnnnnnnnnnnnnnnnnnnnnnnnnnnnnnnnnnnnnnnnnnnnnnnnnnnnnnnnnnnnnnnnnn

SEQ ID NO: 118587 - DNA, 1847 bp, Arabidopsis thaliana
ggctggtccgttctgcagtaccgcgtccggaatttccgggtcgacccacgcgtccgatttcttctcccttgtactgttttagaaacaaacacacggaccaaccgttcataacaatgatcgcgcgacggatctggcgaagccaccggtttctccgcccattcagctcgtcatctgtttgctctccgccgttccgggtaccggagtatctttctcagtcgtcttcctctccggcgtcgcgcccattctttgttcaccctcccactttgatgaaatggggtggaggaagtagaagctggttttcgaacgaagccatggccactgattcaaattcagggttaattgatgtgccactagctcaaactggggaaggtattgctgaatgtgagcttctcaagtggtttgtcaaagagggagattctgtggaagagtttcagccactctgtgaagttcagagcgataaagcaactatagagatcacaagtcgttttaaagggaaagtggctctgatttcacattctccaggtgacattattaaggttggagagactctggttaggttggcggttgaagactcgcaggattcgcttctaaccactgatagttcagaaattgtaactctgggaggttcaaagcagggaacagaaaatcttcttggagctctctcaacgcctgcggttcgtaaccttgcaaaagaccttggcatagatatcaatgttataactggaactggtaaagatggtagagttttgaaagaagatgttctccggtttagtgaccagaaaggatttgtaacagattcagtttcttctgagcatgctgttataggaggagactcggtttccactaaagctagtagtaactttgaagataaaacagttcctctaaggggattcagccgagcaatggtcaagacaatgactatggctacaagtgtaccgcattttcattttgttgaagagataaactgcgactcacttgtggagctcaagcagttcttcaaagagaacaatacagattccaccatcaaacacacttttcttcctactttaatcaagtctctgtcaatggctctaaccaaatatcccttcgtgaatagttgcttcaacgcggaatctctcgagatcattctcaaaggttcacataatattggagttgcaatggccactgaacatggccttgtcgttcctaatataaagaatgttcagtcattatctctgctagagataaccaaagagctgtcccggttacaacatttggcagcaaacaacaaacttaaccccgaggatgtgactggtggaaccataactctgagtaacattggagcaattggtggtaaattcggatcccctcttttaaacttaccggaagttgcaatcatcgctcttggaagaatcgagaaagttccaaaattctcaaaagaaggaactgtctatcctgcatcgataatgatggttaacattgctgcggatcatagagttctagatggggcaacggtagctcggttttgctgccagtggaaagagtatgtcgagaaaccggagctgctgatgcttcaaatgagataagaaggaaaggttcatgtttatttgtgaatcattatgtatgaaaccttcatgttcgaataagatcaagaactgagctagcagttgtaaactaaacaagaaagtaaaagtcatatctaataaaaaaaaaaaaaaactgccacatatggaccctagctaacctccttagtttttacccgggacggtttgttaataattgaaatggatttattgaaaaaaaaaaaaaaaaaagggcggccggtttaaaagattccaggctacggaagggggccaggcacgttcaaa

SEQ ID NO: 118588 - DNA, 704 bp, Arabidopsis thaliana
  unsure (1)..(704): unsure at all n locations
cagctctatgcgactcatatagggaaagctggtacgcctgcaggtaccggtcccgtccgcccgggctatttcttctcccttgtactgttttttgttttttaccaaagaccaaccgttcataacaatgatcgcgcgacggatctggcgaagccaccggtttctccgcccattcagctcgtcatctgtttgctctccgccgttccgggtaccggagtatctttctcagtcgtcttcctctccggcgtcgcgcccattctttgttcaccctcccactttgatgaaatggggtggaggaagtagaagctggttttcgaacgaagccatggccactgattcaaattcagggttaattgatgtgccactagctcaaactggggaaggtattgctgaatgggaagcttctcaagtggtttggtcaaagggggagattctgggggaagaggttcaagccactctgtgaaagttcagagccataaagccacctatagggaatcacaagtccgttttaaaaggggaaagtggctcttgattttaacattctccaggggacattattaagggttgggngccnctggtaaggtttgcggnttaaggctcnaggnttcggtntnaccccttgaaggttanaaatttnaccctggggggttaancaggnccanaaanttnttggggctttaacntggggttgacctttaaanncntga

SEQ ID NO: 118589 - DNA, 3029 bp, Arabidopsis thaliana
  unsure (1)..(3029): unsure at all n locations
cagtgatcactgtcgtggttgtccatgtcatttcccacgttttccttccatttctcaaaagtttccctctgttttctcccgaagctccctctccgctgtgcgttcttttgctcagtgaattgggttctattgagcttcatcattgttcttggtggtgggttgctactttcagagggagcttctagttctaggcctcctgttattaaagttggtgctatatttggtttaaacaccatgtacggtgaaactgcaaatatcgcctttaaagctgctgaggaagatgttaactctgatcctagcttccttggtggatcgaaattgcggattttgatgaatgatgctaaacgtagtggcttcctcagcatcatgggagcattgcaattcatggagactgatgtagtggctataattggtccacagacatcaataatggctcatgtgttgtctcatcttgccaatgagcttactgttccgatgttgtcatttacagctcttgaccctaccctctctccactccaattcccattctttgtccaaacagcacctagtgatctgtttctgatgcgtgccattgcagagatgatcacttactatggctggtcagatgtggtggcattatataatgatgatgataatagtagaaatggcgttacagcgttaggcgatgagcttgaagagaggcgttgcaagatttcttacaaggcagtacttcctttggatgttgtgattactagtccagttgagattatagaggagttgattaagatacggggaatggagtctcgggtaatcgttgtgaacactttcccaaatacaggcaagatgatctttaaggaagcagagagattagggatgatggagaaaggttatgtttggatagctacaacttggttgtcttctgtgctagattcaaatttgcctttggataccaaattagtcaatggagttcttacactgcgtcttcacacgccagattctagaaagaagagggactttgcagcacggtggaagaacaagttgagtaataataagactattgggttaaatgtctatggtctgtatgcttatgatactgtctggatcattgctcgagccgttaagacacttttggaagctggaggcaatctttctttctccaatgatgcaaagttaggcagcttgaaaggtgaggcgttgaatctaagtgcattaagcagatttgatcaaggatcacaacttcttgattatattgtgcatacaaagatgtctggtctaactggtccggttcaatttcatccagacagatcaatgctacagccttcatatgatattatcaacttggttgatgaccgggttcaccaaataggttactggtctaactattctggtctttctattgtaccgcctgaatcattttacagcaaacctcctaaccgttctagctcaaaccaacatctgaactctgtaacttggcctggtggtacttcagttacgcctcgtggatggatttttcgtaacaatggaaggcggctaagaattggtgttcctgatagagcaagcttcaaggactttgtttcaagggtcaatggaagtagcaacaaagttcaaggatattgcattgatgtatttgaagctgcagtgaaactgctttcttatccggttcctcacgagttcatctttttcggagatggtttgacgaatccaaactacaatgagctggtcaacaaggtcaccactggggttgactttgatgctgttgtaggcgacatagccattgtcaccaaacggaccaggattgtggatttcacccagccatacattgagtcaggccttgtcgttgttgctcctgtcacaagacttaacgaaaatccttgggcctttttacgcccgtttactcttcctatgtgggcagtaacagcatctttttttgttattgttggagctgcaatatggattcttgaacaccgtataaatgatgagtttcgtggtccaccaaggagacagatcattaccattctctggttcaccttttcgacgatgtttttctcccatagagagactacagttagcacacttggtcgtatggtgcttctgatatggctttttgtggttctgatcattacatctagctacacagcgagtctcacatcaatacttacagtgcaacagcttaattcacctataaaaggagtagatacactcatcagtagcactggtcgtattggtttccaggttggttcttttgctgaaaactacatgaccgatgagcttaacattgccagctccagacttgtgcctctcgcctcccctgaagaatatgctaatgcgcttcaaaatggcactgttgcagcgattgttgatgaacgtccttatattgatctcttcctctcagattactgtaagtttgccatcagaggccaagaattcaccagatgcggttggggatttgcattcccaagagactctcctttagcagttgacatgtcaaccgcgattcttggtctatccgaaactggagagcttcagaagatccatgaccgatggctttcgaaatccaactgcagcagcccgcatgggtctcagtcaggtgactcagaacagctcaacgtgcgtaccttctggggtatgttccttgtggttgggatagcctgtctcgtcgctctctttatccacttcttcaaaataatccgcgacttctgcaaagacacacctgaagtagtagtagaagaagctataccttcaccaaaatcttcacgtttaacaaagctacagacttttttagcatttgttgatgaaaaggaagaagaaaccaagcgaaggttaaagcgcaaaagaaacaacgatcattctatgaatgccaatagcattatctcgaggactgcatctagaagacccatatgattatccttatgattttgttcatctgtacatttcaacacacacctcatttgcaacaaaaatgagattttgtttatataccaccatttacaatcatttaagctaaagccaaaccaaagtggacaagcttnnnnnnnnnnnnnnnnnnnnnn

SEQ ID NO: 118590 - DNA, 3049 bp, Arabidopsis thaliana
aagcatctccttcgcaaatctccatctccatctccatcttctgaattcaggttcttgttgcttacgcttccagctaaaaagatgacgtctcgttttttcactcaggttggaagtgaaagtgaagatgaaagtgattatgaggtagaggttaatgaggttcagaatgatgacgtcaataaccgttaccttcaaagtggtagtgaggatgatgatgatactgatacgaaacgtgtggttaagcctgctaaggataaacgttttgaggagatgactaacactgttgatcagatgaagaatgctatgaagatcaatgattgggtcagccttcaagaaaactttgataaggttaacaaacagcttgagaaggttatgaggattactgaggctgtgaagcctcctaccttgtatatcaagacgcttgttatgttggaggatttcttgaatgaagctcttgccaataaggaagccaagaagaagatgagtactagtaactccaaggctttgaactcaatgaaacagaaattgaagaagaacaataagttgtacgaagacgatatcaacaagtatcgtgaggctccagaagttgaggaagagaaacaacctgaagatgatgatgatgatgacgatgatgacgatgaggttgaagatgatgatgattcttccatcgacggacctaccgtagatcctgggtccgatgtggatgaacctactgataatctcacttgggagaagatgctgagcaaaaaagataagcttttggagaagctaatgaataaagatcctaaagagatcacttgggactgggtcaacaagaagttcaaggaaattgtggctgctcgtgaaaaaaagggcactgctcgatttgagctagttgatcagcttacgcacttgacaaagattgccaacactcctgcacagaagcttgaaatcttgtttagcgttatttcggctcagtttgatgtgaatccaggtctcagcgggcacatgcctatcaatgtctggaagaaatgcgtgcttaacatgctcaccatactggacattctcgtcaagtacagtaacattgttgtggatgacacagttgagcctgatgagaacgaaacttcaaagccaacagattatgatggaaaaattcgggtctggggaaatttggttgcattcttggagagggttgacactgagtttttcaagagtttgcaatgcattgatcctcacacccgtgagtatgttgagaggctaagggatgagcccatgttcttggcccttgctcagaacatccaggactactttgagcggatgggtgattttaaagctgctgcaaaggtagccttaagacgtgttgaggcaatatactacaagccccaggaagtttatgatgcaatgaggaaattggctgagttggtggaagaagaagaagaaactgaggaggccaaagaggaaagtggacctcctacttcatttattgttgttccggaggttgttccccgtaagcctaccttcccagagagcagccgagctatgatggatattcttgtgtcccttatctacagaaatggagatgagcggaccaaagcgcgtgcgatgctatgtgatatcaatcaccatgctttaatggacaactttgtgactgctagagacctgttgctgatgagtcatctgcaagacaacatccagcacatggacatctcaacacagattctctttaacaggaccatggcgcagcttggtctttgcgccttccgggctggaatgatcactgagtcccatagctgcctttccgagctgtactttggtcaaagagtgagagagttgcttgcccaaggtgtctcgcaaagccgataccatgagaaaaccccggagcaggaaaggatggaaaggagaagacaaatgccgtaccacatgcacttaaaccttgagcttctggaggcagttcatctcatctgtgccatgcttcttgaagtcccaaacatggctgcaaactcgcacgatgccaaacgcagagtgattagcaagaatttccgccgcctgctcgagatcagtgaaaggcaagcattcactgcaccgcctgagaatgtacgtgaccatgtcatggcagccaccagagccctgaccaaaggggatttccagaaggcgtttgaagttttgaactctcttgaggtctggaggctgctcaagaaccgtgacagcatccttgacatggtgaaggatagggttcaagaagaggctctaaggacttacctattcacatactcaagctcttatgagtccttgagtcttgatcagctggccaaaatgtttgacgtctctgagccgcaggtccacagcattgtgagtaagatgatgattaatgaggaactgcatgcaagctgggatcagccaacacgatgcatcgtcttccatgaagtgcaacacagcagattacaatcattggctttccagttaacggagaaactctcgattttggcagaaagcaatgagagggcaatggaatctagaaccggtggaggtggtctggatctgagttcaaggagaagggacaacaatcaggactatgcaggagcagcatcaggtggtggtggatattggcaagacaaggcgaattacggacaaggaagacaaggcaacagatcaggttatggtggaggaagatcatctggacaaaatggtcagtggtcagggcagaaccgaggaggagggtatgcaggaagagttggttcaggaaacagaggtatgcagatggatggctcaagccgtatggtgagtcttaaccgaggtgttcgtacttaaagaggatgaggagaaatctgcagtgttgaccttagtctcaaccttttgttatgttttggattccttttggttatcaaatggttctttctaagagatgttcatcacattttctcgcggccgcgaattcgatgtcaaggtttgggataatggcagttggtggaaaacgccttttaggaagctttaaaacaaaaaacaaaagggcggcccgctctaaaagatcccaagcttacgtacgggtgcatcacgtcaagtctttaaggtcact

SEQ ID NO: 118591 - DNA, 786 bp, Arabidopsis thaliana
  unsure (1)..(786): unsure at all n locations
ctttaagcagacaactaaagtaccctagagatatgtagctccagatatgcatgcaagctgggatcagccaacagtatgcatcgtcgtccatgaagtgcaacacagcagtattacaatcattggctttccagttaacggcggaaactctcgattttggcatatagcaatgagagggcaatggaatctagaaccggtggaggtggtctggatctgagttcaaggagaagggacaacagtcaggactatgcaggagcagcatcaggtggtggtggatattggcaagacaaggcgaattacggacaaggaagacaaggcaacagatcaggttatggtggaggaagatcatctggacaaaatggtcagtggtcagggcagaaccgaggaggagggtatgcaggaaagattggttcaggaaacaaaggtttgcagatggatggctccaaccgtatggtgagtcttaacccaggtggttcgtacttaaaagaggatgaggagaaatctgcagtggtggccttagtctccaccctttggtaatggtttgggatccctttgggttaccaaagggttctttctaaaaaaggttcttcccattttctcgccatgggactggtttattttctttggtaaaacccccagtggtgggaaaagaccttttaagaatgcattacctggaaggtttaataagtttttttttaaaaaaaaaaaaaaaaaggcgnnnnnnnnnnnnnnnnnnnnnnnnnnnnnnnnnnnnnnnnnnnnnnnnnnnnnnnnnnnnnnnnnnnnnnn

SEQ ID NO: 118592 - DNA, 2928 bp, Arabidopsis thaliana
  unsure (1)..(2928): unsure at all n locations
tttgtacttccggagctaaagagttatagctactgtagtagctggaagtgaagaagattttttaatagattgtacggaaaaattagggttttcaaagtttggtttcttgaagttgaattagacatgaagctgtcaacatctggattgggtcaacagggtcatgaaggagagaagtgtctgaattctgagctatggcatgcttgtgctggaccattagtctctcttccatcatctggtagtcgagttgtttactttccacagggtcacagtgaacaggtagctgctacaactaataaggaagttgatggtcacatacccaattacccaagcctaccaccacaattgatatgccagctccataatgttacaatgcatgcagatgttgagacggatgaagtctatgctcaaatgacacttcaaccattgacaccggaggagcagaaggaaacatttgtaccgattgagttggggataccgagtaagcaacctagtaattatttttgtaagactctcacagctagtgataccagtacacatggagggttttctgttcctagacgtgctgctgagaaagtgtttcctccattggattacacactgcagccaccagctcaagaactgattgcaagggatctccatgatgttgaatggaagtttaggcatatctttcggggacagcccaaacggcatctcctaactactggatggagtgtctttgtcagtgccaagcgactagtagctggagattctgtcattttcatcaggaatgaaaagaatcaactctttttgggaattcgtcatgccactcggccgcagactattgtaccatcatctgttttatctagtgatagcatgcatattggactccttgctgctgctgcacatgcttctgcaactaatagctgtttcactgttttctttcatccaagggctagccaatctgagtttgtgatacaactttccaagtacattaaagccgtttttcacacgcgtatttcagttgggatgcgctttcgcatgctcttcgagacagaagagtcgagtgtccgcaggtacatgggtactataactggtattagtgatctagattctgttcgttggccaaactctcattggcgatctgtgaaggttggttgggatgaatcgactgcaggggagagacagccaagggtttctttatgggagattgagcctctgactacctttcctatgtatccatctctttttcctctcagactaaaacgtccatggcatgctggcacatcatctttgcctgatggaaggggtgatttgggaagtggtctaacatggctaagagggggaggtggagagcagcaaggtttgcttcctctaaattatccatctgttggtttgtttccatggatgcaacaaaggctggatctcagtcaaatggggactgataataatcagcaataccaagcaatgttagctgctgggttgcagaacatcggcggtggagatcctttaagacagcagtttgtacagctgcaagagcctcaccaccaatatcttcaacaatcagcttcccataattctgatttgatgcttcagcagcaacagcagcaacaagcgtcacgccatctcatgcatgctcaaacacagattatgagtgagaatcttccgcagcagaatatgcgacaagaagttagtaaccaaccagctggacagcagcaacagctacagcaaccggaccaaaatgcatatcttaatgctttcaaaatgcaaaatggccatcttcaacagtggcagcagcaatcagagatgccatctccctcgttcatgaagtcagattttactgactcaagcaacaaatttgcaacaactgctagtccggcttctggagatggcaatcttttgaatttttctataaccggtcagtctgtactccctgagcagttaacaacagagggctggtctccaaaagcatccaacactttttctgaaccgttgtcacttccacaagcctatcctgggaagagtcttgctctagaacccggaaatccgcagaatccctctcttttcggtgttgatcccgactctggactcttcctccccagtacggttccccgctttgcttcttcatcaggagatgctgaagcttcccctatgtcactaacagattcaggatttcagaattccttatatagctgcatgcaagacacaactcatgagttattgcatggagctggacagattaactcgtccaaccaaaccaagaactttgtaaaggtttataaatctggttcggttgggcgttcattagacatctcccgattcagcagctaccacgagctgcgagaagagttagggaagatgtttgctatcgaagggttgttggaagacccccttagatcaggctggcagcttgtattcgttgacaaggaaaatgatattcttctccttggtgatgacccatgggagtcatttgtgaataacgtttggtacataaagatactatcaccagaagatgtgcatcaaatgggagatcatggagaaggcagtggtgggttattcccgcaaaacccgacccatctctagaagctgcttcggtgttagtctcatcatgctacaacgcgggagccctttgtttcccatttgaagtcgtttccactcatctttatatgccattcgttcgcatctctctcgttttgacgtttttagaaagaaacataatcatatttgtgagtatgggtcctgaaactttaggacgtactttagcttgtattagacagacactctcgtcataaacataagaacctttatgtagctgtctcagggtaactaaacttttctagtatttattcttattctatttttgtagccacatcgttacacagtaagtttcctcacaccaattagattccataaannnnnnnnnnnnnnnnnnnnnnnnnnnnnnnnnncgcc

SEQ ID NO: 118593 - DNA, 1506 bp, Arabidopsis thaliana
  unsure (1)..(1506): unsure at all n locations
atgatcttnnnnnnnnnnnnncaagaacccaaagatctctctctatttgtttgccttcttctttctttctgactcaaaccctcccacgcgtcctcgcgattaagcaaaaccctagatttattctactcttcgaagtcgatttcaatggaaggttcctcgtcagccatcgcgaggaagacatgggagctagagaacaacattctcccagtggaaccaaccgattcagcctccgacagtatattccactacgacgacgcttcacaagccaaaatccagcaggagaagccatgggcctccgatcctaactacttcaagcgcgttcacatctcagcccttgctcttctcaagatggtggttcacgctcgctccggtggcacaatcgagatcatgggtcttatgcagggtaaaaccgagggtgatacaatcatcgttatggatgcttttgctttgcctgttgaaggtactgagactagggttaatgctcagtctgatgcctatgagtatatggttgaatactctcagaccagcaagctggctgggaggttggagaacgttgttggatggtatcactctcaccctgggtatggatgttggctctcgggtattgatgtttcgacacagatgcttaaccaacagtatcaggagccattcttagctgttgttattgatccaacaaggactgtttcggctggtaaggttgagattggggcattcagaacatatccagagggacataagatctcggatgatcatgtttctgagtatcagactatccctcttaacaagattgaggactttggtgtacattgcaaacagtactactcattggacatcacttatttcaagtcatctctcgatagtcaccttctggatctcctttggaacaagtactgggtgaacactctttcttcttccccactgttgggcaatggagactatgttgccgggcaaatatcagacttggctgagaagctcgagcaagcggagagtcagctcgctaactcccggtatggaggaattgcgccagccggtcaccaaaggaggaaagaggatgagcctcaactcgcgaagataactcgggatagtgcaaagataactgtcgagcaggtccatggactaatgtcacaggttatcaaagacatcttgttcaattccgctcgtcagtccaagaagtctgctgacgactcatcagatccagagcccatgattacatcgtgaagttggtctattcttttgttttttggctgcggaaattgactatcggtttgacccggtttatgaggcaatgcccattgttccctatatctctagtgtagtatctgcttcagacaaagatctttgggttattaaatgacattaacataaatcgatcattatgttttagcgaaaaaggtanatctcgggncatctatgnatcgtagataatgagnnncccgcaattaatatcaanaannnnnnnnnnnnnnnnnnnnnnnnnnnnnnnnnnnnnnnnnnnnnnnnnnnnnn

SEQ ID NO: 118594 - DNA, 2353 bp, Arabidopsis thaliana
  unsure (1)..(2353): unsure at all n locations
agttgattgcgaaatttaaaatcgaaaaagctaaaaggggtagtttcgtcattaaatttgaattttttctttcactgccagctctgctttagagcttctctacttcttcttcttcttcaagttcgcttaagagatcgatcggagattcggagtagagaaaaatgtcaggattcgtcgggattttggtatcggatccatggttacagaaccaattcacgcaagtggagcttcggagtttgaaatctcacttcacgagcatgaagagagagagcgggaagctaacagtatcagacctcgcgtcaaggatggggaaatcaaaagtagttggagatcagaatctaagcaacgaagaacgagcgactttgatccaaaattttcatccgaatttgaatgatgaagtcgatttcgagttttacttaaggatttatctgaatcttcaagcgcatgtaaacgcaataatcggaagcggtgttaaaaactcatctgcgtttcttaaagcagctacaacaactttgttgcatactattagtgattctgagaaatcttcttatgttgctcatatcaataattatctctctggagatgagtttctaaacaagtgccttccgattaatccgtcttcgaatgatctattcgaagttgcaaaagatggtgttttgctttgtaagcttataaatgtggcggttcctggaacaatcgatgaacgagcgattaatactaagagtatgcttaatccatgggagagaaatgaaaatcatacgctttgtcttaactctgccaaggctattgggtgtactgtggttaatataggaacacaagatatcattgaaggaaggcgtcatcttgtgctcggtgtgatctctcaaatcattaagatacaattgctagcagacctaaacttgaagaaaactccccagctggtggagttggtcggtgatagcaaggatgtggaagagctaatgagtttaccacctgagaagatcttattgagatggatgaattttcagttgagaaaaactgaatacaagaaaaccgtcacaaacttctcttctgatgttaaggatgcggaagcttacactaatctattaaatgtcctggcaccagagcacaagaatccatcacatttagcagttaaaagctcatttgagagagcaaaacttgttctcgaacatgcagacaaaatgggatgtaggagatacttgacggcgaaagatattgttgagggttctccaaatcttaatcttgcttttgtagcacatatattccagcacaggaacggactttcaacacaaacgaaacagatatcttttcttgaaaatctagctgatgacattcaaatttcaagagaagaaaaagcattccggttttggattaacagctttgatggttcagtatacataaacaacgtgtttgaagatctcagagatgggtggatactattgcagacactagacaaagtgtctccaggcattgttaattggaaagtatcaagcaagcctccaatcaaattgccattcaagaaagtagaaaactgtaatcaagttgtgaaattagggaagcagctcaagttctctttggttaacattgctggaaatgacattgttcaaggaaacaagaaactcatactagcatacttatggcaattgatgagatacaacatcctgcaacttcttaagaacttgagactacattcaaacggcaaagagataacagacgctgatatattggaatgggcaaatgctaaagtgagaaacaacggatgcaaaacacgcatgtacagtttcagggacaagagcttatccgatggggtatttttcttggagctgctgagttcagtgcagccaagatccgtaaactggagtcttgttacaaacggagttacagatgaagagaaaaagatgaatgcaacttatgtgattagcatagccaggaaacttggttgctccattttcttactccctgaagatataatcgaggtgaatcagaagatgatgctgacattgacggcgagtataatgtattggactctaaagcaacctcttcatctgaataagcctatcggatctcctgatagccacaatggaagtttactcgatgattctacgtcagattcctctatagaataaaattgttttactgtgaaattatatattcttaagaactttatatgaatgatgttattaattattttgctcctttgtattttttgggtgtaaaaactatattaaaattgaaatgtcatcaacgaatattgacaaaaaaaaaacaaaaagnnnnnnnnnnnnnnnnnnnnnnnnnnnnnnnnnnnnnnnnnnnnnnnnnnnnnnnnnnnnnnnnnnnnnnnnnnnnnaat

SEQ ID NO: 118595 - DNA, 1407 bp, Arabidopsis thaliana
  unsure (1)..(1407): unsure at all n locations
caactctctgcgactcactatagggaaagctggtacgcctgaaggtaccggtccggaattcccgggtcgacccacgaattcgccgccgcgtccgaaaactgtaaacccccacacagttattggccgtcggattcaatggaaggattagctatcagagcatctcgaccgtcggttttctgttctattccaggtctcggcggcgattcccaccgaaaacctccaagtgacggtttcctcaagctgcctgcgtcgtctattccggcggacagccgaaaattagtagcgaattctacttcctttcatccaatctcagccgttaacgtctctgctcaagcttccctcaccgctgattttcccgccctttcagaaactatactgaaagagggaagaaataacggaaaagagaaagcagagaacatcgtgtggcacgagagttcgatatgcagatgcgacagacaacaacttcttcaacaaaagggttgtgtcgtttggatcactggtctcagtggttcagggaaaagcactgttgcttgtgcactaagtaaagcattgtttgaaagaggcaaacttacttacacactcgacggcgacaatgtccgtcacggccttaaccgtgacctcactttcaaagcagagcaccgcaccgaaaacattagaagaattggtgaggtggctaagttgtttgctgacgtcggagtcatttgtatagcaagtttgatttctccgtaccggagagacagagacgcgtgccggtccttgttacctgacggcgatttcgtcgaggtcttcatggacgttcctcttcatgtgtgcgagtcgagagatccaaaggggttgtacaagcttgcacgtgcaggcaaaatcaaaggcttcactggaatcgacgacccttacgaggcaccagtgaattgcgaggtagtgctgaaacacacaggagacgacgagtcgtgttcgccacgtcagatggctgagaacatcatctcttacctgcaaaacaaaggttatcttgagggctaagtcaaagtcggaaaaatcaacccaatttgtcgattctatatatggctaaaggattgttctccctgattcggtcagaagcttgagacctggaaacgatgtcgtctcgcttcgtcacactatcatttgttcttgaattgtgttgaagtcaaaagccaaagggaatatatctatatttgttctaatcatcatttagttagtttataaagagtttttgctccaatgatatcgactgtgttgtataatgtgaattaataaagtggatttcgttgtaaaaaaaaaaaaaaaaaaaaaagtcgacgcggccgcgaattccagatctatgaatcgtagatactgaaaancccgcaagttcacttcaactgtgaattcaccnnnnnnnnnnnnnnnnnn

SEQ ID NO: 118596 - DNA, 654 bp, Arabidopsis thaliana
  unsure (1)..(654): unsure at all n locations
attccccggaccgctngccctgntccccaagctttatcggcccccttntggggaagctggttccccntcangtcccgntccggaatccccggtcgnccccacgcgtccggaattattatccaggcttccactggaatcggcgnccccttacgaggcccccagtgcattgcgaggtagcgctgtaaccacacaggaggcggcgagtcgtgttcgccacgtcagatggctgagaaccatcatctcttacctgcaaaacaaaggttatcttgagggctaagtcaaagtcggaaaaatcaacccaatttgtcgattctatatatggctaaagcattgttctccctgattcggtcagaagcttgagacctggaaacgatgtcgtctcgcttcgtcacaccatcatttgttcttgaattgtgctgaagtcaaaagccaaaggggaatatatcgagatttgttctaatcatcccttagttagttcataaagagtttttgctccaatcatatcgactgtgtcgtaccatgtgaattaataaagtggattttgttgtggggtttacagtttcgaacgcgtggcagaacgcataggtcggccgctctagaggatccaagcttacgtacgcgtgcatgcgacgtcataagtcttgtaagtgtcac

SEQ ID NO: 118597 - DNA, 537 bp, Arabidopsis thaliana
  unsure (1)..(537): unsure at all n locations
ccggtccagncttncccccctgggnacttttttcccctncaaattggtggggaacccctttnccncattngngccgccggaaacccgaggccgctgctgagatcgtcttcagtggaaaagctcagcctgggctcacagcaacaaacgtcaatgtagacgaggtgagaatgattgtggacgagggttctgaaggatttggtttcacgaagaagaacgaagtgataaacgggaaggcggcagtgataggattcttgctgctgttagatttcgagctattgacaggtaaaggtctattgaaaggaacagggttcttggacttcctttactctgcttcagatgctttcaagtagaggtaatatctttgttggtctggttttgcttgcctcctttgtgcagtttgccgagaaacaaaaaaaaaaaaaaccatgtaatagtatatagagatggctttgctctgtctttctttgtgtttaccccttatacgagatattctttcttctccttgagttcaaattataatcttcaagctttcccact

SEQ ID NO: 118598 - DNA, 1088 bp, Arabidopsis thaliana
  unsure (1)..(1088): unsure at all n locations
ccggccgggacgcgtgggcggacgcgtgggaatgcatttccctccattctcttacgctttctctcactctcgtcaatggcgaccaccgcatcttcatctctcccccgtaattactccttcacaactccgcgaccttcatcattcatccgaggaccgccattagctagaacgctgcctctctatctccgccgtaaccgtcgagtagctctcacttaccgattggaccagaattcgaagcagagaagtggtggaaacgtaagatgcgaggcgacggaggtatcttcttcttcttctgtatccacacctggaaggaattgggtgccggtggtgccgttatcggcgcttccgaaaggtgaacggcgagtggttattcaagacgatgagacgatattgttgctttggtataagaacgatgtttttgcaattgagaatcgttcaccagctgaaggagcttatagcgaaggacttctcaacgctaggctcactcaggatggttgcattgtgtgtccatcgacggatagtacgtttgatcttagaactggagagatccgggaatggtacccgaaaaacccggttctcagagtcttgacacctgcactgaggaaactatttgtataccctgtcaaatatgatgaggaaaacatctatatcagcattagagacagcgggaaaacagaggcagctgctgagatcgtcttcagtggaaaagctcagcctgggctcacagcaacaaacgtcaatgtagacgaggtgagaatgattgtggacgagggttctgaaggatttggtttcacgaagaagaacgaagtgataaacgggaaggcggcagtgataggattcttgctgctgttagatttcgagctattgacaggtaaaggtctattgaaaggaacagggttcttggacttcctttactctgcttcagatgctttcaagtagaggtaatatctttgttggtctggttttgcttgcctcctttgtgcagtttgccgagaaacaaaaaaaaaaaaaaagnnnnnnnnnnnnnnnnnnnnnnnnnnnnnnnnnnnnnnnnnnnnnnnnnnnnnnnnnnnnnnnnnnnnnnnnnn

SEQ ID NO: 118599 - DNA, 651 bp, Arabidopsis thaliana
  unsure (1)..(651): unsure at all n locations
accacgcgtccgcccacgcgtccgcccacgcgtccgattaattatccaggcttcactggaatcgacgacccttacgacgcaccagtgaattgcgaggttcgtcacgtgaatgatcagatagattttggaacgtaaatttgtactaataaagtattgatgtaatatcctccaggtagtgctgaaacacacaggagacgacgagtcgtgttcgccacgtcagatggctgagaacatcatctcttacctgcaaaacaaaggttatcttgagggctaagtcaaagtcggaaaaatcacccccattggtcgattctatatatggctagaggattgttctccctgattcggtcagaagcttgagacctggaaaacgaggtcgtctcgctttgtccccccatcatttgtttttgaattgccccccagtcaaaaaccaaagggaaaatatgtatatttgttctaatcaccctttagttagtttataaagagtttttgctccaatgatatagactgtgttgtataatgtgaattaataaagtggattttgtggaaagtaaaaaatttaataannggcccctccccggggggcgaccgctctagaggatccaagcttaggtaggcgtgcaggccacgtcataatcttgtagagtgttccta

SEQ ID NO: 118600 - DNA, 1108 bp, Arabidopsis thaliana
  unsure (1)..(1108): unsure at all n locations
ggggggggggngggtagtatcgccnnnnnnnnnnnnnnnnnnntacgcctgcaggtaccggtctggaattcccggccacgcgtccgcccacgcgtccgcaactccaccgaattcagaagatcgaagaagatgagtagaggaagcggcgctggttatgatcgtcacatcactatcttctcaccggaaggtcgtctctttcaagttgaatatgccttcaaggccgtgaaaacagctggtattacttcaatcggagttcgtgggaaagattcggtttgcgtcgttacccagaagaaagttcctgacaagcttttggatcagtctagtgttacacatctgttccctatcaccaagtacattggattggtagctactggcattacagctgatgcaaggtctttggttcaacaagcaaggaatcaagcagctgaatttcggttcacttatggatatgagatgcctgttgacattcttgctaaatggatagcggacaagtcacaggtctacactcaacatgcttacatgagaccccttggagttgtcgctatggtaatgggtgttgatgaagagaatggtcccttactttacaaatgtgacccagctggacatttttacggtcacaaggcaactagtgctggtatgaaggaacaagaagcagtcaatttcttggagaagaaaatgaaagaaaacccatctttcacatttgatgaaaccgtgcagactgccatatcggctttgcaatctgttcttcaagaagacttcaaggctactgagattgaggtaggtgtggtgagagcagagaacccggaattccgtgcattgacaacggaggagattgaggagcatttgacagccattagtgaacgagactgatcaacttagtgaaacaagtgtgagttacgttgcttcgcttctatcagacattcctctaaagtgaccactctccatcgatcttttgtttggtcttccttccataatttaatttacttagtcaacccagcaaacttgaaaaacaaaaatgcactgtaatgcttaaggctgtgagagtttccgagtcttttgactcttccagaaatgacaccaactttactcaaaaaaaaaaaaaaaaaaa

SEQ ID NO: 118601 - DNA, 1191 bp, Arabidopsis thaliana
  unsure (1)..(1191): unsure at all n locations
gnnnnnnnnnnnnnnnnnnnnnnnnnnnnnnnnnnnngccgtaccggttcggaattcccgggtcgacccacgcgtccgcttgaagacaaagaaagctttcttctataatacatctttctctacagatcacacagaagcaaaaattccatctccgatttcggaagagagttgttctcttctctgagaagaagaagatgagcagaggaagcggcgctggttacgatcgtcacatcactattttctcaccggaaggtcgtctcttccaagtcgagtatgctttcaaagccgtgaaagcagctggaatcacatcgatcggtgtccgagggaaagattcagtatgcgtcgttacgcagaagaaagttccggacaagcttttggatcagtctagtgtatctcaccttttccctgttaccaagtaccttggattgttagccactggcatgacagctgattcaaggtcattggtacaacaagctaggaatgaggctgctgagtttaggttccaatatggttatgagatgcctgcagatattcttgctaaatggattgcagataagtctcaggtttacacacaacatgcttacatgagaccccttggagtagttgccatggttctaggtattgatgaagagagaggacctctactttacaagtgtgacccagctggacatttttacggtcacaaggcaactagtgctggtatgaaagaacaagaagcagtcaatttcttggagaagaaaatgaaagaaaaccctgccttcacatatgatgaaacagtacagactgctatatccgctctccaatctgttcttcaagaagacttcaaagcaactgaaattgaggtgggagttgtgagagctgatgaccctctcttccgttccctgagaacagaggagatcgacgagcacttgacggccattagtgaacgtgactgatcactttcactggaacattcagtcgggactttgcatctctttcttttgctttaaatctatctaagatgattcacgtttcagagaaacgtgtttccattagtcatgagtcgtgtagttttcatttgaatcatctgcttcctcctaataggagttacatgtaagggtgtcaaattaaggtcgaatgagatggtttaaggttttgaattttaaaaggcaaaacaaagaaagttatttacaaaaaaaaaannnnnnnnnn

SEQ ID NO: 118602 - DNA, 423 bp, Arabidopsis thaliana
ggtcattctcacgggcacaaggcaactagggctggtatgccagaacaactcgcagtcaatttcttggacaacaacatgaaagaaaaccctgccttcacatatggttatgagatgcctgcagatattctctgctaaatggattgcacataagtctcaggtttacacacaacatgcttacatgagaccccttggagtacttgccatggttctaggtattgatgaagagagaggacctctactatcatcaaattctccaacatcgattcttgctcaaatcaatacaccatgttcaccatctatgctctctagcgttacaggttgcacgagttttctaaccggaggtggtagttttccgacctcagattgttgtggggctcttaaatcgttaaccggaaccggtatggactgtttgtgtctgatagt

SEQ ID NO: 118603 - DNA, 1021 bp, Arabidopsis thaliana
ccgtcttctctgcaagaaacctaaaagcctatttatttcacctctctctctctctctctgcaactaatcacttgttcgatctcgaagctgaagctaaagctttcgctaatttgcttaaggagctatgggagatagtcagtactcgttttctctcaccactttcagcccatctggtaagctggtgcagatagaacatgcccttacagctgttggatctggccaaacatctttagggattaaagcttctaatggagttgtcattgcaactgaaaagaagttgccttctattctggttgatgaagcatctgttcaaaaaattcagcatttgactcctaatattggagttgtttacagtggcatgggtcctgattttcgagttcttgttaggaagagtaggaaacaggctgagcaatatcttcgtctgtacaaagaacccatccctgttacccaacttgtaagggaaaccgctactgttatgcaagagtttactcaatcgggaggtgttaggcctttcggggtttccttgctggtggctggatatgatgacaagggtccacaattgtatcaggtggatccatctggctcttatttctcctggaaagcttcagccatggggaagaacgtttctaatgcaaaaaccttccttgagaaaaggtacacagaagacatggaacttgacgatgccattcacacagcgatactgacattgaaagaaggctttgagggagagatctcaagcaaaaatattgaaattggcaaaatcggtgctgacaaagttttcagggtactaacaccagcagagatcgatgattaccttgctgaagtcgagtaactcccagcatagtctagcaacaaagtttaagaccggaatttcgtggcatttacagtcttaaagagttgttttttctgtaaaactttggatctttaaatagtttgttgctgaacacaagctgagtgtctctcaataactaatgaaatctgtttctttttttctcaaaaaaaaaaaaaaagggcggccgct

SEQ ID NO: 118604 - DNA, 500 bp, Arabidopsis thaliana
agctctatacgactcatataggaagctggtcgcctgcagtacgggccgggatcccggttgtgcaagaaaccttgagagcttaaaaattcttcacttgggtctcttctctctctcttctcttgcgaccattccgttcgatccatatatcaaagcttgatttagttggttttcaatgggggacagtcagtactcgttttctctcaccaccttcagcccatcagggaagctggttcagatagaacatgccctaacagctgttggatcaggccaaacatcacttggaattaaagcttcaaatggagttgtcattgcaactgaaaagaaacttccttctatattggttgatgaagcgtctgttcaaaagattcaacatttgactcccaacattggaactgtttacagtggtatgggtcctgatttccgagttcttgtgcgaaagagtaggaagcaggctgagcaatatctccgtctgtacaaggaacccatccccgttactcaac

SEQ ID NO: 118605 - DNA, 1102 bp, Arabidopsis thaliana
  unsure (1)..(1102): unsure at all n locations
nnnnnnnnnnnnnnnnnnnnnnnnnnnnnnnnnnnnnnngcctgcaggtaccggtctggaattcccgggtcgacccacggagagcaaagttctcagcaaaatcaaagaagaaccgaacgagagagagaaacgaattcttctcaggtgttaaagaatgtctcggagatatgatagccgtaccacaatcttctcgccagaaggtcgtctttaccaggtagagtatgctatggaggccattggaaacgccggttctgcgattggaatcttatccaaagacggtgttgtgttgatcggtgagaagaaagtcacctcaaagcttcttcaaacctcaacctctgctgagaaaatgtacaagattgatgaccatgttgcctgtgctgttgctggtataatgtctgatgctaacatacttatcaacacggctcgagttcaagctcaacgttacaccttcatgtaccaagagcccatgccggttgagcagctggttcaatctctttgtgacacaaaacaaggatacacacagtttggtggtcttcgcccgtttggtgtctcctttctctttgcaggatgggacaagcaccatggtttccagctttatatgagtgacccgagtgggaactatggtggttggaaagctgcagctgttggagcaaacaatcaggcggctcagtctatcctgaaacaagactacaaggacgatgcaaccagggaagaagcagtcgagcttgccttgaaggttctgaccaagacaatggacagcactagcttaacatctgagaagctagagcttgctgaagtgtatctgactccatccaagactgttaagtaccatgttcactcacctgagtcgctcaccaaactgttggtcaagcacggtgtgactcaacccgctgctgaaacatcttaagcccaaaagtatctctagtcttattcgcctggtacggtgtctccgctttatgtttgtagttctctgttttacagctttccttttggtttgaactttgaagttacctttggcgatgaaactagatttgacaatgttatgaatttatcttcaatgcatcatctttttacttaaaaccaannnnnnnnnnnnnnnnnn

SEQ ID NO: 118606 - DNA, 1008 bp, Arabidopsis thaliana
  unsure (1)..(1008): unsure at all n locations
tcgnagaagttgggattcgtctttttataatttgccctgaaaacgaaaacgaaaataaaaagcggagagagagatggctagatacgatcgagcaattactgtcttctcccccgacggtcacctctttcaagtcgaatacgcccttgaagccgtccgcaagggtaacgccgccgtcggtgtccgcggtaccgacaccgttgtcctcgccgtcgagaagaagtccacccccaagcttcaggattctagatcagccagaaaaattgtgagccttgacaatcacattgccttggcatgcgcggggctcaaggctgatgcccgagtcttgattaacaaagcaaggatcgagtgtcaaagccacaggcttacacttgaggaccctgtcactgttgagtacatcactcgctacattgctggccttcaacagaagtatacccaaagtggtggtgtcagacccttcggtctttctactcttatcgttggctttgacccttactctcgcctcccttccctatatcagactgatccttctgggactttctctgcttggaaagctaatgctaccggcagaaactccaactctattagggaattcctcgagaagaactacaaagaatcctctggccaagaaactattaaactcgctatccgtgctctgcttgaggtagttgagagtggcggaaagaacattgaggttgccgtaatgacacgggaggaaactgggctgcgccagctagaagaagctgaaattgatgcaatcgtggccaagatcgaagctgaaaaggcggccgcagaagcagccaagaaaggccctccaaaggaaacttgataaaacaataactgtttctgtttctcaatctgaacttaccttcttcgctgcttctgtttctcaatcttgttttgactcgagccaactctttggcaaaagaagaacctgaccccatcgttttgttaacttgaaaatgctccaaaaaaaaactgaagaaagggtttaaaaaaaaaaaaaaaaaa

SEQ ID NO: 118607 - DNA, 551 bp, Arabidopsis thaliana
  unsure (1)..(551): unsure at all n locations
ggagagagagatggctagatacgatcgagcaattactgtcttctcccccgacggtcacctctttcaagtcgaatacgcccttgaagccgtccgtaagggtaacgccgccgtcggtgtccgcggtaccgacaccgttgtcctcgccgtcgagaagaagtccacccccaagcttcaggattctagatcagccagaaaaattgtgagccttgacaatcacattgccttggcatgcgcggggctcaaggctgatgcccgagtcttgattaacaaagcaaggatcgagtgtcaaagccacaggcttacacttgaggaccctgtcactgttgagtacatcactcgctacattgcctggccttcaacagaagtatacccaaagtggtggtgtcagacccttcgggcctttctactcttaatcggtgggttttacccttactttggcctcccttcctcatataaactgttcctctggggctttttctntttggaaagtaatggttccggagaaatccacttttttgggtttctcgggggcctcaaaattcttgccanac

SEQ ID NO: 118608 - DNA, 1005 bp, Arabidopsis thaliana
  unsure (1)..(1005): unsure at all n locations
ctccgattcgcagatcaattagctgggttttgattccgttgtgcgaaggactttaagaggttttgcagatcgaaatcggaagagaagaagaagatgtttctcactagaactgagtatgacagaggagtgaacactttttctccagaaggaaggctatttcaagtggaatatgccattgaagctatcaagcttggttctactgcaattggagtaaagacaaaagaaggagttgtgcttgctgtcgagaagcgtatcacgtcgccattgctggaaccgagcagtgtggagaagattatggaaattgatgaccatattggttgtgctatgagcggtttaattgctgacgcgcgcacacttgttgagcatgctagagttgaaactcaaaaccatagattctcgtatggtgagccgatgactgtagagtccacaacacaagcactgtgtgatctggctttacggtttggtgaaggagaggaagaatcaatgtctcggccgttcggagtatctcttctcattgctggccatgatgaaaatggaccaagcttgtactacactgatccttcaggaacattctggcagtgcaatgcaaaggcaattggttcaggttctgaaggagctgatagctctcttcaagagcaattcaacaaagatttgtctctacaagaagctgagactatcgctgtatctatcctaaagcaagttatggaagaaaaggtgactccaaataacgtggatattgccaaggtagcaccagcttatcatctctacactccacaagaagtcgaagcagtcatcgctcgtctttgattgaaaaaactcaatttgggtaatttacctatcagcttgtgtcacaaaacttgttacttttgtctgttagattgaggatcatgtcacattttagtcggttgtgtaagagaatcttttggctcccatgtcattcaataacctttcggatttgtgacttataaaatttcctttcctaccnnnnnnnnnnnnnnnnnnnnn

SEQ ID NO: 118609 - DNA, 1119 bp, Arabidopsis thaliana
  unsure (1)..(1119): unsure at all n locations
nnnnnnnnnnnnnnnnnnnnnnnnnnnnnnnnnnnnnnnnnnnnnnnnnnnnnnnnnnnnnnnnnnnnnnnnnnnnnnnnnnccacgcgtccgcccacgcgtccggtttgtttcttcgattcgtagatcaattctcagctgacattgaggtttatctcagatcgaaatcgagaagaagatgtttctcactaggactgagtatgacagaggagtcaatacattttctcctgaaggtcgtctctttcaggttgagtatgccattgaagctatcaagcttggttctactgctattggtgtaaagacgaaagagggagttgttcttgcagtcgagaagcgtattacttcgcctttactggagccgagtagtgttgagaagattatggaaattgatgaccatataggttgtgctatgagtggtctgattgctgacgcgcgaacacttgttgagcatgcacgagtagagacccagaaccacaggttctcgtatggtgagccaatgactgtagaatctacaacacaagctttgtgtgatcttgctttacggtttggtgaaggagaggaagagtcaatgtctcgtccatttggagtatcccttctcattgctgggcatgatgaaaatggaccgagcctgtactacacagatccatcgggaacattctggcaatgcaatgcaaaggcaattgggtctggctcagaaggagctgatagttctctccaagagcaattcaacaaggatataactcttcaagaagctgaaacaatagctgtatctatcctaaagcaagtaatggaagaaaaggtgactccaaacaatgtcgacattgccaaagtcgcaccagcttatcacctctacactcctcaggaggttgaagccgtcatcagtcgtctatgaagaaataaaccgccattctcttcctgttatcttaccttgtctgttcggtaatttatcaggcttctgtctgcttccggttctctaaaccaaaaattagtttcgtttaatcagataatggattttatcgagttgagttttattgagctttctatctacatttttttgtcgttttcaacaagaagttaaaactaataaatatctgtccaaaagaaaaaaaaaaaaaaaaa

SEQ ID NO: 118610 - DNA, 1023 bp, Arabidopsis thaliana
  unsure (1)..(1023): unsure at all n locations
cttgtctctggcttgagaacaaagaaaacccctttcttcgatctcagcttaaatcactcgacgcagaagaaatcagaaaagagtcagagaaaaaaaaaatcaaggaagatgagtagcattggaactgggtacgatctctccgtcaccactttctctcccgatggccgtgttttccagatcgagtacgccgctaaagctgtcgacaacagtgggactgttgttggaatcaagtgcaaagatgggattgttatgggagttgagaaacttattgcatcaaagatgatgctaccaggttccaacaggagaatccattctgttcatcgtcatgctggcatggctgttgctgggcttgcagctgatgggaggcaaattgttgcgcgtgctaagtctgaagcacgaagctatgagagtgtttatggcgatgctgtacctgtgaaggaactttctgagcgtgttgcaagttatgtacatctgtgtaccctgtattggtggctcaggccttttggctgtggggttattcttggaggttatgatagagatggacctcaattgtacatgattgaaccatcaggcatatcatatagatactttggtgcggccattggcaaaggaaagcaagctgccaaaacggaaattgagaaattaaatttatctgagatgacatgcaaagaaggcgttatcgaggtggcgaaaatcatctacaagctacacgatgaagccaaggacaaggcttttgaattggagatgagctggatatgcgaggagtcaaaacgagagcatcagaaggtccctgatgatcttctggaagaagcaaagacggcagctaaaactgcgctcgaggagatggatgctgactaaaactgaggagtgtgttgaatttagatccgtcttattgcgtcgtttgatgtttcttatgtactctgaattgaattttgtctggagggacagttgttgcagtttcgcatgaaccattggagtcttttatcttattgctatcaacnnnnnnnnnnnnnnnnnnnnnnn

SEQ ID NO: 118611 - DNA, 1101 bp, Arabidopsis thaliana
  unsure (1)..(1101): unsure at all n locations
agctctctacgactcactatagggaaagctggcacgcctgcaggtaccggtccggaattcccgggtaaaagaaaggagagaggccgacttggggtataagccagagttcttcttctttttcaagcttcttcttctcatcagtcatcaccggaatctaatttatactcgcaaaactcagcgattcgtttcgtttctgacaagtttccaattctacagcaatggatctcaatctcgatgcacctcactccatgggaacgaccatcatcggcgtcacttacaatggaggtgtcgtcctcggagccgactcacgtaccagcaccggtatgtacgtagcgaatcgagcttctgataagattacacaactgacagataatgtctacgtctgccgctctggatcggctgctgattctcaagttgtatctgactatgtccgctacttccttcaccagcatacaattcagcatggacaacccgcaactgttaaggtttctgccaaccttatcaggatgctcgcatataataacaagaacatgctccaaactggtctcatcgttggaggatgggataaatatgagggtgggaagatctacgggatcccactcggtggaactgtagtcgagcaaccgtttgccattggaggctctggttcgagctatctctacgggttcttcgaccaggcttggaaagataacatgaccaaagaagaagcagagcaacttgttgtgaaggcggtttcactagccatcgcccgtgatggagccagtggtggtgtcgtacggactgtcataatcaactcagagggagtgacgagaaacttttaccctggagataagttgcagctttggcacgaagaattggagccccaaaactcactcttagacattctgaacgctgctggtcctgaaccaatggccatgtgatctgcaaacaacgatcattatcttactctgttgggcaaacattttagatatttcattacagtttccagtgtctttaagactttaaactctgtttgaggttctgttgtaatgaatgacccgatctttctgttttaaacggatatcgtgtttcttatggctatggttttaaaaaannnnnnnn

SEQ ID NO: 118612 - DNA, 1164 bp, Arabidopsis thaliana
  unsure (1)..(1164): unsure at all n locations
ctatacgactttattagggaaacctggtacgcctgcaggtaccggtccggaatttccgggtcgacccagcaaaattcatcaagacttgtcaatttgaaaaaatgtcgcaatcaaccgtagatgttccgccaaagggtgggtttagcttcgatctgtgtaagagaaatgatatgcttacacaaaagggtcttaaagctccgtcttttttgaagactggaacaaccattgttggtttgattttcaaggatggtgtgatactaggggcagatacccgagcaactgaggggccaattgttgctgataagaactgtgagaagattcactatatggcaccaaacatatattgctgtggtgcaggaactgcggctgatactgaagcagtcactgatatggtcagctcacagctgcgattgcatcgttaccagactggtcgagactctcgggtcattactgctttgacccttctcaaaaaacatcttttcagctaccaaggtcatgtctctgctgctcttgtactcggtggagttgatatcactggtccacatctgcatactatatacccacacggttcaactgacactcttccattcgccacaatgggttcgggttctcttgctgctatgtctgtgtttgaggcaaagtataaagaaggcctaactagggatgaaggaattaagctggtcgctgaatccatatgctcgggtatattcaatgacctgggtagtggtagcaacgtggacatctgcgtgatcacaaaggggaacaaggaatatctcaggaactacatggaaccaaacccaagaacctatgtcagcagcaaaggctattccttcaccaagaaaactgaggttcttctcaccaaaatcaccccattgctggagcgagtcgaaatcacagaagttggtgaagctatggaggaataattcaatcaatctcatatatcttcttttgcattgatctacatcaaggctctgtgtactctcatgatctcatcttcccagtcttgtcttcttcccatgtttaaggatcattcaaatcttgttactcctctctctccttcttagatttcaatagagagggtcagactcgagagacttcgtcctttcgaaataaaaaaacaactttccctnnnnnnnnnnnnnnnnnnnnnnnnnnnnnnnnnnn

SEQ ID NO: 118613 - DNA, 1341 bp, Arabidopsis thaliana
  unsure (1)..(1341): unsure at all n locations
ctcgattttggtgattcgaacacgattttacctatccttgagcgatctcgatcccgacgttttgagttgattttattgtcaggagttttcaaaaaatctgttgttaagtctcagcaaaaccttcaagtaaagagtggtgaatcggaaaatgtcgcagtcttccgtcgatataccgccaaaaggtgggtttagcttcgatctgtgcaaaaggaatgatatgctgacacagaagggtcttaaagcgccgtcgtttctcaagactggaacgactatcgttggattgatatttaaggatggtgtaatacttggggctgatacacgggcaactgaagggcctattgtggctgataagaactgtgagaagattcactacatggcaccaaacatttactgttgtggtgcaggaaccgctgctgacactgaagcagtaactgatatggtcagctcacagctgcggttgcatagataccagactggccgagattctcgagtcgttactgcattgacccttctcaaaaaacatcttttcagctaccaaggccatgtctcagctgctcttgtgcttggtggagttgatattaccgggcctcatcttcacacgatatacccacacggttctactgacactctaccatttgctacaatgggttctggttcccttgctgccatgtcagtgtttgaagcaaagtataaagaaggtctaactagagatgaaggaatcaagttggttgctgaagccatatgctctggtatattcaacgaccttggtagtggtagcaatgtggatatctgtgtgatcactaaggggcacaaggaatacttgaggaattacatggaaccaaacccaagaacctatgttagcagcaaaggctattcattcaccaagaaaaccgaggttctactcaccaaaattacaccattattggagcgagtcgaaattgtagaagtggctggtgaagctatggaggaatgaatctcgtgtgagagacagatactaagagtgaaaccattgttctacctcacatgacagtcatgtttacattttctactttgttcaatatgaacgactaaaatcgaatcgtagttgcctccatttcgtctttaaatttggcttgaacttgtgattaatgattatggatgattcggttttgaaatttagctctcacataattttcaaaaaaaaaaaaaaaaaaaaacaaaattgtgctctttctttttttgtccacaacatcttaagacaactcatcattcttactaaaaaaaaaaaaaaaaaagnnnnnnnnnnnnnnnnnnnnnnnnnnnnnnnnnnnnnnnnnnnnnnnnnnnnnnnnnnnnnnnnnn

SEQ ID NO: 118614 - DNA, 666 bp, Arabidopsis thaliana
  unsure (1)..(666): unsure at all n locations
ctcaagctgagttttttttttttaatcattggtctcctccttcttcactctcgtacttctcttcttgaagtctctcttgatcgattcgattctacggtttctctcgatccgagggtttttgattgaaccttttattggtctctttgataatgaagaaattattcaaccctaatgtcaaattacttaactttttgttattctagactggtcaatttgaagaaatgtcgcaatcaaccgtagatgtgccgccaaagggtggggttagctttcgatctgtgtaagagaaatgatatgcttacacaaaagggtcttaaagctccgtcttttttgaagactggaactaccattgttggtttgattttcaaggatggtgtgatactaggggcggatacccgagcaactgaggggccaattgttgctgataagaactgtgagaagattcactatatggcaccaaacatatattgctgtggtgcaggaactcgggcttgatacttgaagcagtcacttgataatggtcaagctcaacagctgccgatttgaatcggttanccagacttggtccgaggnctnttcggggnccaattnncttgcntttnnnccctttntcaaaaaaancatcctttttcnagnntacccaaggncaatgnctcttgcttgnncttg

SEQ ID NO: 118615 - DNA, 458 bp, Arabidopsis thaliana
gaagaaaactctccgtctttttgtaacttttgcttcacctctcttctcttgttctattttttttttcccgattcaagcaaaattcatcaagacttgtcaatttgaaaaaatgtcgcaatcaaccgtagatgttccgccaaagggtgggtttagcttcgatctgtgtaagagaaatgatatgcttacacaaaagggtcttaaagctccgtcttttttgaagactggaacaaccattgttggtttgattttcaaggatggtgtgatactaggggcagatacccgagcaactgaggggccaattgttgctgataagaactgtgagaagattcactatatggcaccaaacatatattgctgtggtgcaggaactgcggcttgatactgaagcaagtcactgatatggtcagctcacagctgcgattgcatccgttaccagactggtcgagactctcgggtca

SEQ ID NO: 118616 - DNA, 930 bp, Arabidopsis thaliana
gaaaaaaactccaaattctactctgaaaccctaagtttccgatgtcgatcttcgagtacaatggaagtgctgttgttgctatggtaggtaagaattgtttcgccatcgccagtgatcggagactcggtgttcagctacagacaatcgccactgatttccagaatctccaagatccacgatcgtgtcttcatcggtctttctggtctcgccaccgatgttcaaacactataccagcgcttggtgtttcgtcataagctttaccagcttagggaagagagagacatgaagcctgaaactttcgctagtcttgtctcagccatcctttacgagaagagatttggtccttacttatgccaacctgtgattgctggcttgggagatgatgacaagcctttcatttgcacgatggactctatcggagccaaagagttagctaaagattttgttgtatctggaactgcttcagaatcactctatggagcttgtgaggcaatgtacaagccagatatggaagctgaggaattgttcgagacaatatcgcaagcacttctctcatctgttgaccgtgattgtctgagtggttggggagggcatgtttacattgtaacaccaacagagattaaggagaggatcctaaagggaaggatggattgatctgcttcttctattcaagttgttttccgctgtaatccggttttaagtagtgtaaccttcacatcccggtttaattatatgatcattccttggctgaaattatgggttatgtatgaagtttgattttcctcttggataatggattatatgattttaattcgtagagttatcgaagaataacacttttaactaaaaaaaaaaaaaaagggcggccgctctagaggatccaagcttacgtacgcgtgcatgcgacgtcatagctggtcgatagtgtaa

SEQ ID NO: 118617 - DNA, 839 bp, Arabidopsis thaliana
  unsure (1)..(839): unsure at all n locations
gaacaaggcttgttctccaagacgctttttaataagctctctctcacaacgccggatctgtagacggaagatggagtgtgtattcggtcttgttgggaatggattcgccatcgttgctgctgatacatcggcggttcatagtatccttcttcacaaaaacaacgaagacaagatcatggtacttgactcacacaagcttgttgctgctagtggcgagcctggtgaccgggttcagtttacggagtacgttcagaagaatgtgtccttgtacaaattcagaaatggaatcccgttgactaccgccgctgctgccaatttcactcgcggagagctcgctactgctttgaggaagaatccgtattcggtgaatatcctgatggctggctatgacgatgagtctggtgcatcactttactacatcgactacattgcaactcttcacaaagtcgacaagggagcttttggttacggctcctacttctccctctccacgatggacaggcattaccgcagtgacatgtctgtagaagaagccattgaactagttgacaaatgcatacttgagatccggtcaagactcgttgttgcaccaccaaactttgtgatcaagattgttgacaaagatggagctcgtgattacgcttggcgtcagtccgtaaaggatgtcacaactgctgttgtctgagttggttttgtgtttggttttcagatgttatgtgtctgtgacatttgcttttgattttaagtcgggagttagtgttttgacactttttaatcgttgagcatcaatagtgtttgcgattccctnnnnnnnnnnnnnnnnnnnnnnnnnnnnnnnn

SEQ ID NO: 118618 - DNA, 981 bp, Arabidopsis thaliana
  unsure (1)..(981): unsure at all n locations
taaaaagctcttaaactattcttccagcgaccggaagaaacgaataatcggaatcgaaaaattcgaaaaaggaactgagaagaaacagatctgaagatggagtgtgtatttggtctagttgggaatggattcgctatcgtggcggcggatacatcagcagttcacagtattcttcttcacaagaacaaagaggacaagatcatgactcttgactctcacaagctcgtcgccgctagtggtgagcctggtgaccgggttcagtttacggagtatgttcagaagaatgtgtcactgtatcagtttcgtaatgggattcctttgagtactgctgctgctgctaacttcactcgtggagaacttgccactgctttgagaaagaatccatattcggtgaacatcctgatggctggctatgacaaagaagccggcgcatctctatactacattgactacattgcaaccctccacaaggttgataagggagcatttggatacggctcatacttctctctctctacaatggacagacactaccgcagcgacatgtctgttgaagaagccattgaattggtggacaaatgcatactcgagatcaggtcaaggctggtcattgcaccaccaaactttgttatcaagattgttgacaaggacggagcccgtgagtacggatggcgtatcagcactgctgatgcctaagttgttttcattgtgtttattagtccatttatgttactcggctcacatttatattctctgttgaacttcaagctccctggatattaaagttcctagataatgatgatgatatgcatgtgttgaactttttctttccttattgcgtatatgaagcaaaagatagtgcaatgtttnnnnnnnnnnnnnnnnnnnnnnnnnnnnnnnnnnnnnnnnnnnnnnnnnnnnnnnnnnnnnnnnnnnnnnnnnnnnnnnnnnnnnnnnnnnnnnnnnnnnnnnnnnnnnnnn

SEQ ID NO: 118619 - DNA, 1086 bp, Arabidopsis thaliana
ctacttcttcttcttctctgctaagcctttcctctcgacttgatacttttctccagtaagggtttgcaaagatgaagcttgatactagtgggttcgagacttccatgcctatgattggatttggctcgagcagtgatatgcttgatgagctttcttctgtaccctcgtttgatctaccccgtactaaagagtttgatggatttcagaaaaaagctaaagacatgttgaagcatgcaaaaggaacaaccactctcgcttttatcttcaaaggtggtgttatggtcgctgctgattctcgggctagcatgggaggatatatctcctcacaatctgtgaagaagattattgaaatcaatccttatatgctcggtacaatggctggaggagctgctgattgccaattctggcacagaaatcttggaattaagtgccgtctacatgagctggcaaacaagaggagaatctctgtttccggagcttcgaaacttcttgccaacatgctctattcataccgtggaatgggactttctgttggtacaatgattgctggatgggacgaaactggtcccggactatactatgtcgacaacgaaggaggacggctcaagggagacaggttttcagtcggttctggttcaccatatgcttacggtgtgctggacagcgggtacaaatatgatatgtcagttgaagaagcttccgagttagcgaggagatcaatctaccatgcgacattccgtgatggagccagtggtggagttgctagcgtgtaccacgttggtcccgaaggatggacgaaactatcaggagatgatgttggggagctacactaccattactaccccgtggcaccagctaccgcagaacaagtcatggaggaagcaacagccgaataaaaatcctgtttagttttctaatcgttcactccctttcttgttgttgcattttgtggtagtatatactgagttgtctctagctgaagctttggtattctattttactgatctgaaatgttgctcgcggattattctctataagattctctttttctgcaatcacaccccccccccccccccttcttctctt

SEQ ID NO: 118620 - DNA, 1202 bp, Arabidopsis thaliana
  unsure (1)..(1202): unsure at all n locations
tgattctgccnnnnnnnnnnnnnnnnnnnnnnnnnnnnnnnnnnnnnnnnnnnnnnnnnnnnnnnnnnnnnnnnnnnnnccacgcgtccgcccacgcgtccgcaaaaccaaaaccatcagatcttaagaagaagaacctaaagctcactacgatatttttcgagaatatgacgactttttctgttccgattgataacggagattctatgaagatcgcagaagaagaatcacaaagaacactgtacccatatgttactggaacttcaattgttgcaatcaagtacaaagatggggttttgatggcttctgatatgggaggttcatatggatcaaccttaagatacaagaacatcgagagagtgaaggctattggtaagcattctcttcttggtgccagcggagaaatcagcgactttcaggagattctccgttatcttgatgagctcaccctgaatgataacatgtgggatgatggtaactctttgggaccaaaagagattcacaactatctgacccgtgtgatgtacaaccgtcgcaacaagtttaaccctctgtggaacactctcgtccttggaggcgtcaaaaatgggaaaagttaccttggaatggtgtcaatgattggtgttagttttgaggacgatcatgttgccactggatttggaaaccaccttgctaggccaattcttcgtgatgagtggcatgcagacctgagttttgaagatggtgtcaagctacttgagaaatgtatgcgtgtgcttctttaccgtgacagatctgctattaacaagcttcagatagcgaagatcacggaagagggcgtgacggtctcacagccatactcattgaagacatactgggaattctcgtcattccacaacccaactgctggtgctgcaggctcctggtaagaagccaagcaaccacatcggctggcgatcttttaaggaagcttttattttattttatgtgatgttgttaaacactttgtactgtagttgttttactattaaacttggtggtttctttctgacagtccagagtttagatcaatgaggatttataaaaagttctggatatctttgggtagtaatccatacctttgttcattgttaatcgttctccaaaaagaaaaaaaaaaaaannnnnnnnnnnnnnnnnnnnnnnnnnnnnnnnnnnnnnnnnnnnnnnnnnnnnnnnnnnnn

SEQ ID NO: 118621 - DNA, 1048 bp, Arabidopsis thaliana
  unsure (1)..(1048): unsure at all n locations
gccnnnnnnnnnnnnnnnnnnnnnnnnnnnnnnnnnnnnnnnnnnnnnnnnnnnnnnnnnnnnntttttttttccattccaaggcttcagtttcacttcatcacactctctgcaaaaaaacaaaaatgagctctcaaatctgcagatctgcttccaaagcagccaaatctcttctctcttcagctaaaaatgctcgcttcttctctgaaggacgagccattggtgctgcggcagcggtttcggcgtcaggaaaaattcctttgtatgcatctaactttgcaagatcatcaggttctggtgttgcttctaagagttggatcactggactcttagctcttcctgctgcagcttatatgattcaagatcaagaggttcttgctgctgagatggaacgaacttttattgctatcaagcctgatggtgtgcaaagaggactgatatcagagatcatttctcgattcgaacgcaagggattcaagctagttggtatcaaagtcattgttccttctaaagatttcgcacaaaagcattaccatgatcttaaggaaagacctttcttcaatggtttgtgtgacttccttagctctggtcctgttattgccatggtctgggaaggagatggtgtgatcagatacggacgtaaactgattggagccactgatcctcagaaatctgagcctggaacaatccgaggagatcttgcagttactgttggcaggaacataatccatggaagtgatggaccagagactgcaaaggatgagatcagtctgtggtttaagcctcaagaacttgtttcttacactagtaactctgagaagtggctctatggtgacaactaaatccctcttcctcttgtcttttgaaatcaaatcacattggtttttcttttcttttcttacccatacaataaaaacaagaaacagttgttacggatacaaacacattccgggttttgatttttccccggtgaactcagtaaacagagcataagcaataagtatgggatgtttgaatctatcttgccccattcttctctaacccagac

SEQ ID NO: 118622 - DNA, 1390 bp, Arabidopsis thaliana
  unsure (1)..(1390): unsure at all n locations
atgatactccaagctccctacgactcactattnggaaagctggtacgcctgcaggtaccggtccggaattcccgggtcgacccacgcgtgcgaacccactgcctctttcccggccagtcctctctttcgcttctaaaaaaaaacctaacaacctctcttctctcttcctcgttcaacaacaatggagttctggggagttgcggtgacaccaaaaaacgctactaaggtgactcctgaagaagacagccttgtccacatttctcaggcttcacttgactgcacagtgaaatctggagaatctgtggttttgagtgtgactgttggtggggctaaacttgttattggaacactttcacaagacaagttccctcagattagctttgatttggtttttgataaagagtttgagctttcacacagcggtaccaaagcaaatgttcatttcattggctacaaatcccccaacatcgagcaggatgacttcactagttcggatgatgaggatgttcctgaagctgttcctgctcctgcccctactgctgttactgccaacggaaatgctggagcagctgttgtcaaggctgacacaaagccaaaggccaaacctgccgaagtgaagcctgcagaagagaagcctgaatcagacgaggaagatgagtctgatgatgaagatgagtctgaagaggatgatgactctgagaaaggaatggatgttgatgaagatgactcagatgatgacgaggaggaggattctgaggatgaagaagaggaggagactcctaagaagcctgagccaatcaacaagaagaggccaaatgaatctgtatccaaaacacccgtctctggaaagaaggcaaaaccagcagcagcaccagcttctactcctcagaagacagaagagaagaagaaaggaggacacaccgccacaccacacccagctaagaagggtggaaagtctcctgtgaatgctaaccagagccccaagtctggaggtcaatcatccggtggtaacaacaacaagaagccattcaactcaggcaaacaatttggtggttccaacaacaagggttctaacaagggcaagggaaagggtagagcttaaggacgtggatcaaggagaggttttgggttttcgagtagatgatgaaaacacttggaagtgtggttttggatttttatcttattttattagtataacttgttatcggatgagctattttgagtatttgcaatttctactttcctatgtaattcagtatatgaatatttgctgaaatgagaaagaagactcgaattgcaaacaaaaaaaaaaaaaaagcgcgcccgctctagaggatccaagcttacgtacgcgtgcatgcgaggtcatagctctagtatagnnnnnnnn

SEQ ID NO: 118623 - DNA, 891 bp, Arabidopsis thaliana
  unsure (1)..(891): unsure at all n locations
gatacttccnnnnnnnnnnnnnnnnnnnnnnnnnnnnnnnnnnnnnnnnnnnnnnnnnnnnnnnnnnnnnnnnnnnnnnnnccacgcggtcgcggacgcgtgcgcccacgcgtncgctgcagaagagaagcctgaatcanacgaggaagatgagtctgatgatgaagatgagtctgaagaggatgatgactctgagaaaggaatggatgttgatgaaaatgactcanatnatnacnatgangaggggggtggaggatnaanaagaggaggagactcctaagaaacctgagccaatcaacaagaagaggccaaatgaatctgtatccaaaacacccgtctctggaagaaggcaaaaccagcagcagcaccagcttctactcctcaaaagacagaagagaagaagaaagggggacacaccgccacaccacacccagctaagaagggtggaaagtctcctgtgaatgctaacccagagccccaagtctggaggtcaatcatccgggtggtaacaacaacaagaagccattcaactcaggcaaacaatttggtggttccaacaacaagggttctaacaaaggcaaaggaaaaggtaaagcttaaggacgtggatcaaagaaaggttttgggtttttgagtaaattaataaaacccctggaaaggtgggtttggaattttattctaatttaataggaaaacctggtaacggaataaccaattttaggaattgccaatttcaccttcccaaggtaatccggaaaataaaaattggttaaaataaaaaaaaagcctcgaatgccaaccaaaaaaaaaaaaaaaggccgcccgctcaaaagaatccaagctaaggaaggggggcatgcaacgtcatagttcttctaaagtgtcacctaa

SEQ ID NO: 118624 - DNA, 1693 bp, Arabidopsis thaliana
cgcgtccgaaacactacattttcacatcaaaatcacattccttccatggccttcttctccatgatctccattctccttggctttgttatctcctccttcatcttcatcttcttcttcaagaaacttctctccttctccagaaagaacatgtctgaagtctccactctcccctctgttccagtggtaccagggtttcctgttattgggaacttgctgcaactaaaagagaagaaacctcacaagactttcactagatggtcagagatttatggtcctatttactctataaagatgggttcttcttctcttattgtcctcaattctactgagactgccaaagaggccatggtgacgcggttttcgtctatctcaacgaggaagttgtcaaatgcgttgacagtccttacttgtgacaaatctatggttgctactagtgattatgatgatttccacaagttggtgaaacggtgtctcttgaacggtcttttgggtgctaatgcacagaaacgaaaaagacattacagagatgcactcattgaaaatgtgtcttccaagttgcatgcccatgctagggaccatccacaagaacctgtaaacttcagagctatatttgagcatgagcttttcggtgtagcattgaagcaagcttttgggaaagatgtggaatccatttatgttaaagaactcggtgtgactttgtcgaaagacgagatcttcaaggttttagtacatgacatgatggaaggtgcaattgatgttgattggagagacttcttcccatacttgaaatggattccaaataaaagttttgaagcaagaatccagcaaaagcataaacgtagactcgcggtgatgaatgctctgattcaagatcgactgaagcagaatggttcagaatcggatgatgattgctatctcaacttcttgatgtcggaagcgaaaacactaaccaaggagcaaattgctatcttggtttgggagacgattatcgagacagctgacactactttggttacaactgaatgggccatctatgagctcgctaagcatccaagtgtccaagatcgtctgtgtaaagaaatccaaaatgtctgcggaggagaaaagttcaaagaagagcaattgtctcaagttccttatctcaatggagtattccatgaaacgcttaggaaatacagtcctgctcctctagtccccattcgctatgcccacgaagatacgcaaatcggaggctatcatgtccctgcaggaagtgagattgcaataaacatctatggatgcaacatggataagaagcgttgggagagaccagaggactggtggccggagcggtttcttgatgatggcaaatacgaaacgtcggatcttcacaagacaatggcgtttggagcgggaaagagggtttgtgctggtgctcttcaagcatctctcatggcaggcattgccattgggaggttagtgcaagaattcgagtggaagcttagagacggtgaagaagagaatgtggatacatatggcttgacctctcagaagctttatcctcttatggctattatcaatccaaggcgttcttaagacagaaatctcttctttcttttgttagtttttaaccttgtatcaacttttatttgtaacaaatgctgttttgtagtactatttatgttttactgtgttatattttactatcctctga

SEQ ID NO: 118625 - DNA, 1061 bp, Arabidopsis thaliana
cccacgcgtcatgaaatctctgtagtttttttttgttcctttcttaaatttcgaaagaaagacatttattaaaccaaaataactctttagatcattgcaaggaaaaatgttgaaaagtgcaagtccaatggcattctacgatatcggagagcagcaatactctactttcgggtacattttaagcaaacctgggaacgcaggagcttacgagattgacccttcgatcccaaacatcgacgatgcgatctacggctcagatgagttccgtatgtacgcttacaaaatcaaacggtgtcctcgtactcgtagccacgactggacggagtgtccctacgctcaccgtggcgagaaagccacacgccgtgatcctcgccgttacacttactgtgcagtcgcatgcccggctttccgaaatggcgcatgccaccgtggcgactcatgcgaattcgcacatggcgtattcgagtactggctccacccggcgcgttaccgaacacgcgcatgtaacgccgggaacttgtgtcagaggaaagtgtgtttctttgcccacgcgccggagcagctaaggcagtctgaaggaaagcacaggtgcaggtacgcatataggccggtgagggctagaggtggtggaaacggcgatggagtgacgatgagaatggacgacgagggttacgacacgtcacggtctccggtgagaagcgggaaagatgatttagatagtaacgaggagaaggtgttgttgaagtgttggagtcggatgagcattgtggatgatcattatgagccgtccgatttggatttggatttgtcacactttgattggatctcagagttggtcgattaaatttgggaaatcaaagcagagaacaaaagaaacccgataaataaagtggattttgttaaaatccacaagatcaagattcaagatgagagatcttgtcatgtatatggtaaatttaattgtaatgatttattgcaatgtcgcaaaagaagttacttctctttgcatgtaaacagattcttgatcttctataagtctttgtattaaaaaaaaaaaaaaa

SEQ ID NO: 118626 - DNA, 1887 bp, Arabidopsis thaliana
  unsure (1)..(1887): unsure at all n locations
nnnnnnnnnnnnnnnnnnnnnnnnnnnnnnnnnnnnnnnnnnnnnnnnnnnnnnnnnnnnngtcgacccacgcgtccgatcggctttgcgtcttttgagctctctccgccgtgatcaatctccgtgaatcgccgccactctctcggtttcaatggctgatctcgatgttcctcctcaagttcctcaaagtaaaactagagaccttgacaagcttcttctccgtcatgggaatctcgttgaccccggcttcgtacccggacccggcctgagggatgacataagggattatgtgagaatcttggtgattggtgcgggtgggttgggttgtgagcttctcaaggatttagctctttctggttttcgtaatctcgaagtgattgatatggaccgtattgaggttactaatctcaatcgccagttcctgttcaggattgaagatgtaggaaagcctaaggcagaggtagcagcaaagcgtgtaatggagagagtgagtggagtagagattgtgccgcatttttcacgtatagaagacaaagagattgagttttataacgattttaatatcattgctcttggtcttgattctatcgaagctcgcaaatacatcaatggggtagcttgtgggtttcttgagtataatgaagatgatactccgaaaagagaaacgatcaagccaatggtagatgggggaactgaaggtttcaagggtcatgctaaagttatcttgcctggagttacaccctgttttgagtgcactatttatcttttcccacctcaagtgaagtttccgttgtgcactcttgcagaaacccctaggaatgcagctcattgcattgaatatgctcatcttattcagtgggaaacggttcatcgtgggaaaacctttgatcctgatgaaccagaacatatgaagtgggtttatgatgaggctatcaggagagctgagctttttggaattccaggtgtcacatactctctcacacaaggtgtggttaaaaacataataccggcgattgcttccaccaatgcgataatatctgcagcttgtgcacttgaaaccttgaagattgtgtctgcatgcagcaaaacacttgtaaattatttgacgtataacggtggagagggtctttacactgaagtgacaaagttcgagagggacaccgaatgtcttgtatgtggtccgggcattctgattgagctggacacctcagtcactttatcaaagttcattgagatgcttgaagatcacccgaagcttctattgtcaaaagcaagtgttaaacagggggaaaacactctctacatgcaggcacctccggttctagaagagtttcacagaccaaagctaagcaagccgctttatgacctcatgggaagagtccagaaggacactatccacgtgtttggacaaagagccctcaagaacaatgagaaagagtcgtgcacaacgaaggtaagagttgtattcaaaggagccgatggtgttgcagacatggatacagccattggagcatgaaaaccgacagagaaaccctttgattgcagcttttagatccattgagataattgggcagcttgactagtccagttcttattttttgtaccttttttgtttgtatgtcgtttaatagctgtgactgcagaattttactgcttggggaacaaaaaatgactccaaacagtgagtttatatgattattcttaatctcggattgttcttaatctcaaagatgtgtcttgagattgttttcttaacagttcatatgatcaggattctacctgcgatttcagataaaaaaaaaaaaaaagnnnnnnnnnnnnnnnnnnnnnnnnnnnnnnnnnnnnnnnnnnnnnnnnnnnnnnnnnnnnnnnnnnnnnnnnnnncaa

SEQ ID NO: 118627 - DNA, 834 bp, Arabidopsis thaliana
ctggacacctcagtcactttatcaaaggtccttcctctcgcattatcatggcattgtcttttttggaccacgattatcttgattttcatactcacgtattgcttcattcatgctaaattatcttctctattactatctcctcgcttttccaggcttggttttagctaaatctcaatttactcgtgctttgtttgtccatgtaaatctgcgtctcaattctttaccatttatttgttcatgttttgtttttctttgtcctagttcattgagatgcttgaagatcacccgaagcttctattgtcaaaagcaagtgttaaacagggggaaaacactctctacatgcaaggcacctccggttctagaagagtttcacagaccaaagctaagcaagccgctttatgacctcatgggaagagtccagaaggacactatccacgtgtttggacaaagagccctcaagaacaatgagaaagagtcgtgcacaacgaaggtaagagttgtattcaaaggagccgatggtgttgcagacatggatacagccattggagcatgaaaaccgacagagaaaccctttgattgcagcttttagatccattgagataattgggcagcttgactagtccaggttttattttttggaccctttttggttggaagtcggttaataactgtggctgcaaaattttactgcctggggaaccaaaaattgcttccaacaattaagttcggccccggaattcttcaagcccggggattccctaagtttaaaacggcccccccccccggtgaaggttccggcttttgtccccttagtgagggttatttcgagctgaa

SEQ ID NO: 118628 - DNA, 1160 bp, Arabidopsis thaliana
gttattttgacgtaaatcgaatatgctccctatatgtttctcagtctctttctccgattgatacatctctcgttactctcgaaataaagctcatcatctgaggaaattcatcaatttgccggtgactttagttcaattccgaccctccgatgggctcgacgttcagagatcggacggtggagcttcattcactgtcccaaacattgaagaagatcggggcaatcccgtccgttcatcaagatgaagatgatccggcatcatccaaacggtcgtctccgggatccgaattcaataagaaggcttcccggatcgggttaggtattaaggaaacgtcacagaagatcacgaggctcgctaaattggcaaaacaatcgacgattttcaatgaccggactgtggaaatacaggagttaactgtgttgatcaggaacgatatcacggggctgaatatggctctctcggatttgcaaacccttcagaacatggagcttgctgatgggaactattcacaggaccaagttggtcattacactgctgtttgtgatgacttgaaagccagacttatgggagctactaagcagcttcaagatgttctaactacgagatcagagaacatgaaggctcatgaaaaccggaaacaactcttttccacaaaaaatgcagtagatagtccgcctcagaataatgcaaaatctgtacctgagcctcctccttggtcaagttcatcaaatcctttcgggaatttacaacaaccactattacctccattaaatactggagctccgccaggtagccagctcagacgcagatccgcgatcgagaatgctccttcacagcaaatggagatgtccttgttgcagcaaacagtcccaaagcaggagaactatagccaaagtcgagcggttgcacttcacagtgttgaatcaagaataacagagctcagtggaatattcccgcagctagctacaatggtcacacaacaaggagagctagcaatcagaatcgatgacaatatggatgaatcgttagttaatgtagagggagcacgtagcgctcttctgcagcatctcactcgaatttcgtcaaatagatggctcatgatgaagatctttgctgttatcatcttgttcctgattgttttcctcttctttgtggcttaa

SEQ ID NO: 118629 - DNA, 605 bp, Arabidopsis thaliana
gagaatctctcaattctcttttgtcgatttcgcagtagaagagtcctttcgccgtctccgagaaactcgttgcagcgtcacgaccagttggagaaaatgtcttctagaggaaaaaggaaagacgaagatgtcagagcatcagatgacgaatctgaaacccacgcgccggctaagaaagtcccaaagccagcagacgattccgaccagtctgacgatatcgtcgtctgcaacatatctaagaataggagagtctctgtaaggaattggaacgggaagatttggattgacattcgtgagttctatgtcaaggacggaaagactttgcctggcaagaaaggtatctctctaagcgtggatcagtggaacactcttcgggaccacgcagaggatatcgagaaggccctctctgacctttcttaggttttaaaacttgtatcattggttgtacgtctattagaatatggctcagttgttttggttgtttttgtagaacaacaccatgttctgctagtgtaagctgcttcaaattagttggtgtatggaatctttcacttttggttcagacaagctttggttggtattaagaatataatgattgctctttt

SEQ ID NO: 118630 - DNA, 812 bp, Arabidopsis thaliana
gttccaaggaaaaaagaatcgaaaaaaaccttgttaataaaagaaaccccagtgttattgggtataatgacaaaaaaatccccaagagtttccaagggtttcgaaaacctcgttttgggaaaaaacttagcaattcggctctgtcggaaaaaattctcaacaaaagcattttgtaacaagcggtcgtgaaaaaatttcctcgcagaaaaaaagagcgatagaatataaaacttcacaagtgaataagaaagaagaagatgtagataaggattgtggtaaaggaaacatagagtttgatgatgacggcgatcttatcatttgcaggttatcggataagagaagagtgacgattcaggaatttaaagggaagagtttggtttctatcaaagagtattacaagaaagatggcaaagaacttcctacttctaaaggaataagcttaacagatgaacaatggtcaaccttcaagaaaaacatgccagccatcgaaaatgctgtcaagaaaatggaatcgcgtgtctgaatgaagaacatgtgatactttatctctaaacatgtgtaagtgtcttcttaagtagttagttgttcgaatgttcaggtctctcatgtaactgtcttttttattttcttctctcgaattggtcgttatgtgtctcgtactgagttgtatccatttcgctttagccgattccaaaaactctggaccaaagtacaaaaccatctgatccgatttcaaatttcaaaaaaaaaaaaaaaaggtcggccgctctagaggatccgagcttacgtacgcgtgcatgcaacggcaagct

SEQ ID NO: 118631 - DNA, 846 bp, Arabidopsis thaliana
tcaatacgactcaccttagggaaagctagcgtacgcctgcaggtaccggtccggaattcccgggtcgacccacgcgtgcggacgaaggagaagatcgagaaaactgtgatagagatactcagtgaatcggatatgaaagagataacagagttcaaggttcgtaaactcgcttcggagaaactcgcaatcgatctctcggagaaatctcacaaagcatttgtacgaagcgtcgtggagaaattcctcgacgaagagagagcgagagaatatgaaaactcacaagtgaataaggaagaagaagatggagataaggattgtggtaaaggaaacaaagagtttgatgatgacggcgatcttatcatttgcaggttatcggataagagaagagtgacgattcaggaatttaaagggaagagtttggtttctatcagagagtattacaagaaagatggcaaagaacttcctacttttaaaggaataagcttaaccagatgaccattggtcaaccttccagaaaaacatgccagcccttggaaaatggctgtcaagaaaaagggatcccgtgtctgaatgaaaaacatgtgatactttatctcttaaacatgggtaagtgttcttcttaagtagttagtttgttccaatggtcaaggtcttcttatggaaactggcccttttttaaatttacattcttctttcgaaattaggggccggttaatggtggtccttcggcacctggagggttggtgattccccattttccggcctttttaacccggtatttgcccaaaaaaaacctctttgggaccccataagattccacaaaaaccccttttcgtgaatcccggg

SEQ ID NO: 118632 - DNA, 578 bp, Arabidopsis thaliana
  unsure (1)..(578): unsure at all n locations
ccacgttaaatcgcttccagtgtcgaagattagtgatagatcgttctttggtgtcccgaggccgaccgcacgatgttagttacctgaaccgagtgtgcttccgtctttagccggtagatccgttgacttgctttcactgacgtgatctgttgcgagtttcttcgatagttttgagtggattgagtttacgcgagcctggtcgagtcttaggatctcgacatggtctggactcgtggccttgccattgtttagacgcgaacacgtgccgtgtctatgcgtcacgtgcagtgaagactttgtagtagacgctctgggagaaagaacacaagatgatgatgatgaagggaggagagagctgacttggatagtatgagaatcagtctctctttcttgagctccatcgttacaacccaaattgagacatatacaaaggattattatgatattcaacagattcctatttatgctcattttgctctcttaattccggacgcgtggnnnnnnnnnnnnnnnnnnnnnnnnnnnnnnnnnnnnnnnnnnnnnnnnnnnnnnnnnnnnnnnnnnnnnnggagtatcat

SEQ ID NO: 118633 - DNA, 1663 bp, Arabidopsis thaliana
cttatcaattcatctcacactcttcttcactctcttctctctacacacacacacacacacacacacaaaatggattcttcgaatgttgaagaaaacctaaacccagaaacaaaatccgcagaagaacaaaacccacttgccattttccattcttctctaccaatcgcatctctttctctgaccttgttcccatcctcgactcaatttctcaaattgtttgctcatcatccaaacaaggttaagatccctacgcaggcttcttctctcactcatctctctctttcttctgtctctccttttccttcttccagaatctctttcaaatccaccatcgctgctaaccctcttcaatcccctctctccatcgtccctcgtcgtcccgttgatccttcctccgccgccgctctccgccgtgctgctgtcgtctggttccgcaatgacctccgtgtccacgacaacgagtgtctcaactccgccaacgacgagtgcgtctccgttttgcccgtttactgcttcgaccctagagattacggcaagtcctcttccggcttcgacaaaacggggccttttcgtgcccagtttctgattgagtccgtttcggagctccggaagaatctccaagccagagggtcgaatctagttgtccgtgtcgggaaacctgaagctgttttggtggaattggctaaggagattggagctgacgcggtttatgctcacagagaagtgtctcacgacgaggttaaagcggaagggaagatagagaccgcgatgaaggaggaaggcgttgaagtcaagtatttctggggaagcactctctatcatttggatgatttgcccttcaaaattgaagacttgccgtcaaattacggagctttcaaggataaagtccagaaattggagattaggaagactatcgcagcgcttgatcaattgaaaagcttgccctctcgaggagacgttgagcttggcgatattccttctctcctggatcttggcattagccccactcctaggactagccaggaggggaaaccgacaatggttggaggagagacagaggcgttgactagactaaagagctttgccgcggattgtcaggctcggttgagcaagggaaaccagaaaggaggcaacaacagtgtctttggtgcaaacttctcttgcaagatatcaccttggttagccatgggaagcatctctcctcgttccatgttcgatgagctgaagaaaacaatctccgcatcaaccacctccacaactccaaggaacggaccgggagatacaggactcaactggttaatgtatgagttgctatggagggatttcttcaggtttataaccaagaaatacagctcagcgaagacgcaggtcgaggctggtccggctacagcctgtaccggtgcctttgcttaaacatttgaaaactttcaggtgaccggaaaagttagaagcgacctgtttctttgccctactctggtgtatggtggattaatttgctatccggacaggactttactgctctcttttgaaacttgagtgtcaggagaataaaatctaagcttctttttttggctcaatcaagttgtccgttccctgttctaaacatttcggatactcattccataaaaagtctctacaatttgagacgctctcctttgtggtt

SEQ ID NO: 118634 - DNA, 2992 bp, Arabidopsis thaliana
  unsure (1)..(2992): unsure at all n locations
gcggccgctatggagaggccaagagcccctccatctcctttgaatgatgcggagtcattaagtgaacgtagatctcttgagattttcaacccttcgagtggaaaagagacacatggatcaacttcttcttcttcaaagcctcctcttgatggcaacaacaaaggtagtagtagtaagtggatggagttttcaagattgccgctaagattacagaaagaacccgctgaatggggattgtcagctgttaagccggattcgggagacgatggcattagtttcaagctgtccagtgaagtggaacgaagcaagaacatgtctaggaggtcatccgaagaatctacatcttctgaatcaggggccttccctaaagtatccgaggagctcaaaactgctctatccacgttgcagcagacttttgttgtctctgacgctacacagcctcactgtcccatagtctatgccagcagtggattctttaccatgactggttattcttccaaggaaattgttggaagaaactgccggtttctgcaagggccagacaccgacaagaatgaggttgccaaaatcagagattgtgtcaagaatggaaaaagttactgtggaaggctgttaaactacaaaaaggacggaactcccttctggaatcttctcacagtcactcctatcaaggacgaccagggcaataccatcaagttcattgggatgcaggttgaagttagcaaaaacacagaaggggtaaatgataaagcattgaggcctcatggattctccaaatccttgattcgatatgatgctcgccagaaggagaaagctttggattccatcacagaggttgtgcaaactataagacatcgtaagtctcaagttcaggaatccgtgagcaatgacactatggtaaagcctgatagttctactacacctacacctggtagacaaacaagacagtcagatgaggcttcaaagtctttcaggacacctggacgtgtttctactccaacggggtcaaagctcaaaagctcgaataacaggcatgaagatcttttacgtatggaacccgaagaattgatgttgagcacagaagtaatagggcagagggacagttgggacctatcggatagagaaagggatatacgccaagggattgatctagctaccactcttgagcgcatagagaagaatttcgtcatcagtgatcctcgtctccctgataatcccattatctttgcatcagacagctttcttgaattgacagagtattcacgcgaggaaatattggggagaaattgtcggtttcttcaggggccagagacagatcaagcgactgtccagaagataagagacgcaatcagagatcagagggagattactgtgcagttgataaactacactaaaagcggaaagaaattctggaactttttccacttgcaacctatgcgtgatcagaagggagagcttcaatacttcatcggtgtgcagcttgagggaagtgatcatgtagagcccctccaaaatcctttgtctgagagaacagagatggagaactcgaaagtggtgaaagctccggcaacaaatgtagatgaagctgtcagagagcttccagatgctaatacgcggcccgaaggcctgtgggcttcacactcgaagcctgtctatcctctgcctcacaataaggagagtacgtcctggaaagcaataaaaaagatccaagcgagtggagacacagcgggactacatcatttcaaaccaataaaaccgttgggctctggtgatactggcagtgtccatttggttgagctgaagggcacgggtgaactatatgccatgaaagcaatggagaaaacaatgatgttgaatcgtaacaaggctcaccgagcgtgcatcgaaagggaaatcatttcccttctggatcatccattccttcctactctctacgcttcttttcagacctctacgcacgtctgtttgattacagacttctgcccaggtggagagttgtttgcactacttgacagacaacctatgaaaatattgacagaagactctgcaaggttctatgcagcagaggttgttatcggcttagaatatcttcactgcttaggaattgtatatcgagacctgaagcctgagaatatactgctcaagaaggatggacacatagtattggctgactttgatttatcattcatgacgacctgcacaccccagcttattattccagctgcacctagcaaacgaaggagatccaaaagtcaaccactacccacatttgttgcagaaccaagtacccagtcaaactcgttcgtaggaactgaagaatacattgcgcctgagataatcacgggtgctggtcatacaagtgctattgattggtgggcactgggtatcttgttgtatgagatgctttatggtcgcacacctttcaggggtaagaataggcaaaagacatttgccaacatcttgcacaaagatctcactttccccagcagtatccctgtgagtcttgtaggtagacagttgatcaacacgttgttaaatagagatccgagcagtcggttaggatccaaaggtggggcaaatgagataaagcagcatgctttctttcgcgggatcaattggcctctcatacgaggcatgagtcctccaccactggatgcaccgttgagcataatcgaaaaagatccgaatgccaaagatataaagtgggaagatgatggagtgcttgtgaattctacggacttggacattgacctcttctaatcctattcttcctctctctgcctttgattctcaaattatgcaaaactcttcttctcaataaaagccaaggtgttgttgtacttgtagttgcttaaatataaacggctcttttcatgtttaaaaaaaaaaaaaaaaaaacaacaattcannnnnnnnnnnnnnnnnnnnnnnnnnnnnnnnnnnnnnnnnnnnnnnnnnnnnnnnnnnnnnnnnnnnnnnnnnnnnnnnnnnn

SEQ ID NO: 118635 - DNA, 510 bp, Arabidopsis thaliana
  unsure (1)..(510): unsure at all n locations
aaagattgttcatatcaaatagttttcgttaattcactctacaaaggaaaataatgagctcgtcgccgttatcttcatctctctttcatcctctgtcgaccttgtcgactccattgccatggtcggagacagaacctctgtttcaatcggaagcaacaacctttcgttgtcagagccgcaaaacttcctgaaggggtgatagtgccaaaagcacaacccaaatctcaacctgcgtttctgggattcacacaaacagctgagatatggaactcacgagcttgcatgattggtctcatcggtactttcatcgtcgaactgattctgaacaagggaatacttgaactgatcggtgtagagattgggaaaggactcgatctttcctctataatgtatatcactgtttgtgttctttccaacaaaaacatctcttatgaaatgtaaaattctcaagtttattcacagaaaacgggcatttttgaaaagttgggtntttnggtccggtgncggntc

SEQ ID NO: 118636 - DNA, 1640 bp, Arabidopsis thaliana
accaccacaacctcgcaagtaactctcatcctcgctgtactgatcagaagaaaaaactctgaaagatgtcgaccggaggaccccaaaaattagaagcacaaggaggaaaagaaggcaaagaatgggatgatggagccgaacacgatggtgtgacgaagatatacgtagcagctggtggtcttggaattgaacaaatcagattcgattatgtaaagaacggacaaccaaaggaaggatcttttcatggtgtgaagggtagaagtactatttctacgattgagattagccatccagccgagtatcttatttccatggagggttggtacgactctaccaatatcattcaaggaattcagtttaaatccaacaaacacacttcccagtactttggatatgaattttttggagatggtacacaattttcacttcaagttaatgacaacaagatcattggctttcatgggtttgctgattctcatctcaattctgttggggcgtattttgcacccatctcttcctccttgactactactcccaacaaagtggaagctcaaggaggaaatggtggagaaacattcgacgatggtgtttttgatcatgtaagaaaggtttatgttggtcaaggtgagtccggtgtagcttatgtcaaattcgaatatgagaaagatgggaaaagagaaacaagagaccatgggaaaatgacattgttaggaacagaggagtttgaggttgattcagatgattacatcacatcaattgaagtttctgtcgacaaagtctttggttataacagcgaaatcgtcactgctcttgtgttcaagactagtaagggtacaacctcaccgccttttggaatggtgactgagaagaaattcgaacttaaagatggtaacggaggaaaacttgccggattccatgggaaagctagtgatgttctttatgctcttggtgcctatttcgctccatcgacaacttcgactactccatctactaccaagaagctacaagcaagaggtggtaatggaggagcttcttgggatgatggtgtttttgatggtgttagaaagatacttgttggtcaaggaaacgatggtgtagcttttgtcacgtttgagtacaacaaaggctctcaagcaatcctcggtgatggtcatgggaagaaaacattacttggaactgaaacgtttgagcttgattatccaagtgagtacatcacttcagtggaaggttactatgataaaattttcggtgttgaagctgaagtggtgacgagtctaatgttcaagactaacaagagaacgtctcagccgtttggaatgactgctggggaacatttcgagcttaaagaagacggttacaaggtcgttgggttccatggaaaagcgggtgatttggttcatcagatcggagtccatatcgtgcccattttcaccaattacagagttgctatttaggtttttttcttctgatgattccgtaaaataaggtccatggaccatgcatgcttatggattagggtgtgtgttttagcgtcaatgcttctatgcgaacatgtaatgttctgcattcatgtgtcttatcatcacttgtcgattttaataaaggatgtttcttttttatctcaaaaaaaaaaaaaaaaa

SEQ ID NO: 118637 - DNA, 724 bp, Arabidopsis thaliana
  unsure (1)..(724): unsure at all n locations
nnnnnnnnnnnnnnnnnnnnnnnnnnnnnnnnnnnnnnnnnnnnnnnnnnnnnnnnnnnnnnnnnnnnnnnnnnnnnnnnnnnccacgcgtccgcccacgcgtccgcccacgcgtccgcggacgcgtgggcaaaggctctcaagcaatcctcggtgatggtcatgggaagaaaacattacttggaactgaaacgtctgagcttgattatccaagtgagtacatcacttcggtagaaggttactatgacaaaattttcggagttgaagctgaagtggtgacgagtctaacgttcaagactaacaagagaacgtctcagccgtttggaatgactgctggggaacatttcgagcttaacgaggacggttacaagatcgttgggttccatggcaaagctggtgatttggttcatcagatcggagtccatgccgtgcccattttcaccaattacagatgtgttttctaggtttctttctctgatgattccgttaaataaggtccatggaccatggttatggatttgtgtgtgtttcactgttttagtgtcaatgctttatgcgatcatgtgatgttatgccttcatggtatttgatcactaataaaggatttttcttgtcaatctcaaaaacaaaggcaaccgctctagaggatccaagcttacgtacgcnnnnnnnnnnnnnnnnnnnnnnnnnnnnnnnnnnnnnnnnnnnnctaatcagaatatct

SEQ ID NO: 118638 - DNA, 634 bp, Arabidopsis thaliana
tcggaacatatgagtttgatgttgagtctgatgattacatgacatcaattggagtttctgtcgacaatgtctgtggttttaagagtgaaatcgtcacttctcttgtcttcaagacctttaagggaataacctcacaaccttttggaatggagactgagaagaaattggaacttaaagacggtaaaggaggaaaacttgtgggattccatgggaaagctagtgatgttctttatgctcttggcgcttatttcgctccaacaacaaattcaactacgccatcgactccttctacatctaagaaactacaagcaagaggtggaaatggaggagcttcttgggatgatggtgtttttgatggtgttagaaagatacttgtaggtcaaggaaacgatggtgtagctttcgttacgtttgagtacaacaaaggctctcaagcaatcctcggtgatcgtcatgggaagcaaacattacttggaactgaaacgtttgagcttgattatccaagtgagtacatcacttcggtagaaggttactatgacaaaattttcggagttgaagctgaagtggtgacgagtctaacgttcaagactaacaagagaacgtctcagccgtttggaatgactgctggggaaca

SEQ ID NO: 118639 - DNA, 543 bp, Arabidopsis thaliana
attccttgctatcactatccacaaactcgcaagttactctctcattcctcatcgtaccctctttactcaggtattttctgaagttaaaagatagaaataatgtctgaaaaggtgggagcgatgggtggtaacaagggtggagcattcgacgatggtgtttttgatggtgtgaagaaagtaattgttggaaaagacttcaacaatgtaacttatatcaaggttgaatacgaaaaggacggaaaattcgaaattcgtgaacacgggactaatcgcgggcagctaaaagagttttcagtggattatccgaatgaatatatcacagccgttggtggaagctacgacactgttttcggttacggatcagcgttgatcaagtcattactcttcaaaacctcttatggaagaacctctccaatccttggtcacacgacattactatggaatccagctgggaaagaattcatgctcgagtccaaatatggaggaaagcttcttggtttccatggacgttctggtgaagctcttgatgccattggacctcac

SEQ ID NO: 118640 - DNA, 793 bp, Arabidopsis thaliana
caaactcgcaagttactctctcattcctcatcgtaccctctttactcaggtattttctgaagttaaaagatagaaataatgtctgaaaaggtgggagcgatgggtggtaacaagggtggagcattcgacgatggtgtttttgatggtgtgaagaaagtaattgttggaaaagacttcaacaatgtaacttatatcaaggttgaatacgaaaaggacggaaaattcgaaattcgtgaacacgggactaatcgcgggcagctaaaagagttttcagtggattatcctaatgaacatattacatcggtcgagggaacaatccatggttaccttccgcccctgaccggtttacgacatcaaaaggaagaacctcccctgtttttgggaatgtggtcggtagtaaatttgtgttcgaagaaacaagttttaaacttgttggggttttgtggtcgatccggtgaagctattgatgctcttggtgcacattttgcccctcttcctgctcccactccagctcccgcgcccgcgcccgcgcccgctccagctccagctccctcgcccgctcccgcttctgcgcccgttccagctcccgcacccacgcccgctccagctccagctcctcctaacaaagtggaagctctaggaggaaatggtggaacaatatttgacgatggtgctttcgatcatgtaagaaaggtttatattggtcaaggtgattctggtgtagcttatgtgaagttcgaatacagaaaagatgggaaaagagagacacgggagcatggaaaaatgacagtgt

SEQ ID NO: 118641 - DNA, 3035 bp, Arabidopsis thaliana
  unsure (1)..(3035): unsure at all n locations
tcaaacaccttttgagagcggttattttttctctatcaactaatacagtaaccttacgggtgtttatttgtatagatctctgtggttttcttggccaactctagtgagatctttttcgtttctcgaattcgatgaaaatgagacgaggcaattcaagtaacgaccatgaacttgggattctacgaggagctaactcggacaccaactcggacacggagagcatcgctagcgaccgtggtgcctttagcggtccgcttggccggcctaaacgtgcgtccaagaaaaacgcaagattcgccgacgatcttcccaagagaagcaatagtgttgctggcggccgtggtgatgacgatgagtacgtggagatcacgctagacatcagggacgactcggtggccgtccatagtgtccaacaagcagctggaggtggaggccacctggaggacccggagctagcccttcttacgaagaagactctcgagagcagcctcaacaacaccacctccttatctttcttccgaagcacctcctcacgcatcaagaacgcctcccgcgagctccgccgcgtgttctctagacgtccctccccggccgtgcggcggtttgaccgcacgagctccgcggccatccacgcactcaaaggtctcaagttcattgccaccaagacggccgcatggccggccgtcgaccaacgtttcgataaactctccgctgattccaacggcctcttactctctgccaagttttgggaatgcttaggaatgaataaggaatctaaagacttcgctgaccagctctttagagcattagctcgccggaataacgtctccggcgatgcaatcacaaaggaacagcttaggatattctgggaacagatctcagacgaaagctttgatgccaaactccaagtcttttttgacatggtggacaaagatgaagatgggcgagtaacagaagaagaggtggctgagattattagtcttagtgcttctgcaaacaagctctcaaatattcaaaagcaagccaaagaatatgcggcactgataatggaagagttggacccagacaatgctgggtttattatgatcgaaaacttggaaatgttgctattacaagcaccgaaccagtcggtgcggatgggagacagcaggatacttagtcagatgttaagtcagaagcttagaccggcaaaagagagcaaccctttattgagatggtcggagaaaatcaaatatttcatacttgataattggcagagattatggatcatgatgttatggcttggcatctgtggtggcctctttacttataaattcattcagtacaagaacaaagctgcctatggtgtgatgggttattgtgtttgtgtcgccaaaggaggcgccgagactctcaaattcaacatggctctcatattgttgcctgtttgtcgaaacaccatcacttggcttaggaacaagaccaagcttggtactgtcgttccttttgatgatagtcttaacttccacaaggttattgcaagcgggatagtcgtcggtgttttgctccatgcgggtgcccatttaacgtgtgattttccacgtttaattgccgcggatgaggacacctatgagccgatggaaaaatactttggggatcaaccgactagctactggtggtttgtgaaaggagtggaaggatggactggcattgtgatggttgtgctaatggctatagcctttacactcgctacgccttggttccgacgtaacaagcttaacttacctaacttcctcaagaagcttaccggtttcaacgccttttggtacacccaccatttgttcatcattgtttatgctcttctcattgtccatggtatcaagctctacctcacaaagatttggtatcagaagacgacatggatgtatcttgctgtacccatccttctatatgcatctgagaggctgctccgtgctttcagatcaagcatcaaaccggttaagatgatcaaggtggctgtttaccccgggaacgtgttgtctctacacatgacgaagccacaaggattcaaatacaaaagtggacagttcatgttggtgaactgccgagccgtatctccattcgaatggcatcctttctcaatcacatcagctcccggagacgattacctgagcgtacatatccgcactctcggtgactggacacgtaagctcaggaccgttttctccgaggtttgcaaacctcctaccgccggtaaaagcggtcttctccgagcagacggaggagatggaaacctcccgttcccgaaggtccttatcgacggtccatacggtgctcccgcacaagactacaagaaatacgacgtggtactcctcgtaggtctcggcattggagccacgcctatgatcagtatccttaaggacatcatcaacaacatgaaaggtcctgaccgcgacagcgacattgagaacaataacagtaacaacaatagtaaagggtttaagacaaggaaagcttatttctactgggtgactagggaacaaggatcattcgagtggttcaagggaataatggacgagatttcggagttagacgaggaaggaatcatcgagcttcacaattattgcacgagtgtgtacgaggaaggtgatgcaagagtggctctcattgccatgcttcagtcgttgcaacacgctaagaacggtgtggatgttgtgtcgggtacacgtgtcaagtcccacttcgctaaacctaactggagacaagtctacaagaagatcgctgttcaacatcccggcaaaagaataggagtcttctactgtggaatgccaggaatgataaaggaattaaaaaatctagctttggatttttctcgaaagacaactaccaagtttgacttccacaaagagaacttctagattaattatatacgttgtagaaaaataaaacaagaaacaactatacaaataaatatttattttaaattcttttcattttatgtaaaattatctgagttatctttttttgttnnnnnnnnnnnnnnnnnnnnnnnnnnn

SEQ ID NO: 118642 - DNA, 1323 bp, Arabidopsis thaliana
caaaaacttcaattaaccagaaaaggtcagattctccgccgcctcacacgacgggcaacttcagttcctgccgtcgcgttagatcccgccgtcaatcggtcatggcgaccggtaaaacctcttccgccgcgaatcttttcactggctcgacgcgttttgatttatcatccgctgattcgcctccttcaaaactctctctctcctccgatcagctcaaccactgccaccaagctctcggcgttttccggggaaagatccaaaatcctgactcgatcgctcatgagtttactggtttacaggctaataggatgtggccatcggagctgctgctaaacagtacagtggctatgaacagtgtcaatgttgagaaaaacagatacagtgatgttgttccatttgacaagaacaggattgttctgaatccatgtaaagactcatctgcaaaaggatatgtgaatgcaagcttaattaagacgtcggagtctgagagtatttctcagttcatagctacgcaaggtcctttaccacacacgatggaggccttctgggagatggttattcagcagcattgcccaatcatagtgatgctcactcgattggttgataataataggactgttaaatgcggggactattttcaagacgaagatggacctagagaatttggcaacatatctcttacaacaaagtggataaagactactgacacttcattgatgttacggaatcttgaggttaactacaaggagacagaggatcagcccatgtccgttttgcatattcagtatccagaatggcctgatcatggagttcccaaggatacagtggctgtccgtgaaattctaaaaagactatatcaagtaccacctagtctcggcccaatcattgtgcactgcagtgcaggtataggaagaactggaacatactgtgcgatacataacacaatccaaagaattcttgctggcgatatgtctgcgttggatcttgctaaaaccgtggcactatttcgcaagcaacgcattggcatggttcaaaccatggatcaatacttcttttgctacaatgctattgttgatgaattagaagatctaaccgcggggacaaatgctggaacgagttcctaaagctgaagggttcgtctgcttagagagggaaaaaggcttctacccaactatatcaatttcgtaatgtgattcaagaagaaacccgcgtgaatctctacattcaagacttttcaatttctgtaaatttccatatctgataggtttcattgttacttttgttgtggaaatgctgattaaaaagcaaatgaagtcgccaatg

SEQ ID NO: 118643 - DNA, 2309 bp, Arabidopsis thaliana
cacaccacatatactcatctatatctctgatttttcttcttcttctctctctcgccggaaaaagtaaatcaaaatgatcaccggcaaagacatgtacgatgttttagcggctatggtgccgctatacgttgctatgatattagcctatggttcggtacggtggtgggggatattcacaccggaccaatgttccggtataaaccggttcgttgcggttttcgcggttcctcttctctctttccatttcatctcctccaatgatccttatgcaatgaattaccacttcctcgctgctgattctcttcagaaagtcgttatcctcgccgcactctttctttggcaggcgtttagccgcagaggaagcctagaatggatgataacgctcttttcactatcaacactgcctaacacgttggtaatgggaatcccattgcttagggcgatgtacggagacttctccggtaacctaatggtgcagatcgtggtgcttcagagcatcatatggtatacattaatgctcttcttgtttgagttccgtggggctaagcttctcatctccgagcagttcccggagacggctggttcaattacttccttcagagttgactctgatgttatctctcttaatggccgtgaacccctccagaccgatgcggagataggagacgacggaaagctacacgtggtggttcgaagatcaagtgccgcctcatcaatgatctcttcattcaacaaatctcacggcggaggacttaactcctccatgataacgccgcgagcttcaaatctcaccggcgtagagatttactccgttcaatcgtcacgagagccgacgccgagagcttctagctttaatcagacagatttctacgcaatgtttaacgcaagcaaagctccaagccctcgtcacggttacactaatagctacggcggcgctggagctggtccaggtggagatgtttactcacttcagtcttctaaaggcgtgacgccgagaacgtcaaattttgatgaggaagttatgaagacggcgaagaaagcaggaagaggaggcagaagtatgagtggggaattatacaacaataatagtgttccgtcgtacccaccgccgaacccaatgttcacggggtcaacgagtggagcaagtggagtcaagaaaaaggaaagtggtggcggaggaagcggtggcggagtaggagtaggaggacaaaacaaggagatgaacatgttcgtgtggagttcgagtgcttctccggtgtcggaagccaacgcgaagaatgctatgaccagaggttcttccaccgatgtatccaccgaccctaaagtttctattcctcctcacgacaacctcgctactaaagcgatgcagaatctgatagagaacatgtcaccgggaagaaaagggcatgtggaaatggaccaagacggtaataacgggggaaagtcaccttacatgggcaaaaaaggtagcgacgtggaagacggcggtcccggtcctaggaaacagcagatgccgccggcgagtgtgatgacgagactaattctgataatggtttggagaaaactcattcgaaaccctaacacttactctagtctctttggccttgcttggtcccttgtctctttcaagtggaatataaagatgccaacgataatgagtggatcgatttcgatattatctgatgctggtcttggaatggctatgtttagtcttggtctatttatggcattgcaaccaaagattattgcgtgcggaaaatcagtagcagggtttgcgatggccgtaaggttcttgactggaccagccgtgatcgcagccacctcaatagcaattggtattcgaggtgatctcctccatatcgccatcgttcaggctgctcttcctcaaggaatcgttccttttgttttcgccaaagaatataacgtccatcctgatattctcagcactgcggttatattcggaatgctggttgctttgcctgtaacagtactctactacgttcttttggggctttaagttattatcaaaacgtatttgcaaataaaaggcgatacgacccaaaggtgattttttttcaaacgaaaaagaataattacaagaacgaaaaaagactaattccaggtcaggcttaggtgtatgggaccatgcaatgtcgcattaattaaattatagcatatgatagtcgaaaatttagataactttgtataattaattatatgcacatgcatgtacgtgactttgtagtttttgttacatttattaaatttttgggatgtgcaagtacaattatttactaaaaaaaaaaaaa

SEQ ID NO: 118644 - DNA, 2389 bp, Arabidopsis thaliana
  unsure (1)..(2389): unsure at all n locations
cccacgcgcattgaaatggaatcgcggcgagagaagaatccgatgacggaggaggaatctgatgggctaattgcggcgaggcggatccaacgattgtctttacacctatctccctccttgacgccgtcgccgtcgttaccgttggtgcagacggagacgtgttcggcgaggtcgaagaagctggatgtcaacggcgaagctttgtcgctgtatatgagaggaaaacatatagatatacaagagaaaattttcgactttttcaattcccgacccgatttgcagacgccgatcgagatctccaaggatgatcatcgggaattgtgtatgaatcagcttatagggcttgttagagaagctggggtaaggccgtttaggtatgttgctgatgatcctgagaagtatttcgcaatcatggaagctgttggaagtgttgatatgtcccttgggattaagatgggcgttcaatacagtctctggggaggctctgtgatcaatttagggactaagaagcatagagacaagtattttgatggcattgacaatcttgattacaccggttgctttgccatgactgaattacaccatgggtcaaatgtgcaaggtcttcagaccacggcgacattcgatccacttaaagacgaatttgtgatcgatacacctaatgatggagctatcaaatggtggattggaaatgctgcagttcatgggaagtttgccactgtttttgccaggcttatacttccaactcatgattccaaaggagtctcggatatgggtgttcacgccttcattgttccgataagggatatgaaaacacaccagacactccctggtgttgaaatccaagattgtggacataaagtgggacttaatggagtggataatggtgcgttgagattccgttctgtgagaataccccgtgataatcttctcaatcgttttggagatgtgtcccgagatgggacgtatacaagtagtttgccaacaatcaataaaagatttggtgcaacactcggtgagcttgtaggtggtcgagttggccttgcctatgcatctgttggcgtccttaaaatctctgcaacgattgccattcgttattctcttctaagacaacaattcgggcctccaaagcaacctgaggtcagtattctcgattaccagtctcaacaacacaagctcatgccgatgttagcctccacctatgcataccattttgcaactgtataccttgtggagaaatattcagagatgaagaagactcacgatgagcaattggttgctgatgtccatgcactctctgctgggctcaaatcttatgtgacgtcttacaccgccaaggcgctctcggtctgcagagaagcctgtggaggtcatggttacgcagctgttaaccgatttggaagcttgagaaatgatcatgacattttccaaacatttgaaggagacaacactgtacttctgcaacaggtggctgctgatttattgaagcgttataaagaaaagttccaaggcgggacattgacagttacatggagctacttgagagaatcaatgaacacttatttgtctcagccaaatcccgttacagcgcgttgggaaggtgaagatcatctaagagatcctaaattccaactagatgctttccggtatcgaacatcgcgattgctacaaaatgtggcagcgagattgcagaagcattcaaagactcttggtggtttcggggcatggaacagatgcttgaatcatcttttaacgcttgcagaatctcacattgaaacagtcattcttgccaagttcatcgaagctgttaaaaactgcccggacccaagtgcaaaagctgctctgaaactagcatgtgatctttacgcattggaccgaatctggaaagatataggaacgtaccgtaacgtggattatgtggcgcctaacaaagctaaggcgattcataaactgacagagtatttgagttttcaagtaaggaatgtggccaaggaactagtggatgcgttcgagctccctgatcatgttactcgagcaccaattgctatgcagtccgatgcttattcccagtatactcaagttgttggattctaaaaacacaagaacaaaacatatatcatcacaatgatcttttaattcgaagcaaaaaaaagatgaaaaacaatttacagggggtacaaaagaatctgcagtcctttgtatgtgtttttagttgttgtttgttttcacaggagaataaaaaaaaacagagtaataaaaatgtcatttttttcgtagaccnnnnnnnnnnnnnnnnnnnnnnnnnnnnnnnnnnnnnnnnnnnnnnnnnnnnnnnnnnnnnnnnnnnnnnnnnnnnnnnnnnnnnnnnnnnnnnnnnnnnnnnnnnnnn

SEQ ID NO: 118645 - DNA, 2519 bp, Arabidopsis thaliana
  unsure (1)..(2519): unsure at all n locations
cccacgcgtccgtgcaattaaatcggtagagtgaggcattgtccttctttttctccctctgttttttttttttttttttttcctatcatctctgagagttttctcgagaaacttttgagtgtttagctactagattctgaattacgaatcatggaaggaattgatcacctcgccgatgagagaaacaaagcagagttcgacgttgaggatatgaagatcgtctgggctggttcccgccacgcttttgaggtttccgatcgaattgcccgccttgtcgccagcgatccggtatttgagaaaagcaatcgagctcggttgagtaggaaggagctgtttaagagtacgttgagaaaatgtgcccatgcgtttaaaaggattatcgagcttcgtctcaatgaggaagaagcaggaagattgaggcactttatcgaccagcctgcctatgtggatctgcactggggaatgtttgtgcctgctattaaggggcagggtacagaggagcagcagaagaagtggttgtcgctggccaataagatgcagattattgggtgttatgcacagactgagcttggtcatggctcaaatgttcaaggacttgagacaactgccacatttgatcccaagactgatgagtttgtaattcacactccaactcagactgcatccaaatggtggcctggtggtttgggaaaagtttctactcatgctgttgtttacgctcgtctcataactaacggaaaagactacggtatccatggattcatcgtgcaactgcgaagcttagaagatcattctcctcttccgaatataactgttggtgatatcgggacaaagatgggaaatggagcatataattcaatggacaacgggtttcttatgtttgatcatgttcgcattcctagagatcaaatgctcatgaggctgtcaaaagttacaagagaaggagaatatgttccatcggatgttccaaagcagctggtatatggtactatggtgtatgtgagacaaacaattgtggctgatgcttccaatgcactatctcgagcagtttgcatagctacaagatacagtgcagtgcggaggcaatttggcgcacataatggtggcattgagacacaggtgattgattataaaactcagcagaacaggctatttcctctgctagcatctgcatatgcatttcgatttgttggagagtggctaaaatggctgtacacggatgtaactgaaagactggcggctagtgatttcgcaactttgcctgaggctcatgcatgcactgcaggattgaagtctctcaccaccacagccactgcggatggcattgaagaatgtcgtaagttatgtggtggacatggatacttgtggtgcagtgggctccccgagctgtttgctgtatatgttcctgcctgcacatacgaaggagacaatgttgtgctgcaattacaggttgctcgattcctcatgaagacagtcgcccagctgggatctggaaaggttcctgttggcacaactgcttatatgggccgggcagcacatcttttgcaatgtcgttctggtgttcaaaaggctgaggattggttaaaccctgatgttgtactggaagctttcgaagctagggctctcagaatggctgttacgtgtgccaaaaatctcagcaagtttgagaatcaggaacaaggattccaagagctcttggctgatttggttgaggccgctattgctcattgccaattgattgttgtttccaagttcatagcgaaactggagcaagacataggtggcaaaggagtgaagaaacagctgaataatctgtgttacatttatgctctttatctcctccacaaacatctcggcgatttcctctccactaactgcatcactcccaaacaagcctctcttgctaacgaccagctccgttccttatacactcaggtccggcctaatgcggttgcacttgtggacgccttcaattacaccgaccattacttgaactcggttcttggccgttacgacggtaatgtgtacccaaagctctttgaggaagcgttgaaggatccattgaacgactcggtggttcctgatgggtaccaagaataccttcgacctgtgcttcagcagcaacttcgtaccgctaggctctgaagagttttctttgcttgatactcgatatggttaatcacattagacttgcttcgtccttcttcttcgtcttcttcttcttctcgctttgaataatttcgcagtttaaaaactggcgatgcccttatttatatgtagcaatgtaatagttaatgtacgatcgtcatatggcggaattttagtactatttttcgttttcaatgcaacattaatacaattgatcgtttctactctgagaaggatatgtgggatatttgtaatcttcgtatatattgacattttctctattgatttcgttaaaaaaaaaaaaacgaagggcgtccactatacaggatcccggacgcgggcagggggcgtcatagctcgtngatagtgta

SEQ ID NO: 118646 - DNA, 862 bp, Arabidopsis thaliana
  unsure (1)..(862): unsure at all n locations
tcgcttctttttcggagtcggagcagagaaaggttttggagatcgagaccaaactccgattgaaagaggatgcattcttttggttacagagcgaatgctctactcacattcgccgtcacgattctagctttcatttgcgcgattgcttccttctctgataacttcagtaaccaaaatccctctgctcagatccagatattgaatatcaattggtttcagaagcaacctcatggaaatgatgaggtcagcttgacactgaacataacagctgacttgcagtcactatttacttggaacacaaagcaggtatttgcttttgtagcagcagagtatgaaacctccaagaacgccctgaatcaggtttcactatgggatgccataataccagagaaagagcatgccaaattctggatacaaatctcaaacaagtaccgtttcatagatcagggacataacctccgagggaaggactttaacttgacattgcactggcatgtcatgcccaagccaggcaagttgtttgcggacaaaatggttatgcctggttatcgtttacccaatgcttacagatgaagatgaagagcctcctcctgcatcatctaaggttaacaaaaaatctcttaaattaggaaagaagagagttatatttcaggtgttaagttagacttgctgatctgtatactggcatgaagttaaaaacattgttttggaatgaattatgagccaagcacatatgagattgtcgtcgactctttgattaaaaaaaaaaaacaaaacacaaagnnnnnnnnnnnnnnnnnnnnnnnnnnnnnnnnnnnnnnnnnnnnnnnnnnnnnnnnnnnnnnnnnnnnnnnnnnnnnnn

SEQ ID NO: 118647 - DNA, 1043 bp, Arabidopsis thaliana
  unsure (1)..(1043): unsure at all n locations
tcgcgactctatacgactcacttagggaaagctggtacgcctgcaggtaccggtccggaattcccgggtcgacccacgcgtccgtcatgacttgcatatttcacttattcgctacatttgcgtaagatgacgctgcctcatttttttttcatattcgattgacataattaatattcttgtgtgtttatctcaattgccaggagcattataaggatcttagtgctaaatcattctttcctaacctgattgagtacatcacttcaggtccagttgtgtgtatggtatgggtataactatgctctaatttgatttttacttgttttcaagttgtaattagatgagttaattgcatgtgatgttttaaacctggtaaaggcttgggaaggtgttggtgttgttgcttcagccaggaagctaatagggaaaacagatccgcttcaagctgaacctggtactataagaggagatcttgctgtgcaaaccggaaggttggacttctatcatctttaaaattgttggaagtaagcacttaaaataattctcatggtttgatatttttaaattatgccatttgcaggaacattgtgcatggtagtgacagccctgaaacggcaagcgtgagattggtctgtggttcaaagagggcgagctatgcaagtgggattcggctctaactacatggctaaaggagtgatccttgagaagacagagtcaattataatggtgtcttacttggtttcttgtaccgatgatgagcttggtgtttgttcctgatttgggcagcatataatataactgcatctatggctgattctctatatctgtgacacttgcatgtatcaaactagtcagatcatctgctttggtctacgtccagacactccaaaatcattcatcttcactctacaccgagcaatgaaaattttctaatctccnnnnnnnnnnnnnnnnnnnnnnnnnnnnnnnnnnnnnnnnnnnnnnnnnnnnnnnnnnnnnnnnnnnnnnnnnnnnnnnnnnnnnnnnnnnnnnnnnnnnnnnnnnnn

SEQ ID NO: 118648 - DNA, 853 bp, Arabidopsis thaliana
  unsure (1)..(853): unsure at all n locations
acccacgcgtccgcggacgcgtggggcagaaaatggtgggagcgactgtagttagtaaatggactcccctatgtgtggcttcgccgccggagagaaactcggcaagtctcaatccacactgttctccagccagggttaattttagaacagcgttggccgcatttcgtcctcagttccgtcttttctctcgcaattccgcgtctcgccgccgtcttcgcgcttccagctccgccgaatcgggaatcttccttcctcaccttgtagcttctatggaggacgttgaggagacttacattatggtgaaacctgatggcatacaacgaggccttgtaggagaaatcatttctcgctttgagaaaaaggggtttaaacttattgggctcaagatgtttcagtgcccaaaagaattggctgaggagcattataaggatcttagtgctaaatcattctttcctaacctgattgagtacatcacttcaggtccagttgtgtgtatggcttgggaaggtgttggtgttgttgcttcagccaggaagctaatagggaaaacagatccgcttcaagctgaacctggtactataagaggagatcttgctgtgcaaaccggaaggaacattgtgcatggtagtgacagccctgaaaacggcaagcgtgagattggtctgtggttcaaagagggcgagctatgcaagtggggattcggctctagctacatggctaaggggggtgtccntttgnaggcagagcaattataaatggngccccanttgttttctnttacccctntgantttggggtttttnccccatttgggggaannaattaacccccaacntttggnttntttncccat

SEQ ID NO: 118649 - DNA, 824 bp, Arabidopsis thaliana
  unsure (1)..(824): unsure at all n locations
tttgatttaacccatacacacatctctctgttccacgattctcttcctcagcctccacgtcgtctctaaactcagcaaaaaccaatgtcgacggtgagaaaaatcactcttaagagttcggatggcgaaaacttcgaaattgacgaagcggtggcgctagagtcacaaaccatcaaacatatgattgaagatgactgtaccgataatggtatccctctccctaatgtcacaagcaagatcctttcgaaggtgattgagtactgtaagagacatgtcgaagctgctgagaaatccgaaaccacggccgatgctgctgctgctactactaccaccaccgtcgcgtcgggttctagtgatgaagatctcaagacttgggattctgagtttatcaaagttgatcagggcactctcttcgatcttatcctggctgctaactacttgaatatcaagggactgttggacttgacttgccagacagtggctgatatgattaaaggaaaaaccccagaagaaatccgcaagacgttcaatatcaagaacgacttcacgccagaggaagaagaagaggttcgccgtgagaatcagtgggcgtttgaatgaagaaaaatgaagacctaggttgctgtcatgtcctcgacccatttgtgtctccctgtcttatcttctttctttgactatatatccattctcttctacgtgatggtccagctaagacagtgggtcggatgttaatgttatgttatgtatgtcaaattaaagacttaactacgaaacatattgaagttgttgctcnnnnnnnnnnnnnnnnnnnnnnnnnnnnnnnn

SEQ ID NO: 118650 - DNA, 2978 bp, Arabidopsis thaliana
tttcttttggttctctctcccacttgtgaagaagctcctcaagaagaaccctaaaaaaatgattcttctttgattttgtgtatttttacctgttcttgttggtgtttgtttgcttagttctgaagcaaaagctagggtttttcttcttcttcttgaaaatgccattgaaagaagatgattgttgtttattcgctgaagaatacgatggtccaccattatcatacaatatcccttgtgctgttcctattaacgtcgagaaaatcccagtcgccgccgttgtttctccggtttgtatttccgataacatgtctttccctgtgattcaaccgattttatcagtagagagtaaaaagtttctgatagattcggtttctcctacttctgttatagctaattgtggatctaatcagcttgaattggtttctgattcaatcactgtttctcctacttcggttattgaacatactgaggaagaagaagaagaagaaggtggtgatggtgaggattgtgaattgagtagctctggagagttattgttgaggtcttgttcagtgaaagagagtttagacttgaatgagtcgtcttcgaatccgttagtaccggattgggaatcgaatgagtcagttttgagtatggattacccgtcgtctcgtgttactggagattgtgttagtgagactaatggtgatggtaagaagcaaccagttgttactttcttgggtattgcttctgatgatggatttgaggaagaggagagttgtagtaacctgaggcgggttcgggttgtaccggttaagaaacagccgcagacgaaaggtaagaagggttcttgttatcggtgttttaaagggagtaggtttacggagaaggaagtgtgtttagtttgtgatgctaagtattgtaatagctgtgtgcttagagctatgggttctatgcctgaaggaaggaaatgtgttacttgtattggctttcctattgatgaatcgaagcgagggagtttagggaaatgctctaggatgcttaagaggttgcttaatgatttggaggttaaacagattatgaagactgagaggttttgtgaagctaatcagttaccagctgagtatgtgtatgttaatggacaacctctttaccctgaagagctggttacacttcagacttgttctaatcctcctaagaagctgaaaccaggggactattggtatgataaagtgtctggactttggggaaaggaaggagagaagccttatcagataattagtcctcatctgaatgttggaggtcctattagtccggaagctagcaacggaaacactcaagttttcataaacggtcgggagattacaaaagtggagctacgaatgctgcagttggcaggagttcaatgtgcgggtaacccacatttttgggttaacgaggatggatcgtatcaagaagaaggacagaagaataccaagggatacatatggggcaaggctgggactaagttactttgtgctgtattgtcacttcctgtaccgtcaaaatctaccgcgaatgcttctggggaacaactctatagcgcaaatagcagaagcattctggaccatcttgagcataggactttgcaaaaaattcttttggttggaaacagtggttctggaactagcacaatattcaagcaggcaaagatcctttataaggacgtaccattcttggaagatgagcgtgaaaacataaaggtgattatccagaccaatgtgtatggttatctcggtatgcttcttgagggccgggagcggtttgaagaagaagctcttgctctcaggaacacgaagcagtgtgtccttgaaaatatacctgcagatgaaggagatgcgaaaagcaacgacaaaaccgtcaccatgtactccattggcccgaggcttaaagcattttctgattggctattaaagactatggctgctggaaatcttggggtcattttccctgcagcctctcgtgagtatgcgccactagttgaggagttatggagggatgcagctatccaagctacatacaaacggagaagtgagctaggactccttcccagtgtcgctagttacttcttggagcgggctattgacgtgttgacaccagattacgagccatcagatttggatatattatatgcagaaggagtcacttcatccagtggtctagcttgtctcgatttctcatttccacagactgcatcagaagagaatcttgatccttctgatcaccatgattccctgctcaggtaccagttaattagagtaccctcgagaggcctcggggaaaactgcaagtggatagatatgtttgaagacgtcggaatggttgtgtttgttgtttccatgagtgactacgaccaggtgtcagaagatggaaccaacaagatgttactcacaaagaaactctttgaaagcattatcactcatcccatctttgagaacatggacttcctcttgattctcaacaagtacgatctcttggaagaaaaagtagaacgcgttcctttggcacgctgcgagtggttccaagacttcaatcccgtggtcagtcgtcaccgtggttccaacaacggtaaccccactttgggtcagcttgccttccacttcatggcggttaagttcaagcggttttactcttccttgaccgggaaaaagctgtttgtttcttcaagcaaaagtttggacccaaacagtgttgattcgtcgctgaagttagctatggagatactgaaatggagtgaggagagaacaaacatctgcatgagtgaatactctatgtatagcactgagccaagttccttctcaaattgatgtttttcacagtcaacaaaagagtctaatgtatatggtaacaactttcttgtgtatagattgccacgtagattgtattaacagagtactcaagcatcagtttacaaaccaatctcggtgtactaaaactgttacaatttaaccgattcttct

SEQ ID NO: 118651 - DNA, 3310 bp, Arabidopsis thaliana
  unsure (1)..(3310): unsure at all n locations
gaaaaaaacgagcatcgtccatcgagatccaaatcctcagtttcattttcatctctctctctcgtattgatcagctactcgaaactccggattcctcgtcgtaaagttgccggtggacgaccaaggtccaactcttgaacatcccaaatcatgaatcccttttcttctggtactcgtctaagggacatgatccgtgccataagagcatgcaaaacagctgcggaggagcgagctgttgtaagaaaggagtgtgccgatattcgagcattgattaatgaagatgacccgcatgataggcaccggaaccttgcgaaactcatgtttatacacatgctgggttatcccacacactttgggcagatggagtgcttgaagctaattgcatctcctggatttcccgagaagaggattggatatctagggctaatgttgcttcttgatgagagacaagaagtgttgatgcttgtcacaaattcgttaaaacaagatcttaatcactcgaaccagtatgttgtaggacttgctctctgtgctttagggaatatttgttcagcagaaatggcccgtgatcttgcgccagaagtagaaagattaatccagtttcgtgaccctaatattcgaaagaaggcggcgctttgctctactagaataataaggaaagttccagatctagcagaaaacttcgtaaacgctgctgcttccttgcttaaagaaaagcatcatggggttcttataacaggagttcaactttgttatgaattatgcacgattaatgatgaagccctagagtacttcagaacgaaatgcacggagggacttataaaaactttgagggatattactaatagcgcatatcagcctgagtatgatgttgcagggatcacagacccttttctccacatacggttgctcaggctcttgcgtgttttaggccagggtgacgctgatgctagtgatttgatgactgatatacttgcccaggtggcaacaaaaactgaatcaaacaaaaacgcagggaatgcggtactctatgagtgtgttgaaacaatcatggccattgaagacaccaatagcttgcgtgtgcttgctatcaacatcttgggaagattcttatctaaccgcgacaataacatcagatatgttgcattaaacatgctgatgaaagcaatcactttcgatgatcaagcagtgcaaagacacagagttacaattttggaatgtgtgaaggacccagatgcttctattcggaaaagagctctagagcttgtcactcttttggtgaatgaaaacaatgtcacacaactgacaaaggagctaattgattatttggaaatcagcgacgaagattttaaggaagatcttagtgcaaaaatttgttttatcgttgaaaagttttctccagaaaaactatggtacattgatcagatgctcaaggttctgtgtgaggctggaaagtttgtgaaagatgatgtgtggcatgcacttattgttgtcataagcaatgcatcagagcttcatggatatacagttagggccttgtacaaagcagtcttgacttatttggaacaggagacccttgtccgagtggcggtatggtgcattggggaatatggtgatctgttggttaacaatgtggggatgcttggtattgaagatccaataacggtaacggaatctgatgcagtggacgttatcgaggatgccattactcgccataactcagattcgactacaaaagcaatggcattggttgctctactgaagttatcatcccgctttccttctatttcagtgagaatcaaaggcataattgtgaagcagaaaggaagccttctccttgaaatgcagcagagagctattgagtacaattctatagttgacaggcataaaaatatcaggtcttctctggttgacagaatgccggtactggatgaggctactttcaatgtgaggagggccggctcttttcctgcatcagtttcaaccatggccaagccttcagttagccttcaaaatggtgttgagaaacttcctgtcgctcctcttgtggacttgctagacctagattctgacgatatcatggctgcacctagtccatctggtgcagatttccttcaggatcttctcggtgtagacttaggttcatcgtcagcacaatatggtgcaacccaggctccaaaagctggcacagatctgttgctggatattctatcaattggaacaccttctcctgcccaaaacagcacatcatctattggtttattatcaatagctgacgttaacaataatccctcaattgcgctatacacactttcttcaccagctccacctcacgtagcaacaacttcgtccaccggtatgtttgatttgctagatggtctttctccaagcccatcgaaggaagccaccaatggtccagcttatgcacctattgttgcatacgagagcagctccttgaagattgagttcaccttctcaaagacaccagggaatctgcaaacgacaaatgtccaggctacttttactaatttgtctcccaatactttcacagattttatattccaggctgctgttccaaagttcctccagctgcacttggatccagctaacagtaacacactcccggcaagcggtagtggtgccatcacgcagaatctaagagtcactaacagccagcaggggaagaaatctcttgtgatgcgcatgaggattgggtacaaactgaacggaaaagatgtattagaggaaggacaagtcagcaacttccctcgcgggttgtgaaactcaccgatcagccattgtattttcagcagaaggacttgtgtttattttcatcaaccggactgtaaaagaaagacaagtcttgccgaagccgttgatgcagcaaaagcagctttctccttacaaattttttcatccgtttcttgaaactactactatggcctttgtttgggattttgaggttcttggggtttctttttttgtacaaaagtttcgacgtttggaatcggaaagtgatcaaagaagtagagtttgtctctcgtgtctgagacttcaaaaaatacgtgaatcataacccatgatgtatctactacagtttcagctttgtcttgcaaaaaaaaaagttttggattttggatatgggaccatgtcgtagtttgcatgtacatttgcactcttgcttgatcaacaatatctcatagttgaaagtctnnnnnnnnnnnnnnnnnnnnnnnnnnnnnnnnnnnnnnnnnnnnnnnnnnnnnnnnnnnnnnnnnnnnnnnnnnnnnnnnnnnnnnnnnnnnnnnnn

SEQ ID NO: 118652 - DNA, 3258 bp, Arabidopsis thaliana
  unsure (1)..(3258): unsure at all n locations
gaaaaaaacgagcacatcgtccatcgagatccaaatcctcagtttcattttcatctctctctcgtattgatcagctactcgaaactccgattcctcgtcgtaaagttgccggtggacgaccaaggtccaactcttgaacatcccaaatcatgaatcccttttcttctggtactcgtctaagggacatgatccgtgccataagagcatgcaaaacagctgcggaggagcgagctgttgtaagaaaggagtgtgccgatatacgagcattaattaatgaagatgacccgcatgataggcaccggaacctagctaaactcatgttcatacacatgctgggttatcccacacactttgggcagatggagtgcttgaagctaattgcatctcctggatttccagagaagaggattggatatcttgggctaatgttgcttcttgatgagagacaagaagtgttgatgcttgtcacaaattcgttaaaacaagatcttaatcactcgaaccagtatgttgtaggacttgctctctgtgctttagggaatatttgttcagcagaaatggcccgtgatcttgcgccagaagtagaaagattaatccagtttcgtgaccctaatatccgaaagaaggcggcgctttgctctactagaataataaggaaagttccagatctagcagaaaacttcgtaaatgctgctgcttccttgcttaaagaaaagcatcatggggttcttataacaggagttcaactttgttatgaattgtgcacgattaatgatgaagccctagagtacttcagaacgaaatgcacagagggactgataaaaactttgagggatattactaatagcgcatatcagcctgagtatgatgttgcagggatcacagacccttttctccacatacggttgctcaggctcttgcgtgttttaggccagggtgatgctgatgctagtgatttgatgacagatatacttgcacaggtggcaacaaaaactgaatcaaacaaaaacgcagggaatgcggtactctatgagtgtgttgaaacaatcatggccattgaagacaccaatagcttgcgtgtgcttgctatcaatatcttgggaagattcttatctaaccgcgacaataacatcagatatgttgcattaaacatgctgatgaaagctatcactttcgatgatcaagcagtgcaaaggcacagagttacaattttggagtgtgtgaaggacccagatgcttctatccggaaaagagctcttgagcttgtcactcttttggtgaatgaaaacaatgtcacacaactgacaaaggagctaattgattatttggaaatcagcgacgaagattttaaggaagatcttagtgcaaaaatttgttttatcgttgaaaagttttctccagaaaaactatggtacattgatcagatgctcaaggttctgtgtgaggctggaaagtttgtgaaagatgatgtgtggcatgcacttattgttgtcataagcaatgcatcagagcttcatggatatacagttagggccttgtacaaatcagtcttgacttattcggaacaggagacccttgtccgagtggcggtatggtgcattggggaatatggtgatctgttggttaacaatgtggggatgcttggtattgaagatccaataacggtaacggaatctgatgcagtggacgttatcgaggatgccattactcgccataactcagattcgactacaaaagcaatggcattggttgctctactgaagttgtcatcccgctttccttctatttcagagagaattaaagacataattgtgaagcagaaaggaagccttctccttgaaatgcagcagagagctattgagtacaattctatagttgacaggcataaaaatatcaggtcttctctggttgacagaatgccggtactggatgaggctactttcaatgtgaggagggccggctcttttcctgcatcagtttcaaccatggccaagccttcagttagccttcaaaatggtgttgagaaacttcctgtcgctcctctagtggacttgctagacctagattctgacgatatcatggttgcacctagtccatctggtgcagatttccttcaggatcttctcggtgtagacttaggttcatcgtcagcacaatatggtgcaacccaggctccaaaagctggcacagatctgttgctggatattctatcaattggaacaccttctcctgcacaaaacagcacatcatctattcgtttattatcaatagctgacgttaacaataatccctcaattgcgctagacacactttcttcaccagctccacctcacgtagcaacaacttcgtccaccggtatgtttgatttgctagatggtctttctccaagcccatcgaaggaagccaccaatggtccagcttatgcacctattgttgcatacgagagcagctccttgaagattgagttcaccttctcaaagacaccagggaatctgcaaacgacaaatgtccaggctacttttactaatttatctcccaatactttcacagattttatattccaggctgctgttccaaagttcctccagctgcacttggatccagctagcagtaacacactcctggcaagcggtagtggtgccatcacgcagaatctaagagtcactaacagccagcaggggaagaaatctcttgtgatgcgcatgaggattgggtacaaactgaacggaaaagatgtattagaggaaggacaagtcagcaacttccctcgcgggttgtgaaactcatcgatcagccattgtattttcagcataaggacttgagtgtttctttctatcaaacccaactaaaaaagaaagacaagtcttgcccaagccgttgatgcagctttctccttccaattttttcatccgttttatgaaacaagtagtactttggcctttgcttgtgatttgaggttcttgggttttctttttgtacaaaagttttgatgtttggaatcggaaagtggtcaagaagtagaatttgtctctcatgtctctgagactataaaaaagatgtgatttatgacccataaccataactcatgatgtatctactacagttacaattttcgtcttgcaaagaaggagtattggattttggatccaaaaaaaaaaaaaaaaaaaaaacacagagnnnnnnnnnnnnnnnnnnnnnnnnnnnnnnnnnnnnnnnnnnnnnnnnnnnnnnnnnnnnnnnnnnnnnnnnnnnnnnnnn

SEQ ID NO: 118653 - DNA, 776 bp, Arabidopsis thaliana
  unsure (1)..(776): unsure at all n locations
aaacatnnnnnnnnnnnnnnnnnnnnnnnnnnnnnnnnnnnnnnnnnnnnnnnnnnnnnnnnnnnnnnnnnnnnnnnnnnnnnnatcaagatcggccgcctcagtttcattttcatctctctctctcgtattgatcagctactcgaaactccggtaacggattttcacaatcccggcggcgaaactcttcttcccggctaagttttcattttcttcagattcctcgtaaagttgccggtggaccaaggtccaactcttgaacaccccaaatcatgaatcccttttcttctggtactcgtttaagggacatgatccgtgccataagagcatgcaaaacagctgcggaggagcgagctgttgtaagaaaggagtgtgccgatattcgagcattgattaatgaagatgacccgcatgatcggcaccggaaccttgcgaaactcatgtttatacacatgctgggttatcccacacactttgggcagatggagtgcttgaagctaattgcatctcctggatttccagagaagaggattggatatctagggctaatgttgcttcttgatgagagacaagaagtgttgatgcttgtcacaaattcgttaaaacaagatcttaatcactcgaaccagtatgttgtaggacttgctctctgtgctttaaggaatatttgttcagcagaaatggcccgtgatcttgcgccagaagtagaaagattaatccagtttcgtgaccctaatatccgaaaagaagcggcgctttgctctactagaataata

SEQ ID NO: 118654 - DNA, 1268 bp, Arabidopsis thaliana
  unsure (1)..(1268): unsure at all n locations
ttaggtacactatagaagactatgacgtcgcatgcacgcgtacgtaagctcggaattcggctcgagaatggcatcaattctcaggtcagtggcaacgacttcagccgtcgtagccgccgcctctgcgattcccatcgcgatcgccttctcttcttcttcttcttcttcctctaccaaccccaaatctcaatctctcaatttctccttcctctcccgatcgtctccacgtctcttgggactttcacgaagcttcgttagctctccgatggcgactgctctcacttctgatcgtaatctccatcaggaggatcgagccatgcctcagcttcttactgagtttatggtggatatgacatgtgagggttgtgttaatgctgtgaagaacaaattagaaaccattgaaggtattgagaaagtggaggtggatttgtccaatcaagttgtgaggatacttggatcttcccctgttaaggctatgactcaagctttggagcaaactggtcgaaaagctcgcttaattggacaaggtgttcctcaagatttcttagtctcatctgcagtagcagaattcaaaggccctgacatttgtccgggggtagtccgatttgctcaggtcagtatgggaacttgcaagaatcgtaagccaacttttaccggtttgtcacccggaacccacagctggtgtatcaacgagtatggagatctcacaaacggagcagccagcacagggagcttgtacaatccatttcaagatcaaactggcacagagccattgggagacctgggaacactagaggcagacaaaaacggagaggccttttattcgggaaagaaagagaaactcaaggttgcagaccttatcgggagagccgtcgtggtgtacaagaccgatgataataagtcaggccccggattgaccgccgcagtgattgctagaagcgcaggggttggagaaaactacaaaaaactttgttcttgtgatggtactgtcatatgggaagctacaaacagcgatttcgtggccagtaaggtttaataacaagtcaacaaccatacattttataaaacgttacgttttttagtgattgagaacttgttttgtatcaaaacttgaggtttatattgaaacaacacaagctttttgttttgtaccaaaaaaaaaaaaaaattcaattgcgtaaaaaaaaannnnnnnnnnnnnnnnnnnnnnnnnnnnnnnnnnnnnnnnnnnnnnnnnnnnnnnnnnnnnnnnnnnnnnnngagtagct

SEQ ID NO: 118655 - DNA, 1375 bp, Arabidopsis thaliana
  unsure (1)..(1375): unsure at all n locations
tatngtccgcggaccgcgaatgggctctcaaaatatggatagtcacaaatggagtctaggtttcacattacttgctttcctcttcatcacttcctcttccgctgagctcatcattaaacaggtcacacagggcagaggaatagagtacaacaactcttacagtctcacgtcgaatcttggagtgacgacaagagagttgagagacgagcgaccatcaagtaagatagtgacaatcacaagcttctctgtgattaaggacagaggagaaccctatgaatcatctatttttgaggctgccggttacaaatggagattagttttgtacgtgaagggtaatccgaaaggcggtataaataatcatatttcactttacgcgaggatagaagagacagaaactcttccaagagggtgggaagtgaatgttgatctcaaactctttgtccacaatcggaagttaaagaaatatttgtctgttacagatggaacagtgaagcgatacaacgatgcaaaaaaagagtggggattcacacaattgatttctcttccaacattctacaacgcgaacgaagggtaccttgtgcaggacacagcttcttttggtgctgagatcttcatcgttaacccgacagaaaaacaagagaaagtcacattcatatcaaaccctccagacaatgttttcacttggaagatacttcgtttctctaccttggaagataaattctattactctgatgattttcttgttggagaccgatactggagactaggatttaacccgaaaggatctggtggaggaagaccacatgcacttccaatcttcctatatgctcaaggccataaggcaaacgcagttgttacaaacacttggggagcggttaatctgcggttaaagaatcaacgaagctccaaccacaaacaattatattctgcagcttggtacccgattcgaagcgattatggtgtgggagtgaacaatataatattgatgtcagagctaaaagatgcatcaaaagggtatatggtgaatgatgccattatctttgaagctgaaatggttaaggtctctgtgacaaacatagtctccgtttaaatatcactacttctttttcaacaacaaccttacgaataaagtggactttgatgagtttaatttgttatacgacaacgttgttgatgcttgtgatgtaatcgttgtttctgctctccgagttttcgttttactttttttttcatgttttgctatcaatgaaataaaggtataaaactctcttggtttttaaaagttttttaaaaaaaaaaaaaaaagaagggcgggccggttttagaggaatccaaagcttacgtnnnnnnnnnnnnnnnnnnnnnnnnnnnnnnn

SEQ ID NO: 118656 - DNA, 1297 bp, Arabidopsis thaliana
  unsure (1)..(1297): unsure at all n locations
attcgttgtgtagcgagtagaaaaaccctagcttgcttgaaggagacatcatcgaggctattgaggatcagagggattcagacttttacccttcctgatcttccttacgattatggcacattggaaccgaacattagtggacagaacatgctgaagaatgaccaccatcatgtcaaatcgtgacattctcaagccaataagggattaaaggcagtggagcaccctatgaatactgtggatgtgaggctgctggttacaaatggagattggttttgtacgtgaatggtaataaaaacgacggtggaaatgatcatatttccctttacgcaaggatcgaagagacaaactctcttccattaggttgggaagtgaatgttgatctcaaactctttgtccataatgggaagctacacaaatatttgactgttacagatggcttagtgaagcgatataacaatgcgaaaaaagaatggggtttcggacaattgattcctcgatcaacattctacaacgcgaacgaaggttaccttgaccaggacactggttcttttggtgctgagatctttattgttaaaccggctcaacaacaagagaaagttacattcatatcaaaccctccaaacaatgttttcacttggaagatacttcgtttctctaccttggaagataaattctattactccgatgattttctcgttgaagaccgatactggagactaggatttaacccgaaaggggatggaggaggaagaccacatgcacttccaatcttcctatttgctcaaggccataaggcaaatgcagttgctacaaacacttggggagcggttaatctgcggttaaagaatcaacgaagtactaaccatagacaaatatattctgcagcttggtacccgattggaagcggttatggtgtgggagtgaacaatatcatactgttagctgatttaaacgatgcatcaaaaggatatttggtgaatgatgccattatctttgaagctgaaatggttaaggtctctataaccaacatcgtctccgcttaaatatctgcacttctttgtctacgatcaatcaaccttatgaataaaaagattttaatttgatgagtttgtaataagaaaacgttaatgtttgtgaattgtgaagttattacttctgttcttctgagtttttttatttcaatgaaaataaaactcttaccggtttaaattaaaaaaaaaaaaaaaaaagnnnnnnnnnnnnnnnnnnnnnnnnnnnnnnnnnnnnnnnnnnnnnnnnnnnnnnnnnnnnnnnnnnn

SEQ ID NO: 118657 - DNA, 1029 bp, Arabidopsis thaliana
  unsure (1)..(1029): unsure at all n locations
cgcgcaannnnnnnnnnnnnnnnnnnnnnnnnnnnnnnnnnnnnnnnnnnnnnnnnnnnnnnnnnnnnnnnnnnaatcttcattccagcaatggcgattcgttgtgtagcgagtagaaaaaccctagccggcttgaaggagacatcatcgaggctattgaggatcagagggattcagacttttacgcttcctgatcttccttacgattatggcgcattggaaccggccattagtggagagatcatgcagattcatcaccagaagcatcaccaggcttatgttactaattacaataatgctcttgagcagcttgatcaagctgtgaacaagggagatgcttccactgttgttaagttgcagagcgccatcaaattcaacggcggaggtcatgtcaaccattcgattttctggaagaaccttgctccttccagtgaaggtggtggagagccaccaaaaggatctcttggtagtgccattgacgctcactttggctcccttgaaggtctggtgaaaaagatgagtgctgagggtgctgcagtgcaaggctcaggatgggtgtggctcggactagacaaagaactgaagaagctagttgttgacacaactgccaatcaggatccattagtgacaaaaggaggaagcttggtacctctggtgggtatagatgtttgggagcacgcctactacttgcagtacaaaaatgtgaggcctgagtatctgaagaatgtatggaaagtgatcaactggaaatatgcaagcgaggtttatgagaaggaaaacaactgaatcgtttacacgatgacataaggagatgaaccagttccagctcagcttttgttttaaggttgtctgaaacaaacttacagtgtctctttggtttttaagatttgctcaactcagctgtgtggtacgttgttttacaatgaaagttttcaagaataaaaaaaaaaaaagaggaagggcggccgctctagaggatccaagcgtacgtacgcgtgcatgcgacgtcatagtaatctatagttcgcc

SEQ ID NO: 118658 - DNA, 830 bp, Arabidopsis thaliana
  unsure (1)..(830): unsure at all n locations
gtgaagcgatacaacgatgcaaaaaaagagtggggattcacacaattgatttctcttccaacattctacaacgcgaacgaagggtaccttgtgcaggacacagcttcttttggtgctgagatcttcatcgttaacccgacagaaaaacaagagaaagtcacattcatatcaaaccctccgaacaatgttttcacttggaagatacttcgtttctctaccttggaagataaattctattactctgatgattttctcgttgaagaccgatactggagattaggatttaacccgaaaggatctggtggagggagaccacatgcacttccaatcttcctatatgctcaaggccataaggcaaacgcagttgttacaaacacttggggagcggttaatctgcggttaaagaatcaacgaagctccaaccacaaacaattatattctgcagcttggtaccccgattcgaagcgattatggtgtgggagtgaacaatatcatattgatgtcagaagctaaaagatgcatccaaaagggtatatggtgaatgatgccattatcttttgaagctgaaatggttaaggtctctgtgaccaacatagtctccgcttaaatatatctatcactacttctttatcccccgagaataaccttacaaagaaaagaagtttgatgagtttaatttgttatacgacaacgttattgatgcctgtgatgtaaccgttgtttccgctccccgagtttccgttttttttcatgttttgctatcaatgaaataaaggtataaaactaaattggttttaaagttnnnnnnnnnnnnnnnnnnnnnnnnnnnn

SEQ ID NO: 118659 - DNA, 1323 bp, Arabidopsis thaliana
gaatttccgggtcgacccacgcgtccgctcaaaaatggagtataggtttcatatctctcgcttttctcatatctcttcctcttccgctgagctcctcattaaacaggccacagaaggcagaggaatagaatacaacagttctcacagttcacgaatggagtgacaagagtgtggagggatgaccgaccatcggataagattctttcgataaccagcttctcaataattaggacgagacctgaaccctatgaatcctctgtttttgaggctgttggttacaaatggagattggttttgtacgtgaatggtaatgaaaaggacggtggaaaagatcatgtttcactttacgcgaagatcgtagagacagaatctcttccagtaggatgggaagtgaatgttgatctcaaactctttgtctacaatgggaagcaacgcaagtatttgattgttaaagatggaatagtgaaacgatacaatgatgcgaaaaaagagtggggatacggaaaattgattcctcttacaacattccttgacacgaacgaaggttatcttgagcaggacattgcttcttttggtgctgagatcttcagcggcacagcggtccaagtacaagagaaagtcacattcatatccaaccctccaaacaatgttttcacttggaagatacttcatttctctaacttggaagataaattctattactctgatgattttcttgttgaagaccgatattggagattaggatttaacccaaaaggtactggtgatggaagatcacaagcgatcccaatcttcctatatgctcaaggccataagccaaacgcagttgctacaaacacttggggagcggttaatctgcggttaaagaatcaacgaagctccaaccacgcacaaatatattctgcagcttggtaccctactcgaagcgattatggtgtgggagttaacactatcatatcgttagcagaattcaatgatgcatcgaaagggtattcggtgaatgattccattatctttgaagctgaaatggtgaaggtctctgtgaccaacattgttcccatttaaatatctctattctctacttttctgtcatcgatcaaacaaccttatgagttatgaataaggagacgtttgatgagttttaataagatgaagtttaaaatgcatgtgatgtaatcgttatttcttggtcggtccttctttgttctgctttgttttcaataaaatgaaactctattgcttttaaaaaaaaaaaaaaaaagggcggccgctttaaaagaatccagcctacggaggcgtcctgcacgtcaagctctcaaggtc

SEQ ID NO: 118660 - DNA, 805 bp, Arabidopsis thaliana
tacgacggtaactatgggtaccgtgagcagttcacttttacatttggtgctgagatctacggggggaaaccagcccagcgaagggagaaagtcacattcatatcaaaccctccagacaatgttttcacttggaagatacttcatttctctaccttggaagataaagtctatcagtctaacgagtttcttgttggagaccgatactggaaattaggattaaacccgaaaggaggcttagtcccaatctttctatatgctcaaggccttaaggcaaacgcagttgttacaaccacttgggcagggacggttaggctgcggttaaagaaatcaacgaagctcagcaaccacgttacaactatattctgcagcttggtacccgattccaagcggattatggtgtgggagtgtacactatcatattgatgtcagagctaaaagatgcatcaaaagggtatatggtgaatgatgccattatctttgaagctgaaatggtaaggtctctgtgcccacaaaggtctcccgcttaaaaaaaaacccctacttcttaaccacccaaaaaacccttccaaaaagaagtttgatgagtttaatttgtaatccgccaccgtaattaaggcttgtaaggtaatcgtggtttcggctctccgagttttcggtttttttccatgttttgctaccaatgaaataaaggtataaacctaaaaaaaaaaaaaaaaggcggccgcttctagaggatccaagcttacgtacgcgtgccatgcgacgtcatagctctctaatagtggccaccctaaagccaaacccg

SEQ ID NO: 118661 - DNA, 846 bp, Arabidopsis thaliana
  unsure (1)..(846): unsure at all n locations
cnnnnnnnnnnnnnnnnnnnnnnnnnnnnnnnnnnnnnnnnnnnnnnnnnnnnnnnnnnnnnnnnnnnnnnnccacgcgtccgcccacgcgtncgtacggctgcgaggacgacagaagggtacggctgcgagaagacgacagaagggtccactgttgttaagttgcagagcgccatcaaattcaacggcggaggtcatgtcaaccatttcgatttctggaagaaccttgctccttccagtgaaggtggtggagaccaccaaaggatctcttggtagtgccattgacgctcactttggctcccttgaaggtctggtgaaaagatgagtgctgagggtgctgcagtgcaaggctcaggatgggtgtggctcggactagacaaagaactgaagaagctagttgttgacacaactgccaatcaggatccattagtgacaaaaggaggaagcttggtacctctggtgggtatagatgtttgggagcacgcctactacttgcagtacaaaaatgtgaggcctgagtatctgaagaatgtatggaaagtgatctactggaaatatgcaagcgaggtttatgagaaggaaaacaactgaatcgtttacacgatgacataaggagatgaaccagttccagctcagcttttgttttaaggttgtctgaaacaaacttacagtgtctctttggtttttaagatttgcgccactcagctgtgtgggacgttgttttaccatgaaagttttccagaataaaaatttgctattattgtctccaaaaaaaaaaaaaaaaaaaaaccaaannagcggccgctttaaaggaatccagcttacggaagcggcacatccacgtca

SEQ ID NO: 118662 - DNA, 1006 bp, Arabidopsis thaliana
  unsure (1)..(1006): unsure at all n locations
gccggcactaatacgactctcttagggaaagctggtacgcctgcaggtaccggtccggaattcccccacgcgtccgctcatttcctccaaacgtcaaacatagcagcagccatggctgccaccaacacaatcctcgcattctcatctccttctcgtcttctcattcctccttcctccaatccttcaactctccgttcctctttccgcggcgtctctctcaacaacaacaatctccaccgtctccaatctgtttccttcgccgttaaagctccgtcgaaagcgttgacagttgtttccgcggcgaagaaggctgttgcagtgcttaaaggtacttctgatgtcgaaggagttgttactttgacccaagatgactcaggtcctacaactgtgaatgttcgtatcactggtctcactccagggcctcatggatttcatctccatgagtttggtgatacaactaatggatgtatctcaacaggaccacatttcaaccctaacaacatgacacacggagctccagaagatgagtgccgtcatgcgggtgacctgggaaacataaatgccaatgccgatggcgtggcagaaacaacaatagtggacaatcagattcctctgactggtcctaattctgttgttggaagagcctttgtggttcacgagcttaaggatgacctcggaaagggtggccatgagcttagtctgaccactggaaacgcaggcgggagattggcatgtggtgtgattggcttgacgccgctctaagtcagagggctaagcaagtactcttatgtctactgtgttgatcttgtctgtttgaacagatgtaagaatcttagcaaataatgtttggcttaataaactttgatgtttatgttcattgcatcaatttttctctttttgaatttgtgacagtaatgtgtttacttttgatacaactttgtgtttgatcgtttaagaacattttggttttttttnnnnnnnnnnnnnnnnnnnnnnnnnnnnnnnn

SEQ ID NO: 118663 - DNA, 1546 bp, Arabidopsis thaliana
  unsure (1)..(1546): unsure at all n locations
tgatactctcagctctaatactgactcacttatggaaagctggtacgcctgcaggtaccggtccggaattcccgggtcgacccacgcgtccgttcttcacccaccaaaagtagcaaacctttgccacctaaaaatcttaccagttgggtgaaagttgccaaaatagagcttgcttttgtcgcaatcctatatttttcagattgattgttggtgggtttgtgtaaatggcggctcttttaggcagatcctgccggaaactgagttttccgagcttgagtcacggagctaggagggtatcgacggaaactggaaaaccattgaatctatactctgctattaatcaagcgcttcacatcgctttggacaccgatcctcggtcttatgtctttggggaagacgttggctttggtggagtctttcgctgtacaacaggtttagctgaacgattcgggaaaaaccgtgtcttcaatactcctctttgtgagcagggcattgttggatttggcattggtctagcagcaatgggtaatcgagcaattgtagagattcagtttgcagattatatatatcctgcttttgatcagattgttaatgaagctgcaaagttcagataccgaagtggtaaccaattcaactgtggaggacttacgataagagcaccatatggagcagttggtcatggtggacattaccattcacaatcccctgaagctttcttttgccatgtccctggtattaaggttgttatccctcggagtccacgagaagcaaagggactgttgttgtcatgtatccgtgatccaaatcccgttgttttcttcgaaccaaagtggctgtatcgtcaagcagtagaagaagtccctgagcatgactatatgatacctttatcagaagcagaggttataagagaaggcaatgacattacactggttggatggggagctcagcttaccgttatggaacaagcttgtctggacgcggaaaaggaaggaatatcatgtgaactgatagatctcaagacactgcttccttgggacaaagaaaccgttgaggcttcagttaaaaagactggcagacttcttataagccatgaagctcctgtaacaggaggttttggagcagagatctctgcaacaattctggaacgttgctttttgaagttagaagctccagtaagcagagtttgtggtctggatactccatttcctcttgtgtttgaaccattctacatgcccaccaagaacaagatattggatgcaatcaaatcgactgtgaattactagccgtactatctgtagtttactgtttacactaggactaatgtaatcgcatgtctttgttatcaattcgtctaatgtaacactaccgattaactttaatgaatttcaagataacgaaaaaaaaaaaaaaaaggactatctcacttaatgtgtacgaagattattatctaaaaaaaaaaaaaaagnnnnnnnnnnnnnnnnnnnnnnnnnnnnnnnnnnnnnnnnnnnnnnnnnnnnnnnnnnnnnnnnnnnnnnnnnnnnaaaat

SEQ ID NO: 118664 - DNA, 1361 bp, Arabidopsis thaliana
gacaaagacatttaaaagaagaattttcgaagaaaaattagagagagtagaagaagcagaagcagtaatggtacgagcttcatcgtcgaagaaaggaggatcaaaaggaggagacaaagacgacgcagagtcaaaacagaggaagagattaaaaaccctagctctcgataaccaattgctctctgattctccggcgaaatctcattcctctctcaaaccttcaaagcaagttctcaaacaccatggcaccgacatcatccgcaaatctcagcgcaagaatcgctttctcttctccttccctggtcttctcgctcctatctccgccgctaccatcggcgatctcgatcgattatctaccaaaaaccctgtcctctaccttaatttcccacagggtcgtatgaaactttttggaacgattttgtatccgaagaacagatacttgactcttcaattctctagaggaggcaaaaatgtcttatgtgatgattattttgataacatgattgtgttctctgagtcatggtggattgggacaaaagaggagaatccagaagaagctcgtcttgatttccctaaagaactagctcaggcagagaatactgagtttgatttccaaggcggtgctggaggagcagcttcggtgaagaagctggcgagtcctgaaattggtagccaaccaacagagacagactcacctgaagttgacaacgaggatgttttgtctgaggatggagaattcttggacgataagatccaagtaacaccaccagttcaattaacaccaccagtccaagtaactccggtccgacagtctcagagaaattctgggaagaaattcaactttgcagaaacttcctcagaggcctcctctggtgaaagtgaaggcaatacatctgatgaagatgagaaacctctgttggaacctgaatcttcaacaagaagtcgtgaggaatctcaagatggtaatggtattactgcatctgcaagcaagttgcctgaagaacttccggctaaaagggaaaaactaaagagcaaagacagtaagctcgttcaagctactttgtctaaccttttcaagaaagctgaggagaaaacagctggaacttccaaggctaaatcatcctcaaaagcttaaagaaatcttttccagaagaaaatagaggtctgttgtttctttgctgtgagaatgaacagtttttagttcttttaggtatgtttgtgtgagaaattgctacaagactgatgtattcatcatgcagttggataatgtattcattatgcttattcgatagtttgtgttcatcgagctatgtataaatcatctctgctctttttaatacaacaaactgtctccatctaaa

SEQ ID NO: 118665 - DNA, 2260 bp, Arabidopsis thaliana
  unsure (1)..(2260): unsure at all n locations
attctctctcttcttctctatgccaacgaagcaatagctatgaaaagctaaaccctttccttcttcttcttcttcttcttcttcttcttcttcgattgtttagattacttgggtttgacccaagtttgcttctttctatgattcatcaatctagatcttgctatctgggtccagaaacgattcacgcgcttcattcatgatataaagttactaccttttttttattttaccttctgggtcatggttttgtctgcttttcgtcttttgcttttgtctggatgattcataatctctcgagatctattatgttcacaagagttgttcttatgcgtggtgagatgatcttaggagtgtttcactatctttcttcaattcgggtttttagtttctgagatctgtttttgaagaatctgatctgagtttgaggaagtttgactaaatagatcgaagaagatgtttaagcagatacttgggaagcttcctaagaaaacttctgctaagttttgggataatggtgaatcccaaactctagataacaacaacaatcaaggaggaggtgatgaagttttaagccagagaacgtcatcaaatggagatactagtttggattgtgtttcttcttttgatgtattgccaaggttgagagatgtttccatctctgagaagcaagaactgtttcttaagaagcttagactatgttgtctagtgtttgattttgtagctgagcctcaacagaacttcaaggagaaagagatcaaaaggcaaacacttcttgaagttgtggattatgttatctcttcagggaatggcaagttccctgaatcagttattcaagaagctaccaagatgatttcggcgaatctctttagtaatcctcatcgacaatggaagaacaaaactcctgaggcattggatttggaagaagaagaaggatctttgaatccttcttggcctcacttgcagattgtttatgagttccttttgagaatcgttgcatctcccaacacagaccccaagatatccaagaaatacatcgatcatacattcgttctcaagctattggatttgtttgattctgaagatccgagggaaagagagtatctgaaaacgatacttcaccgcatctacgggaggtttatggttcatcgcccgttcatcaggaaaactatgaacaacatcttgtatgattttatattcgagacagggaaacactcgggaatcgccgagtttcttgaagttttaggatccatcatcaatggattcgctttaccactcaaggaagaacacaagctctttcttactcgtgtcttgattcctctgcacaagctgaaatgcttaccaaattaccatcaacagctttcttactgcgttatacagtttgttgagaaagattgtaagctcgcggataccgttattagagggatgttgaagtactggcctgttactaatagcgctaaagaaatcatgttcttgaatgaattggaggagatactagaagcaactcaattaacagagtttgaacggtgtatggttccgctctctcgccaaattgctcagtgcttgagcagttctcactttcaggtagcggaacgggctttatacttatggaacaacgatcatgtcactaatttagtgagacagaacagtagaatcattttacctatagtgtttcccgctttggagaaaaacggtagcagccattggaatcaggctgtgaagaacttgacagagaatgttctcaaggttttgtccgatacaaatcctgatttattcgaagaatgtttgcacaagttccaagaagatcagcaaaaagcagaagatactaaaaagaagaatggagaaacctggagacagctagaggagattgttgcttcaatggcgaagtaagagttttttctgcactttacgtgattcaacaagaaatcggtttattgttttgttttgtttcctttacgcctgaaaggtatatacatttactttgctttgcttgcttcatttaagtatctggtttcgactttaagactagtttaattcagttaaacagtgtgagattttacctttttcagttcttgatttgtctgtatacttggttcatgtaaacatcttgttatgaaaacacgaattttctattgtctgaagtcacttagtttatcagtgaaagagattgctgcggccgcnnnnnnnnnnnnnnnnnnnnnnnnnnnnnnnnnnnnnnnnnnnnnnnnnnnnnnnnnnnnnnnnnnnnnnnnnnnnnnnnnnn

SEQ ID NO: 118666 - DNA, 1691 bp, Arabidopsis thaliana
tgagaacgatcgatcaaaaatctctcccacgataaaaatgaggaccctgaagctcattgtacttaacgtcttcccctttccagaaaaatcaaccaaacccatttcagtttccccggaaagtttttgtctttcaatcaccattagaattcagctgcaacacaagtgtttgcaacagagagaatcatggagagagctatggaaagacaaaagatattgcttcgtcatctcaatccagtttcttcttctaattcttctcttaaacatgaaccttctcttctgtctcctgtgaattgtgtttctgaagtttccccaatggctgcttttggagatgacattgtgattgtagcggcatatcgtaccgccatttgcaaagcgagacgtggaggtttcaaagacactcttcctgatgatcttcttgcttctgttcttaaggctgtagtggaaagaacatctttggatccaagtgaagttggtgatatcgttgttggtaccgtgatagcgcctggttctcagagagcaatggagtgtagagttgcagcttattttgctggttttcctgactccgtgccagttagaactgtcaatagacaatgctcatcaggactacaagcagttgctgatgttgctgcttccattagagctggttattacgacattggtattggtgctggagtggaatcaatgtcaactgatcatattcctggaggcggctttcatggctctaatccaagagcacaggatttcccaaaagcccgtgattgtttgcttccaatgggaattacttctgaaaacgttgcagaaaggttcggtgtcacaagagaagagcaagatatggctgcggtggagtctcacaaacgcgctgcagctgcaatcgcgtctggtaaactcaaggatgaaatcattcctgttgctactaagattgtggaccctgagactaaagcagagaaggcaatcgtcgtatctgttgatgacggtgtacgtccaaactcaaacatggcagatttggcaaagctgaagactgtctttaaacagaacggttccaccacagctggcaatgctagtcagatcagtgatggtgctggagcagtactgctaatgaagagaagtttggctatgaagaagggacttcccattcttggagtattcaggagttttgctgttactggtgtggaaccatctgtaatgggtattggtccagctgttgccattcccgctgcaactaagctcgcagggctcaacgtcagcgatattgatctattcgagatcaatgaggcatttgcatctcagtatgtgtactcttgcaagaagttagagctggatatggaaaaggtcaatgttaatggaggagccattgctattggccatcccctgggtgctacaggagctcgatgtgttgcgacattgttgcacgagatgaagcggagaggaaaagattgccgctttggagtaatctcaatgtgcataggcactggaatgggagctgcagctgtttttgagaggggagactctgttgataacttgtccaacgctcgtgtggctaacggggatagtcattagaacatcgaagagagcttgaataagtagaagtaatgatgcattgagtctaataaatatgatgctttagctctttcacattgctgaacaatgaaaacttttgtcattctgagtttaaaatcaactacttttctctg

SEQ ID NO: 118667 - DNA, 1486 bp, Arabidopsis thaliana
cgcggtaccgttccggcatattgtctacttttagattttgatatctattggaactcttactagctcattcatccgtcggcctgtgaattgtgtttctgaagtttccccaatggctgcttttggagatgacattgtgattgtagcggcatatcgtaccgccatttgcaaagcgagacgtggaggtttcaaagacactcttcctgatgatcttcttgcttctgttcttaaggctgtagtggaaagaacatctttggatccaagtgaagttggtgatatcgttgttggtaccgtgatagcgcctggttctcagagagcaatggagtgtagagttgcagcttattttgctggttttcctgactccgtgccagttagaactgtcaatagacaatgctcatcaggactacaagcagttgctgatgttgctgcttccattagagctggttattacgacattggtattggtgctggagtggaatcaatgtcaactgatcatattcctggaggcggctttcatggctctaatccaagagcacaggatttcccaaaagcccgtgattgtttgcttccaatgggaattacttctgaaaacgttgcagaaaggttcggtgtcacaagagaagagcaagatatggctgcggtggagtctcacaaacgcgctgcagctgcaatcgcgtctggtaaactcaaggatgaaatcattcctgttgctactaagattgtggaccctgagactaaagcagagaaggcaatcgtcgtatctgttgatgacggtgtacgtccaaactcaaacatggcagatttggcaaagctgaagactgtctttaaacagaacggttccaccacagctggcaatgctagtcagatcagtgatggtgctggagcagtactgctaatgaagagaagtttggctatgaagaagggacttcccattcttggagtattcaggagttttgctgttactggtgtggaaccatctgtaatgggtattggtccagctgttgccattcccgctgcaactaagctcgcagggctcaacgtcagcgatattgatctattcgagatcaatgaggcatttgcatctcagtatgtgtactcttgcaagaagttagagctggatatggaaaaggtcaatgttaatggaggagccattgctattggccatcccctgggtgctacaggagctcgatgtgttgcgacattgttgcacgagatgaagcggagaggaaaagattgccgctttggagtaatctcaatgtgcataggcactggaatgggagctgcagctgtttttgagaggggagactctgttgataacttgtccaacgctcgtgtggctaacggggatagtcattagaacatcgaagagagcttgaataagtagaagtaatgatgcattgagtctaataaatatgatgctttagctctttcacattgctgaacaatgaaaacttttgtcattctgagtttaaaaaaaaaaaaaaaaaaa

SEQ ID NO: 118668 - DNA, 1303 bp, Arabidopsis thaliana
  unsure (1)..(1303): unsure at all n locations
tacgactcactatanggaaagctggcacgcctgcaggtaccggtccggaattcccgggtcgacccacgcgtccgcggacgcgtgggaaaacatctcttcacttctcatcacaccatgcatcatcatcatcatccatgcaatcgcaaacccttcacaaccatcttctccttcttccttctctatctcaatctccataaccaacaaattatcgaagctcgaaatccatctcaatttacgaccaacccatcccctgacgtctctataccggaaatcaaacgtcacctccaacagtacggttacctcccacaaaacaaagaatccgacgacgtttcgttcgaacaagctctcgttcgttaccagaaaaatctcggtctaccaataaccggtaaaccggattccgacacgttgtcacagattctattaccaagatgtgggttccctgatgacgtggaacccaaaacggcaccgtttcacacaggaaaaaaatacgtgtacttccccggacggcccaggtggacaagagacgtcccactgaaactcacgtacgccttctcgcaggagaacctaactccttacttagcaccaacagacatacgggtgttccgacgcgctttcggcgagtgggcttcggtgatcccagtatccttcatcgaaacagaggattacgtcatcgccgacatcaagatcggattcttcaacggagatcacggcgacggagaaccgttcgacggcgttttaggtgttttagcacacactttctctccggaaaacggtaggcttcatctagacaaagcagagacgtgggccgtagatttcgatgaggaaaaatctagtgtggccgtcgatttggaatctgtggcggtgcacgagatcggtcacgtgcttggattaggacatagctcggtgaaagacgcggctatgtatccaactttaaagccaagaagtaagaaagtgaatttgaatatggacgacgtcgttggagtacagtctttgtacggaacaaaccctaatttcacgttaaatagtttacttgcgtcggaaacttcgacaaatctagccgatggttcgaggatacggtctcaaggaatgatctattcggctttgagtactgttatcgctctctgttttcttaattggtagttcgtagacttagataattttctttatacaagaaatccgaaaacgtatagaatcatacagacgcatgaatttgttgttcaaagtagtagtctaatcctatgtttctgtttagaataataccatgttcttttttagtttatattagattgggcttcaagttatc

SEQ ID NO: 118669 - DNA, 599 bp, Arabidopsis thaliana
  unsure (1)..(599): unsure at all n locations
nnnnnnnnnnnnnnnnnnnnnnnnnnnnnnnnnnnnnnnnnnnnnnnnnnnnnnnnnnnnnnnnnnnnnnccacgcgtccgctaaattttgcttctccttttcttaaaccaaccttaggatagttttcaaagaaagaaatatgcttaaaccaaaacatttttgagaagacgatggctcgataccgaccactgaagtcgttccaacctcttcaatggatagtactgtaatttttggtaatatttcaaaagttcaacactcaacagtcaacatctatattatttttttctttattcaacaagtcgaatccaaatttggtgtgttttggtttagctaatcacttgcgactaaactaaacacaatccactaatcatttaataacgaaacggtccaacccccattaaaccaaactatttttcatatttataacaaagcttttccctccacgcaacttcaatatccagaataacagaacatctcttcacttctcatcacaccatgcatcatcatcatcatccatgcaatcgcaaacccttcacaaccatcttctccttcttgcttctctatctcaatctccataaccaacaaattattcgagctc

SEQ ID NO: 118670 - DNA, 1109 bp, Arabidopsis thaliana
aatacgactcactttagggaaagctcgtacgcctgcaggtaccggtccggaattcccgggtcgacccacgcgtccgtacggctgcgagaagacgacagaaggggacaggaactctcttccttgcaaaaaaataaaacactatttcctccaaatacacgtagagagatacatatatacatatagagatcaacaaagatgggaagatcaccatgctgcgagaaagctcacatgaacaaaggagcttggactaaagaagaagatcagcttcttgttgattacatccgtaaacacggtgaaggttgctggcgatctctccctcgcgccgctggattacaaagatgtggtaagagttgtagattgagatggatgaattatctaagaccagatctcaaaagaggcaattttactgaagaagaagatgaactcatcatcaagctccatagcttgctcggtaacaaatggtctttaatagctgggagattaccaggaagaacagataacgagatcaagaactattggaacactcatatcaagaggaagcttctcagccgtgggattgatccaaactctcaccgtctgatcaacgaatccgtcgtgtctccgtcgtctcttcaaaacgatgtcgttgagactatacatcttgatttctctggaccggttaaaccggaaccggtgcgtgaagagattggtatggttaataattgtgagagtagtggaacgacgtcggagaaggattatgggaacgaggaagattgggtgttgaatttggaactctctgttggaccgagttatcggtacgagtcgactcggaaagtgagtgttgttgactcggctgagtcgactcgacggtggggttccgagttgtttggagctcatgagagtgatgcggtgtgtttgtgttgtcggattgggttgtttcgtaatgagtcgtgtcggaattgtcgggtttctgatgttagaactcattagagagtcaatcgagaattctttaggaatctttttatatatttagatcgtcaattgtgttttttttttgttcacatttgttatgtaacatcaagtaagaaactagcataattatttgatggcaaagccaaaagattgtgctc

SEQ ID NO: 118671 - DNA, 1203 bp, Arabidopsis thaliana
cagtaccggtccggaattcccgggtcgacccacgcgtccgcaatccctcaatataaaataacaagtagaattgatctgcctatatataagattttgagacgaaatccacgcgtccgcccacgcgtccgagtaaacataaaagtatgggaaggtcaccgtgctgtgagaaagctcacacaaacaaaggagcatggacgaaagaagaggacgagaggctcgtcgcctacattaaagctcatggagaaggctgctggagatctctccccaaagccgccggacttcttcgctgtggcaagagctgccgtctccggtggatcaactatctccggcctgaccttaagcgtggaaacttcaccgaggaagaagacgaactcatcatcaagctccatagccttcttggcaacaaatggtcgcttattgccgggagattaccgggaagaacagataacgagataaagaactattggaacacgcatatacgaagaaagcttataaacagagggattgatccaacgagtcatagaccaatccaagaatcatcagcttctcaagattctaaacctatacaactagaaccagttacgagtaataccattaatatctcattcacttctgctccaaaggtcgaaacgttccatgaaagtataagctttccgggaaaatcagagaaaatctcaatgcttacgttcaaagaagaaaaagatgagtgcccagttcaagaaaagttcccagatttgaatcttgagctcagaatcagtcttcctgatgatgttgatcgtcttcaagggcatggaaagtcaacaacgccacgttgtttcaagtgcagcttagggatgataaacggcatggagtgcagatgcggaagaatgagatgcgatgtagtcggaggtagcagcaaggggagtgacatgagcaatggatttgattttttagggttggcaaagaaagagaccacttctcttttgggctttcgaagcttggagatgaaataatattgtcaaattttaggcgtaactgtacaaaacttttgcctagataatttgaaagtatatcttcaacttgtatgagaaatttaactggtgaattataatatatagaatttgttttttaaaaaaaaaaaaaaaaaagggcggccgctctagaggatccaagcttacgtacgcgtgcatgcgacgtcaaagatctttctatagtgtgcaccta

SEQ ID NO: 118672 - DNA, 604 bp, Arabidopsis thaliana
  unsure (1)..(604): unsure at all n locations
atccaagtgccccaccaaatgcttcaatcctcttccactacacaaaaaaacaacttaatccctttatacccttttagccaaaaccctcgctaaaagccaatccctcaatataaaataacaagtagaattgatctgcctatatataagattttgagacgaaataagatctaaaccacaagaaagaaagtaaacataaaagtatgggaaggtcaccgtgctgtgagaaagctcacacaaacaaaggagcatggacgaaagaagaggacgagaggctcgtcgcctacattaaagctcatggagaaggctgctggagatctctccccaaagccgccggacttcttcgctgtggcaagagctgccgtctccggtggatcaactatctccggcctgaccttaagcgtggaaacttcaccgaggaagaagacgaactcatcatcaagctccatagccttcttggcaacaaatggtcgcttatttccgggagattaccgggaagaccaggttancgggntaaanaactttttngaccacgggtttttacngnggnaaggnttnttaaaccaggggggtttnttcccaacgggnttatnngccnnttccaagg

SEQ ID NO: 118673 - DNA, 1447 bp, Arabidopsis thaliana
ttgtactcagtaacttctctttctcacttacacactctctctctctctctccattgccttgacttttgtggtcagtggaataaacacatataaccgccggagaaaatgggaagagcgccatgttgcgagaaggtcggtatcaagagagggcggtggacggcggaggaggaccagattctctccaactacattcaatccaacggtgaaggttcttggagatctctccccaaaaatgccggattaaaaaggtgtggaaagagctgtagattgagatggataaactatctaagatcagacctcaagcgtggaaacataactccagaagaagaagaactcgttgttaaattgcattccactttgggaaacaggtggtcactaatcgcgggtcatctaccagggagaacagacaacgaaataaaaaattattggaactctcatctcagccgtaaactccacaacttcattaggaagccatccatctctcaagacgtctccgccgtaatcatgacgaacgcttcttcagcgccaccgccgccgcaggcaaaacgcagacttgggagaacgagtaggtccgctatgaaaccaaaaatccacagaacaaaaactcgtaaaacgaagaaaacgtctgcaccaccggagcctaacgccgatgtagctggggctgataaagaagcattaatggtggagtcaagtggagccgaggctgagctaggacgaccatgtgactactatggagatgattgtaacaaaaatctcatgagcattaatggcgataatggagttttaacgtttgatgatgatatcatcgatcttttgttggacgagtcagatcctggccacttgtacacaaacacaacgtgcggtggtgatggggagttgcataacataagagactctgaaggagccagagggttctcggatacttggaaccaagggaatctcgactgtcttcttcagtcttgtccatcggtggagtcgtttctcaactacgaccaccaagttaacgatgcgtcgacggatgagtttatcgattgggattgtgtttggcaagaaggtagtgataataatctttggcatgagaaagagaatcccgactcaatggtctcgtggcttttagacggtgatgatgaggccacgatcgggaatagtaattgtgagaactttggagaaccgttagatcatgacgacgaaagcgctttggtcgcttggcttctgtcatgatgatattgattgatccgttatgtaatcttttttgtgcattcacagtttgaatctattccacgtcgtatcatatcataaagtttaggatctaaatattagtccattagttaaaattatgtaatgcaataaaacccatgggatgtttggattgtacgtaaggttaaaatattgcagtttttgctttagtggaagaattaaactaatatgatgtttttatttgtatcgt

SEQ ID NO: 118674 - DNA, 1186 bp, Arabidopsis thaliana
cctacatccgtatgcctatatataggtggttgcaaggcttacccaaatctctcttcaacttgccataacatttactctctttggacaaagacacagacagagagatagataaaaacagagaattgtcatagaaccaattcagagagaacgagagagagagagagagaaatggggagacaaccatgctgtgacaaagtagggttgaagaaaggaccatggactgcagaagaggataggaagctcataaacttcatccttaccaatggacaatgttgttggagagctgttcctaagctttctggtcttcttaggtgtggcaagagttgcagacttcgttggactaactatcttagaccagaccttaagagaggtcttctctctgattacgaagagaagatggtcattgatctccattcccagcttggaaacaggtggtcaaagatagcttctcatttaccaggaagaacagacaacgaaatcaagaatcattggaacactcacatcaagacgaagttgaggaaaatggggattgatcttcttacacataaaccactctctatcgtcgaaaaagaagacgaagaacccttaaagaagctacagaataatacagttccttttcaagaaacaatggagcgtcctttagagaacaacatcaagaacatatcaagacttgaagagtctttaggtgatgatcaattcatggagataaatcttgagtatggtgtcgaagatgtccctcttattgaaacagagtctttagaccttatctgcagcaattcaacaatgtcttcatccacgtccacatcttcgcattcttctaatgattcgagtttcttgaaggatttgcagttcccggagttcgagtggtccgactatggtagtagtaataatgataataataatggtgtggacaacattatagagaacaatatgatgagcctgtgggaaattagtgactttagcagtttggatttgctgcttaatgatgagagttcttccacttaaaaaaaaaaaaaaaaaaattcttaagaatatggtttcttttgtaaaagaatggaaactatggggtgggggaaacagaaaaacctaaatacccttcgttactctagtttttgagggatttgagagaacgtttttttacttgtgagaaatttagaaacaaaaataaagtttatttattttgtac

SEQ ID NO: 118675 - DNA, 1387 bp, Arabidopsis thaliana
  unsure (1)..(1387): unsure at all n locations
cacttggaagagaacaacaacgacaagatcaagaaaagacaaagatttgtaagaaaatgggaagagctccatgctgcgacaaggcaaacgtgaagaaaggaccatggtcaccggaagaagatgtgaagctcaaggattacatcgacaaatatggcactggtggcaactggatcgcactgcctcagaaaattgggctgaagagatgtggtaagagttgcagactgagatggcttaattacttaagaccaaacatcaaacatggtggtttttctgaggaagaagatagaatcatcttgagtctctacattagcattggaagccggtggtccataattgcagctcagcttcctggaaggactgacaatgatatcaagaattattggaacacaaaactgaagaagaaacttctaggaagacagaaacaaatgaatcgtcaagactccataaccgattctactgagaacaacctcagcaacaataacaacaataagagtcctcaaaatctgagcaattcggcactggagaagctccagcttcacatgcagcttcagaatctacagagccctttctctagtttctacaacaaccctatcttgtggcccaagcttcatccattgctccagagcactacaactaatcaaaaccctaagcttgcatctcaagaaagcttccaccctttaggagttaacgttgatcatcagcacaacaataccaagctagctcagataaacaatggagcctcttctctctattcggagaacgtagagcaatcccaaaaccctgctcatgaatttcaacctaatttcggtttttcacaggaccttcgattagataatcataacatggactttatgaacagaggggtttctaaagaactgtttcaagtgggcaacgagtttgagctaacgaacggttcgagttggtggtcagaggaagtggaactagagaggaaaacgacgtcgtcgagttcttgggggtcagcttctgtgcttgatcagacaactgagggaatggttatgcttcaagattacgctcagatgagctaccacagtgtttaataagttatatcatgcatatatataaatgcgtaactatagggatggataatggattattgatggaatatgtattttattacggtcataagcttatagcatgttgatggtgaaaggggctttttcataatttgttttaaaatgtaacgagttgtggataataatgttaatcgttaattcaaaaaaaaaaaaaaaaattttggaaaaaataggagacgtaaataaactttgatcgnnnnnnnnnnnnnnnnnnnnnnnnnnnnnnnnnnnnnnnnnnnnnnnnnnnnnnnnnnnnnnnnnnnnnnnnnnnnnnnnnnnnnnnnnnnnnnnnn

SEQ ID NO: 118676 - DNA, 1596 bp, Arabidopsis thaliana
  unsure (1)..(1596): unsure at all n locations
gtccgaaactagatctctcttctcctctgctcgttcaatgttataacgatctcgagtatcacaaaagaacaagatgtctattcgaagaatctaccgatgtctgaattctttaatcaaaagatcttgtgctcaatctctatgatcatacgccccatttcacactttgtttcacctctcagtttttttttttgtgtttttttgtccctctttgtttcacttgagaacaaccccctttgaactcgatcaagaaagctaagtttgaagaatcaagaatggtgcggacaccgtgttgcaaagccgaactagggttaaagaaaggagcttggactcccgaggaagatcagaagcttctctcttaccttaaccgccacggtgaaggtggatggcgaactctccccgaaaaagctggactcaagagatgcggcaaaagctgcagactgagatgggccaattatcttagacctgacatcaaaagaggagagttcactgaagacgaagaacgttcaatcatctctcttcacgcccttcacggcaacaaatggtctgctatagctcgtggactaccaggaagaaccgataacgagatcaagaactactggaacactcatatcaaaaaacgtttgatcaagaaaggtattgatccagttacacacaagggcataacctccggtaccgacaaatcagaaaacctcccggagaaacaaaatgttaatctgacaactagtgaccatgatcttgataatgacaaggcgaagaagaacaacaagaattttggattatcatcggctagtttcttgaacaaagtagctaataggttcggaaagagaatcaatcagagtgttctgtctgagattatcggaagtggaggcccacttgcttctactagtcacactactaatactacaactacaagtgtttccgttgactctgaatcagttaagtcaacgagttcttccttcgcaccaacctcgaatcttctctgccatgggaccgttgcaacaacaccagtttcatcgaactttgacgttgatggtaacgttaatctgacgtgttcttcgtccacgttctctgattcctccgttaacaatcctctaatgtactgcgataatttcgttggtaataacaacgttgatgatgaggatactatcgggttctccacatttctgaatgatgaagatttcatgatgttggaggagtcttgtgttgaaaacactgcgttcatgaaagaacttacgaggtttcttcacgaggatgaaaacgacgtcgttgatgtgacgccggtctatgaacgtcaagacttgtttgacgaaattgataactattttggatgagtgaaactcataatcgatgaatcccacgtgaccatgtcaatatgatgtctatggatatgttaccttgatgatgttgatggtaataataataaataatagatggtgatgatgaccatgcatgaatcatgaatgtagttcgtgttgtcacatatgcttgtgtttttgtgttttttttttttggtctgaagtgtgttgtttcgttgtaaatggattataaatggtgatgtaataattataatgttnnnnnnnnnnnnnnnnnnnnnnn

SEQ ID NO: 118677 - DNA, 1067 bp, Arabidopsis thaliana
acccacgcgtccggagaagtaaaattttctattgcagagagaaagagagttagagaaagagagagagagatgaaacttgtgcaagaagaataccgtaaaggaccgtggacagaacaggaggacatcctcttggtcaactttgtccacttgttcggagatcgaagatgggattttgtagcgaaagtttcaggtttaaacagaacaggaaagagttgcaggttaaggtgggttaattacctgcatcctggtctcaaacgtggtaagatgactccacaagaagagcgtttagtccttgagcttcacgccaaatggggaaacaggtggtcaaaaattgcccggaaattaccggggagaacagataatgagataaagaactactggaggactcatatgaggaagaaggctcaagagaagaagcgacctatgtctcctacttcctcatcttcaaactgttgctcatcatctatgaccactactactactcaagacactggaggctccaacgggaaaatgaatcaagaaggcgaagacgggtactactccatggatgacatatggagagagattgatcagtctggacacgttattaaaccggtaaaagacaactactactcagagcaaagctgttacttgaatttccctcctctggcttctccaacatgggaaagttccttggaatctatatggaacatggatgcagatgaaagtaagatgtcttcttttgctattgatcagtttcctctaagttttgaacatggtagtggtcgcctttagtctaggatttgattcatttggaatgtttatatgtgcagcatatatatgttatcaaacgacgactgtagtagtttcctatgacttacatcaaaaatcaccacccactgtactaatctcataagtagtcatcatcttatgcctttgtttagtttgtagagtgagtgaaaagatgtgtaatacaagtcagaactctatttccaaaataaatagacttttgaagcttctgtgaaaaaaaaaaaaagggcgaagggtgtacagtatacaagcttacggccgcgcgcatgcgactcaag

SEQ ID NO: 118678 - DNA, 579 bp, Arabidopsis thaliana
  unsure (1)..(579): unsure at all n locations
tcaggtactactctacagacattatgaggaagctcggcacgcctgcgtgtgctgggcatgctatacaggggtcgacccacgcgttcgattttctattgcagagagaaagagagttagagaaagagagagagagagagagagagagagagatgaaacttgtgcaagaagaataccgtaaaggaccgtggacagaacaggaggacatcctcttggtcaactttgtccacttgttcggagatcgaagatgggattttgtagcgaaagtttcaggtttgaaggtggagggagaaacataagaataggtttaaacagaacaggaaagagttgcaggttaaggtgggttaattacctgcatcctggtctcaaacgtggtaagatgactccacaagaagagcgtttagtccttgagcttcacgccaaatggggaaacaggtggtcaaaaattgcccggaaattaccggggagaacagataatggggtaaagaacttctggagggnctcatatnngggagaagggctcaaggggaggnagcggcctttgnctcctacttcctcannttcaaacttnttgctcnntca

SEQ ID NO: 118679 - DNA, 961 bp, Arabidopsis thaliana
gagaggaagagagagagagaaagatgggtaggcctccatgctgtgacaagatagggatcaagaaaggaccatggactcctgaagaagatatcattcttgtttcttacattcaagaacatggtcctggaaactggagatcagttcccaccaacactgggttattgagatgcagcaaaagttgtagactgagatggacaaattatctgagacctggaattaaacgtggaaactttactcctcatgaagaaggaatgatcattcacttgcaagccttattgggtaacaaatgggcgtccatagcttcatacctaccacaaagaacggacaatgatatcaagaactactggaacacacatttaaagaagaagctcaacaagtctgacagtgatgagaggagcagatcagagaacattgcgctgcaaacttcttcgacaagaaacaccattaatcatagatctacctatgcttcaagcacagaaaacatttcccgccttgtggagggttggatgagagcgtctccaaagagtagtacaagtactactttcttggaacacaaaatgcagaaccggacaaacaatttcatcgatcatcacagtgatcagtttccatacgagcagcttcaaggttctagggaagagggtcatagcaaaggaatcaacggggatgatgaccagggtataaagaattcagagaataacaacggtgatgatgttcatcatgaagatggtgatcatgaggatgatgatgatcataatgcaacaccaccattgacatttattgagaaatggcttttggaggaaacaagtactactgggggtcaaatggaagagatgagccacttgatggagctctctaatatgctttaattgtgacattttctcctttattttttctttatccttgtgaatcttataaatgagactactaattttatatacacaaataaagaaaccagaaagac

SEQ ID NO: 118680 - DNA, 1279 bp, Arabidopsis thaliana
catcaacataagagagagagaagaaaaaaagaattacaattaataagaacaagatcaagaatcaagaatcaagaaaatgggaagagcaccgtgttgtgataaggccaacgtgaagaaagggccttggtctcctgaggaagacgccaaactcaaagattacatcgagaatagtggcacaggaggcaactggattgctttgcctcagaaaattggtttaaggagatgtgggaagagttgcaggctaaggtggctcaactatttgagaccaaacatcaaacatggtggcttctccgaggaagaagacaacatcatttgtaacctctatgttactattggtagcaggtggtctataattgctgcacaattgccgggaagaaccgacaacgatatcaaaaactattggaacacgaggctgaagaagaagcttctgaacaaacaaaggaaagagttccaagaagcgcgaatgaagcaagagatggtgatgatgaaaaggcaacaacaaggacaaggacaaggtcaaagtaatggtagtacggatctttatcttaacaacatgtttggatcatcaccatggccattactaccacaacttcctcctccacatcatcaaatacctcttggaatgatggaaccaacaagctgtaactactaccaaacgacaccgtcttgtaacctagaacaaaagccattgatcacactcaagaacatggtcaagattgaagaagaacaggaaaggacaaaccctgatcatcatcatcaagattctgtcacaaacccttttgatttctctttctctcagcttttgttagatcccaattactatctgggatcaggagggggaggagaaggagattttgctatcatgagcagcagcacaaactcaccattaccaaacacaagtagtgatcaacatccaagtcaacagcaagagattcttcaatggtttgggagcagtaactttcagacagaagcaatcaacgatatgttcataaacaacaacaacaacaacaacatagtgaatcttgagaccatcgagaacacaaaagtctatggagacgcctcagtagccggagccgctgtccgagcagctttggccggagggacaacgagtacatcggcggatcaaagtacaataagttgggaggatataacttctctagttaattccgaagatgcaagttacttcaatgcgccaaatcatgtgtaacattttgtttaaaactttatttgtacttacatacataaagaggggttttctattttgtaaaaaaaaaaaaaa

SEQ ID NO: 118681 - DNA, 1027 bp, Arabidopsis thaliana
  unsure (1)..(1027): unsure at all n locations
ccacgcgtccgtaccttttacaatttgtttatatattttacgtatctatctttgttccatggagggttcgtccaaagggctgcgaaaaggtgcttggactactgaagaagatagtctcttgagacagtgcattaataagtatggagaaggcaaatggcaccaagttcctgtaagagctgggctaaaccggtgcaggaaaagttgtagattaagatggttgaactatttgaagccaagtatcaagagaggaaaacttagctctgatgaagtcgatcttcttcttcgccttcataggcttctagggaataggtggtctttaattgctggaagattacctggtcggaccgcaaatgacgtcaagaattactggaacactcatctgagtaagaaacatgaaccgtgttgtaagataaagatgaaaaagagagacattacgcccattcctacaacaccggcactaaaaaacaatgtttataagcctcgacctcgatccttcacagttaacaacgactgcaaccatctcaatgccccaccaaaagttgacgttaatcctccatgccttggacttaacatcaataatgtttgtgacaatagtatcatatacaacaaagataagaagaaagaccaactagtgaataatttgattgatggagataatatgtggttagagaaattcctagaggaaagccaagaggtagatattttggttcctgaagcgacgacaacagaaaagggggacaccttggcttttgacgttgatcaactttggagtcttttcgatggagagactgtgaaatttgattagtgtttcgaacatttgtttgcgtttgtgtataggtttgctttcaccttttaatttgtgtgttttgataaataagctaatagtttttagcattttaatgaaatatttcaagtttccgtgttacaaaaaaaaaaaaaaaaaaaagggcggccgctctagaggatcccagcttacgtacgcgtgcatgcgacgtcatagctcgtctatnnnnnaacgnnnnnnnnn

SEQ ID NO: 118682 - DNA, 517 bp, Arabidopsis thaliana
  unsure (1)..(517): unsure at all n locations
nnnnnnnnnnnnnnnnnnnnnnnnnnnnnnnnnnnnnnnnnnnnnnnnnnnnnnnnnnnnnnnnnnnnnnnccacgcgtccgtacggctgcgagaagacgacagaaggggggagggttcgtccaaagggctgcgaaaaggtgcttggactactgaagaagatagtctcttgagacagtgcattaataagtatggagaaggcaaatggcaccaagttcctgtaagagctgggctaaaccggtgcaggaaaagttgacgttaatcctccatgccttggacttaacatcaataatgtttgtgacaatagtatcatatacaacaaagataagaagaaagaccaactagtgaataatttgattgatggagataatatgtggttagagaaattcctagaggaaagccaagaggtagatattttggttcctgaagcgacgacaacagaaaagggggacaccttggcttttgacgttgatcaactttggagtcttttcgatggagagactgtgaaatttgattag

SEQ ID NO: 118683 - DNA, 1033 bp, Arabidopsis thaliana
  unsure (1)..(1033): unsure at all n locations
gtcgacccacgcgtccgtgggaagccacaataaccccctattcctcggccttttttaaaaaagttttagaataatccgataaaatacttttatattaatttttctttggtccatggagggttcgtccaaagggttgaggaaaggtgcatggactgctgaagaagatagtctcttgaggctatgtattgataagtatggagaaggcaaatggcatcaagttcctttgagagctgggctaaatcgatgcagaaagagttgtagactaagatggttgaactatttgaagccaagtatcaagagaggaagacttagcaatgatgaagttgatcttcttcttcgccttcataagcttctaggaaataggtggtccttgattgctggtcgattgcctggtcggaccgctaatgatgtcaaaaattactggaacacccatctgagtaaaaaacatgagtcttcgtgttgtaagtctaaaatgaaaaagaaaaacattatttcccctcctacaacaccggtccaaaaaatcggtgtttttaagcctcgacctcgatccttctctgttaacaatggttgcagccatctcaatggtctgccagaagttgatttaattccttcatgccttggactcaagaaaaataatgtttgtgaaaatagtatcacatgtaacaaagatgatgagaaagatgattttgtgaataatctaatgaatggagataatatgtggttggagaatttactgggggaaaaccaagaagctgatgcgattgttcctgaagcgacgacagctgaacatggggccactttggcgtttgacgttgagcaactttggagtctgtttgatggagagactgttgaacttgattagtgtttctcaccgtttgtttaagattgtgggtggcttttctttcgtattttagtaatgtatttttctgtatgaagtaaagaatttcagcattttaagaaaaatggttatgtttctacgtaataaaaaaaaacgttatttatnnnnnnnnnnnnnnnnnnnnnnnnnnnnnnn

SEQ ID NO: 118684 - DNA, 1638 bp, Arabidopsis thaliana
  unsure (1)..(1638): unsure at all n locations
tggtacgcctgcaggtaccggtccggaattcccgggtcgacccacgcgtccgggaaagaagcacgtggtgaatggacatgaagagaaaaggatgctaggtttaatataaattggaataagaagcagttagtggttgtgaaggaaggaaggaggcaagcaaccaaatctcagagacaattataacagtatagagaaggaagaaagaaaagaaaaagaaaccgttgttgatttagatacagagaagagaagatcatctaacatgggaagatctcctatctctgatgactctggtctcaagaaaggtccttggactcctgatgaagatgagaaacttgtcaactatgttcaaaaacatggtcatagtagctggagagcccttcccaaactcgctggtcttaacaggtgtgggaagagttgcaggctaagatggacgaactacttgagaccagacatcaagagagggagattctctccggacgaggaacagactatcttgaatcttcattcagttcttggaaacaagtggtcaacgattgcgaatcagttaccagggagaacagataacgagatcaagaatttctggaacactcatttgaagaagaagctgattcagatgggttttgatccaatgactcaccgtccaagaaccgatatcttctccggcttatcccagctcatgtctttgtcttctaacctgagaggctttgttgatctgcaacaacagtttcctattgatcaagaacacactatactcaaactccaaaccgagatggccaaactccaattgttccaataccttcttcaaccgtcttccatgagtaacaatgttaaccctaatgactttgacactctcagtctccttaactctattgcctctttcaaagagaccagtaataataccaccagcaacaatctcgacctcggtttcctcggctcttatcttcaggacttccacagcttaccttccctgaaaaccctaaattccaacatggaaccatcatctgttttcccccagaatcttgatgacaatcacttcaaattctccactcaaagagaaaacctacccgtgtctccaatctggctctcggatccatccagcacaactcctgctcatgtgaatgatgatctgatttttaaccaatacggtattgaagatgtcaatagcaatatcacatcttcaagcggtcaagaatcaggagcttcagcttcagctgcatggcctgatcatctattggatgattctatattttccgacattccttagccttcttttgtctttactttcaggtatgtactttggaggaactcaaatcaaatttactcttggaattgtgcttgttggagatttttatttgcctatctatatatatataaatactgtagagacatcatatatttgtaactcatgttgtagaatgtacagtacagagatttcatactcatatgcatatgttgttgtcaatgttctttagcatatgtctctgtgcccagagtttatatatatataaaatttttgtgggatgggnnnnnnnnnnnnnnnnnnnnnnnnnnnnnnnnnnnnnnnnnnnnnnnnnnnnnnnnnnnnnnnnnnnnnnnnnnnnnnnnnnnnnnnnnnnnnnnnnnnnnnnnnnnnnnnnn

SEQ ID NO: 118685 - DNA, 1505 bp, Arabidopsis thaliana
accacttgtacctctttgtcttaagtactctttaaccctacaatttcctaagctctcaagccacaaaaaaccacaaaccgttcttcaccaatatatatatctgatcatcatcaaagtccttctctctgctcataccacaaaccgttccattcttcccctaatcacaaagtgatatttacatagagaagatagagatgggaagaccaccatgctgtgacaagattggagtgaagaaaggaccatggacaccagaggaagatatcatcttggtttcttacatccaagaacatggtcctgggaactggagatctgtgcctactcacacaggtttgaggagatgtagcaaaagctgtagattgaggtggactaattatcttcgacctgggatcaagcgtggaaatttcaccgagcatgaagagaagatgattctccatcttcaagctcttttgggaaacaggtgggcagctatagcatcatatcttccagaaaggacagacaatgatataaagaactattggaacactcatttgaagaaaaagctcaagaagatgaatgattcttgtgatagtactatcaacaatggccttgataataaagacttctccatatcaaacaaaaacactacctcacatcaaagcagcaactccagtaaaggtcaatgggagagaaggcttcagacagatatcaacatggctaaacaagctctttgtgatgccttgtctattgacaaaccacaaaacccaactaatttttctattcccgatcttggttatggtccatcatcttcttcgtcctctaccaccaccaccaccaccaccaccaccacgagaaacactaatccatacccatctggggtctatgcttcaagtgctgagaacattgctcgtttgcttcagaattttatgaaagacacaccaaagacctcggtgcccttgccggttgcagccaccgagatggctatcaccacggcagcttcgagccctagcacaaccgaaggagacggagaagggattgaccattctttgttcagcttcaactccatagatgaagctgaagagaagcctaaactaatagaccatgacattaatggtctaattacacaaggctctctttctttgttcgagaaatggctctttgatgagcaaagccacgatatgatcatcaataacatgtcactagagggtcaggaagtgttgttctagaaagcattaaagtttgacgatttgcttgaggaaccacgaggcttagttataaacaatttgtataattaagtactctttagttttgttttcaatccttattatgatcatattgcagtaattagggattttagtctttagtagtaactcttaagttttaacacatttttctctatctttttagtagtaactctttattttttccttaaatctttgtcgacgtggagatgatatcttctatgtagtagaaactcaaaagtgtacatcatctttattaatgtaacgtctttttaaaaaaaaaaaaaa

SEQ ID NO: 118686 - DNA, 1051 bp, Arabidopsis thaliana
attgggtacgggcccccctcgaggtcgacccacgcgtccgaagaaagaaaaccctaaaccaccggaaatcgatttctttggaagatggatatcgagcagaagcaagccgagatcattgatcagctcgtgaagcgagcttctacttgcaaatccgaggctctgggcccgctcatcatcgaagccacatcgcatccttctctcttcgccttctccgagattttggctctacccaatgttgcccagcttgaaggaaccacagattctgtgtacctggatctactacgcttgtttgcccatggcacctggggagactacaaatgcaatgccacccgtcttccgcacttgtcccctgaccaaattcttaagcttaagcagctcactgtcctcacccttgctgagtctaacaaggtattgccctatgatacactaatggtcgagttagatgtttccaatgttcgcgaactcgaggactttcttatcaatgaatgcatgtatgcgggtatagttaggggaaaactggatcagttaaaaagatgttttgaggttccgtttgcagctggtagggatctaaggccaggtcaactagggaatatgttacacacattgtccaactggttgaacacgtcagagaatctgctcatttcaattcaagacaagatcaaatgggcggacaatatgagtgagatggacaaaaaacatcgtaaggaagcagaagaaggggtggaagaagtgaagaagtctctgtccatgaagagggaataaggagatgtttggggaaccaagtggagtgatggactacgaagaagatgggatccgaccaaagaggaggaggcatcctgtaacaaggtagaggagcaagagagagcaaatggtcagtgcggattgacattccatttaccgagagtagattatgattatttggttgcggattttcaacttgtataagatcctctgttctctctcacaataaccccttgttatgtttgatttccctcattagcaaatttggtgtctttctgcccattaaaagaaaaatggctttgaatttagt

SEQ ID NO: 118687 - DNA, 1555 bp, Arabidopsis thaliana
  unsure (1)..(1555): unsure at all n locations
cagagctttccgccccacgcgtccgctcaggagcttccgccttattcagagtgtagaggaggatccaaaagaaaagaggaaaaaatggactatatgtatggaccagggagacaccatctgtttgtaccaggaccagtgaacataccggaaccggtaatccgggcgatgaaccggaacaacgaggattaccggtcaccagccattccggcgcttacgaaaacattgttggaggatgttaagaagatattcaagaccacatcagggacaccttttctgtttcccacgaccgggactggtgcttgggagagtgccttgaccaacacgttatctcctggagacaggattgtttcgtttctgattggacaatttagcttgctctggattgaccagcagaagaggcttaatttcaatgttgatgtggttgagagtgattggggacaaggtgctaatctccaagtcttggcctcaaagctctcacaagacgagaatcataccatcaaagccatttgcattgtccacaacgagaccgcgaccggagttaccaatgacatctctgctgtccgcacactcctcgatcactacaagcatccggctttgctgctagtggacggtgtttcgtccatctgcgcgcttgatttccgaatggatgagtggggagtggacgtggccttgactgggtctcagaaagccttatctcttccaacaggacttggtattgtctgcgccagtcctaaagctttggaagctaccaaaacttctaaatctctcaaagtattctttgactggaatgactaccttaagttttacaagctaggaacctattggccatacacaccttccattcaacttctctacggtcttagagctgctcttgatcttatctttgaggaaggacttgagaacatcatcgcccgccatgctcgtttgggaaaggccaccaggcttgcggtggaagcatgggggctgaaaaactgcacacagaaggaggaatggataagtaacacagtgacagcagttatggtgcctccgcatatagacggttcggagattgtgagaagggcatggcagaggtacaacttaagtcttggtcttggtctcaacaaagtggctggaaaggttttcagaattggacacctaggaaatgtgaatgagttgcaacttctcgggtgtcttgcgggagtggagatgatactgaaggatgttggatacccagttgtaatgggaagtggagttgcagctgcctctacttatcttcagcaccacattcctctcattccctctagaatctaatccatgtggtccttctctttctttctcttcctctcaatgtaaacaaactctcatgttttctcttttcttcatctatatttttactacattatctatgtttttatttgctatctccaacaaacttattgaacaaaagatcaaatatgtttattactcactaaaaaaaaaaaaaaaaannnnnnnnnnnnaaaccgnnnnnnnnnnnnnnnnnnnnnnnnnnnnnnnnnnnnnnnnnnnnnnnnnnnnnnnnnnnnnnnnnnnnnnn

SEQ ID NO: 118688 - DNA, 873 bp, Arabidopsis thaliana
  unsure (1)..(873): unsure at all n locations
nnnnnnnnnnnnnnnnnnnnnnnnnnnnnnncccacgcgtccggatatattaaagaggtttgtgaagacgaaggagtccaaaacctccctcaggagcttccgccttattcagagtgtagaggaggatccaaaagaaaagaggaaaaaatggactatatgtatggaccagggagacaccatctgtttgtaccaggaccagtgaacataccggaaccggtaatccgggcgatgaaccggaacaacgaggattaccggtcaccagccattccggcgcttacgaaaacattgttggaggatgttaagaagatattcaagaccacatcagggacaccttttctgtttcccacgaccgggactggtgcttgggagagtgccttgaccaacacgttatctcctggagacaggattgtttcgtttctgattggacaatttagcttgctctggattgaccagcagaagaggcttaatttcaatgttgatgtggttgagagtgattggggacaaggtgctaatctccaagtcttggcctcaaagctctcacaagacgagaatcataccatcaaagccatttgcattgtccacaacgagaccgcgaccggagttaccaatgacatctctgctgtccgcacactcctcgatcactacaagcatccggctttgctgctagtggacggtgtttcgtccatctgcgcgcttgatttccaatggatgagtggggagtggacgtggccttgactgggtctcaaaaagccttatctcttccacaagactnggattggctgcgccattctaaagtttggagctccaaaactctaatctctaaagattcttgacggaagacactaagtttacagcagaccattgcatcaacct

SEQ ID NO: 118689 - DNA, 507 bp, Arabidopsis thaliana
aatacgactcactttagggaaagctcgtacgcctgcaggtaccggtccggaattcccgggtcgacccacgcgtccgccgccttattcagaggttaaacttctctcttccttgcaaatttacttcttcgttttctccgcttgtttgtgtctatgatcttgcctatgaaacatctttttatagtacacatatatgttgtcttattggaaatatgatcggctaacatatttgttattgttattaacaaaaaaaataacatttgttattgttcaccggagttgatagtagcaatagtacatattacatggtcatatatgcatatggctacatgtttgagttatattcgattatctggtgaaagatgagattgtgagtttgtaagtttttgacagtgtagaggaggatccaaaagaaaagaggaaaaaatggactatatgtatggaccagggagacaccatctgtttgtaccaggaccagtgaacataccggaaccggtaatccgggcgatg

SEQ ID NO: 118690 - DNA, 1143 bp, Arabidopsis thaliana
  unsure (1)..(1143): unsure at all n locations
gagtcggggaacatgaatttcgacgagaccgtgccactgagccaacgattggagtggtcagacgtggtcccattgactcaggacgatggtccgaatccagtggtgccaattgcctacaaggaagagttccgcgagactatggattacttccgtgcgatttacttttccgacgagcgatctcctcgcgcactacgactcacggaagaaaccctcctcttaaactccggcaactacacagtgtggcatttcaggcgcctagtactcgaggcccttaatcacgacttgtttgaagaactcgagttcatcgaacgcattgctgaggataactctaagaactaccaactgtggcatcatcggcgatgggttgcagagaaactgggtcctgatgttgcagggagagaacttgaatttacccgtagagtactttcacttgatgccaaacattatcatgcttggtcacataggcagtggacactacgggcattaggaggatgggaagatgagctcgattactgtcacgagctccttgaagctgacgtctttaacaattccgcctggaatcagaggtattatgtcatcacccaatctcctttgttgggaggcctagaagccatgagagaatctgaagtaagctacacaatcaaagccattttaaccaatcctgcaaacgagagctcatggcgatacctaaaagcgctttacaaagacgacaaagaatcctggattagtgatccaagtgtttcctcagtctgtttgaatgttctatcccgcacagattgcttccatggattcgctctgagcacccttttggatcttctatgtgatggactgagaccaaccaacgagcataaagactcagtgagagctctagctaatgaagaaccagagactaacttggccaatttggtgtgtactattcttggtcgtgtagatcctataagagctaactattgggcatggaggaagagcaagattacagtggcagcaatttgaatatgtgacgccccaaaatcacacttgaaaaagacttgattattagtttttacgtaattaactgcttatttatgaatcacatgttcatgttaacatgtatcaaaacaatcttgatttctcnnnnnnnnnnnnnnnnnnnnnnnnnnnnnn

SEQ ID NO: 118691 - DNA, 1400 bp, Arabidopsis thaliana
  unsure (1)..(1400): unsure at all n locations
nnnnnnnnnnnnnnnnnnnnnnnnnnnnnnnnnnnnnnnnnnnnnnnnnnnnnnnnnnnnnnnnnnnnnnnnnnncccacgcgccacgcgtccggttcatttctcctccattgatctttctttactcagatctttcctcttcctctgagatgtggagctacgtttggttaccgttggtagctctatctctctttaaggatagcatcataatggccaaggctgcgacgattctcctccctagtcaaaccggatttgatatttctcggagtccggtatgctctgctccggatccgaacctaaattacagaccggttattggtattctgagccatcctggcgacggtgcgtcaggtcgtttgagcaatgctacagacgcgtcctccattgcggcttcgtatgtgaaattagctgagtctggtggagcacgtgtgatcccactcatctttaacgagcctgaagaaattctctttcagaagctagaattggtcaacggtgtgatactaactggtggttgggctaaagaaggattgtattttgaaatcgtcaagaaaatcctcaataaagttttggaaagaaatgatgctggagagcattttcctatatacgctatttgcctcggatttgagctcttgacaatgatcataagccagaacagagacatttttgaaaaaatggatgcaagaaattctgcatcaagtcttcagttcgttgaaaatgttaatatccaaggaaccatattccaaagatttcctccagagctgttgaaaaaactcggtacagattgtctggttatgcagaatcatcggtttggtatctcaccacaaagctttgaaggaaatattgctctgtctaatttctttaaaattgtcacaacatgcgttgatgacaacggcaaggtttatgtttcaacagttcaatcaacaaaatatccagtgaccggcttccagtggcatcctgagaaaaatgcattcgagtggggatcatctaaaattccacactctgaggacgcgatccaggtgagtcagcacgccgcaaatcatctagtcagtgaagctaggaagtcactgaacagaccagagtctaagaaagtgctgagcaatctcatttacaactataagcctacttactgtggatacgcagggattggttacgacgaggtttacatcttcacacaacaacgatcccttctctaataactataacctctcctgtgtatcctctcgtgtgtatagtgaaatatgtaccttcgactctgttattatctgtgaacttgttgtaactttgaacgtcagcctatggcttgtgtttgacattaaactaaataaaaaaaaaaagggcggccgctttagaggatccaagcttacgtacgcgtgcatcaacgtcgtgttagtctaacggaa

SEQ ID NO: 118692 - DNA, 994 bp, Arabidopsis thaliana
acaagatgggcggcctgagaggtgggttccaacacaccaaacacccttatggatccaggggggccggaaccccactcacccccaaagcttccaagaagtgccccggtatatacgggtggcaaaattatatctggtcgcaaaaatctcctaacttgaagaatatctgaagcttcccagatagcattgctcgaatcaggttagtcatttcctagtcagacaagccatcttaagatttatcagaggatatgcacaatctccggttgttataatgtaataacgatggaccttatccaagatttccgccagagttgttaaaaaactcagtccgattgttggttatgcagaaacgcaagtatgtatccaccaccaaacttcaagccaatcctgcttgtctagttttttggaatctcccaacctgcattgataaaacagcaagacttattttcaactgttaagcaaagagatacccaataactggcttccagtggcatcctgagaaaaatgcatttgaatggggatcatctgcgattccacactctgaggatgcaatccaggtgacacagcatgctgctagttatttagtcagtgaagctaggaagtcactgaacagaccagagtctcagaaagtgctgagcaatctcatttacaactataagcctacttactgtggatacgcagggaggggttacgacgaggtttacatttttacacaaccaagatcccgtttctaagaactttactcgtcgtcttgtgtgtttgtttggaactcttatttacatttagggagccggattgtcttgcatgatttcccttgttgattttatctctttggaattacatttcaaaagatacaaactgtgtttgattcgtctttctagcaaataacatttgacttttgagattaaaaaaaaaaaaaaaagggcggaagctctagaggatccaagcttacgtacgcgtgcaggcgacgtcatagatcttctatagtgtgtcctaa

SEQ ID NO: 118693 - DNA, 2564 bp, Arabidopsis thaliana
  unsure (1)..(2564): unsure at all n locations
acgcgcgnnnnnnnnnnnnnnnnnnnnnnnnnnnnnnnnnnnnnnnaacacgcgtccggttaaaaaagtaaaaacctaccccgcggccccgaaaccactcaaccaaaaaactagggttctgtttctcgtctctctctcaaacccacattgcacaatccatttctcgtttctctgatttagatccaaagatggatgggatgaagctttcgttcccaccggaaagtccaccactttcagtcatcgttgctctttctctctcagcttctccggtgacgattgattcttccgccgctgcaacaaccgtcccttcttttgtcttctccgacgggaggaaattgaatggagccaccgttcttcttcgctatgttggtcgatcagcgaaaaagcttcctgatttctatggcaacaatgcttttgattcttctcagattgatgagtgggtagattacgcatctgtcttctcttctggttcagagtttgagaatgcttgtggtcgtgttgataagtatctcgagagtagcacgtttcttgttggccattctctttccattgctgatgtcgctatttggtcagctcttgctggaactggtcaaagatgggaaagtttgaggaaatctaaaaagtatcagagtcttgttagatggttcaattcgatattagacgagtacagtgaggtgcttaacaaggttctagcaacttatgttaagaaaggatcagggaagcctgttgctgcacctaagtctaaagatagccaacaagctgtgaaaggagatggtcaggataaaggtaagcctgaagtggacttgccggaagcggagattggaaaggttaaactccggtttgctccagagccaagtggttatcttcacataggacatgctaaggctgcgttgctgaacaagtatttcgctgagcgttaccaaggggaagtgattgtgcgttttgatgatactaaccctgctaaagaaagcaatgagtttgtggataatcttgtgaaggatattgggaccttggggatcaagtatgagaaagtgacatacacttcggactattttcctgaattgatggatatggcggaaaaactgatgcgtgagggtaaggcatatgttgatgacacaccgagggagcagatgcagaaagagaggatggatgggattgattcgaaatgtaggaatcatagcgtcgaggagaatttgaagctatggaaggaaatgattgcaggaagtgagagaggattacagtgctgtgttcgtgggaaattcaacatgcaagatcccaacaaagccatgcgtgacccggtttattaccgatgcaatcctatgtctcaccaccgtatcggggataagtataagatatatccaacatatgactttgcttgcccgtttgttgattcccttgaaggtataacgcatgctcttcggtctagtgagtatcatgaccgaaatgctcagtactttaaagttctggaggatatgggactgcgacaggttcagctttacgaattcagccggttaaacctagtttttacacttctcagtaagcgcaagcttctctggtttgtccaaactggattggttgacgggtgggatgatccacgtttcccgacagtccaaggaattgttcgtagaggtttgaaaatcgaggctctgattcaattcattctcgagcagggggcttcgaagaatctaaatttgatggaatgggacaaactttggtctataaataagagaataattgatcctgtgtgccctagacacactgctgtggttgcagaacgtcgtgtactatttaccttaacggatggtcctgatgagccgtttgttcgcatgataccaaagcacaagaaattcgaaggtgctggagaaaaagccgaccactttcactaagagcatttggctcgaggaagctgatgcgagtgccatatccgttggtgaggaagtaactttgatggattggggaaatgctatcgtaaaggaaatcacaaaggacgaggagggtcgtgtcactgccttatctggtgtcttgaatctccaaggttctgtaaagactacaaagctgaagctgacatggcttcctgatactaatgaattggtcaatctcacattaacagagtttgattatctaatcaccaagaagaagctggaagatgatgatgaagttgctgattttgtgaatcctaacacaaagaaggaaacattggcacttggtgattcgaatatgaggaatctgaaatgtggagatgtgattcagcttgagaggaaaggctatttcagatgtgatgtgccttttgtcaaatcttcaaagcccattgtcttattctccattccagatggaagagccgctaagtgatcaatgaactatttttgagtttcccattttatgaacattgtgttgagaaatttgctctttaggttttaaaacaatgaaaacaaagctttttatcagttctttagtttcatctcataatagttttaaagttgcaaaaaaaaaaaaaaagnnnnnnnnnnnnnnnnnnnnnnnnnnnnnnnnnnnnnnnnnnnnnnnnnnnnnnnnnnnnnnnngtc

SEQ ID NO: 118694 - DNA, 1215 bp, Arabidopsis thaliana
gccgcgattgtgttcagatcggagctgatttcgaatttggatgtgaaattgagattctagggatttcaaattttgacgatcatggcgacgaggaatcgtacgttgctgtttaggaagtacagaaactctctgagaagcgtcagagctccattgtcgtcatcttcattgacgggaacacgatccggcggcgttggtccggtgatcgagatggcgagtacttcgttattgaatccgaatcgctcttacgctcctattagtaccgaagatcctggaacttctagtaaaggtgcgataacagtgggcttaccaccagcttgggttgatgtctctgaggagatatctgtgaatatacagcgtgcaaggactaaaatggctgagttgggaaaggctcatgccaaggcgttaatgccatcgtttggggatggtaaagaagatcaacataatattgagtctttgacacaggagataacttttctattgaagaagtctgagaagcaacttcagaggctttctgcttcagggccttctgaagattcaaatgttaggaaaaatgtgcagcggtctcttgccactgacctccaacttctttctatggagcttcgcaaaaaacagtcaacatatttgaaacgcttgaggcagcaaaaagaggatgggatggatttagagatgaatctgagcagaaacagatatagacctgaagaggatgactttggcgatatgttaaacgagcatcagatgtcaaagataaaaaagagtgaagaagtatctgtagagagggagaaagagatacaacaggttgtagaatcagtaaacgatcttgctcaaattatgaaggatctttctgcacttgtgatagatcagggtacaatagttgatcggatagactataatatcgaaaacgtcgctactactgttgaagatggtctcaaacaactacagaaggcagagcgaacgcagagacatggaggtatggtgaagtgcgcatccgtgcttgtcatcctctgtttcatcatgctgctactcttaatcctcaaggaaatattcttgtgatcggatactataatccctggttagatcaataagaaaagttcgatccttaactatttcattctttagccccgaacatcgcatgttttcctcgtgcgattgtttctatatcggtagcgaacacattgtgtcagaggatgttattaagaaaagaaagttaaaaaaaaa

SEQ ID NO: 118695 - DNA, 1339 bp, Arabidopsis thaliana
gtcgacccacgcgtccgagaagaaaaccctagatttctccgtctctctaatttcctttctctctcaagcttctcagaaagtctgacactttcgagaatctaatctccaaatttcttgtctttttggagaaggaatcgaattatgtacaaggaacgtagtggaggaggtggtggtgggtcatcgagatcagagatcctcggtggagctattgatcggaaacgaatcaacgatgcactcaataagaaactagagaaatcttcaacttccaccaccacatctagggttttctcttctaaagacaaagatcccttttccttcacatctactaaaactcagcttcctgatgtggaatcggaaactgatagtgaagggtctgatgtgagtggatcggagggtgatgatacgtcgtggatctcttggttttgtaatttgagagggaatgatttcttctgtgaagtcgatgaagattatattcaagatgatttcaatctttgtggtttaagtggtcaagtcccttactatgattatgcacttgatctcattttagatgttgatgcttccaacagtgagatgtttactgatgaacagcatgaaatggtggaatcagctgctgagatgctatatggtcttattcatgttcgttacattttgactactaaaggaatggctgcaatgactgagaagtacaagaactgtgatttcgggagatgcccgagagttttctgttgcggtcagtcttgtcttccagttggacaatccgatatcccgagatcgagtactgtgaagatatactgccctaaatgcgaggatatatcttacccgcgatctaaattccaaggcaatattgatggagcgtactttggaaccacattccctcacttgttcttgatgacttacgggaacttaaagccgcagaagcctactcaaagctatgtcccaaaaatctttggcttcaaggtacacaaaccatgatactagtgctctgcattctcaatggtgatacatttagtggctctgtaattgcatccggatgagcaactgaaacgatagctgcggtgactggagcatacatcaaccattgggttagaggatgagagctgaagttgaaagatggaatcttgaaagaatctcatgaagttccaagaaaacttagaagtgcaacagcctggctcattgggggaaaagaacgacacacttgggtcttgttgttgtctccgaaaagattttccccagttagttggattttgttttgaactgttggattattattcgtttttctaatttcatgtaaaactcataaatttcaactgaagtataacttagatcaatcaatttcatc

SEQ ID NO: 118696 - DNA, 1623 bp, Arabidopsis thaliana
  unsure (1)..(1623): unsure at all n locations
nnnnnnnnnnnnnnnnnnnnnnnnnnnnnnnnnnnnnnnaagctgtggaacgaatcttcgaagtcgaaactgcgtgtctacggattgaatctctgcagcagcttacgaccactgacccttttgcttttgattcaatcgatagacgacggatacaagttctcgctatcgccgagccggagccggagtctgagctgaagccctgtatctgtaactcttccaacagtggacataccttgagagatgaagatcgttcgcagggattttgttcgtaatggacccggaagcgttaagatggtggcagaggactctgatgatctctggtatgcttataacttgattgctgtgggcgatagtgtaatggctgtcactttcagaaaagttcagagagagatacctggtgggggaagagactctgaacgtgttaaactgaagctggaagtacaagttgaggaggtggactatgacaaagacggatctgttttgcgcatacgtggcaaaaatatcctggagaatgagcacgtaaagattggtgcattccatactttggaacttgagctgaaacgaccttttgtgttgagaaaggaaatgtgggactcaatggctcttgatacactcaaacaggcctcagatcccgctgctagtgctgatctagctgtagttctaatgcaagaaggactggcacaaatcttccttgtgggcagaagtgtgacaagtagccgtgcacgaatagaaacatccattcctaggaagcatggacctgcaattgctggttacgagtctgctttgaagaaattttttgagaatgttctgcaggcctttgtgaaacatgttgacttcagtgtcgttcgctgtgcagtagttgcaagtcccggcttcacaaaggatcagtttcatcgccacttattgttggaagcagaaagaagacaactgagacctattattgagaataaatcacgtataatattggtgcacacaaactctggatatagacatagcctgggtgaggttctccatgcccccaacgtgatgaatatgataaaagatacaaaagcagcaaaagaggtcaaagctctcaatgattttcacaacatgctttcaactgaaccagatcgggcatgctatggaccaaaacacgtggaagttgcaaatgaacgaatggcaattcaaacgcttctcataacggacgagcttttcaggaattctgacgtgaaaacaaggaagaagtatgtgaatttggtggagtcggtaaaagattcgggaggagatgcttttatattttcggcgatgcatgtgtcaggagaacaattggcacagctgactggaatagcagctcttctcaggttccctttaccagaactcgaagacattgagatgtaaaaaaatcttcggcttatagaaaacaatacaacaaatcatacacatctctcataatttatagtttatttgtactcagtgtcataaaaagagatttgtaactcattacaaattataagataaccattcgttgctgttttgttgttaagcaatttttctacataaaaaaaaaaaaaaaagggcggccgctctagaggatccaagcttacgtacgcgtgcatgcgacgtcatagtcttgtataggtcact

SEQ ID NO: 118697 - DNA, 1626 bp, Arabidopsis thaliana
  unsure (1)..(1626): unsure at all n locations
ggactcatattatagggaaagctggtacgcctgcaggtaccggtccggaattcccgggtcgacccacgcgtctcctttctatttaccgtgttccttcctttgaagtcattcttcaattcatcgctccattgttcttcagatttcaattttgctgggaaattttagagtaggcgactcctttgatcgccttatttcatttcgaaagttgagattttggatacgaccctcttgatctgacaccggaatgttggttagttaaatggagagaaaaaagaacaaaggacagtgaaccaggaccagtccctctgcttgtaccggttgatagatttgggtttctgaaacaggaacatggcagttctcctcaacgtttcaccaagactaaatcatctattaattatgagaaggaggagaagagagtgacaaaatggaggaagatgattggaactgggggtagtgattggaagcattacgttaggagaaaacctcatgttgtcaagaggcggattcgaaaagggatccctgattgcttaaggggtctcgtttggcaattgatctctggaagtcgagaccttttgcttatgaatcccggtgtttatgtgcaactggtgatttatgagacgtcggcatcagaactcgatatcattcgggatatatctcgtactttcccgtcacatgttttcttccagaagagacatggaccaggccaaagatcattatacaatgttctaaaagcatactctgtctatgacagagatgtcggatatgttcagggaatgggtttcatagccggtttgttgcttctttatatgagcgaagaagatgcattctggttattagttgcattactcaaaggagctgtccactccccaatagaaggattgtatcaggcagggcttcctcttgtacagcaatatctgttacagtttgatcagttggtaagagagctaatgcccaaactaggagaacatttcactcaagaaatgatcaatccgagtatgtatgcaagtcaatggttcataaccgtcttttcgtattcacttcctttccattcagcgctacgaatttgggatgtgtttctagctgagggtgttaaaatcgtgttcaaagtcggtttagcattattgaagcattgccatgatgatttgttgaaattgccatttgaggaactcatgcatgctctgaggaatttccctgaagatgccatggatcctgatactttgcttccattggcttattccattaaggtatcaaagcgtttggaagaaatgaaacaggattgtgacaaggccgttgctaaaccgactcaaacggccaaatcggttcgacaatagagtttgatattcttgaaccgaatcaaaccggaaagtggattctcgaagattcttctcattatttgtgcaaatttctatctttctctctttttttacaactcgtgtgaaaacaatagaagaattacttttgtaaaaatatatttcgactcaacaactttagattcttctttctttttggtaatgaaaagtcaaatttgagccttaaaaaaaaaaagggtaagaataaaaaaannggtaannnnnnnnnnnnnnnnnnnnnnnnnnnnnnnnnnnnnnnnnnnnnnnnnnnnnnnnn

SEQ ID NO: 118698 - DNA, 3368 bp, Arabidopsis thaliana
  unsure (1)..(3368): unsure at all n locations
atcttaaacccttattccctaaacatctaatttggttccacgcgtccgaatccgcagagatttcttcttttcagaagaagtaagagggtggcgaagaagatttgattgatcggcgataatggcgggtcggaacatagagaagatggcatctattgatgctcagcttcggcaactcgttcctgctaaagtcagtgaagacgataagcttgttgagtacgatgctcttctccttgatcgctttctcgacattctccaggatttacacggcgaggatctccgtgaaacggttcaagagttatacgagctttctgctgagtatgaagggaagcgtgagcctagcaagcttgaggagctagggagtgtcctaacgagtttggatcctggtgactcaattgttatctccaaggctttctctcacatgcttaacttagccaatttggctgaggaggtgcagattgctcaccgtcgcaggatcaagaagctgaagaaaggtgatttcgttgatgagagttctgcaactactgaatccgatattgaagagacttttaagaggctcgtttcggatcttggtaagtctcctgaagagatctttgatgccttgaagaatcagactgtggatctggttttgactgctcatcctactcagtctgtgcgtagatcattgcttcagaagcatgggaggataagggactgtcttgctcaactctatgcaaaggacattactcctgatgacaagcaggagctagatgagtctctgcaaagagagattcaagctgcattccgaacagatgagattagaagaacacctccaaccccacaagatgaaatgagagctggaatgagttatttccacgagacaatctggaaaggtgtccccaagttcttgcgccgtgtggacacagctctgaaaaacattgggattgatgaacgtgttccttacaatgccccattgattcaattctcttcgtggatgggcggtgatcgtgatggtaatccgagggtcacacctgaggtcactagagatgtgtgcttgttggctagaatgatggctgccaatctctactataaccaaatcgagaatctgatgtttgagttatctatgtggcgttgcactgatgaattccgtgtgcgggcggatgaactgcacaggaactcaaggaaagatgctgcaaaacattacatagaattctggaagacaattcctccaactgagccataccgtgtgattcttggtgatgtgagggataagctgtatcacacacgtgagcgttcccgccaattgctgagtaatggaatctcggatattcctgaagaagctaccttcactaatgtggaacagttcttggagcctcttgagctctgttaccgatcactatgttcatgtggtgacagcccgatagctgatggaagccttcttgatttcttgaggcaagtctctacctttggactctcccttgtgagacttgacatcaggcaagagtctgaacgccacacagatgtcttggatgctatcaccaagcacttggacatcggttcctcctatagagactggtctgaagaaggccgacaggaatggcttcttgctgaactaagcggcaaacgtccacttttcggacctgatcttcccaaaaccgaagaaatttctgatgtcctggacacattcaaagtcatatctgagctgccttcagattgttttggagcttatattatctctatggcaacttcacctagtgatgtgcttgcggttgagcttttacagcgcgaatgccatgtgaaaaatccacttagagttgttccactctttgagaagctagctgatcttgaagcagctcctgccgctgttgcaagactcttttctatagactggtacaaaaaccgtattaacggtaaacaagaggttatgattggttactcagattcagggaaagatgcagggcgtctctcagctgcttgggagctatacaaagctcaagaagagcttgtgaaggttgctaagaaatatggagtgaagctaactatgttccatggccgtggtggcacagtcggaagaggaggtggtcctactcatcttgctatattgtctcagccaccagatacagttaatggctctcttcgagtcacggttcagggtgaagtcattgagcaatcatttggggaggcacacttatgctttagaacacttcaacgtttcacagcagctactctagagcacggaatgaaccctccgatttcaccaaaacccgagtggcgtgctttgcttgatgaaatggcggttgttgcaactgaggaataccgatctgtcgttttccaagaacctcgattcgtcgagtatttccgcctcgctactccggagctggagtatggacgtatgaatattggaagtagaccttcaaagcgaaaaccaagcggtgggatcgaatctctccgtgcaatcccatggatctttgcttggacgcaaacaagattccatcttcctgtatggttaggtttcggagcagcatttaggtatgcgatcaagaaggatgtgagaaaccttcacatgctgcaagatatgtataaacaatggccctttttccgagtcaccatcgatctaattgaaatggtgttcgccaagggagaccccgggatcgctgctttgtacgacaaacttcttgtctcagaagatttatgggcttttggagagaaactcagagccaactttgatgaaaccaaggacctcgtcctccagactgctggacataaagaccttcttgaaggagatccttacttgaaacagagactaaggctacgtgactcttacattacgaccctcaacgtttgccaagcctacacattgaagaggatccgtgatgcaaactacaatgtgactctgcgaccacacatttctaaagagatcatgcaatcaagcaaatcagcacaagagctcgtcaagcttaaccccacgagtgaatacgcgcctggacttgaggacacacttatcttaaccatgaagggtattgctgcaggattgcaaaacaccggttaagtgagtcagtgaaagaaaacaaaacttcgaatctctcttttttatctaccctttttaataatctctttttttctagaatccaaaataattacggttggattacagtttactttatgtatccaccgttgaaatcttaatcttccattgtatcaaacgtcactgactctgtttctggaagtgtaaacaagaacagagacagtgaatcttaatgttatcttctttgtctaaaaaaaaaaaaaaaaannnnnnnnnnnnnnnnnnnnnnnnnnnnnnnnnnnnnnnnnnnnnnnnnnnnnnnnnnnnnnnnnnnnnnnnnnnnnnnnnnnnnnnnnnnnnnnnnnnn

SEQ ID NO: 118699 - DNA, 821 bp, Arabidopsis thaliana
atggccgtctgcagtaccggaccggaattcccgggtcgacccacgcgtccgcctggacacattcaaagtcatatctgagctgccttcagattgttttggagcttatattatctctatggcaacttcacctagtgatgtgcttgcggttgagcttttacagcgcgaatgccatgtgaaaaatccacttagagttgttccactctttgagaagctagctgatcttgaagcagctcctgccgctgttgcaagactcttttctatagactggtacaaaaaccgtattaacggtaaacaagaggttatgattggttactcagattcagggaaagatgcagggcgtctctcagctgcttgggagctatacaaagctcaagaagagcttgtgaaggttgctaagaaatatggagtgaagctaactatgttccatggccgtggtggcacagtcggaagaggaggtggtcctactcatcttgctatattgtctcagccaccagatacagttaatggctctcttcgagtcacggttcagggtgaagtcattgagcaatcatttggggaggcacacttatgctttagaacacttcaacgtttcacagcagctactctagagcacggaatgaaccctccgatttcaccaaaacccgagtggcgtgctttgcttgatgaaatggcggttgttgcaactgaggaataccgatctgtcgtttccaagaacctcgattcgtcgagtattttcggctcgctactccggagctggagtatggacgtatgaatattggaagtagaccttcaaggcgaaacccagcgggggggacgaatct

SEQ ID NO: 118700 - DNA, 491 bp, Arabidopsis thaliana
cggacgcgtggctctgaatctgactgacttcaaaggacacagcttttacttctataactgagcgaagcaggtgaaaaaatggcgaatcggaagttagagaagatggcatcgattgatgttcatcttcgtcaactggttcctggcaaagttagtgaagacgacaagcttgttgagtatgatgctttgcttctagatcggtttctcgatatcctccaggatttgcacggtgaagatctccgtgaaactgttcaagagctttatgagcattctgcagaatacgaagggaagcatgaacctaagaagctagaggagctagggagtgtgctaacgagtttagatccaggagattccattgttatcgctaaagctttctctcatatgcttaacttagccaatttggctgaggaagtgcagattgcttatcgccgtaggatcaagaagctgaagaaaggtgattttgttgatgagagctctgctactactgaatctga

SEQ ID NO: 118701 - DNA, 1617 bp, Arabidopsis thaliana
ccagataacgaccatttcttagattctccgtcgccgcctcttctagagatgagacaccaccaatcagcgacggagaacggtggtggttgcggagagattgtggaggtacaaggaggtcacattgttcggtcaacaggaagaaaagacagacatagtaaagtatgtacagcgaaaggaccacgtgaccggcgcgtgagactctcagctccgacggcgattcaattctacgatgttcaagatagacttggttttgatcgaccaagtaaagctgttgattggcttattactaaagctaaatccgccattgatgatcttgctcagcttcctccttggaaccccgccgatactcttcgtcaacacgccgccgctgctgctaacgctaaacccagaaaaaccaaaactttaatttctccgccaccgccacaaccggaagaaacagagcatcatcgaatcggagaagaagaagataacgaatcgagttttcttccggcgtcaatggattctgattcgatagctgacactataaagtcgttttttccggtagcttcaacgcaacagagctatcatcatcagccaccgtcacgaggcaatacacagaaccaagatcttcttcgtctctcgcttcaatctttccaaaatggtccaccttttcctaatcaaacagaacctgctctgttctccggccagagcaataatcagttagcgtttgactcatcgacggcaagctgggaacagagtcatcagtcaccggaatttggaaagatacagagactagtgtcatggaacaacgtcggagcagctgaatccgccggaagtaccggaggatttgtgtttgcttctccgtcgtcgttgcatccagtttatagccaaagtcagcttttatcacagaggggtccccttcagtccattaacacacctatgattcgtgcttggtttgatcctcaccatcatcatcatcatcatcagcagtccatgaccactgacgatctccaccatcatcatccctaccatatccctcccgggattcaccaatctgctattccaggcattgcatttgcttcaagtggtgaattctccggttttcgtataccagcacggtttcaaggcgaacaagaggagcacggcggcgacaacaagccgtcctctgcttcatccgattctcgccattaaacaagttccaaaaacacataagattgtgcaacacaacaggtttcttttcatattccagggcgcttcgaatgcgtggaatagtgaaggcggttttcgttgttgtgtgtttcgaatatccaaatggcctataaatctgatcaacagtttcaggttcttcttaagtctttaaaagcctaggccttggttaatttgaattcatcttgtatcaattagagaacgttctgtaagttcaattctgttttacaatgtttagctctagctacatgagctcacatcttgtttgttgtaacttgttctacaattacttgtcgtttctttatgttcttgtgttggaaacctttaaccccacttgaagctaaagtcttttgtttgccctttaaaaaaaaaaaaaaaaagggcggccgctctagaggatccaagcttacgtacgcgtgcatgcgacgtcat

SEQ ID NO: 118702 - DNA, 2497 bp, Arabidopsis thaliana
ccacgcgtccgcccacgcgtccggggtttaatgtcttcttcttcttcttcttcgttatttctattctagaagagagagagagagaaagacaaggacgatcgttaaatctttttctcttaaatcttagaatttcaaagtctctgtaatttttttctcttttcatttgtatagcacaattgttcttaatcagagattcgtgagaggtaaaggtagcgtaattattcagtttgcgtgatctataatttaactggcgccagattgtgatccaggaatcgttggcttgttaggttgttgttttgttatgcataattgagagatggtggtcaaaaggaagttaaattgtggtggctctaatggttttgatttccccaatattcccaaggctcctcgttcaagcaggaggaaggtctcaggtaagagatctgatgatgaaagtgagatctgtgcaattgatttgctagcttctcttgctggaaagttgttggaagaaagtgaaagttcctcaacgtctacctatgcatctgaagctgataatcttgatcatttgggtggactgattaagcaagaacttgaagatggctatactactaagccttgtaaatccgagtttttcgatccaggaaaccctgcttcaaagtctactagtgaaaatactagcgtgacttgtttgccattttcgtctttcgaaaatgattgcattttggagcaaacaccggtttctgattgtaagagggcatctggtttgaagtccctggtagggagcatcactgaggagacatgtgttgttaatgaggatgccggatctgaacaaggtgctaatactttcagcttaaaggatccaagtcaattacattcgcagtctccagaatcggtccttctggatggcgatgtgaaattagcaccatgcacggatcaagtccctaatgattcttttaaaggatataggaatcattctaagttagtttgcagagatgatgacgaaaactattgtaagtattataaatttagtgacaaatgtaagtcatataggcctctctcccgggttggcaatagaagaataatgcagtcggtgagagcaatctccaagttgaagtgttttgaagacactagaacagatggtcgtttgaaggctctctaccgcaagagaaaattatgttatggttacaacccatggaagcgtgagaccattcataggaagagaagattgtctgacaaaggtttggtcgtaaattatgatggtgggctcagtagtgaaagtgtttccaattcacctgaaaagggagaatcagaaaatggtgatttctctgctgcaaaaataggtcttctttcgaaagactcccgtgtaaagttcagcatcaagtcccttaggattccggagcttgtaattgaagttccagaaacagcaacagtaggcttactgaagaggacggtgaaggaggcggttactgctttactcggtggtagaatacgtattggggtgttagtccaagggaaaaaagttagagatgacaacaacactctatcacagactggtctttcgtgtagagaaaatcttggcaaccttggcttcaccttagagcctggtttggaaacactgcctgtacctctttgttctgaaactcctgtcctttctctgccaactgactctacaaagttgtcagaaaggtccgcagcttctccagcgttagagactggaattcctctccctcaccaagatgaagattacttgattaatttgggaaatagtgtggagaacaatgatgaattagtcccacatctgagtgacataccagctgatgaacaaccttcatcagatccaagagcgctggttccagttttggccttggaatccgacgctcttgcacttgttccagttaacgagaaacctaagcgtacagagctttcacaacgcagaaccaggagaccattctctgttacagaggtagaagctctagtaagcgcagttgaagaagttgggactggaagatggcgtgatgtgaagttgcgttcttttgagaatgcaagtcatcgaacctatgtggacttgaaggacaaatggaaaacgttggttcacacagcaagtatatcaccacagcaacgaagaggagaaccagtgcctcaagaactgctagacagagtcttaggagcacataggtactggacacagcaccaaatgaaacagaacgggaaacatcaggtggctacaacaatggtggttgaagcaggttcgtccatgtaaagaaggagaatggtaataacaataactttcacttgacgactaaggaaccaaagtgggcaactgtacaaagggaaacaacaaaatacagaaacatacttaatttctgaaaagaagagtctatatttttattttttttaaatcatagctggtagaaacaagacgttccttgacacttttggttacttttatggtaagtctgttcattccaaatttctaatcgatttgattatgtaatttggtggtaggaccatggaaaaa

SEQ ID NO: 118703 - DNA, 1490 bp, Arabidopsis thaliana
aaaaagggttaggtggatctctcatgaaatcggtggagctcccccatatcttttttaaatagctttcttcttttggccccttacccagagatagattcttatatactactgagaatcttcaatttctgcaacttttgtatctcttcctgatcaccaaataagaaaactcttgtggttctattgaattgggtttccactatctttattgtagagatggagtcttcaagtccccaccatagtcacattgttgaggttaatgttggaaaatctgatgaagagagaataattgtggcgagtaaagtctgtggagaagcaccatgtgggttttcagattctaagaatgcttccggggatgctcacgaacgctctgcttctatgcggaagctttgtatcgccgtcgtgctgtgtctagtgttcatgagtgttgaagttgttggtgggattaaagccaatagtttagctatattaaccgatgcagctcatttgctctctgacgttgctgcctttgctatctccctcttctcattgtgggctgctggctgggaagcgactcctaggcagacttacgggttcttcaggattgagattttgggtgctcttgtatctatccagctcatttggttgctcacgggtattctggtttatgaagcgattatcagaattgttacagagaccagtgaggttaatggattcctcatgtttctggttgctgcctttggtctagtggtgaacatcataatggctgttctgctagggcatgatcatggtccacagtcatggacatgggcatggcacggccatgaccatcacaatcatagccatggggtgactgttaccactcatcaccatcatcacgatcatgaacatggccatagtcatggtcatggagaggacaagcatcatgctcatggggatgttactgagcaattgttggacaaatcgaagactcaagtcgcagcaaaagagaaaagaaagagaaacatcaatctccaaggagcttatctgcatgtccttggggattccatccagagtgttggtgttatgattggaggagctatcatttggtacaatccggaatggaagatagtggatctgatctgcacacttgccttttcggttattgtcctaggaacaaccatcaacatgattcgcaacattctagaagtattgatggagagtacacccagagagattgacgccacaaagctcgaaaagggtttgctcgaaatggaagaagtggtggctgttcatgagctccacatatgggctatcacagtgggaaaagtgctattggcttgccatgtcaatatcagaccagaagcagatgcagatatggtgctcaacaaggtaattgattacatccgcagggagtacaacattagtcatgtcacgatacaaatcgagcgctaaaagctaagtaagatctgatgaagggtttttgtatcagcattctcattaacaataaaatcaataaagtttctactcgtgcc

SEQ ID NO: 118704 - DNA, 471 bp, Arabidopsis thaliana
agcccacgcgtccgcccacgcgtccgcccacgcgtccgaaaaaaagggttaggtggatctctcatgaaatcggtggagctcccccatatcttttttaaatagctttcttcttttggccccttacccagagatagattcttatatactactgagaatcttcaatttctgcaacttttgtatctcttcctgatggagtcttcaagtccccaccatagtcacattgttgaggttaatgttggaaaatctgatgaagagagaataattgtggcgagtaaagtctgtggagaagcaccatgtgggttttcagattctaagaatgcttccggggatgctcacgaacgctctgcttctatgcggaagctttgtatcgccgtcgtgctgtgtctagtgttcatgagtgttgaagttgttggtgggattaaagccaatagtttagctatattaaccgatgcagctcatttgctctctgac

SEQ ID NO: 118705 - DNA, 2211 bp, Arabidopsis thaliana
  unsure (1)..(2211): unsure at all n locations
nnnnnnnnnnnnnnnnnnnnnnnnnnnnnnnnnnnnnnnnnnnnnnnnnnnnnnnnnnnnnnnnnnnnnnnccacgcgtccgcaaagtttgagagaaagaaagagagagaatggaagtggaagaagaggtctcaagatgggaaggctacgccgattggagaaacagagcagccgtgaaaggccgtcacggtggcatgctcgccgcctctttcgtcttagtggtggagatattagagaatctagcgtatttggcgaatgcgagtaatcttgtgctatacctaagagaatacatgcacatgtctccatcaaaatcggcaaatgacgtcaccaatttcatgggcacagcttttctcctagctctcctcggtggtttcctctccgacgctttcttctccacttttcaaatcttcctcatctcagcttccatcgagtttttgggattgatcatactcacaattcaagctcggacaccatccttaatgcctccatcgtgcgatagtcccacatgtgaagaagtgagtggttcgaaggcagcgatgctattcgtggggttgtaccttgtagctttgggtgtgggagggatcaaaggttcattagcatctcacggagcagaacagtttgatgagagtacacctaaaggtcggaaacaaaggtcaacgttctttaactacttcgtgttttgtcttgcttgtggagcactagttgctgtcacgtttgtagtttggttagaagacaacaaaggatgggaatggggattcggtgtttctaccattgctatcttcgtctctattctcatctttctctctggatcaagattttataggaacaagattccatgtggaagtcctctcaccacaatcttgaaggttcttcttgcggcttcggttaagtgctgctcgagtggaagttcaagcaatgcggttgcgagtatgtccgtgagtccctcaaatcattgcgtatcaaaggggaaaaaagaagttgaatcacaaggagaattggaaaagccacgtcaagaagaagctttgcctcctcgggcacaactaactaacagtttgaaagtattaaatggagctgcggatgaaaaacctgtccatagattgttagaatgcacagtccaacaagtggaagatgtgaagattgtcttgaaaatgcttccgatatttgcttgcactatcatgcttaactgttgcttagctcagctctctacattctccgtccaacaagctgcttccatgaacacaaagataggaagcctaaagatacctccagcttccttaccgatcttacccgtcgttttcataatgatcctcgcacctatctacgaccatctcattatcccattcgctagaaaagctaccaagaccgaaacaggagtcactcatctacaaagaatcggagtaggtttagttctttcgatattagcaatggcggttgcagctctagttgagattaaacgaaagggagtggctaaagactccggcttgcttgactcgaaagaaaccttacccgtgactttcctatggatcgcacttcagtatcttttcctagggtcagccgatctattcacactagctggactactagagtatttcttcacggaagcaccttcctcaatgagatctctcgcaacatcgctctcgtgggcttctttggctatggggtattacctaagctcagtgatcgtgtccatagtaaacagcatcacaggaagctcagggaacacaccttggctcagaggaaaaagcataaaccgttacaaactagactacttctattggctaatgtgtgttcttagtgcagctaacttcttgcactacctcttttgggcaatgcgttacaagtatagatcaactggttcaagaagctaaaattggatgggcaacttttgagttttttttttgtttttaattagagcagaaaatgtttttacttgagcggctgttatataagagatgataaatgggggtaagtagtaatgttgtgatcaggtatatattggggtttgaagtttttatcgttggacaagtaatgtacagcgaatgatattaacttgctttaagtctttcttttgttctgggggggtccgaatttgagtcaaggttttgttccaaaaaaaaaaaaaaaaaaaaaaacaaagnnnnnnnnnnnnnnnnnnnnnnnnnnnnnnnnnnnnnnnnnnnnnnnnnnnnnnnnnnnnnnnnnntgtcctaa

SEQ ID NO: 118706 - DNA, 678 bp, Arabidopsis thaliana
  unsure (1)..(678): unsure at all n locations
ttntacccaaagcctnaatccgaaatccccatttttttnncgattttgaaaactttaccattgngctttncccccanttnttcaagggtnttcttnacttttttcagcttcatctttagtgancccttctttaancttctttggtaanccttcgatnaccnctttacctcctttcaaccnccaagcttattcaancccttaccagctttaattacttgcaatacgagaacttactcggaacttcattgataacccacatcgaactctcgtttgccccctccaactacaagccgccccgccaccgtcggctggagctgcaacccgccgctgctgcggggcctaaggagagtggggagacaccgaatttgtcttggagatagtcgacgaggatacgagcttcttcgagggttagggaggagatttcggatccgatcttctcgattttctccggagcttcgacggcggagataggacggaggttgattgcacggtggctagaagaagagctgagacgaaatgggaattcgattgcggtgggtttggaaaggaagtgatgagtggaagcggaagtgagaggagaagaggaacggattgttgttgcgattganagagtcgtcgacgccattgtttctcactctcttcttcttcttcctctgaagctttgggatttgttttgtg

SEQ ID NO: 118707 - DNA, 972 bp, Arabidopsis thaliana
  unsure (1)..(972): unsure at all n locations
nnnnnnnnnnnnnnnnnnnnnnnnnnnnnnnnnnnnnnnnnnnnnnnnnnnnnnnnnnnnnnnnnnnnacctttctttttttttttttatttttaactctgtttcatgttaagcaactaccgagtgattcgcctcatttaggcatttcaacaaacaatgttatgtgcagctaccaaaaagctcacatcaatggcgaaatcagctaatgggaaaccaaatgtgattcacattactacaatttctcaacaattccagacgcagactatactaaacatcacaaaagaccaatcaaattccagagaagataacaacttcttttttttttttttttataaaaaccttaagcaatggagactctagcaccagcttcttcaagagtcttcttagcttcttcagcttcatctttagagataccttctttaaacttctttggtaatccttcgattagctccttagcttccttcaacgccaagctagtcaaagccctaacagctttaattactgcaatacgagaactactcggaacttcattgatacccacatcgaactctgtttgctcctccactacagccgccgcgccaccgtcggctggagcagcaaccgccgctgctgcgggggctaaagagagtggggagacaccgaatttgtcttggagatagtcgacgaggatacgagcttcttcgagggttagggatgagatttcggatccgatcttctcgattttctccggagcttcgacggcggcgattggacggagatgggttgcacggtgggtcaatgtggatgatgaaccaccaccgaagcgagaggggaattcgatggtggtggttcgggaagggaagtgattgatggaagcgagagtaggataagatgaggaacggattgttgttgcgattgagagagtcgtcgacgccatttttgtttcactctttggcttttcttctgagtttttcttctctctgtgtgttttga

SEQ ID NO: 118708 - DNA, 638 bp, Arabidopsis thaliana
  unsure (1)..(638): unsure at all n locations
gaanacaagctnctaaaagcttcttactnttaacttaactttaaggaaaacctnctttaacctctttggnacaccctcgaattacccccttaccttccttcaaccccaagccctagttaaacccctaacaaccttttaaccacttggaaatacggggaacttcctgggaaccttctttgattcccnacatcgaacctcttgtttgccccctccaactaaaagcccgccgcgcnacccgtcggctggagcagcaaccggccgctgctgcggggcctaaagaagagtggggagacaccgaatttgtcttggagatagtcgacgaggatacgagcttcttcgagggttagggatgagatttcggatccgatcttctcgattttctccggagcttcgacggcggagataggacggaggttgattgcacggtggctagaagaagagctgagacgaaatgggaattcgattgcggtgggtttggaaaggaagtgatgagtggaagcggaagtgagaggagaagaggaacggattgttgttgcgattgacagagtcgtcgacgccattgtttctccctctcttcttcttggtcgtaaaaagctttggaatttgttttgtgcgaatgtgtggaacgccccgggttt

SEQ ID NO: 118709 - DNA, 819 bp, Arabidopsis thaliana
  unsure (1)..(819): unsure at all n locations
acgtcgcatcgcacgcgtacgtaagctcggaattcggctcgagctatattagcaatggcggttgcagctctagttgagattaaacgaaagggagtggctaaagactccggcttgcttgactcgaaagaaaccttacccgtgactttcctatggatcgcacttcagtatcttttcctagggtcagccgatctattcacactagctggactactagagtatttcttcacggaagcaccttcctcaatgagatctctcgcaacatcgctctcgtgggcttctttggctatggggtattacctaagctcagagatcgtgtccatagtaaacagcatcacaggaagctcagggaacacaccttggctcagaggaaaaagcataacccgttacaaactagactacttctattggctaatgtgtgttcttagtgcagctaacttcttgcactacctcttttgggcaatgcgttacaagtatagatcaactggttcaagaagctaaaattggatgggcaacttttgagttttttttttgtttttaattagagcagaaaatgtttttacttgagcggctgttatataacacatgataaatgggggtaagtagtaatgttgtgatcaggtatatattggggtttgaagtttttatcgttggacaagtaatgtacagcgaatgatattaacttgctttaagtctttcttttgttaaaaaaaaaaaaaaaaggnnnnnnnnnnnnnnnnnnnnnnnnnnnnnnnnnnnnnnnnnnnnnnnnnnnnnnnnnnnnnnnnnnnnnnnnnnnnnnnnnnnnnnnnnnnnnnnnng

SEQ ID NO: 118710 - DNA, 893 bp, Arabidopsis thaliana
  unsure (1)..(893): unsure at all n locations
cgattgtnnnnnnnnnnnnnnnnnnnnnnnnnnnnnnnnnnnnnnnnnnnnnnnnnnnnnnnntttttttttttttttttggcttgttgtctttttctgtaatacgaaaccaaattgattcaaagtacaacaatttctcaaaagctgaatcaataactcaaacacaaactatactaaacaacaaaaagactcataaattccgaaaaatatcacatttttttttttccgattgttgaagaaacttaagcaatggagactttagcaccagcttcttcaagagtcttcttagcttcttcagcttcatctttagtgataccttctttaaacttctttggtaatccttcgattagctccttagcttccttcaacgccaagctagtcaaagccctaacagctttaattactgcaatacgagaactactcggaacttcattgataaccacatcgaactctgtttgctcctccactacagccgccgcgccaccgtcggctggagctgcaacggccgctgctgcgggggctaaggagagtggggagacaccgaatttgtcttggagatagtcgacgaggatacgagcttcttcgagggttaaggaggagatttcggatccgattttctcgattttctccggagcttcgacggcggagataggacggaggttgattgcacggtggctagaagaagagctgagacgaaatgggaattcgattgcggtgggtttggaaaggaagtgatgagtggaagcggaagtgagaggagaagaggaacggattgttgttgcgattgagagagtcgtcgacgccattgtttctcactctcttcttcttcttcctctgaagctttgggatttgttttgtgcggacgcgtgggtcgacccgggaattccggaccg

SEQ ID NO: 118711 - DNA, 693 bp, Arabidopsis thaliana
  unsure (1)..(693): unsure at all n locations
gattttttttaaaccttnnaggaatttgccacccctaaagctctnacccttaanttaactttagaacccntttanctnttggaaccctngatngcccctagctccttaaaccncaacctaagtaaaaccctnaaaanctttaattccttnaatccaaaacctacccgggaccttaattataaccacatcgaactctgtttgctcctccacttacagccgccgcgccacccgtcggctggaacaacaaacccccgctgctgcgggggctaaagaagagtggggagacaccgaatttgtcttggagatagtcgacgaggatacgagcttcttcgagggttagggatgagatttcggatccgatcttctcgattttctccggagcttcgacggcggcgattggacggagatgggttgcacggtgggtcaatgtggatgatgaaccaccaccgaagcgagaggggaattcgatggtggtggttcgggaagggaagtgattgatggaagcgagagtaggataagatgaggaacggattgttgttgcgattgagagagtcgtcgacgccatttttgtttcactctttggcttttcttctgagtttttcttctctctgtgtgtttcggacgcgtggnnnnnnnnnnnnnnnnnnnnnnnnnnnnnnnnnnnnnnnnnnnnnnnnnnnnnnnnnnnnnnnn

SEQ ID NO: 118712 - DNA, 562 bp, Arabidopsis thaliana
  unsure (1)..(562): unsure at all n locations
gaaaccaaattgattcaaagtacaacaatttctcaaaagctgaatcaataactcaaacacaaactatactaaacaacaaaaagactcataaattccgaaaatatcacatttttttttttccgattgttgaagaaacttaagcaatggagactttagcaccagcttcttcaagagtcttcttagcttcttcagcttcatctttagtgataccttctttaaacttctttggtaatccttcgattagctccttagcttccttcaacgccaagctagtcaaagccctaacagctttaattactgcaataccgagaactactcggaacttccattgataaccacatccgaactcctggttggctcctccaactaacagccggcgcggccaccggtcggctgggagctggcaaccggccgctgctgcgggggggtaagggcgaggtgggggnggcacccgggatttgggccttgggggatagcccgacgcggggntacgggggttcttcggggggggaagggggggggtcggtgccggggccccggtttccccgngttgctccggggg

SEQ ID NO: 118713 - DNA, 846 bp, Arabidopsis thaliana
  unsure (1)..(846): unsure at all n locations
ggataacnnnnnnnnnnnnnnnnnnnnnnnnnnnnnnnnnnnnnnnnnnnnnnnnnnnnnnnnnnnnnnnnnnnnnnnnnnnncttttgggttttttttttttaatttttttttttttttttttttgtttggggaaaccaaatgtgattcaaattacaacaatttcttaacaattccagacgcaaacttttctaaacaacacaaaagaccaatcaaattccaaaaaagataacaacttctttttttttttttataaaaaccttaagcaatggagactttaacaccagcttttttaaaaggctttttagcttcttcagcttcatctttagggaaacctttttttaacctcctttggtgatccttcggattagcctccttagctcccttcaacgccaagctagtcaaagccctaacagctttaattactgctaatacggagaactactcggaactttcattgataaccacatcgaactctgtttgctcctccaactacagcccgccgcgccaccgtcggctggagcaaccaccccccgctgctgcgggggctaaagagagtggggagacaccgaatttgtcttggagatagtcgacgaggatacgagcttcttcgagggttagggatgagatttcggatccgatcttctcgattttctccggagcttcgacggcggcgattggacggagatgggttgcacggtgggtcaatgtggatgatgaaccaccaccgaagcgagaggggaattcgatggtggtggttcgggaagggaagtgattgatggaagcgagagtaggcggccgcgaggtcgatatcaagcttagctataccgtcgaagcctagggggg

SEQ ID NO: 118714 - DNA, 300 bp, Arabidopsis thaliana
  unsure (1)..(300): unsure at all n locations
gtggggagacaaagaatttgtcttggagatagtagacgaggatacgagcttcttcgagggttagggatgagatttcggatccgatcttctcgattttctccggagcttcgacggcggcgattggaagaagatgggttgcacggtgggtcaatgtggatgatgaaccaccaccgaagcgagaggggaattcgatggtggtggttngggaagggccgtgccggacgttttttatagtcggacgagttgaggaacggattgttgttgagattaagagagtcgtagacgccatttttgtttcac

SEQ ID NO: 118715 - DNA, 2433 bp, Arabidopsis thaliana
  unsure (1)..(2433): unsure at all n locations
agggaaacctggtacgcctgcaggtaccggtccggaattcccgggtcgacccacgcgtccggcttcacatttcttcacttccacacacttttacttctttctctcttctcttctcttctccagatctgatcccaaacctttgattcattgttgttgttctctgctgctttatcagagagcatcatcatgtacggaagagatccatggggaggtccattggagataaacactgcagattccgccaccgacgatgatcgtagtcggaatttaaacgatttggatcgtgcggctctttcacgtccactagatgagacgcagcagagttggttacttggtccaacggagcagaagaagaagaagtacgtcgatctcggttgtattatcgttagccgcaagatcttcgtctggactgttggtactcttgttgccgccgcgttactcgccggattcattaccttgatcgttaaaactgtgccgcgtcatcatcctaagactccgccgccggataattatactatagctctacacaaagctcttaagttcttcaatgctcagaaatctgggaaattgccaaagcataataacgtgtcatggagaggtaattctgggcttcaagatgggaaaggtgaaacaggaagcttctataaagatttggtgggaggttattatgatgctggtgatgctatcaagttcaatttccccatggcttatgctatgactatgttgagctggagtgttattgaatatagtgctaaatacgaagctgctggtgagctcactcatgttaaggagcttatcaaatggggaactgattactttctcaagactttcaatagtactgctgattccattgatgatcttgtgtcacaggttggatcagggaatactgatgatggaaatacagatcctaatgaccattactgttggatgcgacctgaggatatggactataaaaggcccgtgactacttgtaatggtggatgttcggatctcgctgcagagatggcagctgctctggcttcagcatctattgtattcaaggataacaaggaatattctaaaaagcttgtccatggtgctaaggtggtgtatcagtttggaaggacgaggagagggagatatagtgcaggcactgcggaatctagcaagttctataattcaagtatgtattgggatgagttcatttggggtggtgcttggatgtattatgctaccggaaatgtaacgtatctcaatctaatcacccaacctactatggccaagcatgctggtgccttctggggtggcccttactatggtgtatttagctgggacaacaagcttgctggtgctcagttgctgttgagccggttgaggttgtttctgagtcctggatatccatatgaagaaattctaaggaccttccacaatcagaccagcatagtcatgtgctcatacttgcctattttcaacaaatttaacagaaccaatggaggtttaatagagttgaatcatggagctccacagccgctgcaatattctgtaaatgcagctttcttagcgactctatacagtgattatctggatgctgctgatactcctggatggtactgtggacctaatttctattcgacaagtgtgctacgtgactttgctagatcccagattgattatatactgggtaaaaaccctcggaaaatgagttatgtcgttggttttggcacaaaatacccaagacatgtgcatcacagaggagcttcgatacccaagaacaaagtcaagtataactgcaaaggaggatggaaatggagagacagcaagaaaccaaacccaaacacgattgaaggagccatggttgctggtcctgacaagcgcgacgggtaccgtgatgtccgtatgaactacaactacactgaaccgactcttgcaggcaatgctggtctagtcgcagctcttgtggcattatcgggtgaagaagaagccaccggtaagatagacaaaaacactattttctcagctgttcctcctttgttccctactccaccacctccaccagcaccatggaaaccttgagaaagctagacttgtgtgattctgtcgctgctgccaaaaaaaatgaatgaggtaagaaggatttgggtgtgagaccagaagattagaagctaaacacaagtcagccataaccaaactactaaggatttcatttggctttactagatacaaacacggggtgggttactttaccacaagcattgtctttcttttctttttttgggttgctgttttgttcttgtgagatatcatatatatctatgcgttttactctgtatatgtttgataccaaacttgtattctttgataaacaatttaatgaactgtattaaacttttaactnnnnnnnnnnnnnnnnnnnnnnnnnnnnnnnnnnnnnnnnnnnnnnnnnnnnnnnnnnnn

SEQ ID NO: 118716 - DNA, 1119 bp, Arabidopsis thaliana
  unsure (1)..(1119): unsure at all n locations
cccccctcgaggtcgacggtatcgataagcttgatatcgaattcgcggccgccaatcatacactaccacatcaacaacttttaatctaagactgttgatgtattagtgtttgatcagctttgaaaataacaaaacataaacgaatactaaaataacaaaagcagaaaacacatcaaaaacagtgtccatctataaagtccatcatgttggtgagtgtgctaagctcaaactcatcctcatgaacccaaagtgaactcaagtagttacttccttgatgatcttcttgaatttcatctccgaggatattattgttatcgacaatattcgagattttcgtttcttctgatgtttcgggtagggattcgggagattgatttgataaacaatatcaccattgctctgtttggttttctgatctttgattccgagtttcttactaagatgcgtgttccaatagttcttcacttgattatccgttcgacccggcactcttttagcaattaaagaccacctattaccaagcaacttgtggagcctaatgataagatcctcttcttgctcggtgaaattgcctcttttcacattagggctgagataattcatccacctcaatctacaactctttccacatctctttaaaccagtctttttggcaatacgattccagtgacctttgccatgagctttgacataatccatgaggattttgtcttcttctactgtccacaaacctttcttgtactcattgtttccttcgtcgaggtaagaaggatttgggtgtgagaccagaagattagaagctaaacacaagtcagccataaccaaactactaaggatttcatttggctttactagatacaaacacggggtgggttactttaccacaagcattgtctttcttttctttttttgggttgctgttttgttcttgtgagatatcatatatatctatgcgttttactctgtatatgtttgataccaaacttgtattctttgataaacaatttaatgaactgtattagcggccgnnnnnnnnnnnnnnnnnnnnnnnnnnnnnnnnnnnnnnnnnnnnnnnnnnnnnnnnnnnnnnnnnnnnnnnnnnnnnnnnnnnnnnnnnnn

SEQ ID NO: 118717 - DNA, 632 bp, Arabidopsis thaliana
  unsure (1)..(632): unsure at all n locations
atgnatgggggcgcaggaccnacccaacccggtngaggcccatgnttctgtcctgacagcgcggcggtnccgngatgcccgtaggactnccacttccactgacccgnctnttggcaggcaatgctggtctagtcgcagctcttgtggcattatcgggtgaggaagaagcccaccggtaagatagacaaaaccactattttctcagctgttcctcctttgttccctactccaccacctccaccagcaccatggaaaccttgagaaagctagacttgtgtgattctgtcgctgctgccaaaaaaaatgaatgaggtaagaaggatttgggtgtgagaccagaagattagaagctaaacacaagtcagccataaccaaactactaaggatttcatttggctttactagatacaaacacggggtgggttactttaccacaagcattgtctttcttttctttttttgggttgctgttttgttcttgtgagatatcatatatatctatgcgttttactctgtatatgtttcataccaaacttgtatgcggccgcgaattaaaaaaaaaaaggggatccactagttctagagcggccgccaccgcggtggagctccagctttgttactttaatagggta

SEQ ID NO: 118718 - DNA, 2494 bp, Arabidopsis thaliana
gcgtacgcaacaaacaaaaaaaacacagctacgtcaggggccaaactaaagattagatttgggaggttgatgatcaattccggacaacggaggaaaccatactgatagattcaacgacggtgattgcggcggaggagtagaaacccgttggaaacatggcgatgagagaccttgttaacggcggagccgcttgtgccgttcctggttcgtcttcttcttctaatcctctcggagctctcaccaacgctttacttggttcgtcttccaaaacccaggaaaggctcaaggagatacctaatgcaaaccggtcaggtcctcggccacaattttactctgaagaccaacagataaggtcacttcctggttctgagttagatcagccacttctgcaaccgggtgctcaggggtcagagttcttccgtggttttcgctctgttgatcagaatggtttgggtgcagcttgggatgaagtacagcaaggtggacctatgcctccaatgggacccatgtttgagccagttcagcctacatttgaaggacccccacagagagttttatcaaactttctgcattcatttgttgagagtagccgtggtggtattccatttcgtccagcacctgttccagttctaggattgtcacaaagtgacaaacaatgtatacgtgatcgtagtagcataatggcccggcatttttttgccgataggggagaggaatttattaattctcaggtaaacgcattattgtcatctttagatattgatgatgggatacaagctcgaggtcatgttcccgggagatttcgggagctagatgattactggaatgagtctcaagctgttgtgaaacctaatttacatcctgctgacaattgggcggctgaatttaaccaacatgggatggatcatggtggtcctgattcatgggtccagtcttttgagcaacaacatggtgtgaatgggtgggctactgagttcgagcagggtcaatctcaattgatgtcaagccaaatgagaagtatggatatgcaaaatatagctgcaatggagcagactcgtaagcttgcccatacactatctcaagatgggaatccgaaatttcagaattcaagattccttcagtttgtttccaagatgagccgtggtgaacttattattgatgagaatcaggtcaagcaagcttcagcccccggggaatgggctactgaatatgaacagcagtatctggggccaccaagttgggctgatcaatttgcaaatgagaaactttcacatggaccagaacagtgggctgatgagtttgcttccgggagaggacagcaagaaacagccgaggaccaatgggttaatgagttttcaaagttgaatgttgatgactggatagatgaatttgctgaaggtcccgtgggtgatagttcagctgatgcatgggcaaatgcttacgatgagtttctgaatgagaaaaatgctggaaaacaaaccagtggtgtctacgtcttctctgacatgaatccttatgtgggtcaccctgaacctatgaaagaagggcaagaattgtttcgaaaaggacttctgagtgaagcagcgcttgctctagaagctgaggttatgaaaaaccctgagaatgctgaaggttggagattacttggggtcacacacgcagagaacgatgatgatcaacaggcaatagctgcaatgatgcgtgcacaggaggctgatcccacaaatctagaggtgcttcttgcgcttggtgtgagtcataccaacgagttagagcaagcaactgctttgaaatatctatatggatggctgcgaaatcacccaaagtatggagcaattgcgcctccggagctagcggattctttgttccatgctgaaattgctagattattcaatgaagcttctcagttgaatcctgaggacgccgatgtgcatatagtgttgggcgtgctctacaatctgtcgagagagttcgatagagcaatcacatccttccaaacagcattacaactaaaaccaaacgattattctctgtggaataagctaggtgcaacgcaagccaacagtgtccagagtgctgatgccatatctgcttatcaacaggctctagatttaaaaccaaattatgttcgtgcttgggcaaacatgggaatcagttacgcaaaccaggggatgtacaaagaatcaatcccgtattatgtccgtgcccttgcgatgaatcctaaagctgataacgcatggcaatacttgagactctcgttaagttgtgcatcaaggcaagacatgatagaagcttgtgagtcaaggaatctcgatctcttgcagaaagaattcccgctgtgagtagacaaagcaggcgattaaaaccctaaatccacatgaaaatcttacaaagacgttacgtctttttgttgtttagttttgtaaaaactacaatttaaaaatcggaactatgggttgaaaattaataaaaatggtattgtttttacccccgt

SEQ ID NO: 118719 - DNA, 974 bp, Arabidopsis thaliana
ttttattttttccttatcaagaatcctctgatcagtcaaatacccatcaatcaatcaaatccccaaacactcccaaaaaaagatcagcttccaatatttttccccttcttacaaaaaagatgtctatgtcgtctatgtcctccccttcctcagctgtttgttcaccggaccacttctctccttccgaccatctctgctatgtccaatgcaacttttgccaaaccatccttgcggttaatgttccttacacaagcttgttcaagaccgtaactgtccgatgtggttgctgtaccaatctcctttcggtgaacatgagatcatatgtcctcccagcttctaaccagctccagctccagctcggtcctcactcttacttcaatccccaggatattctggaggagctgagagatgcaccgtctaacatgaatatgatgatgatgaatcaacatcctactatgaatgacataccatctttcatggatcttcatcaacaacatgagattcctaaagcaccacccgttaaccgccctccagagaaaagacagagagtcccatccgcatataaccgattcatcaaggaggagatccaacgtatcaaagctggtaatcctgatataagccacagagaagcctttagtgctgctgccaagaattgggcccacttcccccacatacacttcgggctcgtgccagacaatcaacccgtgaagaaaaccaacatgccccaacaggagggagaggataacatggtgatgaaagaagggttctacgctcctgcagctgctaacgttggtgtgactccttattaaagagataaatataatcgactaagtatttgaggaattgaaatccaatttcttagggtttatcatgtccaaaagttgtggtttcttttcctttcttgaacttatttatatatattataaatatgcatgtgtctttttctgttgttgtaaaaaaaaaaaaaaaaaatt

SEQ ID NO: 118720 - DNA, 1064 bp, Arabidopsis thaliana
cacgcgtccgctcaaccgtccgatcatccatcttgccatcaccgttcaccaatcttcttcgtctcctctctctttctctctttttgctgtttctagctcctctctctctggatctcgccggcgaaccgtttctcttgggtgtaaacagtagcaatcaagctatagaatctcagatatcgctgaattagctgttggattttatccgccttttcttcgttatccggggctcgggtataaggtttcatcgtcttatttcatctgtaaatgggctgcttccactcaaaggcagcaaaagaatttcgaggacacgaagaccctgttaagcttgcctctgagacagcttttagtgtgagtgaggttgaagcattatttgagctattcaagagcataagcagttcggttgttgatgatggtctgattaacaaggaggagtttcaacttgctttgttcaaaagccggaagagggagaatatatttgctaataggatatttgatatgtttgatgttaaacgaaaaggagtcatcgatttcggggactttgtaagatcactcaatgttttccaccccaatgcttctctagaagacaaaatagattttacgtttaggctttacgacatggactgcacgggttacattgaacgacaagaggtcaagcaaatgttgatcgcgcttctctgcgaatctgaaatgaaactggctgatgaaaccatagagataatactcgataagacatttgaagatgcagacgtgaatcaagatggaaaaattgataaattagagtggagtgatttcgtaaacaaaaatccatcattgcttaagatcatgactcttccatatctcagggatattacgacaacgtttccgagttttgtcttccattcggaggtcgatgagattgccacatgaagaaacaaactggtttaagaccgagtagattgccacgagttggaagaacaagtctgagctaatcggtgtaatcaacatctgtttgtaaacagtagtagagcatattctcttgaaattgtttgggttacttttttcttctcacaacagtttaaaatttt

SEQ ID NO: 118721 - DNA, 1140 bp, Arabidopsis thaliana
  unsure (1)..(1140): unsure at all n locations
tcgtctccgtcttcctcgctcagcttcaacaaccagagccgacttgagattgagaatcaacgtaatcgatactctcgcaaagtctcatcctttctcagcaaaaaacactaggaaatggttgaaaggcatggagagttttgatttgctgcttaagatatatcatgtcgcagtgcgttgacggtatcaagcatttatgcacctctgttttagggtgttttgatcttgatttgtataaacaatctggtggccttggagatcctgaattgcttgcaagagacactgtttttagtgtgagtgaaatagaagctctttatgagctttttaagaaaatcagcagtgccgtgattgatgatgggctaataaacaaggaagagtttcagttggctttgtttaagacaaataaaaaagagagtttgtttgcagatcgggttttcgatttgtttgatacaaagcacaatggaatactggggtttgaggaatttgctcgtgctctctccgtctttcacccaaatgcgcctatagatgacaaaattcacttttcatttcagctatatgatcttaaacagcaagggtttatcgaacggcaagaggtgaaacaaatggttgtcgctacgcttgctgaatctggaatgaatttgaaggatactgtcattgaggatataatcgacaagacgtttgaggaagcagacacaaaacacgatggaaagatcgataaggaagagtggagaagccttgttcttagacatcccagccttctgaagaacatgactcttcaatatctcaaggatatcacgactacgtttccaagctttgtgttccattctcaggttgaagatacctgaaaaagcaaaagcaaaagcaagcagcggcaagacatcattgtattgttgaaggttgttctttcgttatggttctttatttgttacatttctaaatctctgaactcattttattttttattgagctttttttgtgaagcaaaattcttctttttagtttggtttttgtcctttttgatttcgctcggtctatctgtagatacaacttttgcatcttgatgttatggtaatgtaaagtttttcagttnnnnnnnnnnnnnnnnnnnnnnnnnnnnnnnnnnnnnnnnnnnnnnnnnnnnnn

SEQ ID NO: 118722 - DNA, 1106 bp, Arabidopsis thaliana
  unsure (1)..(1106): unsure at all n locations
aaaattttgcaatatattcattctgcttatagattattgtgtcgaccttttttctctcacttacccaataagagcttttttcgcgttttccaccgcaaccaccgtcaccttcaaccgccggagccgccgcaaggaaggctcatcatccgccgtggcaattttttgaggtgtacaaagcattgcctatttgacgaaccaggaaatggttaaaaggcatggagagttttgatttacaagatatatcatgtcgcagtgcatagacggtttcaagcatgtatgctcctcttttttccggtgttttgatatcgatatttacaaacaatctggaggccttggtgaccctgaacttcttgcgagagagacagtttttagcgtgagtgaaatagaggctctctatgagctgtttaagaaaatcagcagtgctgtgattgatgatgggctaataaacaaggaagaatttcagttagccttgttcaagacaaataaaaaagagagcttgtttgcagaccgggtattcgatttgtttgacacaaagcataatggaatactggggtttgaggagtttgcgcgtgctctctctgtctttcatccaaatgctcccatagaagacaagattgacttttcgtttcagctatatgatcttaagcagcaaggtttcatagagaggcaagaggtgaagcaaatggtggtggctactcttgctgagtccggcatgaacctgtcagacgaaatcatagagagtataatcgacaagacatttgaggaagctgatacaaaacatgacgggaggatcgataaggaagagtggagaacccttgttctcaggcatccttcccttctaaagaatatgactctccagtatcttaaggatataacaactacatttccgagctttgtgttccactcgcaggtggaagatacctgagaaaaacaatagcatattagcagaggagacaatttgggaattgtgtttgttttctgattatgtatcatgtctatttgtttcaatctctctgaacattttcaaaattttgttgttacttgtgtgaattaaaagtaaagaaaacaaatctgtttttttgctnnnnnnnnnnnnnnnnnnnnnn

SEQ ID NO: 118723 - DNA, 1568 bp, Arabidopsis thaliana
  unsure (1)..(1568): unsure at all n locations
nnnnnnnnnnnnnnnnnnnnnnnnnnnnnnnnnnnnnnnnnnnnnnnnnnnnnnnnnnnnnnnnnnnncccacgccgttttgccaacgaacgttctttcttcttaatcacagctcagcctgacgcaaccgctcaggctgatctcttccaatttacagccatttcccagctcagatctctgatccggtgagatctctctcaaggaaaaggagttagagcatcatcaagatgaaggcactcattcttgttggaggcttcggcactcgcttgagaccattgactctcagtttcccaaagccccttgttgattttgctaataaacccatgatccttcatcagatagaggctcttaaggcagttggagttgatgaagtggttttggccatcaattatcagccagaggtgatgctgaacttcttgaaggactttgagaccaagctggaaatcaaaatcacttgctcacaagagaccgagccactaggtaccgctggtcctctggctctagcgagagacaaattgcttgatggatctggagagcccttctttgttcttaacagtgatgtgattagtgagtaccctcttaaagaaatgcttgagtttcacaaatctcacggtggggaagcctccataatggtaacaaaggtggatgaaccgtcgaaatatggagtggttgttatggaagaaagcactggaagagtggagaagtttgtggaaaagccaaaactgtatgtaggtaacaagatcaacgctgggatttatcttctgaacccatctgttcttgataagattgagctaagaccgacttcaatcgaaaaagagactttccctaagattgcagcagcgcaagggctctatgctatggtgctaccagggttttggatggacattgggcaaccccgtgactacataacgggtttgagactctacttagactcccttaggaagaaatctcctgccaaattaaccagtgggccacacatagttgggaatgttcttgttgacgaaaccgctacaattggggaaggatgtttgattggaccagacgttgccattggtccaggctgcattgttgagtcaggagtcagactctcccgatgcacggtcatgcgtggagtccgcatcaagaagcatgcgtgtatctcgagcagtatcatcgggtggcactcaacggttggtcaatgggccaggatcgagaacatgacgatcctcggtgaggatgttcatgtgagcgatgagatctatagcaatggaggagttgttttgccacacaaggagatcaaatcaaacatcttgaagccagagatagtgatgtgaaaatgagatattatatgtgcaacttttttttttttttttttgtgtcctttcttcaactttgaaatcgctttcgtaattcttaatggcttttgaataagcatcaatcaaaacgctgtatatcttgttagggtcgtttgctgttttgtctctttttttgttttgtaatttataaaaaaatttattctcattttatgtgagatacttttgaatattcattaattataaagctttttttttgtgaaaaaaaaaaaaaaa

SEQ ID NO: 118724 - DNA, 468 bp, Arabidopsis thaliana
  unsure (1)..(468): unsure at all n locations
attttgccaacgaacgttctttcttcttaatcacagctcagcctgacgcaaccgctcaggctgatctcttccaatttacagccatttcccagctcagatctctgatccggtgagatctctctcaaggaaaaggagttagagcatcatcaagatgaaggcactcattcttgttggaggcttcggcactcgcttgagaccattgactctnagtttcccaaagccccttgttgattttcctaataaacccatgatccttcatcagatagaggctcttaaggcagttggagttgatgaagtgggtttttggccatcaatttatcagccagaggtgatgccttgaactttcttgaaggaccttttaagaccaagctgggaaattcaaaatcaacttgntcaacaaggggcccgggggcacttagggtacccactgggcccctttggttttttggggggggcaaaattttcttt

SEQ ID NO: 118725 - DNA, 1506 bp, Arabidopsis thaliana
gatattttagctgtatggttttggttccgatcacaaagtgcgtcgaatcgagctacttcctccgccggctttgctgtgtgtgtgatcgttcgtttactaaatctgaaacaagtatctaacgccttgccggagatgtcgagctcaggccaaactcagttccgttatacacagacgccgtcgaaggtggttcatctgcggaatcttccatgggaatgcgtcgaagaggagctcatcgacctttgcaaacgattcggcaagatcgtcaataccaagagcaatgtcggcgccaatcgcaatcaagctttcgtcgaatttgctgacttgaatcaagctatatcaatggtttcgtattatgcttcatcttcagagcccgcacagattcgtgggaaaactgtctatattcagtactctaatcgccatgagattgttaacaatcagagtcctggagatgtccctggaaatgtcctcttggttacctttgaaggagtggaatctcacgaagtcagcatcgatgttatccatctggtattttctgcttttggatttgtgcataaaattgccacatttgagaaagctgctggtttccaggcactagttcaatttactgatgtggagactgcatccgcggcaaggagtgcgttggatggcagaagtatacccaggtatctgctttccgcacatgttggttcgtgcagtttgcgaatgtcttattcagctcatactgatctcaacatcaagtttcagtcccaccggagcagagattacacaaatccataccttccagtgaatcagaccgcaatggatgggtctatgcagcctgctttaggtgctgacggcaagaaagttgaatctcagagcaacgtccttctcggtttgattgagaatatgcagtatgctgtcactgtggatgttcttcacacggtgttttctgcatatggaactgtccagaagattgctatatttgagaagaatggttcaacgcaagcattaattcaatactctgatataccaacagcagcaatggccaaagaagcactggaaggacactgcatttatgacggtggctactgtaagcttcgactatcatactctcgtcatactgatctgaatgttaaggcttttagcgacaaaagcagagactatacacttcctgatctaagcctacttgtggcacaaaaaggtcccgcggtgtcgggttctgcaccaccagcaggttggcagaacccgcaagcgcaaagtcaatactcaggttatggcggaagccatatatgtacccatcatctgatcccaacgggcttcaccctcaggtcaacctccttactatggatgagatattgtttactaaaaatttcggattttgctgccactggggagtatttccatgtttaggtttgtttgaggttaaaagtgtgattgttctttcttttttgttgttgacataatttaagtgggaagaccaataataaatcgaatatgttgcgcttgctaaaaaaaaaaaaaaaaaaa

SEQ ID NO: 118726 - DNA, 2037 bp, Arabidopsis thaliana
  unsure (1)..(2037): unsure at all n locations
gaaagagcaatctctctatactacaaacaccaaagtttaaaattaaacaaaatcttcaagaaacactttacgaatttctgcaatggcttcacttcaattttcttctcagtttctgggctcagacactaaaacacacagctctatcatttccatctctcgtagttactctccaactccattcactagattctcccgcaagaagtatgagtcatgttcgatgtctatgaatggttgtgatggagatttcaagacgccacttggtacagtggagacaaggactatgactgctgttttatctccggcagccgccactgaaaggctaatctccgccgtctctgaactcaaatctcaacctccgtcgttttcctccggcgtcgttcggttacaggttccaattgaccagcaaatcggagcaattgattggcttcaagcccagaatgagattcagcctcgctgtttcttctctcgtcgcagtgacgttggtcgtcccgatcttcttctcgatctagctaacgagaacgggaacggaaacggaaacggaacagtgtcatctgatcgtaatctggttagcgttgctggtatcggctctgcagttttcttccgtgaccttgatcctttctctcatgacgattggagatccatcagaaggtttttgtcttcaacgccacctctgattcgtgcctatggtggtatgcgttttgatcctaatggcaagatcgctgttgaatgggaaccttttggtgcattttacttttcagtccctcaggttgagtttaatgagtttggtggaagttcaatgttggctgcaactattgcttgggatgatgaactctcttggactctggaaaatgctattgaagcactccaggagactatgcttcaagtttcttctgttgtaatgaagttgagaaacagatctttaggagtatctgttttaagcaagaatcatgttcctaccaaaggagcttatttccctgctgtagagaaggctttagagatgattaaccagaaaagttcaccccttaacaaggttgttcttgctcgtaacagcaggataattacggataccgacattgatcccattgcttggctagcacagttacagcgcgaagggcatgatgcatatcagttctgtcttcaaccacctggtgcaccagcttttatcggaaacacgcctgaaagactattccaaaggactcgattaggtgtctgcagtgaagctttggctgcaactaggcctagagctgcttctagtgctcgtgatatggagatagagcgtgacttactaaccagtccgaaagacgacctcgagttctctatcgtacgagagaatataagagaaaagttaaacggtatatgtgacagagttgttgtcaagcctcaaaaaactgtgaggaagcttgcaagagtgcaacatctatattctcaattggcagggagacttacgaaggaagatgatgagtataaaatattggctgctctgcatccaactccagctgtttgtgggcttccagcagaagaagcaaggcttttgattaaggagatagaatcattcgatagaggaatgtatgcgggacctattggattttttggtggcgaggagagtgaatttgcagtcgggatcagatcagctctagtcgaaaagggtcttggggcattgatctatgcggggacagggatagtagctggaagtgacccatcttcagagtggaatgagcttgatcttaagatatctcagttcaccaagtcaattgaatatgaagcaacaacatctctacaggcgattaattgaagaaagagtaacatttgtatttgattgttttgtttgtatgggggataaggggttctcccaataagaaagcaatgttgtctctcttgtaaattaaaaaagaaatgctttaatttgttaatgggccgagccttttcgggttgtaactagggcaggcctatcatgaatgttcataggcctagctgttatgattgttaatgagcttctanagtgtttttcttcnnnnnnnnnnnnnnnnnnnnnnnnnn

SEQ ID NO: 118727 - DNA, 673 bp, Arabidopsis thaliana
ctcaatctagctctcttctctatctttctctaaatcaggggtcttcctgaagatttcatcaccgagcttcagagtccaggttacatattaatgatactttacgtcatcggtttctttagagacatggtcgatgctctttgtccttacattggtctacctagttttctagaccacagcgagacctctggacccgatccgacccgacacgctctctctacgtcagcgagtcttgctaacgagttgatcccggtggttcggttctcggatcttccgaccgatccggaagattgttgtacggtttgtttgtcagattttgagtccgacgataaggttaggcagctacccaagtgtggacacgtgtttcatcatcattgtttagaccgttggatcgttgactacaacaagatgaaatgtccggtttgtcggcaccggttcttaccgaaagaaaagtacacgcaatgtgattggggttctggttcagattggtttagtgatgaagtggaaagtaccaactaattggtagttttaatctatgtcggcagaatgtttgttgtattaattccagtataactctatgtatattagcatagatcatctttttgtgatggaacaacactatatatctttatacaaaaaaaaaacactatatatattatcaaaaaaaaaaaaaaaa

SEQ ID NO: 118728 - DNA, 806 bp, Arabidopsis thaliana
ggactgtccactgccgtaccggtccggaattcccgggtcgacccacgcgtccgctctcgtctatatctttctctcacactcatgggtcttcctacagatttcaaagagcttcagattccaggttacgtactaaaaacactttacgtcatcggtttatttagagacatggtcgatgctctttgtccttacatcggtctaccaagttttcttgaccacaacgagacctctcgacccgacccgacccgactcgctctctccacgtcagcaactcttgccaacgagttaatcccggtggttcgtttctccgatctcttgaccgatccggaagattgctgcacggtttgcttatccgattttgtatccgacgataagattagacagctaccgaagtgtggacacgtgtatcatcatcgttgtttagaccgttggatcgatgactgtaataagataacgtgcccgatttgtcggaaccggttcttaccggaggaaaagtccacgccgtttgattgggggacttcagattggtttagagatgaaatgtgaagaaccaactaataatgatggttttacttttacttgttacttttttcacgggaatatttttctactgtataaatcttttttccaaactactggataaatgaaggtataagattatggaattggggatattagcatcaaatatttttttttggtaaagaaccgactggataaaaatcatccaatggaatccggctttttctttttttttggaataaaaaaagtgggacaggattaaacgcgggggaaaaaatcattgggttttt

SEQ ID NO: 118729 - DNA, 878 bp, Arabidopsis thaliana
  unsure (1)..(878): unsure at all n locations
gaagaagaaagatggggctacaaggtcagctaagtgacgtctcttccgattcaatccctcttatgctcctctctctcctcgccgtcttcatcaaccatctccgatctttcctcctccgtctcacctctaaatcaaatcctaatctccccgtagacgatgtctctatagcatcgggactagccaacataatcgttctcgccgatcagcttagtttgaatcggttattctcgtaccggtgcggtgacggaggtggtggcggctccgattgtgttgtgtgtttgtcgaagttaaaggaaggtgaagaggtgaggaagctggaatgtcgacacgtgttccacaagaagtgtttggaaggatggcttcatcaattcaatttcacttgtcctctttgtagatctgctttggtttccgatgattgcgtctctaaaacgcagcgtagcgttgggagggatttgatctcgtgtttctctctccactgagtaaaagatcggaagatgaagaagatccgatggtatctgagagatctacggtggctggctggttcggtttgaccacgcgcgtgcgccccttcttttctcggattttttttgaggtctctttcttctgtgagaggagaaccttttgtttgtttggtttttttttttacttttcgatttggaatatgtaaattttgaatatacaaattttcaccgtttgtatctttgttgttccttgctgttgagtatatataaatggagaagatatcaattcccagtataatttgaaaaaaaaaaaaaaaaaaaggnnnnnnnnnnnnnnnnnnnnnnnnnnnnnnnnnnnnnnnnnnnnnnnnnnnnnnnnnnnnnnnnnnnnnnnnnnnnnnnnnnnnnnnnnnnnnn

SEQ ID NO: 118730 - DNA, 563 bp, Arabidopsis thaliana
  unsure (1)..(563): unsure at all n locations
tgatggncctggcctgnactnccngggctacccactnagtcctgagaatgaagaagaatgaatgaaagactggggctacaaggtcaagctaagtgacgtctcttccgattcaatccctcttatgctcctctctctcctcgccgtcttcatcaaccatctccgatctttcctcctccgtctcacctctaaatcaaatcctaatctccccgtagacgatgtctctatagcatcgggactagccaacataatcgttctcgccgatcagcttagtttgaatcggttattctcgtaccggtgcggtgacggagggtgggtggcggctccggattgtgttgtgtgtttgtcgaagttaaagggaagggtgaagaaggtgaaggaagctgggaatggtcganacggggttccacaaggaagtggtttggaaggcatggcctccaatcaaatccaatttccaattggtcccccttttgaaagacacgtccttttgggtttacccgattnanttccggccttaaaaacgnaancgtagngtttgggnagggngtttaaacccngggtttntc

SEQ ID NO: 118731 - DNA, 904 bp, Arabidopsis thaliana
  unsure (1)..(904): unsure at all n locations
ccacttatacatcatataggaagtgtaccctcagaccgtccggattccggtcaccacgcggcggaaccaaagaaacaaaaacaatctctaaaaccatatcaatgggactacaaggtcagctctccgacgtgtcatcagattcgatcccactgatgctactggctctcctcgcaactttcttcagacacgtccggtctcttctcctcttcccttcttctgcccccgttgttgttgttacttcaaacctcagcgtcctcgccgaccagctcaacctaaatcgcctcttctcgtaccgctactccgacaacgcagcctctgactgcatcgtgtgtctgtctaaactccaagaccggagaagaagtgaggaagctagattgcagacacgtcttccataagcagtgtttggaaggctggcttcaacatctcaacttcaattgcccgctctgtagatctccattgctacctcatcatcatcagggacatggcagtgatgcgtcgatctcagccttccctcttcgctctacctctactgcatcatctcattgatttttatgtgaagaaagaagaaagaagtaagcaagagagaagaagatggagggaggatgctttttttatttatcttccttctcctctttcctttttaggagaagattcttatttcttactacagaagattgattcttcttatatatctatatatataaccttctatatttagctatgtttttgaggaatctcagatcggaagagaggtccttttgtttttcagatttccactctgtaaattcttagtatgaaaagaatcaaattaagcttcatgtaaaaaaaaaaaaaaaaagnnnnnnnnnnnnnnnnnnnnnnnnnnnnnnnnnnnnnnnnnnnnnnnnnnnnnnnnnnnnnnnnn

SEQ ID NO: 118732 - DNA, 422 bp, Arabidopsis thaliana
  unsure (1)..(422): unsure at all n locations
gcaagaacaacaacaagaaccaaagaaacaaaaacaatctctaaaaccatatcaatgggactacaaggtcagctctccgacgtgtcatcagattcgatcccactgatgctactggctctcctcgcaactttcttcagacacgtccggtctcttctcctcttcccttcttctgcccccgttgttgttgttacttcaaacctcagcgtcctcgccgaccagctcaacctaaatcgcctcttctcgtaccgctactccgacaacgcagcctctgactgcatcgtgtgtctgtctaaactcaagaccggagcacagaagtgaggaagctagattgtcaggcacggcctttccattaagcagtgttttggaagggctgggttctaagcattcttcaaacgtcaatttgccccgttcttgaaggnttt

SEQ ID NO: 118733 - DNA, 862 bp, Arabidopsis thaliana
cgtggatcaagattctttcttatcttcatcactccacacattttcttgtcttcaaactcacacaaagaaaagaaaagtctccaaagctcaaaaagcaatgactcgaccgtcaagattacttgagacggcggcgccaccaccacaaccgtcggaggagatgatcgcagcggaatccgacatggtggtgatcttgtcggctcttctttgcgctcttatctgcgttgctggtctcgccgccgtcgtacgatgcgcttggctccggcggtttacagccggaggagattcgccgtcaccgaacaaaggcttgaaaaagaaagctcttcagtctcttccaagatccactttcaccgccgcggaatcaacctccggcgccgccgctgaagagggagactcgacggaatgtgctatttgcctcactgacttcgccgacggtgaagaaataagagtgcttcctctttgtggtcattctttccacgtggagtgtattgacaaatggctagtttctaggtcttcttgtccttcttgtcgcaggattcttacgccggtgagatgtgaccggtgtggtcatgcttctacggcggagatgaaagatcaagctcatcgtcatcaacatcaccaacactcttctactaccattcctacgtttcttccttaattaacactaatttttgttttattatggcaataattaattgcataaaagttatgtaaagtgagtttaattaggattagagagatcttttaaagtttttctctcttttctccttgttgtaatccagtgtatttaatcaaatctcagatggagttcaaaaaaaaaaaaaaaaaaaaatgatgtcatctaacaacaaaaaaaaagaataga

SEQ ID NO: 118734 - DNA, 864 bp, Arabidopsis thaliana
ttctcctctaaacaacaacaaagtctctcttccttctgtctttcacatttcctcttcccctaaaaacagaactcaaaaccaaaacaaaatgactcgctcctctagattccttggtacggcgtcgcctccaccaccggaagaaatcctcgccgccgaaaccgacatggttgtgattctctcagcacttctctgcgctctcgtatgcgtagccggtttagccgccgtagctcgctgcgcttggctccgccgtctcaccggagttaatcccgccgccgtcggagaagctccaccgcctaacaaaggcctcaagaaaaaagcacttcaagctctccctaaatcaacttacaccgcctctgcctctaccgccgccgccgctgacgatctaccgtgctcttcagtcggagacggagattcatccaccgagtgtgcaatatgcataacggaattttcggagggcgaagaaatcagaatcttaccgctgtgtagtcacgccttccacgtggcgtgtatagacaagtggttgacttcacggtcgtcgtgtccgtcttgtcgtcggatattggtgccggtgaagtgtgataggtgtgggcaccatgcttcgacggcggagactcaggtcaaagatcaacctcctcatcaccaacatccttcacagttcacttccgccattattcctgcttttcttccttgaaatgttttcactttattaaatttttataatttgctaaaaatatcggcatgattaaaagtaaagtattaattaattaggaattagtaatctttagttaagtacttttatatttctcctctgtaatcctctgttctgaattaatcagatgaaatttcgacaaaaaaaaaaaaaaa

SEQ ID NO: 118735 - DNA, 2112 bp, Arabidopsis thaliana
taaaagcttagcaaaattcttctgaatgaataatcggcgattatgtctttgaaaaacgatgcgagtagtagccacgacggtggaagcaacagagaaagcgtaatcgatgatcatggccgccgtaaaagcacttgcggctactgtaaatccccagctcggtccagtatctctcacggtttatcagcacagactcttaccgtttatgactaccaagctcttattgaccgaggctggagaagatctggtacttatctttacaaacatgagatggataaaacgtgttgccctccttatacgatacgtttgaaagcaagtgattttgttcctactaaagagcagcagcgagtttctagaagactagaaaggttcttggatggcaaactagatgtgcagcccagggaacaaagaggtgcttcttcctctggtgatgtttcagatacaaggagaaaaacacttggagctgctaaaagtgaagagaataagaaagttgaagcagttatggatgatttgtctaaaaatattgaccaagctgtgcaattatgcatacggagtggggaattcccgtctaatatgcagataccaaaagcttcagtgaagaaggttttctgtgctagaagaaagaaactagctgaaggaacagaacaaatcttatacaccagcaacattgcttttccaatagcagctgcaataaaacgcatccagacatctgagaaagaggggataaatagtgcagaaggaaatagattatcacctgaaactatttctgagatgttgttgagtgcaatgcataaggtgggggaaactcctgatgtgtctatcaaagtctgtaagggccatatcaatttcctttcatctgccaaagattctttttctgatagagatgttgtacctaatggtaacatctcgagaggagccaattctttagatggaagtgaaacccttcacgctaagaaggattcagaaaaccatcaggcaagaaagcgaaagctggagatacatttgaaaaggtctagttttgatcctgaagaacatgagttatacaaacggtatcagctgaaagtgcacaatgataagccagggcacgttgtagaaagttcatacagaaggtttttggtcgactctcctttaatagatgttcaaccttcaggtgatgaaaaggttccgccttgtggcttcggctctttccaccaacaatatagaattgatggccgcctaattgccgtcggggttgtagacattcttcctaaatgtttgtcaagtgtatacttattctgggatccagactatgcattcttatcgctcggaaaatattctgccattcaagaaattaattgggttatagagaaccaagctcgctgcccttctcttcagtattactatcttggttattatatacattcctgcagcaagatgagatataaagcagcctatcgtccatctgagcttctatgtcctctccgtttccagtgggttccatttgaagtagcaaggccgatgcttgataaaaagccatatgtcatattgtccgatattgctatttcacataatcaatgttctttactagctggtgcttctgaaactctcgtggaaccagcagcaagtgaacatgaagacatggaacaaggggagacgaatgataactttatgggctgcagtgatgaggatgaagatgaggatgatgatgatgatgatgatgatgaggaaatgtatgagactgaatcagaggactctcatattgagtcagaccctggatccaaagataacgacattaacaacatccttatcggtctttatggatcccaatatagatacaaggaaatgcggcagatcataactcccgtaggcaggaagcaactggaaccgatgttacaaagctaccgcaaggttgtgggcgctgagctttcagagagaatggtgtatgaaatcaactgaagcttcaacaataccaagctccattgagctttggtaccattagtcattagataaaactcaaaattgtttgtattcatgtttcagttgttgtatatctatgactatgagacttgtacatggtgtctttctttaagtttgtattttctgattacctttatattgaaaaaatttctgtccaag

SEQ ID NO: 118736 - DNA, 315 bp, Arabidopsis thaliana
caaagataacgacattaacaacatccttatcttcatcctgataactttatgggctgcagtgatgaggatgaagatgaggatgaggatgatgatgatgatgatgatgatgatgaggaaatgtatgagactgaatcagaggactctcatattgagtcagaccctggatccaaagataacgacattaacaacatccttatcggtccttatggatcccaatatagatacaaggaaatgcggcagatcataactcccgtaggcaggaagcaactggaaccgatgttacaaagctaccgcaaggttgtgggcgctgagctt

SEQ ID NO: 118737 - DNA, 1166 bp, Arabidopsis thaliana
  unsure (1)..(1166): unsure at all n locations
nnnnnnnnnnnnnnnnnnnnnnnnnnnnnnnnnnnnnnnnnnnnnnnnnnnnnnnnnnnnnnnnnccacgcgtccgggttattcgactagagaaaaggagctctgtgtgtcgaaaccctccgtcgccagcatttattcttctcacttttcttcaccggagaatcacgacaacatcaaattctccggcgacatctcagtggcagtgcatctgtaaaatgcttcaaggactgttgttcgctactcttgcttaattattactatagctggtgaaaatgggaggttgctgtagttcttcgaggaagtcacatcttgttggaacacctgtttactattattgtccagaatcttttgaagagcttgtcccttcaggaacccgtgctggtgtgggatcagcattcaccacaggcctcttggttgatataggtttggagacatctatacctgacaccttttgtgctcctgctcctcttccatatgatttgcttttggggcgaccacaatgcacagattctgagtccatcaaaggaaggatgagtggaagcagttttgaaacgctagcgacatgtgaagatcttggggaatcagactgtaaaactctagccagctcagtcattctttcaccgaggaaatcagatttctcgaaacatcaaggattgaagatattggttgatgaagaggaggaatgttgtcctatttgctttgaagattatgatgttgagaatccaagactaacgacaaagtgtgagcacgaatttcacctctcttgtcttctggagtggattgaaagaagcgatagatgcccaatatgtgataaggaagttgtgtttgatgatcgcttgaactagcatcattactatcccctggcttgaaagtttgaaggtgtggcgctttgtttggttagtctactacataattagcatacatctattttgtttcttcctcacacactttaagtgttgggtctccacatttccacttagttttgtcgtattggttatgttcgttttgcccttgtgcgatcatatagatatacatacaattgtaaatattacctagcttcttgttcgttcgtttgtgatctccggggtgtgatagagaagaaaggaccaccatttcagtattttgattgtttgcatcttcaannnnnnnnnnnnnnnnnnnnnnnn

SEQ ID NO: 118738 - DNA, 1422 bp, Arabidopsis thaliana
tcctcttcttccccccaaatcctctctcgctagggtttctcattccgatccataattctagatgtcgaggtttttaactgagacctgtcaaataagctaaagcttcttctaagagcttcaaggaaagcattgcattgttgtggtcttgtttgtgtccacagaaggaaagaagagtgagaagctcaggatgtcaagcagtcgaaatacccactggtgtcacagatgtcagcgtgctgtccgccttcacggccaagagcctgtatgcttttattgcggaggtggatttgttgaagaacttgatatggctcaagccagcccctttgatatgtttagatcccacaggggtgttgtagaacgtgatcagacttttgatctcatggatgctttctctgtgtttatgaggaaccgcttagctgaaaggagccacgacagagaaatcagaggaagaaccatcagttcaggtcctgaaaactttcctggtctggcccctttgttgatctttggtggtcaagtcccttatagactaactggcgacaatgcagtcgaagccctcttcaatggcggctcccctggcattggcatcacacgtggtaacaccggcgactacttcttcggtcccggccttgaagaattgttcgagcagctttcagctggcactactcgccgaggcccaccacccgcaccgagatcagcaatagacgcattgccaactatcaagatcgcgcagaggcatcttaggtcatcggactcgaattgtcccgtgtgcaaagacgaattcgaactgggatcagaagcgaaacagatgccgtgtaaccacatctatcattctgactgcattgtcccgtggctggttcagcacaactcttgcccggtctgtcgccaagagctaccatcagctagcggaccttcaagcagtcaaaacagaaccacccctaccagaaactacagaagcagtagtagtagtagtagtagtaacagtcgtgagaacgggaatgaaagaaggaatcctttctcttccttctggccattccgttcgtcaggttcaagctcaagctccactcaaaaccgtggaggcacaagaaactcggatacaagcgatgagaaccataactaccatcaacagcaacatcaacaatcatatatgggttacagtggctggccttttgattactaaaagtctaaaagtgagctaaaacaaatctttggtctcactttggtctctttacttaaatatgcttgtgattctgcatatgccttgtgcttcactctctatctctctcactctcttttatcaacataaataatggagaactgtatttgttactgtagattttctttctctgttaaaaacgagttcatcattttctatatgctttgttaaatatgtcattttagttgggtttttaaaaaaaaaaaaaaaaa

SEQ ID NO: 118739 - DNA, 1764 bp, Arabidopsis thaliana
  unsure (1)..(1764): unsure at all n locations
nnnnnnnnnnnnnnnnctgcagtaccggtccggaattcccgggtcgacccacgcgtccggtcttccttcttcttcctttttctctccccccccattatcttcggcgaatcatgaatctagggttttgttttctcccataaccctagattttcttccatcaatcttatatttttctcatttcttcttctccgttttagctcatctcccgattcatctcgatttccatggagggagcgggagagacgacgacgtcggaggggcatttgacttcggcagcagcttttgtggaagggggaattcaagatgcttgtgatgatgcttgtagcatttgtcttgaatccttctgcgaaagcgatccttctactttgactagttgcaagcatgagtatcatcttcaatgcattcttgagtggtgtcaaagaagctcacagtgccctatgtgttggcaatcaattagtctcaaagaccccacaagtcaggagttgcttgaggctgtggaacaggagaggaatttccgcttcaatccaactagaaatgccaccatatttcgtcatccaactcttggtgattttgaattacaacatcttccagtgggggtggataatgctgagattgaagaacgaatcattcagcacttggctgctgctgctgctatgggacgagcaagacatggggtaagaagggaaggccacagaagcaggtcgtcaagtcaaggacatcaacagttcatggtgttctcttcgcaacctaatgcttcttctcctccacctcatcctcccatgccttcttctccatctcagagagatgagagtgacacagtgtcaaaccttcctcacaatgctttaggggagggttctcatcagtcaaacacgcagccaccaacttcttctcatccccgccaggtttctccctcagcatctgattcaaacagcaggcctcttaatcaatcttccccaagtgaacaagatagagctggaccatcagaactccagtcattttcggaatcacttaagtctcgattaaacgctgtctccacgagatacaaagaatcgatatcaaagaatacaaggaactggaaagatagacttttttctcgcaacacgtccatggcagatcttggctctgaggttaaaagagaggtcagtgccggaatcgccactgtgtcccgcatgatggaacgtttagaaacgagagaaaacagtagacccagcactgcatctgtatcagatgtctctgaaaatcacactcctgaaacaaacaatgagcacaatagagcagcagcgggtgatgaacattctgtgaatgaaagaggtgttaaagaaacatgtgcgactggttctggttcaagctaataagtgagtgccagcatcttgttggcaaagagagaggaagatgttgtccattgtgaaattctgataatatatatatacagagtcagaagtctcaaaagtgtggagcataggaagaaggttattattgataaagaaaaagagttttccgattatcaataaataagaaaagttatatatatgaccaaaaggaggccttaaagacgcctctttctgtgttatgtcaaacaaacaaaaaaaaaactaaagagaaaaattagagtaaaagacctgtgtggggttgttggttatttggtcggtctgttgtaaattcacattgtcgttcacattacggatttctatgaatttctacttatgtatcttcaaaaacttggtctagcaaaaccaatttaatgtaaaaaaaaaaaaaaaaaaa

SEQ ID NO: 118740 - DNA, 1682 bp, Arabidopsis thaliana
  unsure (1)..(1682): unsure at all n locations
atgatactccagctcccatacgactcacttagggaaagctgctacgcctgcaggtaccggtccggaattcccgggtcgacccacgcgtccgctcaaattaaaagtcaatcatatcaaatcccaaatcctcccagatgtttttatcatcttcttcttcctgaagatttgatttcattttcctctctttcagatccctattctcatggcttctggatcttactggtgctatagttgtagccgattcgtttgggtttccgattcaatctcttgccctgattgcgacggtggtttcctcgaactcatccaagagcctctcgatttcacaccttccgattccttcaccaccaccaccaccactcaacatcgcagccccactcgcttccctcctccttcttcttcttcctccaccccatccgcttctatgcacgccgataacagtcccactcctaccatcgttactcgtacacgaagcaatcgatctcctaatccagttattgttctccgtggatctgctgctgctccttcttctgatgttgtttccgaaggtttagatcgatctgcttttcagatgtattacgatgatggtactgattctggtcttagacctttaccaccgagtatgactgagtttttgttaggttctggatttgatcgtttgttagatcagatctctcagatcgagcttaacaccaatcggaatcttcgttcttgtgaacatccaccggcttctaaatcggccattgaagctttgcctctgattgaaatcgatccgactcatctcttatcggattctcaatctcattgcgctgtttgcaaagagaatttcgttttgaaatcatctgctcgcgagatgccttgtaatcacatctatcatcctgattgtattcttccttggcttgcgattcgtaactcttgtccggtttgccgtcatgagctaccggcggaggatctcaccgacggaaccggtgctgctttgactgctgttaccgctactgcagaggaagaggaagactcagctgcggggttaacgatttggaggttaccaggtggaggattcgctgtagggagaatccctggtggttggagaggtggagatagaatgatgccggtggtttacacggaggttgatggtggtagactcggtgatgagagacttccgagaagagtagcttggggttcgagaagaggtggaagagatggtggaggtagtagagagagaggtggtggctttgcgggtcggatcatgaggcttttcggatgttttagtggatcatctggatccattgctgctgctgctgctgcatcatccgggtccgggtccagaattcgggttactcgtagaaccaggtcgttctctatgttcagtacggcgtcgtcttcgtcaaggagacgaaattggctagcgtgattactagaattaccaagctctcttctcaggtgaaaactaaacacgaaagaacacactcttcttctgtttaaatttttcctatgttccttattaagtttttgtctatttcagtgtaatgattatattcattcctaaaatttgaatctatgcgagtaaattgatacaaaaaaaaaaaaaaaaaaannnnnnnnnnnnnnnnnnnnnnnnnnnnnnnnnnnnnnnnnnnnnnnnnnnnnnnnnnnnnnnnnnnnnnnnnnnnnnnnnnnnnnnnnnn

SEQ ID NO: 118741 - DNA, 1134 bp, Arabidopsis thaliana
  unsure (1)..(1134): unsure at all n locations
tgannnnnnnnnnnnnnnnnnnnnnnnnnnnnnnnnnnnnnnnnnnnnnnnnnnnnnnnnnnnnnnnnnnnnnnnnnnnnnccacgcgtccgcttttactcctctttttaagtaatctcacttcatttatctctctctctctctctatttcttttgcttccttttggtatttgctttgtatgtttgttttgagatcaaaatggcttcaagtgcttcaaagttcatcaagtgtgtgactgttggtgatggtgctgttggtaaaacctgtatgctcatctgctacaccagcaataaattccccactgactacataccaacagtttttgacaactttagtgcaaatgttgttgttgaaggcaccactgtcaatttggggctttgggacactgctgggcaagaagactataacagattaaggcctttaagttacaggggagcagatgttttcgtcttgtctttctcattagtcagccgagctagctacgagaatgtttttaaaaagtggatccctgaactccaacactttgctccaggagttccccttgtccttgttggtaccaaattagatcttcgtgaagataagcattatttggctgatcatcctggactatcccctgtaactactgcacagggagaggagttgcgtaagctaattggtgcgacgtattacattgagtgtagttcaaaaactcaacagaatgtgaaagcagtttttgattctgcgataaaggaagtgatcaaacctctggttaaacaaaaggagaagactaagaagaagaagaagcaaaagtcgaatcacggctgtttatcaaatgttctgtgtgggaggatagtgactcggcattgatgacgatgacccaactcagtctgatgattttaaactccacttttgagattgtgtgataaacgagagactttatattatatagattgaatcatgtaagagattattagcctctaatcaatcaatagttaccttgaagagagaaagagggggaggtagagagcttattattaattcaattgtgtttatttgtttcaaacctgttattgcaagatattagncattttgatacnnnnnnnnnnnnnnnnnnnnnnnnnnnnnnnnnnnnnnnnnnnnnnnnnnnnnnnnnn

SEQ ID NO: 118742 - DNA, 1707 bp, Arabidopsis thaliana
ccacgcgtccgcactctcccaaatctctcttctttaacaacaaaaaaaaaatcacagagacatagagagaagaagacggaacagaggctccaaaaaaatgatgatggagactagagatccagctattaagcttttcggtatgaaaatcccttttccgtcggtttttgaatcggcagttacggtggaggatgacgaagaagatgactggagcggcggagatgacaaatcaccagagaaggtaactccagagttatcagataagaacaacaacaactgtaacgacaacagttttaacaattcgaaacccgaaaccttggacaaagaggaagcgacatcaactgatcagatagagagtagtgacacgcctgaggataatcagcagacgacacctgatggtaaaaccctaaagaaaccgactaagattctaccgtgtccgagatgcaaaagcatggagaccaagttctgttattacaacaactacaacataaaccagcctcgtcatttctgcaaggcttgtcagagatattggactgctggagggactatgaggaatgttcctgtgggggcaggacgtcgtaagaacaaaagctcatcttctcattaccgtcacatcactatttccgaggctcttgaggctgcgaggcttgacccgggcttacaggcaaacacaagggtcttgagttttggtctcgaagctcagcagcagcacgttgctgctcccatgacacctgttatgaagctacaagaagatcaaaaggtctcaaacggtgctaggaacaggtttcacgggttagcggatcaacggcttgtagctcgggtagagaatggagatgattgctcaagcggatcctctgtgaccacctctaacaatcactcagtggatgaatcaagagcacaaagcggcagtgttgttgaagcacaaatgaacaacaacaacaacaataacatgaatggttatgcttgcatcccaggtgttccatggccttacacgtggaatccagcgatgcctccaccaggtttttacccgcctccagggtatccaatgccgttttacccttactggaccatcccaatgctaccaccgcatcaatcctcatcgcctataagccaaaagtgttcaaatacaaactctccgactctcggaaagcatccgagagatgaaggatcatcgaaaaaggacaatgagacagagcgaaaacagaaggccgggtgcgttctggtcccgaaaacgttgagaatagatgatcctaacgaagcagcaaagagctcgatatggacaacattgggaatcaagaacgaggcgatgtgcaaagccggtggtatgttcaaagggtttgatcataagacaaagatgtataacaacgacaaagctgagaactcccctgttctttctgctaaccctgctgctctatcaagatcacacaatttccatgaacagatttagagttacatatgtatatgtatatatgtatgattgattgtatgtatagatgatactggagaatgatgagtttttgagaatcaaactcttttcttctttctagtgattgcctttattcctttacatgttttggttctctgtacactatttgatttaccttttttactttctttcttcatttgtcaggaaatgttggaagataacattaatggtaaaaagttggtgtggaccgttgttgcgttggcatttcaaaaaaaaaaaaaaaa

SEQ ID NO: 118743 - DNA, 514 bp, Arabidopsis thaliana
  unsure (1)..(514): unsure at all n locations
ccaatggagtccaacgggtcctaacgctagtttctaccctgtccccttctactggggatgcacggttccgatataccctacctcagagacttcatcatgtttaggaaaacggtcaggggatcaaactgaaggaagaatcaatgatactaatacaacagtaactactacaagagcaagattggtctcagaatctcttagaatgaatatcgaagctagtaagagcgctgtgtggtctaagttaccgacaaaacccgagaaaaaaccgcaaggattcagtttgttcaatggatttgacacaaagggaaacagcaacagaagtagcttggtctccgaaacttctcacagtctacaagcaaacccttgtggaagaaggcaaagctgtgtagatagttttgttgtttggaactaagagtagatatagtatttactgttcggacgcgtggnnnnnnnnnnnnnnnnnnnnnnnnnnnnnnnnnnnnnnnnnnnnnnnnnnnnnnnnnnnnnnnnnnnnnnn

SEQ ID NO: 118744 - DNA, 2730 bp, Arabidopsis thaliana
aagcgaacgttacagagctatacaagaaattatatggagattctgttttctatttccattcttgctcttctcttttccggagtagtagctgctccaagcgacgatgatgttttcgaagaggttagggttggattggtggttgacttgagttctattcaaggcaagattctggaaacttcttttaacttagcgctttcagatttctatggcatcaacaatggataccgaaccagagtctctgttttggtcagagactcccaaggagacccgatcattgctcttgccgccgctactgatcttctcaaaaatgcaaaagcggaagccattgttggtgcacaatcattacaagaggcaaagcttttggcgacgattagcgaaaaagctaaagttccggtcatatctactttcttgccaaacacgttatctttgaagaaatacgataactttattcaatggacgcatgatactacatcagaggctaagggaattacaagtctcatacaagatttcagttgtaaatcggttgtggttatatacgaggatgctgatgattggagtgagagtttgcaaatattggttgagaattttcaagataaaggaatctatatcgctcgttctgcttcttttgcagtctcatcatcaggagaaaatcatatgatgaatcagctaaggaagcttaaggtctcaagagcatcggtttttgtggtgcatatgtccgagattcttgtttctcgtctcttccaatgtgtagagaagttaggtttgatggaagaagcgttcgcttggatcctcactgcaagaaccatgaactacttggaacattttgcaataactaggtcgatgcaaggggtcattggtttcaaatcttacatccctgtatctgaagaagttaagaattttacttcaagattgaggaaacgtatgggagatgatacagaaacagagcattctagtgtaatcatcggtttacgcgcacacgatatcgcttgtattctagcaaatgcagtagagaagttcagtgtaagtggtaaagttgaagcatcttcgaatgtatcagctgatcttctggatacaattagacatagtagattcaagggtttgagtggtgacatccaaatctctgacaacaaatttatctcagagacatttgaaatcgtgaatattggaagagaaaaacagagaaggataggattatggagtggtggtagttttagccaaagaagacagattgtttggcctggcaggtctcgtaagatcccaagacaccgtgttttggcagagaaaggtgaaaagaaggtgcttagggtcttagttaccgcaggaaacaaggtcccgcatctagtgtcggtgcgtcctgatcctgaaacaggtgttaatactgtctctggattctgcgtagaggttttcaagacttgcattgctccttttaactacgagcttgaattcataccttaccgtggaaacaatgacaatcttgcttatctactttctactcagagagacaagtatgatgcagcagttggtgatatcaccatcacttccaacagatctttgtatgttgattttactttgccgtacactgacattggtattggaatcctgacagtaaaaaagaaaagccaagggatgtggactttctttgatccttttgaaaaatccttgtggctagcgagtggagctttcttcgtcttgaccgggattgttgtttggttggttgaacggcccgttaatccggagtttcaaggctcttggggacaacaacttagtatgatgctctggtttggattctctaccattgtgtttgctcacagggagaagctacagaaaatgtcatcaagattcttagtcatagtttgggtttttgtggtgttaatattgacttcaagttacagcgcaaacttgacatcaaccaagaccatttctcgcatgcaattaaatcatcagatggttttcgggggatctacgacgtcaatgactgcgaagctcggatccattaatgcagttgaggcctatgcacaacttttgcgagatggaactcttaatcatgtcatcaatgaaataccttatctcagtatccttatcggaaattatccgaatgatttcgtaatgacagatagagtgactaataccaatggctttggctttatgttccagaaaggttcggatttggttcctaaagtatcgcgagaaatcgcgaagctaagatcattgggaatgttgaaagacatggagaaaaaatggtttcaaaagctggattcactaaatgtacattccaacactgaggaagttgcctctaccaacgacgatgatgaggcatctaagcgattcaccttccgtgagttgcgcggtttgttcatcattgcgggagctgctcatgttctcgtactagccctacatctctttcatacgcgtcaagaggtatcacgactatgcaccaaacttcaaagcttctataagtaaaaagtgatccatcattcataagctctactatagcaattgatggaggactcataagtaacaacaaagtacacttcgaaacaaatgtcacatgtaatacttggttttttttcccgtttaaattcacatgtaataatttaactcacgtaaatactaaagtgattcacccaaaaaaaaaaaaaaaagggcggccgctttaaaggatcccagcttacgtacgcgtgcatgcgacgtcatagctcttctataggtcacgcaatcaaaccggggcgc

SEQ ID NO: 118745 - DNA, 3194 bp, Arabidopsis thaliana
aaacaccgcaattttctctgcatctcataatttcaccagaatctcagatggcgacgacatcggagatcaacaatgatctttcgttttccgttgtatcgattgttgaagatgttcttcaacaacatagtagccgatcaagcgacgtcggtttggtttccagaaaagttgaagaatcttctttgagaagatatgaagctgctgggtggcttagagatatgatcggagtttccaatggtaaagattttccaggagagccttctgaagaagagtttaggcttggattgcgaagtgggatcgttctttgtaatgttcttaacaaagttaatcctggatcagtctcaaaggtcgttgaagcgccggacgatgttgcagatggagctgcactttcagcttttcaatactttgaaaacataaggaattttttagtagctatagaggaaatggggttgccatcatttgaagcttcagatatggagaagggaggcaagtctataaggatagtgaactgcattcttgcccttaagtcttatagtgagtggaaactgaaaggtgaaaatggtccatggaggtatggatctaacatgaaacataactttggatcgagaaaactatttctgagaaaaagttcagagccatttgttagttctatatcgagaactcagtcgacggatatgttatcaactgatcaacctctgagttctgatggagattctagatccataaatgggcttgttcggtcattcattgcagacagaaagcatgaagatattccaaatgttgtagagtctgtgttgaacaaagttatggaagaagtccagcagcgtttatcaatccacaatgaaatgatgaaatcaagttcaaagcctattccagaagatgattcatcctgtgagacagtggtccggtctcagctgtgtgatgcaagacaacatgaggaagcagaagaaaatagtccgccccaggttgtggaaaaaaagtttcaaaggacaaattttgaacatcacgaagaacaaaagattcttctgaatcaacaaaaacacatccaggagttgaagcaaaccttatacactacaaaagcaggaatgaaattgctgcagatgaagtatcaagaagatttctttcatctaggcaagcatttaaatggtttagcttatgcggctacgggatacaaaagggttcttgaagaaaaccgtaaactgtacaatctagtgcaggatctaaaaggaaacatacgggtgtactgtcgagttaggccgttcttgcctgggcaagaaagtggtggtttgagtgccgtggaagacatagacgaagggaccatcacgatcagagttccatcaaagtatgggaaagcaggacaaaaaccatttatgttcaacaaagtctttggtccttctgcaacacaagaggaagtgttttcagacatgcagcctttggtacggtcggttctcgatggctacaatgtctgcatcttcgcttatggccaaaccgggtcagggaaaacttttaccatgacagggcctaaggaactgactgaagagagcctaggtgtgaactacagggcactggcagatctgtttcttctatcaaatcaaagaaaagacacgaccagctacgaaatctcagttcagatgttggaaatttacaacgagcaagtcagagatctacttgcccaagatggccagactaaaaggttagagatcagaaacaactctcacaatggaatcaatgtaccggaagcaagtctagtgcctgtctcatcgacggatgacgttatacagctaatggatttgggacacatgaatcgtgcagtgagctctacagccatgaatgacagaagtagtcgatctcacagttgtgtaactgttcatgttcaaggcagagacctcacatctggctctatcctccatggttctatgcatctggttgatcttgcaggaagcgagagagtggacaagtctgaggtgactggagacagactgaaggaggctcaacacatcaacaagtccctctcggctcttggagatgtcatctcctcgctttcccagaagacttctcatgtgccttacagaaacagtaaactcactcagctgctgcaggactccctcggaggatcagccaagacacttatgtttgtccacataagtccagaacctgacactctcggagaaactattagtactctgaagtttgctgaacgagtggggagtgttgagctaggcgctgctcgtgtgaacaaagataactcagaggttaaggagcttaaagagcagattgctaatcttaagatggctctagtgaggaaaggaaatggtaatgatgtacaaccaacagctataccaatcaaccgtgagagaatatcgagaagaagatcactcgaaactcctactattcgacccaaattacctaccatgggaaacacatcaaacaacagtaggccccagatcatggatctaagtggaccagaggcttttaacgacagtactgcatcttcaagaagacacagcttagatatccatgagctaatgaaatcttcttctccggcttggccgaggcagccactcaatggaaaagacgaggacagagaatctaagtcgggcgagtggatcgataagcatgaagaattaattcaaaatcagaatccaaattctcccgagcaattctaccagtcaatggtccctcaacaacaatcactatatggtgggaaacaagatttcgaagtgcagagtattacagataacgaatctgatgaagccgcaacaagcgattgctcagattccgtttgctgtggcggattgagcgttcaagtgaatgttcccaaagtttctaatatccaaaactcagcaaaccccaaaccaaagaaaattcagcccagaactgctaaactctcagaaactagaagtttaattccatcgctgatcccagcaccaagcaagagacctcctaacacagtaaattcacagccgcagcgaccaacgagagatggaaaacgcagactgagtttaggcacatgaacacaccagttttgtaaagagtttaaaaaggaaggagacaaatatttgttgttttgtatattgtgagagaaagctttctctgttgtggccgctcttattgtgccattaaggtaaaaatctcaaatttgctgttttgagtgtacaaaaaatgattccttattatacaatcttcttttggattct

SEQ ID NO: 118746 - DNA, 3143 bp, Arabidopsis thaliana
  unsure (1)..(3143): unsure at all n locations
nnnnnnnnnnnnnnnnnnnnnnnnnnnnnnnnnnnnnnnnnnnnnnnnnnnnnnnnnnnnnccacgcgtccgacgatccaattgaatcgctatttttcttcgccttcgtatgcctgatccctttgttttctcggtgaaaaattaagtgaaaatctgagaagattgattgcatatgcagcaacttaagaaaacgattggtttattaagcgtcactgttgttggattttgaggaagatgaaagcaagcaatgtctaggctaagtaaagactttgattcagcgtttcaaggtgttggaaccaaaagtggcttggagatttggtgcgtttataataaacagcttatttctatccctaagtcttcttttggaaaatttcactctggaaatgcataccttgttcttagaacgtttttgcggaagatcgaatctccccagtatgacattcactattggctaggaattgatgcaaatgaggtggattcaattttggcatcagacaaagcattagatttagatgccgcacttggatgttgtacggtgcaataccgtgaagttcaaggtcaagagactgagaagtttctctcttacttcaaaccttgtattatacctgttgaaggcaagtattccccaaaaactggaattgctggcgagacataccaagtcaccttgctaaggtgcaagggagatcatgttgttcgtgttaaagaggtgccttttcttcggtcatcactgaaccatgacgatgtcttcattctggatactgcgtcaaaggtttttctttttgctggttgtaactcaagcactcaggaaaaagctaaagcgatggaggttgtggaatatataaaggataacaagcatgacggaagatgtgaggtcgcgactatcgaggatggaaaattttcaggtgattcagatgctggggaattctggtctttctttggtggttatgctcccattcccaagctttcatcttctaccacccaagaacaaactcagactccatgtgcagaattgttctggatagatactaagggaaatctacatccaactggaacaagttctttggacaaggacatgcttgagaagaacaaatgctacatgctggactgtcacagtgaagtatttgtttggatgggaagaaacacatcacttacagaaaggaagacatccatttcttcctcagaagaatttctacgaaaggagggacgctcgacgaccacaagtttagtacttctaacagaaggattagaaaatgccagattcaggtcattttttaacaaatggccttcagaccggtggagtctagccttctacaatgaaggtcgagaaaaagtggctgcgttgttcaaacaaaaaggatatgacgttgaggagcttcctgatgaagaagatgaccctctctacacaaactgccgagacaacctcaaggtttggcgtgtagatggtgatgacgtctcgcttctctctattcctgaccagacaaagctattcaccggcgattgctatcttgtgcagtataaatatacttataaagaaagaaccgaacatcttttatatgtatggatcggttgtgaaagcatacagcaagatagagctgatgccataaccaatgctagtgccattgttggtacaaccaagggtgaatctgtactgtgtcatatatatcagggaaacgaaccttctcggttttttccaatgttccagtcactggttgtttttaagggcggtttgagtagacggtacaaagtgcttctagcagagaaggaaaagataggggaagaatataatgagaacaaggcttctcttttccgtgttgtaggaacaagcccaagaaacatgcaagcaatccaagtgaatctagttgcaacctccttgaactcatcctactcttacattttacaatatggagcttctgccttcacttggattgggaaactttcatcagactctgatcatgaagttcttgacagaatgctatatttccttgatacatcttgtcaacctacatacatcagggaaggaaatgaaacagacacattttggaatttgcttggtggtaagtcagagtacccaaaagaaaaggaaatgagaaaacaaatagaagaaccacatttatttacatgttcatgcagttcagatgtactcaaggtgaaagaaatatacaattttgtgcaagatgatttaactactgaagatgtatttctattggactgccaaagtgaagtatatgtctggattggatcaaactcaaacataaagtcgaaggaagaagctcttactcttggtctgaaattcctagagatggatatactggaagaaggtctaaccatgaggactcctgtatatgttgtcacagaaggccacgagccaccatttttcacccgtttctttgagtgggttcctgaaaaggcaaacatgcatggtaattcatttgaaaggaagcttgctagtttgaaaggaaagaagacaagcactaagagatctagtggaagccagtatagatcacagtcaaaggataatgcatcacgtgatttacaaagtcgatctgtgagctcaaacggatcggagcgaggagtatcaccttgctccagcgaaaagcttttgagtttgagctctgcagaagacatgacaaacagcagtaactcaactccagttgtcaagaagcttttctcagaatctcttgtagtggatcctaatgatggagtggcgagacaagagtcgagttccaagtcggacatttctaaacagaagccacgcgttggaatcaatagcgatcttagtagtctagagtcacttgcatattcatatgaacagctcagagttgattctcagaagccagtgacggatatagatgcaacaagaagagaggcgtacttaacagagaaagagtttgaagagagatttggaatggcgaaatctgagttctatgcacttccaaagtggaaacagaataaactcaaaatatctcttcatcttttctaaaaacctagagtaagatctttgcaacaaagctatttttttgggtcttaccaaatgtaaaaactgtaatgtttttgtttattgcaatgacctccctgatatataagtttaaaaaaaaaaaaaaaaaaaagggcgaccgctctagaggatccaagcttacgtacgc

SEQ ID NO: 118747 - DNA, 3624 bp, Arabidopsis thaliana
  unsure (1)..(3624): unsure at all n locations
nnnnnnnnnnnnnnnnnnnnnnnnnnnnnnnnnnnnnnnnnnnnnnnnnnnnnnnnnnnnnnnnnnnnnnccacgcgtccgcggacgcgtgggcttcttcctcgcctcgtctacgcaataatactactcttatatcacaaaatctccacgaaaggtttgtatagagatgctataacatagcacacatctcctttcaataattcgctttttcctctctctcttctttttcatgttttcttgttcctgatctctctccattacttttttgcccatctctttgtcttcctcagcgctactcgaagatctgtcttttcaggtcgtttatgtattttctcttgaaggaagagattagccactaatacaaaatgtctgggtcaacaaaagtattggatcctgcgtttcaaggagtggggcagaaaccaggtactgaaatctggagaatcgaaaattttgagccagtcccagtaccaaagtctgaacatggaaagttctatatgggagatacctacattgtcttgcagaccacacagaataagggtggcgcttatctatttgatatacatttttggattggtaaagatacaagccaggatgaagctggaacagcagctgtcaagacagttgaacttgatgcagctcttggaggccgagctgtccaatatcgtgaaattcaaggtcatgaatctgacaaattcttgtcttacttcaagccttgcattataccactagagggtggtgttgcgtctggatttaaaaaaccggaggaggaggagtttgaaacccggctgtatacctgcaaaggaaaacgtgctgtccacttgaagcaggttccttttgcacgctcatctctgaatcatgatgatgtgtttatcttggacaccaaggaaaagatttatcagtttaatggtgcaaattcaaatatccaagagagagctaaagcgttggtagtcattcaatatttgaaagacaagtttcatgaaggaacttctgacgttgctattgttgatgatggaaaattagatacagaatcagattctggcgagttctgggtcctctttggggggtttgctccaatagcaaggaaagttgcgagtgaggatgaaattattccggagacaactccgcctaagctttatagtatcgctgatggtcaggtggaatctatagacggcgatttgtccaaatctatgctagaaaacaataaatgctaccttttggactgcggttctgagatctttatctgggttggccgagttactcaagtggaagagagaaaaactgctatccaagctgctgaggattttgttgctagtgaaaataggccaaaggcaacacgcataacccgtgttattcaaggttatgagccccattctttcaagtctaactttgactcttggccatcaggctcggcaactcctgctaatgaagaaggacgaggaaaagtcgctgcattacttaagcaacaaggtgttgggttaaagggcctgtcaaaaagcacaccagtgaatgaggatattccaccattgcttgaaggaggtggaaagttggaggtttggtacattgatgccaactccaagactgttctatccaaagatcatgtcggaaaactttattctggggactgctatctggtcctttatacctaccattctggtgaaaggaaagaagactacttcttgtgctgttggtttggaaagaatagtaatcaggaggatcaagaaacagcagttcgtctagcgagcacaatgacaaattcgttgaagggaagaccagtgcaggcccgtatatttgagggtaaagagcctccacaatttgttgcactttttcaacatatggttgtccttaagggcggtttgagctctggttacaaaaatagtatgacagagaaaggttcgtcaggcgaaacctacacgccggaatcaattgcacttattcaagtatctggaactggagttcacaataataaggctctacaagttgaagcggtggcaacttctttgaactcctatgactgcttccttctgcaatcgggtacttccatgttcctttgggttggaaaccatagtacgcatgagcagcaggaactggctgctaaagttgctgaattcttaaagcctgggactactatcaagcacgcaaaagagggaacagagagctcatccttttggtttgcacttgggggaaaacagaacttcaccagcaagaaagtttcctctgagactgtcagggatcctcacttgttctccttttccttcaacagaggaaagtttcaggttgaagagattcacaactttgatcaagatgacctcttgacggaggaaatgcatttactagatactcatgctgaagtttttgtctgggttggtcaatgtgtggaccctaaggaaaaacaaactgcctttgagattggccaaagatacataaatctggctggttcgctggaaggcttgtctccaaaagttccattatacaaaatcactgagggaaatgaaccgtgcttcttcaccacttatttttcatgggattctactaaagctactgtgcaagggaattcctaccagaagaaggcagcattattacttggtacacaccacgttgtggaggatcagtctagcagtgggaaccaaggaccaaggcaaagggctgctgctttagctgccttgacttctgcctttaattcttcttctgggagaacaagctctccgagccgagacagatcaaatggaagtcaagggggtccaagacaaagggctgaagctttagccgccttaacatccgcattcaattcttcaccatcatcaaagtcacctccccgaagatcaggattgacaagccaggcgtcacaaagagcagcagcagtggctgctctttcccaagttctcactgctgagaagaagaaatcacctgataccagcccttctgctgaagcaaaagatgagaaagctttctcagaagtggaggctaccgaagaagctactgaagccaaggaagaagaggaagtgtcacctgcagcagaagcgagtgctgaggaagcaaaaccaaagcaggatgattctgaagtagaaacaactggagtaactttcacctacgaacgactacaagccaaatctgagaaacccgtgacagggattgacttcaaacgcagagaggcttacctgtctgaggtagagttcaagactgtatttgggatggagaaagaatcattctacaaattgcctggatggaaacaagacttactgaagaagaaattcaacttattctaaggattctccaaaaaaaattagcagtgacctcagcgccgcagctatgaagacaatgaacagtttcttgtgtttttcttccttcaattttactcttttattgtttggtttttcaatatatttcttctttctcatgggtgggttttgggtttgattcttcatattcttaaccacaaaatggtgtgttattgtaatgattgtttttttgtcaaacatgcgttcattttttgggtcaggacagttgtgtggtggtgggtagtaaattctttgatctggattgcacattattttgattgtgtaaaagaacagtgtctacatgtaaactcatgaaatttcaatatattggtgttggattcgtttgacc

SEQ ID NO: 118748 - DNA, 3791 bp, Arabidopsis thaliana
  unsure (1)..(3791): unsure at all n locations
nnnnnnnnnnnnnnnnnnnnnnnnnnnnnnnnnnnnnnnnnnnnnnnnnnnnnnnnnnnnnnnnnnnnnnnnnnnnnnnnnnnccacgcgtccgcccacgcgtccgctcctctatattcttcgtcttcgacctcgtcgtctggcagtaattcaatctctctctctctctctctactgtaataaatctaaggaaacaaaaaacgttacgaaagaaaaagcattaaaaagaaaagctttagagagaaaaaaaacacagctcacaacctcttttcaattattcaatttagcttttgttcgctcctgcttcttcatccgccctcgtcttctttgccagttcttcttcatctttcgtcgttttcttagtgccacccaaagatcttcgtgcaggttcattggcgtttgtagtacataaattttccctgacacacagaaaaagaggatttgactgttatacaatatgtcaacaaaagtgttggatcctgcatttcaaggagctggccagaaaccagggactgaaatctggagaattgagaattttgaggcagttcctgtaccaaagtctgagcatggaaagttctatatgggagatacttacattgtcttgcagacaacacagaataaagggggtgcttatttgtttgatatacatttctggattggtaaagatacaagccaggatgaggctggaacagcagctgttaaaacagttgaactcgatgcagttcttggaggccgtgctgtccaacaccgggttattcagggtcatgaatctgacaaattcttgtcttacttcaagccatgtattatacccttagagggtggtgttgcgtctggtttcaaaacagttgaagaagaagtgtttgagacccggttatatacttgcaaaggaaaacgtgcaatccgtttgaagcaggttccttttgcccgctcatcactgaatcatgatgatgtatttatcttggacaccgaggaaaagatctatcagttcaatggtgcaaattcaaacattcaggagagagccaaagctttggaagtcgttcagtatttaaaagacaagtatcacgaaggaacttgtgatgttgcgattgttgatgacggaaaattagatacagaatcagattctggtgcattttgggtcctctttggtggttttgctccaatcggaaggaaagttgccaatgatgatgacattgtcccggagtcaactccacctaagctttattgcatcactgatggtaagatggaaccaatagacggtgacctatccaaatctatgctggaaaacactaaatgctacctcttggactgtggcgctgagatatatatctgggttggccgtgtcactcaagtagatgagaggaaagctgctagtcaatctgctgaggaattccttgctagtgaaaataggccaaaggcaacacatgtaactcgtgtaatccaaggttatgagtcccattctttcaagtctaactttgactcttggccatcaggctcggccactcctggtaacgaagaaggacgaggaaaagtcgctgctttactgaagcaacaaggcgttgggctcaagggcattgcaaaaagtgcaccagtgaatgaggatattccacctctgcttgaaagtggtggaaaattggaggtttggtacgttaatggtaaagtcaagactcccttacctaaagaagatattggaaagctctattctggggactgctatttggtcctttatacctatcattctggggaaaggaaagacgaatatttcttgagttgttggtttggaaagaaaagcattccggaggaccaagatacagcaattcgactggcgaatacaatgtcaaactcgttaaaaggaagacctgtgcagggccgtatatacgagggtaaagagcctccacaatttgttgccctttttcaacctatggtggtcttaaagggtggtttgagctctgggtacaaaagcagtatgggagagtcagagtcaacagacgaaacctacacgccagaatcaattgcactagttcaagtatctggaaccggagttcacaataataaggctgtgcaagttgaaacggtggcaacatctttgaactcttatgagtgcttccttctgcaatctggtacttccatgttcctttggcatggaaatcaaagtacgcatgaacagctagaactggccactaaagttgctgaattcttgaagcccgggattactctcaagcatgccaaagaaggaacagagagctcaaccttttggtttgcacttgggggaaaacagaatttcaccagcaagaaggcttcctctgagacgatcagggatcctcacttattctcatttgctttcaacagaggaaagtttcaggttgaggagatttacaactttgctcaagatgacctcttgactgaggatatatatttcctagacacccatgctgaagtttttgtctgggttggtcaatgtgtggagcctaaggaaaagcaaactgtatttgagattggccaaaaatacatagatcttgctggatccttggaaggcttgcatcctaaagtcccaatctacaaaatcaatgaagggaacgaaccatgcttcttcaccacttacttttcttgggatgccactaaagctatcgtacaaggaaattcattccagaaaaaggcatcgttgttatttggcactcaccacgttgtggaggataagtctaacggtgggaaccaaggactaaggcaaagggctgaagcactagctgccttaaattcggcatttaactcttctagtaacaggcctgcctattcgagccaggacagattaaacgaaagtcacgacggcccaagacagagagctgaagctttagccgccttgtcatccgcattcaactcttcttcgtcatcaactaaatcgcctccaccaccaaggccagtggggacgagtcaggcttcacagagagcagcagcagtggctgctctttctcaagttcttgttgcggaaaataagaaatcacctgatacctctcctacaagaagatccactagctccaacccagcagatgacatccctctgacggaagcaaaagatgaagaagaggcttcagaggtagctggtcttgaagccaaggaagaagaggaagtttcacctgcagcagatgaaacagaagcaaagcaggaaacagaagagcaaggtgattctgaaatacaaccaagtggagcaactttcacctatgaacagctgagagctaaatctgagaacccagtgactggaatcgatttcaaacgcagagaggcttatctatctgaggaagagttccaaagtgtgtttgggatcgagaaagaagcattcaacaacttaccacgttggaagcaagatctgcttaagaagaagttcgacttgttctagtttggttttatgtgggtcagtcaatttgttgttggtttgaagagtgtgtttttttgtttctcttcttcaattttatttacttggctcatttatatttctctcatgggttggtttgggtttgattctttatatttttctgacagcacaatgaggttttcttgtaatgatgatggcggtagattgtaatgaatgttttacccgagacagatttgtgagtgggtagcaaaattctttgatttgtgatcttccatctttgtgactactttttttttttttttgttcaaagtggttgagtctcagcgttgtgactattnnnnnnnnnnnnnnnnnnnnnnnnnnnnnnnnnnnnnnnnnnnnnnnnnnnnnnnnnnnnnnnnnnnnnnnnnnnnnnnnnnnnnnnnnn

SEQ ID NO: 118749 - DNA, 731 bp, Arabidopsis thaliana
  unsure (1)..(731): unsure at all n locations
ccctccaannaccccttgcccnaccccgngggtgcncccctttgccggacccaaagtttnanaaggccnncaggggncctggccttanaccccnagggaagaaggggaatttcccccctncaccagnttgaaccagacccaaaaccgggnaaccagaagnncaaggtgatcctggaaattccacccnaagtggggncaacttccaccntatggaaccagctggggaccaaaatctggagaccccagtgactgggaancgattncaaacgcagagagncttatctatctgaggaagagttccaaagtgtgtttgggatcgagaaagaagcattcaccaactttcccacgttggaagcaagatctgcttaagaagaagttcgacttgttctagtttggttttatgtgggtcagtcaatttgttgttggtttcaagagtgtgtttttctgcttctcttcttcaattttatttacttggctcatttacatttctctcatgcccccggtttgggtttgattctttatattttctgacagcccaatgaggtttcttgtaatgatgatgatcatagattgtaatgaatgttttacccgagacagatttgtgagtgggtagcaaaattctttgatttgtgatcttccgaaagaaaaaaagaccaaacccatagagcggccgctctagaggatccaagcttacgtacgcgtgcaggcgacgtcataactcttctagtagt

SEQ ID NO: 118750 - DNA, 616 bp, Arabidopsis thaliana
  unsure (1)..(616): unsure at all n locations
gctcccncggcgctcacccaaccnggacccggccgggatgcctcaacccagngggctccctgccggggtgngtcaagccggttttgggntgggggaaggancatctccaaatgccgggagggaaccagncttactggagaaggaatccaacttatcctaagggatcncccaaaaaaaattagccaggtggaaacaccacaaacanccttagatctcatgaccctccatgtcagatatatactaagagcaacatgccattgtgttatttggttatgtagtgacctcagcgccgcagctatgaagacaatgaacagtttcttgtgttttttcttccttcaattttactcttttattgttttggtttttcaatatatttcttctttctcatgggtgggttttgggtttgattcttcatattcttaaccacaaaatggtgtgttattgtaatgattgtttttttgtcaaacatgcgttcattttttgggtcaggacagttgtgtggtggtgggtagtaaattctttgatctggattgcacattattttgattgtgtaaaagaccagtgtctacatgtaaactcatgaaatttcaatatattggtgttggattcgtttgac

SEQ ID NO: 118751 - DNA, 1844 bp, Arabidopsis thaliana
aaaaatggcactcaaagcgattctctttttgggtttatttctcgtcgtgatagtttctccgatcaccgtctacggtggagctgtgtgtccggcgagttccacgtttggtcgtggaagctttcctgatggtttcttgttcggtgctacaacttctgctttccagcatgaaggtgcagcagaagaaggaggccgaggttccagcatttgggactcattcactcttaaacaacattcagaaagcaacaacaatcttgacggcaggctcggagttgatttctatcatcattacaaggaagatgttcaactattgaaaaaactgaatatggatgcctttaggttctctatatcttggtcaagaatatttccccatgggaaaaaagacaagggagtgagtgaaacaggagttaaattctacaatgatcttatcaacgagctcattgcaaatggtgtaacgcctcttgtcacattgtttcaatgggatgtacctcaggctcttgaagatgaatacggcggtttcttgagtgaccgtattttggaggatttccgtgattttgcacagtttgctttcaataaatatggtgatagagtgaagcattgggttactataaacgaaccttatgaatttagtcgtggtggatacgagactggagagaaagcaccaggaagatgttctaaatatgtcaatgagaaatgtgttgcaggcaagagtggccatgaagtttacactgttagtcacaatctgctgttggctcatgccgaagctgtggaagaattcaggaaatgtggaaagtgcacaggtggaaagatcggaattgttcaaagtccaatgtggtttgagccttatgataagaaatccacctcgagtccttcagaggagatagtgaagagagctatggatttcactctaggctggcatatggagccaataacacatggagattaccctcaggccatgaaagatgttgttggtagtcgattaccatcttttacgcccgagcagaaggagaaactgaagggttcttatgattttgtcggtatcaattacttcacttctacatttgttgctcatacggacaatgttaatccagagaaaccgagttgggaagctgattctcgcttgcagttacattcgaataacgttgatgggttcaagattggttctcagcctgctactgcgaagtatcctgtttgcgctgacgggttaagaaaagttttgaaatacatcaaagagaactacaatgacccagaaatcatagtcactggaaacgggtacaaggagacacttgaagagaaagatgtacttccagatgccctcagcgatagtaacaggaagtattatcatatgagacatctcatggcattacatggagcagtctgcgaggacaaggttaatgttaaaggttactttgtgtcgtcgcttatggatggactagagtgggaagatggatacaagacgaggtctggactgtactatgtagactatggacacaatatgggacggcatgagaaacaatctgccaagtggctctccaagctccttgagaaagtcccggacacgattcagtcgaaggtagattcggattcaaggaaagagttataaatgatcagagatccttttcgcaactctgtttaatcgatcatatgatgttatgtgtgtttttatcttaaaagagtgtaatccacgatctatgtagtttatataataaataaagaagtaacttatatcacaaaaaaaaaaaaaaaaaaaaaaaaaaaaaaaaaaaaaaaaaaaaaaaagggcggccgctctagaggatccaagcttacgtacgcgtgcatgcgacgtcatagctaatctatagttc

SEQ ID NO: 118752 - DNA, 603 bp, Arabidopsis thaliana
agcaaaaacactcccaaaccaaaaaaagaagaagaagaagctaaattcgaatctctctcttttttgaaatatggctttttccaaatctctagtgtttgttcttctcgctgctcttttgatttcttccgcagtggctcaatctccggctccagctccatctaacgtcggaggtagacggatctcaccggctccttcacctaagaagatgactgctcctgctcctgcacctgaagtttctccttctccttctccggcagccgcattgactccagaatcctctgcttcaccaccatcgccgcctctagctgattctcctaccgctgactccccggctttgtctccatctgcgatctccgattctccgactgaagctcctggtcctgctcagggcggcgccgtttcgaacaaattcgccagtttcggatctgtggcggttatgttaactgctgccgttttggttatctaggttgttccgatcaatgaagcttctttgattttatttatttattttagatatattagagttttgtgagagagatgatgattcattatttttctcttctttctattattttctttgaatactttttctttcttcggctg

SEQ ID NO: 118753 - DNA, 671 bp, Arabidopsis thaliana
aaaataaagaagagtttataacattaaacagagagagtttcaagattcagacaaagaagagataatctaaaaatgaattctaaggcaatgcaagctttgatctttcttggtttcttggccacttcatgtctcgctcaagctcctgcaccagcaccaaccaccgttactcctccaccaacggcgcttcctccagtgacagcagaaacaccttcaccaattgcttcaccgcctgttccagttaacgagccaactccagctcctaccacttctccaacaacatccccggttgcttctcctcctcagaccgatgctcctgctcccggtccttccgctggattaactccaacttcgtctccagctccaggaccagacggtgctgctgatgcaccaagtgccgcatgggctaacaaagctttccttgtgggaacagctgttgccggagctttatacgctgtcgttttggcttagagagcttttgagtttggtggatttggatcctctgctttctattactgttttattttaattacttcttctcgttcatatttgttatttactactattatcattttgacgtggacacttgttgttgttggggatgagatgaacatagagacaatatggtgtaatatctattcttttatataaatcaaaataattcttttatatgt

SEQ ID NO: 118754 - DNA, 744 bp, Arabidopsis thaliana
tccaaaagacaagagttttctcaggtttctatctctctcgtcaaacacaacgaaagacattgaaactgagagaaatggctcttaagacattgcaagctctgatctttcttggtctatttgccgcctcatgtctagctcaagctccggctccggcacctatcacgtttctccctccggtagagtctccttctccagttgttacaccaactgcagaaccaccggctcccgttgcttcaccccctattccagccaacgaacccactccggttccaacaacttcaccaaccgtctcacccccgaccacgtggcccacaacttccccctgtcgcttctcctcctaaaccatatgctttggcttcaggcccatcaggtccaacaccagcttcggcccccggtcctagagcagacgggccggtaggtgactcagcattgatttacaaagctttccttgttagcacagtcattgccggagccttgtacgccgttttggcttaaagagtgccttgcgtattactctatcattctctctctctcactctcctttgttttttcttatcatgatttgtttgagagatctctctgtttttccctaatacatttcgtcctctttgttgttgttttctttttgggatctttttgatatttgtataactttgattggaccatgggattaaacctgagggaagaagttctgattgtaattttcttcattatttttttaattaataaagtcttgtttaatat

SEQ ID NO: 118755 - DNA, 892 bp, Arabidopsis thaliana
  unsure (1)..(892): unsure at all n locations
cgagctcactagtgaactctgccataatctctctccctcactctaacaccaaaagaagaagaagcattttccaaagagaaagagagagaaatgggttccaagattgtccaagttttcttgatgttggctctattcgccacttcagcactcgctcaagcccctgctcctactcccaccgccactcctcctcccgcaactccccctccagtcgcaactcctcctccagtggctaccccaccacctgctgcaacccctgccccagccacgccaccacctgctgcaaccccagctcctgccactactccaccgtcagttgctccttctcctgctgatgttcccaccgcctctccaccagcaccggaaggtcccaccgtgagcccaagcagtgctcccggaccttcagatgcatcccctgccccaagcgccgcattctccaacaaggctttcttcgccggaaccgccttcgccgctattatgtacgccgccgttttggcttgagaactttttttatataattttttttttatccctcaaattatttcaaatctttggtgttaatgtgagaatttgatttattttcgtatttcgctatttgatcgttaattttttttatcatgatttcgtgtgtcggaatggggaaagtaattattatcttggttgaagctaatggaatgttgacacgtgtaatttaccattggaagggcttcatatggttgtgtagaggaggtggaattaatctgtttatgtaaatccaatgataataaatcaatttcattactttttcccttttagaaaaaattaaaaaccccaaaaccccaagnnnnnnnnnnnnnnnnnnnnnnnnnnnnnnnnnnnnnnnnnnnnnnnnnnnnnnnnnnnnnnnnnnnnnnnn

SEQ ID NO: 118756 - DNA, 678 bp, Arabidopsis thaliana
  unsure (1)..(678): unsure at all n locations
atctgtttaggtaacnccnatgnttaataaatccatttcaaaaaaaaaaaangggggtcgccgctcgcgntcttagaactagtctacaaggngganacatgacatgtccttccntccggcgctgacaagcttcctccaagatgcaactgttgtcttgctcccaaaaattgtcctctccatctcgctgattctactactatccattgtagcaaatgatatatatctagtaagaaatacctgatggtatccctccttcgaatcccatccattcctcccactcatcgatttcccccatttctgtaatctccatttcttcttcttctttcttaaacttttgcatcaaacactgaaaatgtgattaatacgtaagcggatttgatctccttgaaatctttgtcctgacccttgtgaacatctggatgatactttagagcgagacgtttaaaggcacgtttgacttcggtttgggaagcgagaggagtcaagccaagaaccgtgtaatggctaagatctggtgataaacaacatcttgtcggaaactggattaaccggcggctatcagtttggatggtggaaccagggtgattcgtcggagctttgaaccggaaatttcgtatcatcgtttcttcttcttcttcttcaccaaccaaacattttaggtttataacaaatcttttt

SEQ ID NO: 118757 - DNA, 355 bp, Arabidopsis thaliana
cccacgcgtccgcaagatttgggtgatgtctttcatcatagcaggagctattttaggaggaataatccctggagttactacaacaaagacagcgatcgcgtgtcctctctattgcttacaagtagagtacatgacatgtccttcctccggcgctgacaagcttcctccaagatgcaactgttgtcttgctcccaaaaattgtactctccatctctctgattctactactatccattgtagcaaatgatatatatctagtaagaaatacctgatggtatccctccttcgaatcccatccattcctcccactcatcgatttcacccatttctgtaatctccatttcttcttcttctt

SEQ ID NO: 118758 - DNA, 595 bp, Arabidopsis thaliana
caacaatacgtaacaatggcctccaaatccgtcgtcgttttcctcttcctcgctctcgtggcttcctctgtcgttgctcaagctcccggaccagctccgaccatatctcccttgccagccactcctacaccgtctcaatcgcctagagccaccgcaccggcaccttcaccatcagccaatcctcctccctcagctcctaccactgctcctccggttagtcagccgcctactgaatctccaccagctcctccgacgtctacttccccatccggagctccgggcacaaatgttccgtctggagaagctggacctgctcagtctcccctaagtggctctccaaacgcagctgcagttagcagagtctccctcgtcggaactttcgccggagtggccgtgatcgccgctttgttgctgtagaggctattgacccatcgaatagattcactaggaattatttttgggttcattgtttgtccttttgttactatttaattatgtagtttatagtgttttatatgatgctttattatcgtgttattgttggtgttatatttgttacaatttttttatagtttccttgattattggcattctt

SEQ ID NO: 118759 - DNA, 1134 bp, Arabidopsis thaliana
  unsure (1)..(1134): unsure at all n locations
nnnnnnnnnnnnnnnnnnnnnnnnnnnnnnnnnnnnnnnnnnnnnnnnnnnnnnnnnnnnnnnnnnnnnnccacgcgtccgtgcggctgcgaaaagaacgaagttttctgagctaaactagatcagctatggcgaccggtggtgctgcggcggatttggaagatgttcagacggtggatctcatgtcggagctcctccgccgcctcaagtgttctcagaagcccgacaaacgcctcatcttcattggacctccagggtcagggaaaggtactcaatctccagtagtgaaggatgagtattgcttgtgtcacttatccactggagacatgttaagagctgctgttgcttctaagacccctcttggtgtcaaggctaaagaagctatggaaaaaggagagctcgtctctgatgatttggttgttggtataattgatgaagccatgaacaagccaaaatgtcaaaaaggatttatccttgatgggttccccaggactgttactcaggcagagaagctcgatgagatgcttaagaggcgaggaactgaaattgacaaagtctcaactttgctattgatgacgcaatctttggaggaaagaataaccgggcgatggatccacccatcgagtggcaggagttaccacactaaatttgctcctcccaaaacccctggagttgatgatattactggagagcctctgatccaacgtaaagatgataacgctgatgttctaaagtcgaggcttgcagctttccacagtcaaactcaaccggtgattgattactacgcaaagaaggccgttctcacaaacatccaggccgagaaggctccccaagaagttacatcagaggttaaaaaagcattgtcatgatcaaagactcctcaagcaaatcatctcctctggttagaatccattcttttccttactacaagagagagacacatctatataatccactcatctgcggaatgacagttttttcttttagtccttgcgcttttccttcttcgactaatattcaaaatatggagaagagtttttactcctgaaaaaaaaaaaaaaaaaaagcttntttcccaataaggaacttgcnnacggttttnncnggggtntggtaatataagngggnntttcc

SEQ ID NO: 118760 - DNA, 555 bp, Arabidopsis thaliana
  unsure (1)..(555): unsure at all n locations
caaatttgctcctcccaaaacccctggagttgatgatattactggagagcctctgatccaccgtaaagatgataacgctgatgttctaaagtcgaggcttgcagctttccacagtcaaactcaaccggtgattgattactacgcaaagaaggccgttctcacaaacatccaggccgagaaggctccccaagaagttacatcagaggttaaaaaagcattgtcatgatcaaagactcctcaagcaaatcatctcctctggttagaatccattcttttccttactacaagagagagacacatctatataatccactcatctgcggaatgacagttttttcttttagtccttgcgcttttccttcttcgactaatattcaaaatatggagaagagtttttactcctgaatattatctactgtcgcagtctctttaccaaataagtaacttgtctcatcgtttttttactcgggatctgataataataaggngggtaattttaacnnnnnnnnnnnnnnnnnnnnnnnnnnnnnnnnnnnnnnnnnnnnnnnnnnnnnn

SEQ ID NO: 118761 - DNA, 1544 bp, Arabidopsis thaliana
ttttctttcaagccaaatcgacctccccgaccttcttcttcttatttcttctataccgtcgtcgaaaagctttaccaaaatctcacgcccccgacgattcatcgggatttgagtttgcactaaacccacaatggtttcctatcgtgctaccacagagacgatttccctggctttagaagccaacagctcggaggctattacgatactgtaccaggttttggaagacccttcttcatctcctgaggctatacggatcaaggagcaagcgattacaaacctttgtgatcgattgactgaagagaagagaggtgaggatctccggaaactgttgaccaagttgaggcctttcttttccttaatccccaaggcgaaaactgcgaaaatcgtcagaggaatcattgatgctgtggcaaagattcctggaacaactgatctccagatcactctctgcaaagagatggtcgaatggacccgcgctgagaagcgtactttcctcaggcagcgagtagaggctaggcttgcagctcttttgatggagaacaaggagtatgttgaagctttggcgctgttgagtactttggtaaaagaggttaggagattagatgataagctccttctggtcgacatagacttgctggagagcaaacttcacttctcattgagaaacttacccaaggcaaaagctgcactcactgcagctaggacagctgctaacgctatatatgtcccaccagctcaacaaggcacgatagatctgcagagtgggattcttcacgctgaagagaaggactacaaaaccggatacagttacttctttgaagcctttgaatccttcaacgctctcggagatccaagagccgttttcagtctgaagtacatgttactgtgcaagatcatggttagccaagctgatgatgttgcagggaataatctcctcaaaggctggactacagtcggccctgacctggatgccatgaaagcagtcgctgatgctcactcgaagaggtccttgaagttgtttgagaacgcactccgtgactacaaagcacagcttgaagatgacccaattgtccacaggcatctctcttctctctatgacacgcttctggagcaaaatctgtgtcgtttgatcgagcccttctcaagagttgagatagctcacattgctgagctcattggattgccgctcgaccatgtggaaaagaagctatctcagatgatactcgacaagaaatttgcaggtaccttggatcaaggagctggatgcctcatcatcttcgaagacccaaaggcagatgctatctactcggctaccctcgaaaccattgcaaacatggggaaggtcgtcgacagcctttatgttccggtctgccaaaatcatgttcctgaaaaatgaatctcattctatcgttctttctttctggttttagatatcgtttggactcaaagaaactgatgtttctcaatggagaaagtaaacttgtctgaattgttcacattactcgttttgcttatgatcttattatgtcaaaaaaaaaaaaaaa

SEQ ID NO: 118762 - DNA, 1065 bp, Arabidopsis thaliana
  unsure (1)..(1065): unsure at all n locations
agatactccagctccatacgactcacttagggaaagctgctacgcctgcaggtaccggtccggaattcccgggtcgacccacgggtcncggcccaccagctcaacaaggcacgatagatctgcagagtgggattcttcatgctgaagagaaagactacaaaaccggatacagttacttctttgaagcctttgagtccttcaacgctctcggagatccgagagcggttttcagtttgaagtacatggggctgtgcaagatcatggttagccaagctaatgatgttgcaggaataatctcctcaaaggctggactacagtacgttggccctgacctggatgccatgaaagcagtcgctgatgctcactcgaagaggtccttgaaagtgtttgagaaccccccccgtgactaaaaagcacagtttgaaaatgccccnaattggcccaaaggnatctcccttcnccnnaatggcacagcttctggagaaaaatcttgttgccgttttgatcgagcccttctcaaagagttgaagatagccccacattgctgagctcattggattgcccgctcgaccatgtggaaaagaagctatctcagattgatactcgacaagaaatttgcaggtaccttggatcaaggagctggatgcctcatcatcttcgaagacccaaaggcagatgctatctactcggctaccctcgaaaccattgcaaacatggggaaggtcgtcgacagcctttatgtccggtctgccaaaatcatgtcctgagagagtgagtgagttggtcgtatgaatctcattctatcgttctttctttctggttttagatatcgtttggactcaaagaaactgatgtttctcaatggagaaagtaaacttgtctgaattgttcacattactcgttttgcttatgatcttattatgtcatggtttcttaccttttattagtgcttaaaatgtagtttgttttcaaaaaaaaaaaaaaaaaaaaagnnnnnnnnnnnnnnnnnnnnnnnnnnnnnnnnnnnnnnnnnnnnnnnnnnnnnnnnnnnnnnnnnnnnnnnnn

SEQ ID NO: 118763 - DNA, 1232 bp, Arabidopsis thaliana
  unsure (1)..(1232): unsure at all n locations
ttcttccggtgttccatgaccgattgaccacgttctcgtcttcccccaaatctaaaaccctaaattctcaatgcgtccgcacacttcgtcactccaccagcgacaatcgccgcagaaacctctacgaaacttgctacaatggagttttcatcacaagacgacgattttggaggagacgattccgctgctaatgccaccagggcttcaggtaatagaagaagcttcggtgatcttgaagacgatgaagatgatattttcggatcaacaacggtagcgcctggtgttagaactgggatgattttgtcactccgaggaagtcttaagaattgtaaagatgatcttgcttcatgtcaaaatgagctcgagtcagcaaaaacagagattcagaagtggaagtcagcgtttcagaatgagtcctttgttcccgctggaaaatctcctgaaccaagatttttgattgattatattcaaaacctaaaatcttctgagaaatctttgaaagaacagttagaaatcgcaaagagaaaagaagcgtcatgcattgtacaatatgcgaaacgggaacaagaaatggcagaattgaagtcagctgttcgcgatttgaaatctcaactcaagccagcgtcaatgcaggcgaggaggttgttactggatccagcaattcatgaagaattttcacgtctgaagaatctagtagaggaaaaagacaagaagatcaaggaactccaggacaacattgcagcagttacttttactcctcaaagcaagaatggaaagatgcttatggcaaagtgcagaaccctgcaagaggaaaatgaggagattgggcaccaagctgccgaaggaaagattcatgaactagcaataaagcttgcaatgcagaagtctcaaaacgcggaacttagaagtcaatttgaaggactgtacaaacacatggaggaattaactaatgatgttgagagatcaaatgaaacggtgataatattgcaagagaaactggaagagaaagagaaggagatagagagagtaaagaaaggactggaaattgtgtctgagctagtaggtgacaagaaagatgaagttgatgaaattgatgaagatgcaaaagaagaaattgctggtggagaataggaattagtagctttcaaaaaatgttttgtacattttgaagttcaaaatcacatttcttcattcnnnnnnnnnnnnnnnnnnnnnnnnnnnnnnnnnnnnnn

SEQ ID NO: 118764 - DNA, 1764 bp, Arabidopsis thaliana
tttttcacgcgttcgtccacgagtaatttaggttattttcgaatccactaacgaatcttccacagcaaacacttttgtgttcctctgtaatttctcagtatatatagataccaaaacaagcagtgaaaaatggctatggcgagtttatatcggcgatctcttccttctcctccggccattgacttttcttccgccgaaggcaagctaatcttcaatgaagcgcttcagaaaggaactatggaaggatttttcaggttgatttcgtattttcagacacaatccgaacctgcgtattgtggtttggctagtctctcagtggtgttgaatgctctttctatcgatcctggacgtaaatggaaagggccttggaggtggtttgatgaatcaatgttggattgctgcgaacctctggaagtagtgaaggaaaaaggcatttcatttggaaaagttgtctgtttggctcattgttcaggagcaaaagttgaggctttccgtacaagtcagagcaccattgatgatttccgcaaatttgtcgtcaaatgcacgagttctgagaattgtcatatgatctcaacatatcaccgaagtgtatttaagcagactgggaatggtcacttttcacctattggtggctataatgctgagagagatatggctttgattcttgatgttgctcgtttcaagtatccccctcactgggttcctcttaaacttctttgggaagccatggacagtattgatcagtcaacagggaaacgtagagggttcatgctcatatctagaccacacagagaacccggattgctctatactctgagctgcaaggatgaaagctggatcgaaatagccaagtatttgaaggaagatgttcctcgtcttgtaagttcacagcatgtagattctgtggagaaaatcatatcagttgtgttcaagtcacttccatcaaatttcaaccaattcatcagatgggtggctgagatccgaattacagaggactcaaaccaaaatctcagcgcagaggagaagtctaggctgaaactaaagcaattggtgctgaaggaagtgcacgaaactgaactgttcaaacacatcaataagttcttatccacagtgggttatgaagacagtctgacttatgctgctgcaaaggcttgttgccaaggagctgaaatcttatccggaagcccatcaaaagagttttgttgtcgggaaacttgcgtgaaatgcatcaaaggtcctgatgactctgaaggcacggtggtgactggagttgtggtgcgtgatgggaatgaacaaaaggttgatctgttagtgccatcgacgcaaactgagtgtgaatgtggtcctgaagcaacttatccagcaggaaacgatgtgttcactgcacttctattggctttacctccacagacatggtcagggatcaaagaccaagctcttatgcatgaaatgaagcagctcatttccatggcttccctcccaactttgcttcaagaagaggtattgcatcttcgacggcaacttcagctgctaaaacgatgccaagagaacaaggaagaggatgatctcgctgctcctgcctattagttcattgtcccaaatcctctctcttccccatttgaatcccacgttctctacacttaattgttagaaagtctctttattctctgtacgattcaaactctatttgcaatgagagatatatgtaacttgcattctataaattgttaatcacaataagttaagaatccaaaaaaaaaaaaa

SEQ ID NO: 118765 - DNA, 1314 bp, Arabidopsis thaliana
  unsure (1)..(1314): unsure at all n locations
agaaggggaattgcaaaaagaaaaccaaaacaaagctcaatcatggctagtcggagagaagtacggtgccggtgcggcagacggatgtgggttcaaccagacgcccgtaccgtccaatgctcaacctgccacaccgtcacgcagctctactcgctagtggacatagctcgcggtgcaaaccgcataattcatgggtttcaacagctacttagacaacaccaaccgcaacatcatgaacaacaacaacaacaaatgatggctcaaccgccaccacggctgcttgagcctcttccctcgccgtttgggaagaagagagcagttttatgcggcgtgaactataagggaaaaagttatagcttgaaaggttgcatcagtgatgctaagtccatgagatctttattggttcaacaaatgggtttccctattgactctattctcatgctcacagaagatgaagccagcccgcagagaataccgacgaagagaaacattaggaaggcgatgagatggttagttgaagggaacagagcaagggactcactagtgttccatttctctggtcatggatctcagcagaatgactacaacggagacgagatcgatggtcaagatgaagccttgtgccctttagaccatgaaacagaaggaaaaatcattgatgacgagattaaccggatactcgtgaggcctctcgtccatggagctaagcttcacgctgtcatcgacgcctgtaacagcgggactgtccttgatttacccttcatttgcaggatggagaggaatggttcttatgaatgggaagaccatagatcagtcagagcttacaaaggaacagatggtggagcagctttctgtttcagtgcttgtgacgatgatgaatccagtggttacactcctgtgttcacggggaagaacacaggagccatgacttatagcttcataaaggcggtgaagacagctggaccagcacccacgtatggccacctgcttaaccttatgtgttctgcaatacgagaggcccagtctcgcctcgcctttaacgggactacacaagctctgatgcatccgcggagccactgctaacatcatttgaggaatttgaagtgtacgcgacaaagtttgtactttgaatgctgtacatatgatgctgcaaatagctcggaaacgtttctatgtgtatgtatcatgtaatgattatgttgcatagcctctctcttcttacgagcaataagctatgaaataattgattcgctaagaaatttaaaatgaaatgaaatgtgtggaaagtttcacaggnnnnnnnnnnnnnnnnnn

SEQ ID NO: 118766 - DNA, 1861 bp, Arabidopsis thaliana
  unsure (1)..(1861): unsure at all n locations
nnnnnnnnnnnnnnnnnnnnnnnnnnnnnnnnnnnnnnnnnnnnnnnnnnnnnnnnnnnnnncgatagaaatagaaggcgaagagataatttccaaaaacaagaaaaacctctaagctcaaaagatgttgttgagaacgatggcggcgacttccccgcggccaccaccgtcaacatccctaacatctcagcagccaccatcacccccctcacagcttcccctccgtacaatgccgggatcgtacggctggccgttggttggaccattatcggaccgtttagattacttctggttccaaggacccgataagtttttccggacaagagctgagaagtataagagcactgtgttccgtacaaatattcctccgacgtttcctttcttcggcaacgttaaccctaacatcgtcgccgttcttgacgtcaagtcttttagccatctttttgacatggatctagttgataaaagagatgttctcatcggagacttccggcctagccttgggttctacggcggcgtttgtgtgggagttaatctggacactactgagccaaagcacgccaagataaaaggtttcgctatggaaacactaaaacgaagctcaaaagtatggctacaagagcttcgttcaaacctaaacattttctggggaacaatcgaatccgaaatctccaaaaacggtgccgcttcatatatcttccctctccaacgttgcatcttcagtttcctctgcgcctctctcgccggcgttgacgcttccgtatcgccggacatcgctgagaacggttggaaaacaatcaatacttggcttgcgttgcaagttattcccactgctaaacttggcgtagttcctcagcctcttgaagagattttacttcatacttggccttatccttctctcttaatcgccggaaattacaaaaagctttacaatttcatcgacgagaacgccggagattgtctccggttaggtcaagaagaattccggttgacccgagatgaggctattcaaaatcttctctttgttttaggttttaatgcctacgggggcttttccgtcttcttaccttctttgatcgggagaataaccggcgacaattccggtttacaggagaggattagaaccgaagtcaggagagtttgcggatccgggtcggatcttaatttcaagacggttaacgaaatggagctggttaaatccgtggtttacgaaacgctgcgttttaatcctccggttccgctgcaattcgcacgtgcgaggaaagattttcagataagttcacacgatgctgtttttgaggtcaagaaaggtgagcttctttgtggttatcagccgcttgtgatgagagacgctaatgtttttgacgaaccggaggaatttaaaccggaccggtatgtaggtgagaccgggtctgaattgctgaattatctctactggtctaacggtccacaaaccggtaccccgagcgcgtcgaacaaacagtgtgcagctaaggacattgtcactctcacggcttccttgctcgttgccgatttatttctccggtatgatacgattactggtgactccggttcaattaaagctgttgttaaagctaaataagttaaagattgattagtgtttaatgttatgtaatcaatcttcaacggtttcatttgttcggagtgtataaattatatgtaaactaaaataatccgaattgaaactcaaattgttatgttagatggtgttgctatgttagagagattttaactaaaaaaaaaaaaaaaaaannnnnnnnnnnnnnnnnnnnnnnnnnnnnnnnnnnnnnnnnnnnnnnnnnnnnnnnnnnnnnnnnnnnnnnnnnnnnnnnnnnnnnnn

SEQ ID NO: 118767 - DNA, 1425 bp, Arabidopsis thaliana
aaatttgatctcatctttaaatttttttgtttcccatttctctcagaaagtgttctgttctttttttcttttgtaatcactaaatgcttcaaaagtttgtccacaattatatttgaaaaaaatgtctgtatctgtagcagcagagcatgattacataggtttgtcagagtttccaaccatggaagcaacaacaatgtctgacaaaaccaaaaccagagacaataacaacggtctcaatttcaaggctaccgagttaagactcggtttacccggttctgagtcgccggagcgagtcgactcaagattcttggctctcaacaagagtagctgtcccgtgtcaggtgccaaaagggtgttctccgacgctattaacgactctaacaaatgggtcttctctcctggatccactactgctactggtgatgtcggctcgggttctggtccccgtacctccgtcgttaaagatggaaagtcgacaactttcactaaaccggctgttccggttaaggagaagaagagctctgctacagctccagcttcaaaagcacaagtggtgggatggccaccaataagatcattcaggaagaactcaatggcttcttctcaatctcagaaacctggtaataactcagagactgaagaagcagaagctaagtctggaccagaacaaccttgcttgtatgtcaaagtgagtatggaaggtgctccttacttgaggaaaatcgatctcaagacttacaaaagctaccttgagctctcttctgctcttgagaagatgttcagttgcttcaccattggtcagtttggttctcatggagggtgtggcagagatgggttaaacgagagtcgcttgactgatctcttgcgtggttctgagtatgttgtaacctatgaagataaagacagtgactggatgctggtcggagatgtcccttgggaaatgtttatatgctcctgcaagaagctgagaatcatgaagagctctgaggctatcggcttagctccaagggtgatggagaagtgcagaagcaggaactaggaaaagcccttttatgtgataatatatgatttgaaaaaatatgtttttaagaaattgaatagccattttgttttgaagtattcttgtgtgtttgtgtgctaggagtgatgtttgatctttcttaaaccagcctctactaagctctaataaggcctcttcctcttacttctttctctaatcaatctaatgaaacatatgggtttgtgtatgtgtgtttgccaaggaagacttcataattcatatgtataaaagttttggtagtgtgtaaaccggatgtggttttcattgttatatatgttttggatgcaaactttactatagaaacacaaccccaaagggcaggccgctctagaggatccaagcttacgtacgcggcgatgcgacgt

SEQ ID NO: 118768 - DNA, 1917 bp, Arabidopsis thaliana
agttacagacgatttggtcccctctcttctctctctgcgtccgtcttgtgcgtcgatttgtctccatctccttctctctccgcctactttctcaggactactccaattcgccgactttttctcctctgttctctgcatttggattgatgccactttaatactttgaggatcaagacttcgtaaaagattgtttctgtaaaacgcaacaccatgcctctgtttgagcttttcaggctcaccaaagctaagcttgaatctgctcaagacaggaacccttctccacctgtagatgaagttgtggagctggtgtgggaaaatggtcagatatcaactcaaagtcagtcaagtagatcgaggaacattcctccaccacaagcaaactcttctagagctagagagattggaaatggctcaaagacgactatggtggacgagatccctatgtcagtgccatcactaatgacgggtttgagtcaagacgatgactttgttccatggttgaatcatcatccctcccttgatggatattgctctgatttcttgcgtgatgtgtcgtctcctgttactgtcaacgagcaagagagtgatatggcggtaaaccaaactgctttcccgttgtttcagagaagaaaggatggcaatgaatcagctcctgctgcttcttcgtcgcagtataacggtttccaatcgcattctctgtatggaagtgatagagctagagatcttcctagccaacaaaccaatccggatcggtttactcagacgcaggaaccactaattactagtaacaagcctagtttggtcaacttttcacatttcttacgccctgcaacttttgcgaagactactaataataaccttcatgacactaaagaaaagagtcctcaaagcccgccaaatgtgtttcagaccagagttcttggagctaaagactctgaagataaggttcttaacgagtctgttgcttctgctacgcctaaagataaccaaaaggcttgcctaatatcagaggactcatgtagaaaagaccaagagagtgaaaaagcagttgtatgttcttctgttggctcgggtaatagtctcgatggcccatccgaaagtccttcactttctttaaagagaaagcattcgaatattcaagacattgactgtcatagtgaagatgtggaagaagaatcaggagatggaagaaaggaagcaggtccatctcgaacgggtttgggttcaaagagaagccgccctgcagaagtgcataatctgtctgaaaggagacggcgtgataggatcaacgagaagatgcgtgccctgcaagaactcattccaaactgtaacaaggtggacaaagcttcgatgctagatgaagccatcgagtatctcaagtcactccaacttcaagtgcagatcatgtcaatggcgtctggttactatctgccaccggcggttatgttcccaccgggtatggggcattacccggcagcagctgctgcaatggcaatgggtatgggaatgccttatgcaatgggcttgcctgatttgagccgtggtggttcatcggttaaccacggaccacagttccaagtctcggggatgcaacaacaaccagtggcgatgggtattccacgtgtctctggtggtggtatctttgccggttcttcgacgattggcaatggctcgactagagatttatctggttctaaagatcaaacaacgacgaataacaacagtaacttgaaaccaataaagagaaaacaggggtcttctgatcagttttgtggatcgtcgtgacataaatacaaacttatgaactgatgtattgtttatttgtagcattcaaacaaatctattttataatcctaaacaaaattaatttgtgttcgttataacagtgaagagctttgtgcttattggtgggttctg

SEQ ID NO: 118769 - DNA, 1379 bp, Arabidopsis thaliana
  unsure (1)..(1379): unsure at all n locations
nnnnnnnnnnnnnnnnnnnnnnnnnnnnnnnnnnnnnnnnnnnnnnnnnnnnnacccacgcgtccccacgcgtcctctcgctctcagttttgtgggattgtttctttaaaaggggttcttagggtttagtgaagctatagatttcaatttcatacatagttaacgtatagaaggaatcttgggttgatcaatggaaggttgtccaagaaacagagaaatcggtccaaaacttcttgatttgattccacaaggaaggaaatggtaccaagaagacaagaacaacacagatcaggagaagaaacttgagctaaggcttggaccacccggtggtgatgaagaagatcattcagcaatcaagaagaagaacacagagataagaaacatcaagaaggaaacagaagacaaatctttccactgttttaatggcaatcacttctctccttccaacaaaaccacttctgttcctcacatctcacagaaaagaactgctcctggtccagtggtgggttggcctccggttcgttcgttcagaaagaatctagcgagcacaagctcttcaaagctaggtaacgaatcctctcatggaggtcaaatcaacaagagtgatgatggtgaaaaacaagttgaaaccaagaaggaaggaatgtttgtcaagatcaacatggatggtgttcctattggtcgtaaagttgatctcaatgcttacaacagctacgaacagctctcttttgtcgttgacaaactcttcagaggtctactcgcagctcaaagagatatctctgatggtcaaggagaagagaaacctatcattggattattagatgggaaaggagaatttactttaacctatgaagacaatgaaggggacaagatgcttgttggggatgttccatggcaaatgtttgtttcatctgtgaagagactgcgtgtgattaaaagctctgagatttcatctgccttgacatttggatgcagtaagcaagagaagatgatgcactgaagagtctttttagaaacttttatttcagacagagagtctcaaagctttataaatgtacatctggtttttgttatatataagagttaatcattggttttttactttttttttggtccagagagacatttgatctgatctgatattcccatgtcttcaagacactagacgatgagattacataagcaatctgtgtttataagcattttaattaattaaggagataattagaacatactgtaataattatctcatgcatgtctgcaaaactctttttgaaaaaagaagatgaaatttttattccaaaaaaaaaaaaaagggcggccgctctagaggatcccagcttacgtacgcgtgcaagccacgtcatagaatttttata

SEQ ID NO: 118770 - DNA, 642 bp, Arabidopsis thaliana
  unsure (1)..(642): unsure at all n locations
aacaaattgagaaagaaaaaaaggtaaggctgtgtgagagagaacccaccaaagcgtgcacgagagagagaaaaaaaaaagctttgattttgtataaaatcccaccactgctctcttaccataccttcattacacatctctctttctctctctcgctctcagttttgtgggattgtttctttaaaaggggttcttagggttttgtgaagctatagatttcaatttcatacatagttaacgtatagaaggaatcttgggttgatcaatggaaggttgtccaagaaacagagaaatcggtccaaaacttcttgatttgattccacaaggaaggaaatggtaccaagaagacaagaacaacacagatcaggagaagaaacttgagctaaggcttggaccacccggtggtgatgaagaagatcattcagcaatcaagaagaagaacacagagataaggaacatcaagaaggaaacaggaagacaaatcttttccacctgtttttaatgggcaatcaactttctctccttccaaccaaaaaccactttcttgntccctnaacaatcttaacaggaaaagnaccttcttcctgggnccagttggntngggttggccntcccggttncgttcgttccaggaangantnt

SEQ ID NO: 118771 - DNA, 1681 bp, Arabidopsis thaliana
  unsure (1)..(1681): unsure at all n locations
tgttgttgccgctcagaaatctgaatcttctccaatcagaaactctccacggcattaccaaagccaagctcaagatcctttcttgaaccttcacccggaaatatctatgcttagaggtgaagggactagtacaatagtcaatccaagaaaggaaacgtcttctggacctgttgtcgaggattttgaagagccatctgctccgagtaactacaatgaggcgaggattaaggttattggtgtgggaggtggtggatcaaatgctgtgaatcgtatgatagagagtgaaatgtcaggtgtggagttctggattgtcaacactgatatccaggctatgagaatgtctcctgttttgcctgataataggttacaaattggtaaggagttgactaggggtttaggtgctggaggaaatccagaaatcggtatgaatgctgctagagagagcaaagaagttattgaagaagctctttatggctcagatatggtctttgtcacagctggaatgggcggtggaactggcactggtgcagcccctgtaattgcaggaattgccaaggcgatgggtatattgacagttggtattgccacaacgcctttctcgtttgagggtcgaagaagaactgttcaggctcaagaagggcttgcatctctcagagacaatgttgacactctcatcgtcattccaaatgacaagttgcttacagctgtctctcagtctactccggtaacagaagcatttaatctagctgatgatatactccgtcagggggttcgtgggatatctgatatcattacgattcctggtttggtgaatgtggattttgctgatgtgagagctataatggcaaatgcggggtcttcattgatgggaataggaactgcgacaggaaagagtcgggcaagagatgctgcgctaaatgcaatccaatcccctttgttagatattgggattgagagagccactggaattgtttggaacattactggcggaagtgacttgacattgtttgaggtaaatgctgctgcggaagtaatatatgatcttgtcgatccaactgccaatcttatattcggtgctgttgtagatccagccctcagcggtcaagtaagcataaccctgatagctacgggtttcaaacgacaagaagagggagaaggacgaacagttcagatggtacaagcagatgctgcgtcagttggagctacaagaagaccctcttcttcctttagagaaagcggttcagtggagatcccagagttcttgaagaagaaaggcagctctcgttatccccgagtctaaagcccaatctaatcactaccctgcacactgcagcaataacaaacgtgtgtgtactggtagtctggtactgccttctgggatacagcaagatgtgttgatgtatgatcaagaatctgtgtgggtgtgtatatgttctgtcactgcctctggtcgtgttcttgaataggttgttttagaaatcggagtttctctctatgtcacttccaaaacaaaaaaggagaagaagaatcacacttctcgaaccataaacatacttataagattatgagagttttagcagaaattattgtcaaaaaaaaaaaaagnnnnnnnnnnnnnnnnnnnnnnnnnnnnnnnnnnnnnnnnnnnnnnnnnnnnnnnnnnnnnnnnnnnnnnnnnnnn

SEQ ID NO: 118772 - DNA, 1776 bp, Arabidopsis thaliana
cccacgcgtccgccccaatctctcttattttgtgagctttttagatcctcctttcttcatcgtttcttttccgaggtttcaaattcgttcaatttctcgattgaagatacctgaaatcgcgttattctaggtccgccgctgttggatctgcaaattccccttcgaatttgaacatttgtgatttcaaattcttcgagaagatgagcgcgaaaaagcttgaaggttcgtcggctccggcgaatcgacgggatccgtacgaggtcctttgtgtatcaaaggacgctaatgatcaagaaatcaaatccgcttacagaaaattagctctcaagtatcatccggataagaatgcgaacaatcctgatgcttctgagcttttcaaggaagttgcattttcgtatagcattttgtctgatcctgaaaagagaaggcactatgacaatgcaggatttgaggcactcgatgctgatggaatggatatggaaattgacttgtcaaacctcgggaccgtaaataccatgtttgcagcattgttcagcaaactaggtgtgcctatcaagactactgtatctgctaatgttcttgaagaggctatgaatggaactgttacagttaggcctcttcctattggaacatcagttagtgggaaggttgagaagcaatgcgctcatttttttggagttacgataagtgaacaacaagctgaatcaggggttgttgttagagtaacttcaacagcacaaagtaaatttaagttactttattttgagcaagattcaagtggtggctatggattggccttacaggaagagcgtgagaaaacagggaaggtgacatcagctggcatgtatttcttacattttcaagtgtatagaatggatacaactgtcaatgcgttggctgcagccaaggaccctgaatctgctttcttcaagcgattggaaggtcttcaaccttgtgaggtttcggaactgaaagctggcacgcatatatttgcagtttatggtgataatttctttaagactgcatcttacacgattgaagcactctgtgccaagacctatgaggatacaacagagaagttaaaggagattgaagctcaaatcttaagaaagagaaacgaactgcggcagtttgaaacagagtaccgaaaagctttggcgcggtttcaagaagttaccaacagatatacacaggagaaacaaactgtggatgaactgctaaagcaacgggatacaatccattcgaccttctctgttgtgaagacaccaagcggcaacaacttgagcaatggaagtagcagcaaagctcagggagatgaatcaaaaggtgatggggatagtgcgggagaagaaggcggaacagagaatagagacaaatccaagaggaaatggttcaacttgaacctaaaaggatctgataagaagcttggttgatcagaacacggatttgttgcgggtcattggtattttgttcattcgttagacagaactgactcggtgaaggtttgtcatcgggtgctctatgtaggcatatataatcatgggaatggttcgagagattgaagagagagagatgcaaaagctctttaaatggatggaaggatttgtattcataggagtgttttgatatgtatgcttatgcttcattgattcattgtttgttaaacagaattgtcattgtgatggtggattgatgatatattcagattcaaaattataataattaaaaggatataggctggccgctaaagaggatccaagcttacgtacgcgtgca

SEQ ID NO: 118773 - DNA, 1554 bp, Arabidopsis thaliana
cagatacgcaaagcactccataccataccatgactctcttcgcctcttttagggcgcaaccaagagacagagaagaagagagagactcgtaagcaacaataaccaatagctctctctctctctctctctctctcctctgctgattcttcgctgactcttgcctcctcgacgtcgtcttcggctttgtagcatctcgccgaagcgtcgttgatttgagagagacccaatttggattgttagaaaatgggttacataggagctcatggtgtagctgctcttaagaaacacaaatacagtggtgttgatcactcttatcttgccaaatatgttctccaacctttttggaaccgttttgtcaaaatcttccctctatggatgccccccaacatgataacacttatggggttcatgtttcttctcacatctgctctcttaggctatatatactcacctaagttggattctccacctcctcgatgggtccactttgcacacggcttacttctgtttttatatcagacatttgatgcggttgatgggaagcaagcacgaagaacaaattcatctagcccactaggagagctttttgaccatggttgcgatgcacttggctgtgcgttagaaacaatggcatatgggagtactgctatgtgtggaagagatactttctggttttgggttatttctgctgttccattttttggagcaacatgggaacactattttaccaatacgcttactcttccggtagtcaatggtcctacagaaggtcttgcacttatatactgtggccatttcttcacagccattgttggtgcggagtggtgggctcagccgtttgggaagtcgattcctttgtttagttgggttccgtttttgaacgagatgcaaatgtccagaataatactattctccatgattttctttgctgttataccaacccttgcaatcaacacgtctaatgtttacaaagttgtacattcaagaaatggaagcatgcttctagcattagctatgctatatcccttagtcacgttaattgcaggagttctgatttgggattacttgtctccaattgatctcataagaaactaccctcacttagttgtgttgggaactggtcttgcatttggattccttgtgggaagaatgattctagctcacttatgtgacgaaccaaaaggattgaaaacaaacatgtgtatgtcactgctttaccttccatttgcactagcaaatgctctaaccgctagactcaacgacggggttcctcttgtggatgagttttgggttcttcttggatattgtatattcacattgtcactatatgcgcattttgcaacttcagtcattcatgagatcacaactgcacttggaatctactgcttcaggattactcggaaagaagcttgatttttagttttagtgttttttttttcttgttcggttgaaatagggtaattcatgtagaagcctttttgtgtaacgtttctaagaaaaaaaaatatgggattgttctagattttttttttaatttaaacctcgttattgatc

SEQ ID NO: 118774 - DNA, 1536 bp, Arabidopsis thaliana
agctctccttttgcttctggtcctctcgtcccgtttcgccgctctctaaaggggcaagtgagaggttactgtctctttcttctttcagacactcgagacgagaaaggctcgtatctgattttaccgccaccggaccatctgtgatagacaataatgggttacataggagctcatggtgtagcagctcttcataggtacaaatacagtggagtggatcactcttatcttgccaaatacgtcctccaacctttttggactcgatttgtcaaagtcttccctctatggatgccaccaaacatgataacgcttatggggtttatgtttctagtcacttcctccctgctaggctatatatattcacctcagttggattctcctcctccacgatgggttcacttcgcacatggtttacttctcttcttgtatcagacatttgatgcggttgatgggaagcaagcaagaaggacaaattcctctagccccctaggagagctcttcgatcatggttgtgacgcgcttgcttgtgcgtttgaagccatggcatttggaagcactgcaatgtgtggaagagatactttctggttctgggttatttcagctattccattttatggagctacatgggaacactatttcaccaacacacttattcttccggttatcaatgggcctacagaggggcttgcacttatatttgtcagccacttcttcacagccatcgtcggtgctgaatggtgggctcagcagttagggcagtcaataccattgtttagttgggtgccatttgtgaatgagattcaaacttctagagcagtgctatacatgatgatcgcttttgctgttataccaaccgttgcattcaatgtaacaaatgtctacaaagtcgttcgatcaagaaacgggagcatggtgttagcgttagctatgctgtatcccttcgttgtcttacttggaggagttttgatatgggattacttgtctccaatcaatctcatagcaacatatcctcacttagttgtactcggaactggacttgcatttggatttttagtgggaagaatgattcttgctcacttgtgtgatgagcctaaaggactaaaaacaaacatgtgcatgtcactactctatcttccctttgcacttgcaaatgcgctaaccgcaagattgaatgctggggttcctctagtcgacgaattatgggttcttcttggctactgcatattcacagtgtcattatacttgcactttgcaacatcagtcatccatgagatcactgaggcccttggaatctactgctttaggatcacgcgtaaagaagcttgaaaagaaacctttgacactgcgaatggtcgatatggaccagttggatcggtgatgtatttcttcttcttattcattgttgtctgtttgatcaggataggtgaagttatgtagaactttgtataatgttcttgtttttggatttatgcattgggcaaatacgaaaactattcttgaaatgctacgaaaatgattttagaaggagcatttttttaa

SEQ ID NO: 118775 - DNA, 780 bp, Arabidopsis thaliana
aagaaatggaagcatgcttctagcattagctatgctatatcccttagtcacgttaattgcaggagttctgatttgggattacttgtctccaattgatctcataagaaactaccctcacttagttgtgttgggaactggtcttgcatttggattccttgtgggaagaatgattctagctcacttatgtgacgaaccaaaaggattgaaaacaaacatgtgtatgtcactgctttaccttccatttgcactagcaaatgctctaaccgctagactcaacgacggggttcctcttgtggatgagttttgggttcttcttggatattgtatattcacattgtcactatatgcgcattttgcaacttcagtcattcatgagatcacaactgcacttggaatctactgcttcaggattactcggaaagaagcttgaagaaacaaaatgtgattgaaatttttatttataagaaaaagcaaatcttaagggagaaaaaaaatgcaaatcccaacacgaatctgaatattttgttacttggaattaaaaatgattgactgatatgcttttggatgtatactcattaatgtttttgttttagtgttttttttcctggtcggttgacatagggtaagtcatgtagaacccttttgtgtaacgtttctaagaataagaaatatgggattgttctacattattttttttaaaaaaagggcggccgctctagaggatccaagcttacggaagggtgcatgcgacgtcatagtcttctatagtgtcactcaaac

SEQ ID NO: 118776 - DNA, 1322 bp, Arabidopsis thaliana
ccacgcgtccgcggcgagaaacaacagagaatcggggaaaaatggcgtgtttcgcaaccaaacagcctctgttgttgtctctcctccttgccattggcttctttgtggtggctgcatctgccggaaacttctatgagagctttgatatcacttggggtaatggtcgtgccaacatattcgagaatggacagcttctcacttgtactcttgacaaggtctccggctcaggttttcaatccaagaaggagtacttgtttggtaagatcgacatgaagctcaagcttgtcgctggaaactctgctggcaccgtcaccgcctactacctatcgtcaaaaggcacggcatgggatgagattgacttcgagtttttgggaaatcgcacaggacatccttacactatccacaccaatgtgttcaccggaggtaaaggcgaccgtgagatgcagttccgtctctggttcgatcccactgcggatttccacacctacaccgtccactggaaccctgttaacatcatcttccttgtggatgggatcccaattcgggtgttcaagaacaacgagaaaaatggggtggcttaccctaagaaccagccgatgaggatatactcaagcctttgggaagccgatgactgggctacagaaggcggtcgcgtgaagatcgactggagcaacgcaccattcaaggcctcttacagaaacttcaacgaccaaagctcatgcagcaggacatcaagctcaaaatgggtgacttgcgagccaaacagcaactcgtggatgtggacgactctcaatcctgcccagtacggaaaaatgatgtgggtgcaacgagacttcatgatctacaactattgtaccgattttaagagattccctcaaggcctccccaaggagtgtaaactttgattctattatgggaattttcaagcatttttctttccgttttgtttcatcttgtgatgttactttgatttattttgttctttcttttggtgtttctgagatacgatattacatgtatacgtattcttcctgagaaaataagaagttgtattactcgataatacattttatctctcaatgtggtgtgattgtttattgggtttggcgtacaatgaaagctacatcaatgtgctttagaaaaatgcatacgaaaagaaaaacacaacaatcaaaaacccgtgaggtaactaaattatctccatttacaaatatactaacaatactactaatttattgctaagctgtcagctgtcacgaccatgataatgaaaaaaaaatcatctctgtttcttctaaacttagagtttctcgaatttcaca

SEQ ID NO: 118777 - DNA, 2202 bp, Arabidopsis thaliana
  unsure (1)..(2202): unsure at all n locations
atgatcttnnnnnnnnnnnnnnnnnnnnnnnnnnnnnnnnnnnnnnnnnnnnnnnnnnnnnnnnnnnnnnnnnnnnnnnnnnnccacgcgtccgctctaacacaatgtgtgggattctcgctgttcttggttgcatcgacaactctcaagctaaacgttctcgtatcatcgaactctctcgcagattgaggcacagaggtcctgattggagtggactccattgttatgaagattgttatcttgcccatgagcgtttagccatcattgaccctacttcaggagaccaacctctctataacgaagacaagaccgtcgctgtcactgtaaatggagagatatacaaccacaagattttgcgtgaaaagcttaagtctcatcagttccgtactggtagtgactgtgaagtgattgcacatctttacgaagaacatggagaggaatttatcgacatgttggatggaatgttcgcgtttgtccttcttgatactcgcgacaaaagttttattgctgcaagggacgctattggtatcactccactttacattggatggggtcttgatggttctgtctggtttgcttcggagatgaaagcgcttagtgatgattgtgaacagtttatgtcttttcctcctggccacatctactcaagtaaacaaggagggcttaggaggtggtacaatcctccgtggtacaatgagcaggttccttcaaccccatatgatcctttagttctgcgcaatgctttcgagaaggctgtaataaagagacttatgactgatgtgccttttggagttctcctatctggaggattggactcgtctctcgttgctgcagtagcattacgccatttggaaaaatcagaagctgctcgtcaatggggttcacaattgcacacgttttgcatcggtttgcagggatcgccagatcttaaagctggcagagaagttgctgactatcttggaacacgccaccacgagtttcagtttacagttcaggacgggatagacgcgatagaggaagtcatttaccatattgagacttatgacgttactacaataagagctagcaccccaatgtttcttatgtccagaaaaattaaatctttaggtgtaaagatggttctttctggggaaggttctgatgaaatactggggggatacttgtacttccataaggctcccaacaagaaagaatttcatgaagaaacatgccgaaagatcaaagctctccaccaatttgattgtttgagagctaacaaatcaacttctgcgtggggtgtcgaagctcgtgtgcctttcctagataaagaatttttaaatgttgcaatgagcatcgatccagagtggaagttgatcaagcctgatctcggaaggatcgagaagtgggtgctacgcaatgcctttgatgatgaagaacgaccttatctaccaaagcacattctatatagacagaaagaacagtttagtgatggagttgggtatagctggatagatggtctgaaagatcatgcaaataaacatgtctctgatactatgctgtcaaacgcaagctttttcttcccggataacacacctctgacaaaagaagcgtactactacagaaccatcttcgagaagttcttcccgaagagtgctgctagagcgactgtaccaggaggtccaagtatagcttgcagtaccgcgaaagctgtagaatgggatgcaacttggtcaaagaatcttgatccgtcaggccgtgcggctcttggagttcatgttgcagcttatgaagaggataaagcagctgctgctgctaaggctggatcggatttagtagatcctcttcctaagaatggaacataagagaacaacactacaggcattgaggatataagcaaatgttttattcttctacacagagagatcgttatcttctagagggatcaatgaataaaagcttcgtccatttctagctggagattccatggatctccagttagtgcaagtgatacacgttgtctacatttgtacctaagtttctgcattttttgtcgttcttttgtgttagacaagtcttggaccctagatgatacttcagtttcttagacgttaaatttgatgaatccgaacttgtttgaaaaaaacaaaaaaagagggcggccgctctagaggatccaagcttacgtacgcgtgcatgcgacgtcatagtctatctatagtgcnn

SEQ ID NO: 118778 - DNA, 1057 bp, Arabidopsis thaliana
atacgattcactatagggcaagctggtacgcctgcaggtaccggtccggaattcccgggtcgacccacgcgtccgcccacgcgtccgcccacgcgtccgcgctttcgatggtcgaaatcagttggtaaagaggaaactctgaaagttgtgttaaaaaaaaaactagaatcatggcggcgtcaatgacgaaacccatctcaataacttctctcggtttctattctgatcgaaagaacattgctttctctgattgcatttcgatttgttctggattcagacattcccgaccatcttgcctcgatttggtcacaaagtcaccgagtaataacagtcgtgttttacctgtcgttagtgcccaaatatcttctgattatattccagactcgaaattttacaaggtggaagcaattgtcagaccatggagaatccagcaagtttcatcggctttactgaaaatcgggattcgaggtgttactgtttctgatgtgagagggtttggtgcacaaggaggttctaccgagagacacggtggctctgagttctcggaagacaaatttgttgctaaagttaagatggaaatcgttgttaagaaagaccaagtggaatctgtaatcaacacaataattgaaggagcaaggacaggagagattggtgatggcaagatttttgttttgcctgtgtcagatgtcataagagttaggacaggtgagcgtggggagaaagcagagaagatgactggtgatatgctttcaccgtcttaggaacaaacagagctcaagaatggtttttttttttttcatttcggtctctagattctgcgaataataatgaatggagtctgtgtttggtttcatgttgaatcgatcaagatgtgtttttaactgtacatgaattatgcagaaacatctgtcctggttctcagacatcgaaactctgttcctaataaaagccgaagtccctgtttttattgtggtaaaaaaaaaaaaaaaaagggcggccgctctagaggatccaagcttacgtacgcgtgcatgcgaggtcatagctctagtatagt

SEQ ID NO: 118779 - DNA, 1333 bp, Arabidopsis thaliana
  unsure (1)..(1333): unsure at all n locations
atnnnnnnnnnnnnnnnnnnnnnnnnnnnnnnnnnnnnnaatacttgaagtcatcagaatgctaaaaagtcgtgccaccacccgtccatttcagaaaaaacacttacaaagctgatatctttcttactacttcgaagaaatcttcttctcccttccaaaaaaacaatccctaaacccggaaccaaagatcgacattcatggctctcttcgacactcataacacatgggcctttgttttcggcttgctcggaaacctcatttcctttgctgttttcctctctcccgtgccaacgttctataggatttgtaagaagaaaaccacagaaggatttcaatctattccctatgtggtggcgctcttcagcgcgatgctttggctctactacgctactcagaagaaagatgtcttccttctcgtcaccatcaacagctttggttgcttcattgaaaccatatacatctccatctttgttgccttcgcatccaagaaagcccgaatgctaacggtgaagctcttgttgctaatgaactttggagggttctgtttgattctcctcctctgccaattcttggcaaaaggaaccacacgtgcgaagatcattggaggtatctgtgtcggattctctgtctgcgtttttgctgcgccgcttagcattatcagaacggtgataaagacgaaaagtgtggagtacatgccgtttagcttatccttgactcttaccatcagtgcggtcatatggctcctttatggtcttgctcttaaggatatctatgttgccttcccaaacgtgattgggtttgttctaggtgcacttcaaatgatactctatgtggtttacaaatactgcaaaacgccgtcggatttggttgagaaagaacttgaggctgcgaaattgccagaagtgagcatcgatatggtgaagttaggtacactcacatctcctgaaccagtagcgatcaccgtcgtccgatcggtgaacacatgtaactgtaacgatcgaaatgctgagattgaaaatggtcagggagttagaaacagtgctgcaactacttgagtttgcccaagaaaccctaataagaaacctatttgttgactattttgactttgtacccttcttgatatacctatcaatcaccattgtccacgtgtactagtttcgttgtagtaattttcaaagtttatcgaagtatgcgtattcgaggattaattaaatcgggaattacattttcctgagttaattttttctctttttcttttacttatgggacaatgtaatgaaactatctgttgcatataaaaaatttccaagttgccaagaaaatgagaattctc

SEQ ID NO: 118780 - DNA, 823 bp, Arabidopsis thaliana
  unsure (1)..(823): unsure at all n locations
nnctactacgattcactatagggcaagctggtacgcctgcaggtaccggtccggaattcccggggggacccacgcgtccggctcttcagtgcgacgctttggctttactatgcgacacagaagaaagatgtcttcctcctcgtaaccattaacgcctttggttgcttcatcgaaaccatctacatctctatgttccttgcctacgctcccaagccagctcggatgttgacagtgaagatgctacttcttatgaactttggaggattctgtgcgattctccttctttgccaattcttggtaaaaggagccacacgtgctaagattatcggaggaatctgtgtcggattctctgtttgtgttttcgctgctcctctaagcataatcaggacggtaataaagacaagaagtgtggagtacatgccctttagcttatccttaacccttaccatcagggctgtcatatggctcctttatgggcttgctctcaaggacatctatgttgctttcccgaatgtgcttggttttgctctcggggcactccaaatgatactctacggttgtctacaaatactgtaaaacggcggcgcatctagggagngnaagaaggccgaagctgctaaggttanccggaggtgagcctcgntaatgttgaagctaaggcacagtttaatcccctgagccaatctcagtgggtnggcaagcgnncaaggtntncctcgggaataatncgaggggctttnggttnaangtggnnaaacccctanacattggaaagnaggccttttcccggngangtncatngattaaaaaccgtaatttggnt

SEQ ID NO: 118781 - DNA, 552 bp, Arabidopsis thaliana
  unsure (1)..(552): unsure at all n locations
ctccgcccaagcgtcaacttttacattaagagaaaacacttgcaaaactaagtgctatctctcttcttcttccttctcctaacaacttatataccatgagtctcttcaacactgaaaacacatgggcctttgtctttggcttgctcggcaaccttatctcctttgccgtgttcctatctcctgtgccaacgttctataggatttggaagaagaagacaacagaagggtttcagtctattccttatgttgtggcgctcttcagtgcgacgctttggctttactatgcgacacagaagaaagatgtcttcctcctcgtaaccattaacgcctttggttgcttcatcgaaacccatctacatctctatgttccttgcctacggtcccaagccagctcggatgttgacagtgaagatgctacttcttatgaactttggagggttctgtgcggttctccttctttgccaatccttggtaaaagagccacagtgctaggttntcggggnnttttggttcntgttgggttnggggccccnaganaaaggggaaaaanna

SEQ ID NO: 118782 - DNA, 1651 bp, Arabidopsis thaliana
tacacgactactatagggaaagtggtacgcctgcccgtaccggtccggaattcccgggtcgacccacgcgtccgcactatcaaaactctgaatttcgatttcaatggagtcacgcgtgctgttacgcgccaccgcgaatgtcgttggaattccgaaattgagacgaccaatcggagcgatccaccgtcaattcagcactgcatcgtcttcctcgttctcggttaaaccaatcggaggaatcggagagggagcgaatctgatctccggtcgtcagcttcgtccaattcttcttctcgattcgtcggcgatcaacggaggagagaaaagagaaattctcaaaccggttaaagccgccgctgctgaaggtggagataccgctggggatgctaaagttggattcctcgccaagtatccatggctagtcactggattcttcttcttcatgtggtacttcttgaatgtgattttcaacatccttaacaagaagatctataattacttcccttatccctattttgtatcggtgatacacttgttcgtgggagttgtttactgcttgatcagctggtccgtgggtcttcctaaacgtgccccgattgactcgaacctcctcaaggtattgataccagtcgcagtctgtcacgccttaggccatgtcactagcaatgtctctttcgctgcggttgctgtctccttcactcacaccatcaaagcacttgagccattcttcaatgcggctgcttctcaattcattatgggacaatccatccccataacactatggttgtctctagctcctgttgttcttggtgttgcaatggcttcactaactgagctatcattcaactggctcggtttcatcagtgctatgatatcaaacatttctttcacttaccgaagcatcttctccaagaaagccatgactgatatggacagtacaaatgtctacgcttacatctccatcatcgcactcttcgtctgcattcctcctgccatcatcgttgaaggtcctaaactacttaaccatggtttcgccgacgcgattgctaaagttggaatgactaaattcatctctgatctcttctgggttggaatgttttaccatctctacaatcagctggctaccaataccttggagagggttgcaccgctgactcacgcggttggaaacgttctgaaacgtgtgttcgtgatcggtttctccatcgttatcttcggaaacaagatatcgacacagacaggtataggaacaggaatagccattgctggagttgcaatgtactctatcattaaggccaagatcgaagaagagaaacggcaaggaaagaaagcatagaaagcagctgaagacggcggtcgacagttgcataaacaagttctccgatggatatatatatatctatataataaataaccaaatgcaatagtatgttgtattgtaccatcaaccattgttttcgagtttttcctttctttgttttttttttgctttctgaaaagttatatataaattttttattctgcttcttctctttttaatggagaacattttcatttccaattaaaaaaattcatgagggcgaccgctctagaggatccaagcttacgtacgcgtgcgtgcgacgtcatagctcttctatagtagttccta

SEQ ID NO: 118783 - DNA, 931 bp, Arabidopsis thaliana
  unsure (1)..(931): unsure at all n locations
aatcgactcctatagggaaagccggtacgcctgcaggtaccggtccggaattcccgggtcgacccacgcgtccggatgaaattgaccattaaccctaccataactccatacaccgcgagatactggattaaccaaatcgagatcatcgtagccgtccgatcaacaagtaccatctcttgaaatactcgaaatcctcataagtccgtccctctttgctctcactatcaaaactctgaatttcgatttcaatggagtcacgcgtgctgttacgcgccaccgcgaatgtcgttggaattccgaaattgagacgaccaatcggagcgatccaccgtcaattcagcactgcatcgtcttcctcgttctcggttaaaccaatcggaggaatcggagagggagcgaatctgatctccggtcgtcagcttcgtccaattcttcttctcgattcgtcggcgatcaacggaggagagaaaagagaaattctcataccggttaaagccgccgctgctgaaggtggagataccgctggngatgctaaagttggattcctcgccaagtatccatggctagtcactggattcttcttcttcatggtggacttcttgaatgtgattntcaacatccttaacaagaagatctataattacttcccttatccctattntgtatcggtgatacacttgttcgtgggagttggttactgcttgatcagctggtcccgtgggtcttcctaaacgtgccccgattgactcgaacctcctcaaggtattgataccagtcgcagtctgtcacgccttaggccatgtcactagcaatgtctctttcgctgcgggtgctggctcctcactacaccatcaagcacttgagccattcttcatgccgctggttctaattattatggacatccatcccatacactatggtggcttagctc

SEQ ID NO: 118784 - DNA, 584 bp, Arabidopsis thaliana
  unsure (1)..(584): unsure at all n locations
gacgcctgcaggtaccggtccggaattcccgtgttcgacccacgcgtccgcaaaactctgaatttcgatttcaatggagtcacgcgtgctgttacgcgccaccgcgaatgtcgttggaattccgaaattgagacgaccaatcggagcgatccaccgtcaattcagcactgcatcgtcttcctcgttctcggtcctccctatcggaggaatcggagagggagcgaatctgatctccggtcgtcagcttcgtccaattcttcttctcgattcgtcggcgatcaacggaggagagaaaagagaaattctcaaaccggttaaagccgccgctgctgaaggtggagataccgctggggatgctaaagttggattcctcgccaagtatccatcggctagtcactggattcttcttctttcatgtgggtacttctttgcaattgtgacttttcaaacaatcccttaacaaggaagggtctattaattaactttcccttaatcccccaattttttgtattcgggggataaaattttntttcgttgggnggttgtttnnntnctttnancaannttnggcccntgggggtttc

SEQ ID NO: 118785 - DNA, 922 bp, Arabidopsis thaliana
  unsure (1)..(922): unsure at all n locations
gaaaaactggagctccaccgcggtggcggccgctctagaactagtggatcccccgttctgcattatttcgcggccgctggtgttgcaatggcttcactaactgagctatcattcaactggctcggtttcatcagtgctatgatatcaaacatttctttcacttaccgaagcatcttctccaagaaagccatgactgatatggacagtacaaatgtctacgcttacatctccatcatcgcactcttcgtctgcattcctcctgccatcatcgttgaaggtcctaaactacttaaccatggtttcgccgacgcgattgctaaagttggaatgactaaattcatctctgatctcttctgggttggaatgttttcccatctctcacaatcagctggctaccaataccttggagagggttgcaccgctgactcacgcggttggaaacgttctgaaacgtgtgttcgtgatcggtttctccatcgttatcttcggaaacaagatatcgtctcagccaggtataggaacaggaatagccattgctggaagttgcaatgtactctatcattaaggcccagatccgaagaagagaaccggccaaggaaagaaaagctttgaaaggcagctgaagacggcggtcgacagttgcataaacaagttttccgatggatatatatatatttatataataaataaccaaatgccatagtatgttgtattgtccatcaaccattgttttcgagtttttcccttctttgtttttttttgccttttgaaaagttaaatataaattttttattttgcttaaaaaaaaaaaaaaaaaaaaaaaaaaaanaaanannnnaacccaagggcgcgnnnnnnnnnnnnnnnnnnnnnnnnnnnnnnnnnnnnnnnnnnnnnnnnnnnnnnnnnnnnnnnnnnnnnn

SEQ ID NO: 118786 - DNA, 1606 bp, Arabidopsis thaliana
  unsure (1)..(1606): unsure at all n locations
cacttgacctcctcttggaacgcggctatgtctcttgtgcgtccgatctatcctttcttggccagaagcaagagatggtttccggttcgaaccggattaaaatcggtttgcttaacaacgaccagagccgaaacaagcggtgttgacagagaggagaaagtagtgattgttgggggcgggattggcggacttgccactgccgttgctcttcaccggcttggaatccggtcggtggtgttggagcaggcagagtcgcttcggacaggaggagcatcgctgacgctatccaagaatgggtggcgtgttcttgacgccatctccatcggacctcaactccgaaagcagtttcttgaaatgcaaggggtggtattgaagaaggaagatggaagagagcttcgttctttcaaatttaaagacaatgatcaaagccaagaagttcgggcggtggagaggcgagtactcttggaaacacttgcaagccagcttcctccacagaccattcggttttcttcaaaactggaaagtatacaaagcaatgatgccaatggtgacactctccttcaacttaaagatggaactcggttccttgcaaatattgttataggttgtgatggtatccggtctaaggttgcaacttggatggggttcagtgagccgaaatatgtcggttattgcgctttccgtggccttgggttctttccaaatggacagccatttcagcaaaaggtgaactacatattcggtagagggcttcgagctggatatgtacctgtatctgcaacaaaagtctactggttcatcactttcaacagcccttctctagggcctcaaatgatggatccagctatcctaagaaaagaagccaaggaactggttagtacctggccagacgatctgcaaaacctcattgatctaacacctgatgaagcaatcagtagaactcctcttgcggaccggtggctttggcctggcattgctccttcagcatcaaaaggtagggttgttcttgttggagatgcttggcacccaatgactccaaatcttggacaaggtgcttgctgtgccttggaagattcagttcttctggcaaataaacttgccagagcaataaatggagggaccgaatcagttgaaagggcgatggaatcatataggagtgagagatggtctcaggtattccggttgacagtacttgcaaacctagtcggaaaacttctgcaatcagacaatcctcttgtgtgttccgttagagacaatattgtcagtgcaatgggaaaatcctctcggaccaacgatggaacacacaaactttgagtgtgagcctctctatgtttcaatattgtctatgtaatgagatgtaaaagcatatgctccattggatagaggacttagacaatgtatcatcagaggaataatatcaaagaagataatataaactctgattgaatgtaaaagaataatacaatgtaattcgtttatgctatgaaagggaatgcctctagggctnnnnnnnnnnnnnnnnnnnnnnnnnnnnnnnnnnnnnnnnnnnnnnnnnnnnnnnnnnnnnnnnnnnnnnnnnnnnnnnnnnnnnnnnnnnnnnnnnnnn

SEQ ID NO: 118787 - DNA, 982 bp, Arabidopsis thaliana
  unsure (1)..(982): unsure at all n locations
nnnnnnnnnnnnnnnnnnnnnnnnnnnnnnnnnnnnnnnnnnnnnnnnnnnnnnnnnnnnnnnnnnnnnnnnnnccacgcgtgcgcccacgcgtccgcggacgcgtgggtaaaatccattattgattgaatcttcgagttaccaacaaaaaaaaaactctcctttatttcagtcttcttttacaaatcataatcttctctttgattccatcttgtgaaccaccggcataagaaaatatgacaattgctttaacgatcggaggaaacgggttttcgggtctaccaggatcgtcgttttcttcatcatcttcgtcgtttcgattaaaaaacagcagaagaaagaacacgaagatgctcaacagatcaaaagtcgtttgttcttcttcatcttctgtaatggatccgtataagactcttaagatccgacccgattcatctgaatacgaggtcaagaaagctttcagacaactcgctaaaaagtatcatcctgatgtttgtagaggaagcaattgtggggtacagtttcagacaattaacgaagcttacgatattgtgttgaagcaaattaaaaatcagatggaagggacggaggaatttgagccgttcgatgtatacgacgagggattgaacggaatgaatgatccagattgcgacacgtgggaagaatggatgggatgggagggagcaggaacccgtgattactcctctcacgttaatccttacgcttgataaacgaatgatttcactaattaatttcgaaagaaatcatccaaatgtgtataaataacaatcagagagagactaaaagcacaacaatgtaaataagtgaaatttgtctcggataatgattgcttaaatgtgaataaagtaatctctcctttgtgtaaaaaaaaaaaaaaagnnnnnnnnnnnnnnnnnnnnnnnnnnnnnnnnnnnnnnnnnnnnnnnnnnnnnnnnnnnnnnnnnnnnnnnnnnnngaatcg

SEQ ID NO: 118788 - DNA, 562 bp, Arabidopsis thaliana
aatccattattgattgaatcttcgagttaccaacaaaaaaaaaactctcctttatttcagttttcttttacaaaccataatcttctctttgattccatcttgtgaaccaccggcataagaaaatatgacaattgctttaacgatcggaggaaacgggttttcgggtctaccaggatcgtcgttttcatcatcatcttcgtcgtttcgattaaaaaacagcagaagaaagaacacgaagatgctcaacagatcaaaagtcgtttgttcttcttcatcttctgtaatggatccgtataagactcttaagatccgacccgattcatctgaatacggggtcaagaaagctttcaggcaactcgcttaaaaaggtttcatccctgatgttttttagggggagcaatttttgggggacagtttcaggcaattttacggggctttccggtattttgtttaaggaaatttaaaatccggttggaggggccgggggcattttagccgttcggtgtttccgccggggggttcccggtttattcccccacttcgcggcacgtggcaagattgg

SEQ ID NO: 118789 - DNA, 1491 bp, Arabidopsis thaliana
ggcgcgaatcgaaggggaaccggagagaccaaaaccctaatttcgccgacgagaaaaaccatgccggagcttccagaggtcgaggcggcgaggagagcaatagaagaaaattgtcttggaaagaagattaagcgagtcattatcgccgacgacaacaaagtgatccatggaatctcgccgtccgatttccagacctcaatcctcggaaaaaccatcatctctgctcgtagaaagggcaaaaacctctggctcgaattagattccccgccatttccttcttttcaattcggtatggctggtgctatttatatcaaaggcgttgcagttactaagtataagaggtctgctgtaaaggactcagaggagtggccatctaagtattcaaagttcttcgtcgagcttgatgatggtctggagctttcatttactgataagaggagatttgccaaagttcgacttctagcaaatcctacttctgtgagtccaatatcagagcttggtcctgatgcattgttggagcctatgacagttgatgaatttgcagaaagcttagctaaaaagaaaataaccataaaacctctcctacttgatcagggatatatttcaggtattgggaattggatcgctgatgaagtgctgtaccaagccagaatccacccgttgcagactgcttctagcctctccaaagagcaatgtgaagctttgcacacatccatcaaagaggtgatagaaaaagctgtggaagttgatgcagacagtagtcagtttcctagtaactggatttttcataatagggaaaagaagccaggaaaggcctttgttgatgggaagaagattgatttcattactgctggtggaaggacaacagcttatgttccagaactgcagaaactttatgggaaagacgcagagaaagcagccaaggttagaccggctaaacgaggtgtgaaacccaaagaagacgatggagatggggaagaagatgaacaagaaactgagaaagaagatgagagtgctaaatcgaagaaaggacagaaacccagaggtggtcgtggtaagaagcctgcatcgaagacaaaaacagaagagagcgacgatgatggagatgatagcgaggctgaagaagaagttgtgaaacccaaaggccgtggtacaaagcctgcaataaagaggaagtctgaagagaaagctactagccaagctggtaagaagccaaaaggaagaaaaagttgagaacctatgtttccaagatgatagtttttgtgggcagctaacagttatcccattttttttgtaagaaagtatgttggaaatgtgggatgcctacaaggctatgtgatattctactattattagttattttggctgttacaaggctttgtgattacctctgtccttttttgttgtatttggaagtcagaaaaatgctcggagggcagcaactactttctctggcctgtatacaaagttcaaaattcagagagtcttata

SEQ ID NO: 118790 - DNA, 655 bp, Arabidopsis thaliana
  unsure (1)..(655): unsure at all n locations
tccacccgttgcagactgcttctagcctctccaaagagcaatgtgaagctttgcacacatccatcaaagaggtaagactctaaacaccccaccaaaacagtacctctgtccttttttgttgtatttggaagtcagaaaaatgctcggagggcagcaactactttctctggccagtcttcttgaggcaaatgcccagcaccttcgatgagtcgaagcttaacattttgggggttctgtttctcaaattcctctgctatagactgaggcagatatttatcagctattccccaagccagaagcgtaggtttatcccagctgcctgatgaaaacccatttgcaatttgactcaatgtgtctccaaagttgatcttcttcgcagtctcgagcaaggcaaagccaggccctccgcttgacaaatatggtagacgatacacatcagctttctcattcttcaggacgtaggggctacctccttcaatgaaccgctcggccaagatagcattttggcaggtgaattcaccaaacaggggaatcctcagctgcttaaataatccgggaactgcggatgcaacggtcagcggactattaagcatcgcgagtttctcaaccaaacttgaaaatttcaaagcccaagttaaaccatatgaccctnccg

SEQ ID NO: 118791 - DNA, 3057 bp, Arabidopsis thaliana
  unsure (1)..(3057): unsure at all n locations
agctannnnnnnnnnnnnnnnnnnnnnnnnnnnnnnnnnnnnnnnnnnnnnnnnnnnnnnnnnnnnnnnnnnccacgcgtccgcccacgcgtccgcccacgcgtccggtctgattgcggaaaaagcagagagagagagaaagttcgagcggaagagaagcggaaagctcgaggagtcatcaatggtgacggacgatagcaactcctctggacgaatcaagtctcatgtagatgatgatgatgatggtgaagaagaagaagatagactcgagggtttggaaaacagattaagtgagcttaaaaggaaaattcaaggagaaagagttaggtctattaaagagaaatttgaggctaatagaaagaaagtggatgctcatgtttctcccttttcatctgctgcatcgagccgagctaccgcagaggataatggaaatagcaatatgctttcttcgagaatgagaatgccactctgcaagttaaatggtttttctcatggtgtgggagatagagactatgttcctactaaggatgttatatcagcaagtgtcaagcttcctattgctgagagaataccgccatacactacctggatatttttggacagaaatcaaagaatggctgaagatcagtctgtggttggtcgaagacaaatctactatgaacaacatggtggtgagacgctaatatgcagcgatagtgaggaagaaccagaacctgaggaggaaaaacgtgaattttccgagggtgaagattccattatatggttaattgggcaggagtatggcatgggtgaggaagtgcaggatgccctttgccagttgctaagcgtagatgcttctgatatcctggaaagatacaatgagctcaagttgaaggataagcagaataccgaggaattttctaattccggattcaagctgggaatatctctggaaaagggccttggtgcagctctagattcttttgataatcttttctgccgccgttgcttggtatttgactgtcgtctgcatggatgttctcagcctttgattagtgctagtgaaaaacagccttattggtctgattatgaaggtgataggaaaccctgcagcaaacattgttacctccagctcaaggcggtcagagaagtaccagaaacatgcagtaattttgcatctaaagcagaagagaaagcttcagaagaggaatgcagcaaggctgtctcctctgatgttccccatgctgctgctagtggtgtcagtctgcaagttgagaagactgatattggtatcaagaatgtagattcatcctctggtgtagaacaagagcatggaattagaggaaagcgtgaggtcccaattctaaaagactccaatgatctgcctaatttatcgaacaagaaacagaagaccgcagcctcagatacaaaaatgtcatttgttaattctgtccctagcttagatcaggcattggatagcacaaagggtgatcaaggtggaacaactgacaataaagtaaacagagactcagaagctgatgcaaaagaagtaggtgagcctattccagacaattcggtccatgatggtggttcctcaatttgtcagccacaccatggtagtggaaacggagcaataatcattgcagaaatgtctgagacaagtcgaccatctacagagtggaatcctatcgagaaggatctttacttgaagggagtcgaaatctttggaagaaacagctgtcttattgcaagaaacctgctttctggcttgaagacatgcctagatgtgtccaattacatgcgtgaaaacgaagtttcagtttttcgaagatctagtaccccaaatttgctgttggatgatggcaggactgacccagggaatgataatgatgaggtgcctccaaggacaagattgttccgtagaaaaggcaaaacccggaagctaaaatactctacaaagtctgctggtcatccgtctgtctggaaaagaatagctggtggcaaaaaccagtcctgtaaacaatacacgccgtgtggatgcctgtcaatgtgcggaaaggattgcccttgtctaactaatgaaacttgctgcgagaaatattgcgggtgctcaaaaagctgtaaaaatcgtttccgaggatgtcattgtgcaaagagtcaatgcagaagtaggcagtgtccctgctttgctgctggcagagaatgtgatccagatgtttgcagaaattgctgggttagttgtggagatggttctctcggtgaagcaccaagacgcggagaagggcaatgcggaaacatgagacttctcctgaggcaacaacagaggatcctattgggaaagtctgatgttgctggatggggtgcttttctaaagaactcggtcagcaaaaatgaataccttggagaatacaccggtgaattgatctcacaccatgaggcggataagcgtgggaaaatatatgaccgggcaaattcgtccttcctctttgacttgaatgatcagtacgtcctcgatgctcaacgcaaaggtgacaagctgaaatttgccaatcactcagctaaacccaattgctacgctaaggtgatgtttgtagcaggagatcacagggtcgggatttttgcaaacgaacgaatagaagctagcgaagagcttttctatgactatagatatggaccagaccaagcaccagtgtgggctcgcaaacctgaaggctccaagaaagatgattcagccattactcatcgtagagccagaaagcaccaatctcattgatgattactggctaagagaagtaacttttataaaaataacttatagagttgtgagagatgatatttgaagtttgataacttaagcttgtctttattaattaattattatagagttgagattttattttattttgacatcgagtttggactttgtataggtgataaaacaatttatgaattattggggtcaataagtaaaaatgtatcatttcgaaaaaaaaaaaaaaaagnnnnnnnnnnnnnnnnnnnnnnnnnnnnnnnnnnnnnnnnnnnnnnnnnnnnnnnnnnnnnnnnnnnnnnnnntca

SEQ ID NO: 118792 - DNA, 1505 bp, Arabidopsis thaliana
atcgaaaagatttttttttttttttaattacaaattaagaaagcaactccacccaaagttaattgcggataactgatatgacacagagagaggctctatgatataagtaagtaacacaagagagaattatcttcttcttccatttttattggaccaaaaagaagatagataacaaaaatagaaaaatctaaggtgtgggaagctctgcagctcatccatccatggcgacgacgattcccactacagctaccgcaactatgtgtccgtctcctcctgtccctacaatctctcccttactcagaacgactcaccaatgtcaaccatctccttctttatcatccccattttctataaagcttagtacggctctggtttgcggtgacactacagtggatagagtggttgatagctccgtgatgatcaaacctgagaaatggggaattcagtcagaaaagagaaggaagaggagaagaagaagaagagtaggttacgaacgtttggagcctgaagaagaggaaaatgctggcgtagaagcagaagcagagacaattagtgttcctgttgttggagcttcacgatctgggtttttgagtcgtttagaggaggttcagctttgcttgtacctcaaggaaggagcaaaacttgaaaatttgggaacaagtgttgaagagaatgaaatggtatcagttttgttagccagtggcagagggaagaagaagcgtagtgcaaatgaaatactatgccgtagaaaagaagcgagagaaaagattactcgttgttaccgtaggttggttgtttctattgcaacagggtaccaaggcaaaggtttgaatttgcaagaccttattcaggaaggaagcatagggctgcttcgtggagctgagagatttgatcccgaccgaggatacaaactatcaacttatgtctactggtggatcaaacaggccatcttaagggctatagcgcataaatctagacttgtcaaattgccgggaagcatgtgggagttaacggcaaaagttgcagaagctagtaatgtgttgaccagaaaactaagaaggcaaccaagctgtgaagagattgcagagcacctaaacctcaatgtatccgcggttagactagctgtggagcgtagcagatcccctgtttcgttggaccgagtcgcgtctcaaaatggccgcatgacattgcaggaaattgtacggggaccagatgaaacaaggccagaggagatggtgaaaagggaacacatgaagcatgagattgagcaactcttaggaagtcttaccgctagagaatctcgtgtattgggactttactttgggctcaacggagagactcctatgtcgtttgaagagataggtaagtcgctgaagctttcgagagagagggtgagacaaatcaatggcattgctttgaagaagctacggaatgtacataatgtgaatgatttgaaaatatactattcctctagtgaataaaaagcaaataaattggttcttcat

SEQ ID NO: 118793 - DNA, 900 bp, Arabidopsis thaliana
acggataaaggcggaggaaaaaaaagagagaagacgcacaccgaagaaaacacacaagactccattattctcctgcttcttcgtctcttcaattattttctctgagactagctttgattcaaccatggctaatgcagcatcaggaatggcagtccatgatgactgcaagctgaaatttatggaattgaagacgaaaaggacacaccgtttcatcatttacaagattgaggagctgcagaaacaagtgattgttgagaaaatcggtgaaccgggtcaaacccatgaggaccttgctgcaagtcttccagctgatgaatgccgctatgccattttcgattttgattttgtcagttctgagggtgtcccaaggagcaggatttttttcgtggcatggtctccggacacagcaagagtgagaagcaagatgatctatgcgagctccaaggacaggttcaagagagaactagacggaattcaggtcgagcttcaggcaaccgatccaaccgagatggatcttgatgttttcaaaagccgagccaattgatgaaagaaatcccctgaaaatttcggttgaatcaaactttttcgtactattactcagtgatgctttttcctaaagtttgctgtgacggtaccaacctgaacagcttcattttatcagtttggtctttgtctttgtctttggtctcctttttgggtccttatagtgttgtcttaaaacttaaggaatctggcttgtgctctttaccattgtggaagaaatcgaaccctttattaaacaagaatcctattggcacaaaaaaaaaaaaaaaagaaaaaaaaaaaagcggccgctctagaggatccaagcttacgtacgcgtgcatgcgaggtcatagctcatctatagttcagttaaat

SEQ ID NO: 118794 - DNA, 797 bp, Arabidopsis thaliana
  unsure (1)..(797): unsure at all n locations
cgccaacctctaattcgactcactatagggaaagctggtccgcctgcaggtgccggtccggattcccggggcgcccacgcgtccgtacggctgcnataagacgacagaaggggaggaaaaaaagagagaagacgcacaccgaagaaaacacacaagactccattattctcctgcttcttcgtctcttcaattattttctctgagactagctttgattcaaccatggctaatgcagcatcaggaatgggagtccatgatgactgcaagctgaaatttatggaattgaagacgaaaaggacacaccgtttcatcatttacaagattgaggatttttttcgtgacatggtctccggacacggcaagagtgagaagcaagatgatctatgcgagctccaaggacaggttcaagagagaactagacggaattcaggtcgagcttcaggcaaccgatccaaccgagatggatcttgatgttttcaaaagccgagccaattgatgaaagaaatcccctgaaaatttcggttgaatcaaactttttcgtactattactcagtgatgctttttcctaaagtttgctgtgacggtaccaacctgaacagcttcattttatcagtttggtctttgtctttgtctttggtctcctttttgggtccttatagtgttgtcttaaaacttaaggaatctggcctggggctccttacccttggggaagaaatccaaccccttattaaacaagaatccttttgggnnnnnnnnnnnnnnnnnnnnnnnnnnnnnnnnnnnnnnnnnnnnnnnnn

SEQ ID NO: 118795 - DNA, 837 bp, Arabidopsis thaliana
gttgaagcaaaaagagccatagtcgtcgataacatcattcactcttctctgcgcctccttctttcacccgaaattgtctctgacaccgttttgattcagccatggctaatgctgcgtcaggaacggcagtccatgatgactgcacgctaagatttctggaactgaaggcgaaaaggacacaccgtgtcattgtctacaagattgaggagaagcagaagcctgtgattgttgagaaagttggcgaacctattctaacttacgaggactttgcagcaagtcttccagctgacgaatgccgatacgccatttatgatttcgactttgtcactgcagagaattgccagaagagcaagattttcttcattgcatggtgtcccgacgtagcaaaggtgagaagcaagatgatctatgcgagctctaaggacaggttcaagcgtgaacttgatggaaggcaagtggagcttcaagcaactgatccaactgagatggatcttgatgttttgaaaagccgcgtcaactaaaagaaactctctttgaataagcttccgattatattcgactattatgaaatggtgttttctattctcttacagtctcttgtgactgttagatacacttgacacccttcattctatctgtctggtctgttctctgtgtctatgttaccttacagtgtctcatctatattcaaaattatcacaaggtttgtgctgtgtttgcttcctttgtttcaactctaccaaagcttaagattaagatttgggtaagatgattcttttaagcttccctttgttctctttgttacagagggtataaaaaatgcaaaaactattcacc

SEQ ID NO: 118796 - DNA, 390 bp, Arabidopsis thaliana
gaccgaagaaaacacacaagactccattattctcctgcttcttcgtctcttcaattattttctctgagactagctttgattcaaccatggctaatgcagcatcaggaatggcagtccatgatgactgcaagctgaaatttatggaattgaagacgaaaaggacacaccgtttcatcatttacaagattgaggagctgcagaaacaagtgattgttgagaaaatcggtgaaccgggtcaaacccatgaggaccttgctgcaagtcttccagctgatgaatgccgctatgccattttcgatttttttcgtggcatggtctccggacacagcaagagtgagaagcaagatgatctatgcgagctccaaggacaggttcaagagagaactagac

SEQ ID NO: 118797 - DNA, 1113 bp, Arabidopsis thaliana
accgaacacttttttttcttttgcaataaaccaaaaaaagttaaaaattcaaaaacttaattactaagcaaaagtgtgcacgaagaacaaagcgacgcatccgattttatttgtttgataagttcgtgtcgtcttcgtctctctaacccaattctgtggtgtctgaagaaagcagaatcaaatccatgtctttcagaggacttagcaggccaaatgcaatatctggaatgggtgttgcagatgagagcaaaaccacatttctagagcttcaaaggaaaaaaactcatcgctatgtggtcttcaagattgatgaatccaaaaaagaagttgttgttgagaaaactggaaatcctacagagagctacgatgatttcttagcttcacttcctgataatgactgcagatacgctgtttatgactttgatttcgttacttctgagaattgtcaaaagagcaaaatcttcttctttgcttggtctccttcgacctctggaattcgagccaaggtgctttactcgacttctaaagaccagttaagtagggagcttcaagggattcactatgagattcaagctactgatcctactgaggttgatcttgaagtgttacgcgaacgagcgaactgagagcaagcaaggttgctatgtctattcaaaacttatggtaatgtaatgaataattcgtattctctgtggattgatttgtgtaaacacagtttcatgttctatgtcaaactgtataacctctggtgtttcagattgcacaacctaaagcttaggtaaactgaatatggtttaagatcgtaaaaggttgatatattagtaatgttaagagggagaagaaacttctctttagtagataacgagaatgttgatgagcatgatgagagagttcttaaactagtctagcaaattctgtataagctcttgttgtagccatcttgaattcgaatctaatccttgcgaacaatataaaaagtggtagtgtgtaaagtttccctcatcatttgtggtttctttttctcactttcttcggtgtagtaaaatttaagttgtatgtataataattctatcatatacctgctttctaaaaccaaaaaaaaaaaaaaaaaaa

SEQ ID NO: 118798 - DNA, 761 bp, Arabidopsis thaliana
gtaaaagcgttcactaacaacaaagcttcgcatccaaatttatttgtttgatgggggggtatcttcttggactctctaacccaattctgtgttgacagaagaaagcataatcaaatccatgtctttcacaggacttagcaggccaaaagcaatatctggaacgactgttgcagatgagagcaaaaccacatacttagagtctcaaaggaaaaaaacttatacgttatcgcactttaaaaatgaacaaatccaaaaagcagtagttgttgtgaaaactggaaattctacagagagctacctaaatattcttagcctcacttcctgataatgactgctgataccctgttaatgactttgatttcgttacttctaagaattgtcaaaagagcacagtcttcttcttggcttggtctccttcgacctatggaatccgagccaaggtgctttactcgacttctaaagaccagttaagtagggagcttcaagggattcactatgagattcaagctactgatcctactgaggttgatcttgaagtgttacgtgtacgacccacctgagagcaagcaagattgctatgtctattcaaaacttatggtaatgtaatgaataattcgtattctctgtggattgatttgtgtaaacacagtttcatgttctatgtcaaactgtataacctctggtgtttcagattgcacaacctaaaaaaaaaaaaccaaagggcgaccgctctagaggatccaagcttacgtacgcgtgcg

SEQ ID NO: 118799 - DNA, 1350 bp, Arabidopsis thaliana
ccacgcgtccgcaaataatccctgacttcgtcacgtttctttgtatctccaacgtccaataaatgaaagcaactctagcagcaccctcttctctcacaagcctcccttatcgaaccaactcttctttcggctcaaagtcatcgcttctctttcggtctccatcctcctcctcctcagtctctatgacgacaacgcgtggaaacgtggctgtggcggctgctgctacatccactgaggcgctaagaaaaggaatagcggagttctacaatgaaacttcgggtttgtgggaagagatttggggagatcatatgcatcatggcttttatgaccctgattcttctgttcaactttctgattctggtcacaaggaagctcagatccgtatgattgaagagtctctccgtttcgccggtgttactgatgaagaggaggagaaaaagataaagaaagtagtggatgttgggtgtgggattggaggaagctcaagatatcttgcctctaaatttggagctgaatgcattggcattactctcagccctgttcaggccaagagagccaatgatctcgcggctgctcaatcactctctcataaggcttccttccaagttgcggatgcgttggatcagccattcgaagatggaaaattcgatctagtgtggtcgatggagagtggtgagcatatgcctgacaaggccaagtttgtaaaagagttggtacgtgtggcggctccaggaggtaggataataatagtgacatggtgccatagaaatctatctgcgggggaggaagctttgcagccgtgggagcaaaacatcttggacaaaatctgtaagacgttctatctcccggcttggtgctccaccgatgattatgtcaacttgcttcaatcccattctctccaggatattaagtgtgcggattggtcagagaacgtagctcctttctggcctgcggttatacggactgcattaacatggaagggccttgtgtctctgcttcgtagtggtatgaaaagtattaaaggagcattgacaatgccattgatgattgaaggttacaagaaaggtgtcattaagtttggtatcatcacttgccagaagccactctaagtctaaagctatactaggagattcaataagactataagagtagtgtctcatgtgaaagcatgaaattccttaaaaacgtcaatgttaagcctatgcttcgttatttgttttagataagtatcatttcactcttgtctaaggtagtttctataaacaataaataccatgaattagctcatgttatctggtaaattctcggaagtgattgtcatggattaactcaaaaaaaaaaaaaaaaaaa

SEQ ID NO: 118800 - DNA, 852 bp, Arabidopsis thaliana
accggaacttccgggtcgacccacgcgtccccagacgcgtgggtcacaacctagctagctagtaaacagtattttctatataccaaaaatggcttcaagttccatagctcttttcttggctctcaatcttctctttttcacaacaatctccgcctgtggtagctgtactccgtgcggcggaggttgcccctctcccaagccaaagccaactcctaaaccaaccccaagccctagctctggctcgagcaagtgccctaaagacaccctcaagctcggtgtctgcgctaatgtgctcaacggcctcctggacttgacccttggcaagccaccggtcgagccatgctgcagcctcatccaaggactcgctgatgttgaggcagccgtttgtctctgcaccgctcttaaggctaacattcttggaatcaacttgaacctcccaatatctttaagtctactccttaatgtttgcagcaaacaacttcctcctggcttccaatgctaaaaaccatattgatatataatttaaatacacttatgtgtgtattaatttatcttcttgttttaaagagacagggtgattctctatactcttatattgtgtctttatatatcttgatctgtggtttcttctactctgcttgctctggtgttcattggggtgatccgtaagattcctgaagtttacagtttcattatttcctattatatatactcttaccattgggggtattgttgtattggtttgtattatgattctatgaattaataagaatttaacttttatgttcgagccgaattccgagcttacgtacgcgtgcatgcgacgtcatagctcttctatagtgcacctaa

SEQ ID NO: 118801 - DNA, 771 bp, Arabidopsis thaliana
gctggccgtccgcagtaccggtccggaattcccgggtcgacccacgcgtccgccgtgcggcggaagttgcccctctcccaagccaaagccaactcctaaaccaaccccaagccctagctctggctcgagcaagtgccctaaagacaccctcaagctcggtgtctgcgctaatgtgctcaacggcctcctggacttgacccttggcaagccacccggccggcccatgctgcaccctcacccaagggctccgctgatgttggggcacccgtttggctctggcacccgcccttaaggcctaaccattcttggaatcaacctggaccctcccaatcacctttaagcctacccccttaatggttgccagcaaaccaccttcctcctggcttccaatgctaaaaaacccatattggttatataatttaaatacacttatgtgtgttattaatttatcttctttgtgttttaaagagacagggtgattctctatactcttatattgtgtctttatatatcttgatctgtggtttcttctactctgcttgctctggtgttcattggggtgatccgtaagattcctgaagtttacagtttcattatttcctattatatatactcttaccattgggggtattgttgtattggtttgtattatgattctatgaattaataagaatttaacttttatgttatggattcattattatacggaatattgtgttttatggtttatatatatagactgtatcttctacagttctacccaaatatttt

SEQ ID NO: 118802 - DNA, 792 bp, Arabidopsis thaliana
  unsure (1)..(792): unsure at all n locations
ctccccccaaacccggncggcccggccgtccgaanngggnnccgattnnaatttaaaaaactatgttcattaaacaataaacacacacacccaaggaaaaaattcacgcatcaggaagggaacaataaccacccaattcactcacaacctacctagctagtaaacagtattttctatataccaaaaatggcttcaagttccatagctcttttcttggctctcaatcttctctttttcacaacaatctccgcctgtggtagctgtactccgtgcggcggaggttgcccctctcccaagccaaagccaactcctaaaccaaccccaagccctagctctggctcgagcaagtgccctaaagacaccctcaagctcggtgtctgcgctaatgtgctcaacggcctcctggacttgacccttggcaagccaccggtcgagccatgctgcagcctcatccaaggactcgctgatgttgaggcagccgtttgtctctgcaaccgntcttaaggntaacattcttgggatcaaacttgaaactcccaatatctttaagtctaactcccttcaatggtttgcaggaaacaactttcctcctgggnttccaatgcggaaaaaaccatattggtatataatttaaatcacacttatggggggggattaaattaacctccctgggttttaaagancaggggggtccccaaaaccccaaaatggggggcttaaaaactgtactggggtctcaanntggttgcctggggnaatggggnccgaaaatnngaggtaagtnatattcgc

SEQ ID NO: 118803 - DNA, 555 bp, Arabidopsis thaliana
  unsure (1)..(555): unsure at all n locations
gctagtgaacagtattttctatataccaaaaatggcttcaagttccatagctcttttcttggctctcaatcttctctttttcacaacaatctccgcctgtggtagctgtactccgtgcggcggaggttgcccctctcccaagccaaagccaactcctaaaccaaccccaagccctagctctggctcgagcaagtgccctaaagacaccctcaagctcggtgtctgcgctaatgtgctcaacggcctcctggacttgacccttggcaagccacccggtcgagccatgctgcagcctcatccaaaggactcgctgaatgtttgaggcagccggtttgttttctgcagcggtcttaagggtaacattcttgggatcaacttgaacctcccaatatctttaaggctactcccttaatgtttgcagcaaaaaatttctccngggttcaatggtnaaaacnttttgnntttaatttaanaccnctttggggggnnaaattaatntctgnttaaaggggcagggggttcnttaanccnnaaatnggntttaaaattggnntc

SEQ ID NO: 118804 - DNA, 513 bp, Arabidopsis thaliana
  unsure (1)..(513): unsure at all n locations
ctcacaacctagctagctagtaaacagtattttctatataccaaaaatggcttcaagttccatagctcttttcttggctctcaatcttctctttttcacaacaatctccgcctgtggtagctgtactccgtgcggcggaggttgcccctctcccaagccaaagccaactcctaaaccaaccccaagccctagctctggctcgagcaagtgccctaaagacaccctcaagctcggtgtctgcgctaatgtgctcaacggcctcctgggcttgaccccttggcaagccacccggtcgagccatgctgcaggcttcatccaaggactcggttgatgttgaggcagccgctttgttttttggaaccgttctttaaggttaacaattctttgggattaacttgaacctcccaatttttttagggttccccctaaaggtttaaggaaaaaattccccccggggttctgtaattcctttttgttttaatttaaannnatttngggggnanaaataanctc

SEQ ID NO: 118805 - DNA, 1292 bp, Arabidopsis thaliana
  unsure (1)..(1292): unsure at all n locations
ccaacgcgaaacccaaaccctcattccaaaaaatggggtctcgctctcaaaacctctcctttctcgtcctcctcctccttggcttcgttgccgtctcctatgcttgcgactgtacccctcctaaaccatcaccagcacctcacaaaccaccaaaacatccagtcaaaccgcctaaacctcctgccgtcaaaccacctaaaccaccggcagtaaaaccacctactccaaaacctcccaccgtgaaaccccatcctaaaccacccaccaaacctcacccccacccaaaacctcccatcgtaaagccaccaaccaagcctcctccgtccacccctaaacctcccaccaaaccttccccgtccacacctaaacctcccacgaccaagcctcctccgtctactccgaaaccaccccaccacaagccttccgcctacaccatgcccaccaccaacaccaacgccgactccaccagttgtaacaccgccaacaccaaccccacccgtcataactccaccaacaccaaccccacccgtcgtaacaccgccaacgccaactccacccgtcattacaccaccaacaccaactccacccgtcattacaccaccaacaccaacaccacccgtcgtgacacctccaacaccaacaccacccgtagtaacaccaccaacaccaactcctcctacgcctattccagagacttgcccaattgacacgctgaagctaggcgcttgtgtggacgttcttggaggtttgattcacatcggacttggaaaaagccacgccaaggcagaatgttgtccggttttaggaggtttacttgacctagacgcagccgtttgtctatgtaccaccattaagctcaaacttctcaacatcgaccttgttctccccattgctcttgagcttcttctcgactgtggaaaaactccaccatctgacttcaaatgtcccgcttaatcgatgtagaacgttgagagtctctggacgactccaaaagtttcgtttcttcaagaaatttgttagtttcatgatctatttggtaatgggaggttaatctgcatatgtgcgacctttagttacatgtttcatttgatacaataaaaggcgttgtaatttgggtttgagatttcaatttctttgggctttcttgttatgttgtacttttaagaagaagaaaaaaaaactgttaaacgatataactttttttttaatatgaacaagtttgtatctgtctaatttgtttttatgtacatacgtacgttatggagtnnnnnnnnnnnnnnnnnntttaatcg

SEQ ID NO: 118806 - DNA, 708 bp, Arabidopsis thaliana
  unsure (1)..(708): unsure at all n locations
gtcngaaacncncaanccaacccacccggggaacccgaacggantccccggnattnccccacacaaatcnccggnattcccnccaanaccaacaccnccngnngggcncctcaacaccaacaccacccgngnacnccacccaccaccaantccacctacgcctattccagaggcttccccaacttgccacgctgaagctagccgcttgtgtggacgttcttgggaggtttgattcacatcgggacttggaaaaagccacgccaaggcagaatgttgtccggttttaggaggtttacttgacctagacgcagccgtttgtctatgtaccaccattaagctcaaacttctcaacatcgaccttgttctccccattgctcttgagcttcttctcgactgtggaaaaactccaccatctgacttcaaatgtcccgcttaatcgatgtagaacgttgagagtctctggacggctccaaaagtttcgtttcttcaagaaatttgttagtttcatgatctatttgggaatgggaggttaatctgcatatgtgcgacccttagttacatgtttcatttggtacaataaaaggcggtgtaatttgggtttggcgctttcctttgcggttctcgtaagtgttctttaggggggaaaaactgtaacggtaacttttttaaanggcagttnccgcaanngttnnggcacggggttgggat

SEQ ID NO: 118807 - DNA, 680 bp, Arabidopsis thaliana
ggtcgaccacgcgtccgcccaagcaacccaaaccctcattccaaaaaatggggtctcgctctcaaaacctctcctttatcgtcctcctcctccttggcttcgttgccgtctcctatgcttgcgactgtacccctcctaaaccatcaccagcacctcacaaaccaccaaaacatccagtcaaaccgcctaaacctcctgccgtcaaaccacctaaaccaccggcagtaaaaccacctactccaaaacctcccaccgtgaaaccccatcctaaaccaccaaccgtcaaaccccatcctaaaccaccaaccgtcaaaccccaccctaagccacccaccgtcaaaccaccccaccctaaaccacccaccaaaactcacccccacccaaaacctcccatcgtaaagccaccaaccaagccttctccgtccacccctaaacctcccaccaaaccttccccgtccacacctaaacctcccacgaccaagcctcctccgtctactccgaaaccaccccaccacaagccttcgtctacaccatgcccaccaccaacaccaacgccgactccaccagttgtaacaccgccaacaccaaccccacccgtcataacttcaccaacaccaaccccatcccgtcgtaacaccgtcaacgccaactgcacccgtcatttcaccaccaacaccaac

SEQ ID NO: 118808 - DNA, 1586 bp, Arabidopsis thaliana
  unsure (1)..(1586): unsure at all n locations
nnnnnnnnnnnnnnnnnnnnnnnnnnnnnnnnntgaaatctggattcgtctcctccattaaacatctctcgtctgataacaccgatccatctctttctttctctctccgtcgactctcgttcttaaagatgaaagctttctacgtattcgttgttgctcttcttctcaccttgaattataggggagaagcaagtggttctgttttcttcattgatggatccaacaatcaatatcttcgtccacgatcatccagtgaggcacttcccatgtcgcctgttgaaatatctgcagcagtgtctgccttgttgggttttgcaccttcagcaactttgacagctgatggctcatccaagttgaacaagattctaaaacctaatccatttgagaggcctcgcgctgcttttgtgctagaaatcgctggagctgatgatatgcttttggaaacctcccctagtcattctttcttgggcaatgccataaggagcagtattaagtctgattcgtacaaagctgatactgaacttccagacaatgaagtggttgttgtgtctgtcaatgaaccctcctctgatgtgactgacaaggacattaatgattttgcatcttggttgggtggatcatatgttgctggagctgaaccatcgtctggattgttgagtatccctctggctgggggtgctaatgtggagttcaatttggaaaaggaagcagagaggaaatttgcattgaaccttttgggtctatatcagaatatcagacaggcagtcagcgtttatgacgatttatctcatggtattgacagaactgccgaattaacggttggacgctttggtggtatcgatgctttagcacaggagtatggacaaggtatggctaagcaagggatggatgtattactttccacattatcaaagctattcaatctgttggagacatctcataaaggccaaattgttggggttatcgtccttgatgagagagtaaaccaagaatcagaaaatcttttgaactttgggtcttcccgttcatctgcacgctcaatggtggaagtggagggaattccaagtgcagccattatcgctgaggttatacttgttaggctgactcttgcatggttgactggaatcattcttctcattgcaactatccttggggtatacttccttatgaacatgcctttgacgaaggatactcttctatattcaaatgtaaagctcgactaagaaatgaaacagagcttcaaaacggcaaaaggacactgattttctctacaggtcgttcgtttacatatttttgtgtgtatcaagccgtgtttctcaactggccgcctttgaaaccggtgtcatttgaatgtttaaagagaaggatgaaacttttggtggtcagagcagttgatgtgttatgtgtatattgccatattggttgcattctcgacttataattattttctttcttacatacattttgagtctcagtcctaataataaaagaccactttggacacttgatgtgtatcttctgtctctgtaagagcttttgatcatgaatctgaatatattattgcaactaaaaaaaaaaaaaaaaaa

SEQ ID NO: 118809 - DNA, 936 bp, Arabidopsis thaliana
agacgagctatgacgtcgcatccacctgtttttgagacttcatctgtgcatagcaaatagaagatttgtaatttgagaggaacaagaaaggttatgttcatatcattacaagaatcacatcaagacttgaaaatttaagctccaggtgcaaacttagttgcgaaagcccacgcattgttagcaacagggttgtcaagatggtcaaggagattctccaaaggaccttttccagtaacaatggcttgaacaaagaagccaaacatagagaacatagccaatcttccgttcttgatctctttcaccttaagctcagcaaaagtaactggatcatcagcgagacccaacgggtcaaagtattgcccaccggggtacaagtcgttgccttcgccaacaccatcaagaccgttgatgcggaaaccttcaaccaaacccatgaggatgacttggaagccaaggacggctaaaatgctctgagcatggactaggtttgggttgcctaagtagtccaaaccgccttcggagaagatttgtgaaccggctttgaaccagactggttctttgaagtccacacggacccacttttgaagaacttcaggggttatgcaaccaaaaagctcccaacattgcccatctcccatggatcacctcaagagctctgtttttggcaaaggcttcagggtctgcggataaaccggcggtgtcccaaccataatcgccagggaattctccggtgaggtaagacggagtttgaacggaaaagggtcctaagtacttcactctgtcaggtccataccaaagatcatttcccatagtgtacttgggagatccgagagagacaacatcacgaagggggttaaagcttgaggctttagtctggccaaggaatgttgttggggtaagaacactgcttgagctcgtgaatgttgatgccattgt

SEQ ID NO: 118810 - DNA, 870 bp, Arabidopsis thaliana
  unsure (1)..(870): unsure at all n locations
gagaaaagaaaactttgtaccttttccaaagtctaagcaaatcattgtttttgattactggaactcgttgagggattgagaaaaaaataatcagaagagaaagatccatggctgataattgtatcagacttcttcactcagcctctgttttcttctgtttagggcttctaatttcatccttcaacttgttgcagggtattgcagctgaaaatctttccaagcagaaactgacctcatggattcttcagaatgagattgtaaaggaagtcaatgagaatccaaacgctggatggaaagcttctttcaatgatcggtttgcaaacgccactgttgcagagtttaagcgccttcttggtgttaaaccaacaccaaagacggaatttttgggtgtgcctattgtaagccatgatatatctttgaagcttccaaaagaatttgatgctagaaccgcttggtcacagtgcaccagtattggaaggatcttagatcagggtcattgtggttcttgctgggcatttggtgctgttgaatcactatcagatagattctgtatccaatttggcatgaacatttctttatctgtcaatgatctcttagcatgttgtggattcctttgcggtcaaggttgtaatggtggctacccaattgctgcgtggcggtacctttaagcaccacggtgtagtcacctgaagagtgtgatccatactttgacaatactggttgcttgcacccggggtgcgaacccggttaccctccttcaacngaaattttcgggggaaatcngtnnggcaacaaactttgggggngtcgaggattacagggtnagacanacnctgtgaatctaatccccaagntttcatggggggggta

SEQ ID NO: 118811 - DNA, 743 bp, Arabidopsis thaliana
ctctctttctctctttttgctatcgtggggaaaaagattcattctcccaccattgaggtttaacttatacaaacagatctttttgaaattggattcatctaagaagcagactctgttttcatggctgtttacaataccaaactctgtttggcctctgttttcttgctcttagggcttctcttggcttttgacttgaagggtatagaagcagaaagtcttaccaaacagaaactggactcgaagatacttcaggatgagattgtgaagaaagtcaacgaaaacccaaacgctggatggaaagctgctataaatgatcgattttcaaacgccactgttgcagagtttaagcgtcttctcggtgttaaaccaacaccaaagaagcatttcttaggtgttcctattgtgagccatgatccatctttgaagctacctaaagcttttgatgctagaactgcttggccacagtgcactagtattggaaacatcttagggttggtgttatgcttctagctttttcctcacaattttagtgttcaactgcatttccgtattaactcttgggttttggggtgggggggagactgctctatgaaccggacaaggtaaatatccaatctttgtggattcgtgaacctttagaatttgcctaaagaactaatggctttatgagattttggggtttggcttatggaccatgtgggtcttgctgggcaattggtgctggtgaatcccttttaaattaa

SEQ ID NO: 118812 - DNA, 1323 bp, Arabidopsis thaliana
cttatacaaacagatctttttgaaattggattcatctaagaagcagactctgttttcatggctgtttacaataccaaactctgtttggcctctgttttcttgctcttagggcttctcttggcttttgacttgaagggtatagaagcagaaagtcttaccaaacagaaactggactcgaagatacttcaggatgagattgtgaagaaagtcaacgaaaacccaaacgctggatggaaagctgctataaatgatcgattttcaaacgccactgttgcagagtttaagcgtcttctcggtgttaaaccaacaccaaagaagcatttcttaggtgttcctattgtgagccatgatccatctttgaagctacctaaagcttttgatgctagaactgcttggccacagtgcactagtattgggaacatcttagatcagggacattgtggttcttgctgggcatttggtgctgttgaatcactatcagatagattctgtatccaatttggcatgaatatttctttatcagtaaatgatctcctagcatgttgtggattcctttgcggtcaaggttgtaatggtggatacccaattgctgcgtggcggtactttaagcaccacggtgtagtcacatgaagagtgtgatccatacttcgacaatactggttgctcgcacccgggatgtgaacccgcttaccctacaccaaaatgtgcaaggaaatgtgttagcggaaaccaagctttggcgtgaatcaaaacattatggtgttagtgcgtacaaggtcagatctcaccctgatgacattatggcagaagtttacaaaaatggacctgttgaggttgccttcactgtttacgaggactttgcgcattacaaatctggagtgtacaagcacataacaggtactaacattggaggtcatgctgttaaacttattggcttggggaacttctgattgacggtgaagattattggttgcttgcaaatcaatggaaccgagctggggtgatgatgggtcttcaagatcaggagaggaacaaacgaatgtggcattgaacatggtgttgtagctggtttaccttcagacaagaacgtagttaaaggtattactacttcagatgatcttctggtttcctcagtctaaacaagacgatgtgtccctactctgtaatatatcatttgcaactgtgttgtagtttaatataccattgaaagaatccccttcaatccaaaaaaaaaaaaaaaaaaaaaaaaaagggcggccgctctagaggatccaagcttacgtacgcgtgcatgcgacgtcaagctcgtctatagtgtaacgg

SEQ ID NO: 118813 - DNA, 1056 bp, Arabidopsis thaliana
  unsure (1)..(1056): unsure at all n locations
ggagaaagctggtacgcctgcaggtaccggtccggatataccgggtcgacccacgcgtccggtggttcttgctgggcatttggtgctgaagaatcactatcagatagattctgtatccaatttggcatgaacatttctttatcagtaaatcgatcccctagcttgttgtggattccgttgtggtgatggttgtaacggtggctatccaattcctgcttggcaatacttttcgtatagcggtgttgtcacagaagagtgtgatccatactttgataataccggatgctctcacccgggttgcgaaccggcatatcctacaccgaaatgttcgaggaaatgcgttagcgacaacaaactatggagcgagtcgaagcattacagtgttagtacatacactgtgaaatctaatccacaagatatcatggcagaggtttataagaatggacctgttgaagtctcttttaccgtttatgaggattttgctcattacaaatctggagtctataagcacataacaggttctaacattggaggtcatgctgttaaacttattggttggggaacctagcagtgaaggagaagattattggttgatggcaaatcaatggaacagaggctggggtgatgatggttatttcatgataaggagaggaactaatgaatgtggaattgaagatgaaccagtagctggtttgccttcaagcaagaatgtgtttagggttgataccggttcgaatgatcttccggttgcatcggtttaagatcaaagatggaaatgttgcatcggtttaatatcaaagatgaaaagttgtttgtaagatatatatgttatggttgttgtttccagtaaaagattccggtgactagaaattgttttctggttggctgtgaaaatgttatacaaataaacacttcaacttaagcaatataatatcatttctacttaaaaaaaaaaaaaaaagnnnnnnnnnnnnnnnnnnnnnnnnnnnnnnnnnnnnnnnnnnnnnnnnnnnnnnnnnnnnnnnnnnnnnnnnnnnataatnnnnnnnnnnnnnn

SEQ ID NO: 118814 - DNA, 732 bp, Arabidopsis thaliana
atacgactttattagggaaacctggtacgcctgcaggtaccggtccggaatttccgggtcgacccacgcgtccgcccacgcgtccgaaactgtgaaacctgaacaacatggtggtggattcggtgacaatggaggaggaagataccaaggaggaggcggccatggtggccacggagggggaggataccaaggaggaggaggacgataccaaggaggcggtgggcgacaaggaggagggggaagttactgccgccacggctgctgctacaaaggttaccatggctgctcaaggtgttgttcatatgccggagaagcggttcagactcagtctggtcactaaatctacataatatatcaaccaccatgagtgtacgatttcatttatatatacacttacgtgtgtatgtgatatgacaatacacttacgtttgtaatgaagtgccttaagtttaagaggagaaactatcggaataaagtttcataatgtaatgcctttgtgtttatttaagttgttatttgcgatgtttgcataataaagttgtttctagttgaagttggcagaaatcgaaaaaaacgggggggccgctttgtattccgcaagcttaccttctctggctcacactttcttttcttgtcattaagatacctatatacacccaccggggatcaggtttaaagggggagaccaggaaatctttaattgtgcactttatcggttcaaatattttgttt

SEQ ID NO: 118815 - DNA, 697 bp, Arabidopsis thaliana
  unsure (1)..(697): unsure at all n locations
tgannnnnnnnnnnnnnnnnnnnnnnnnnnnggacaggtggtacgcctgcaggtaccggtcccggaattcccgggtccgcacccacgcgtccgccctgatgacattatggcagaagtttacaaaaatggacctgttgaggttgccttcactgtttacgaggactttgcgcattacaaatctggagtgtacaagcacataacaggtactaacattggaggtcatgctgttaaacttattggctggggaacttctgatgacggtgaagattattggttgcttgcaaatcaatggaaccgaagctggggtgatgatgggtacttcaagatcaggagaggaacaaacgaatgtggcattgaacatggtgttgtagctggtttaccttcagacaggaacgtagttaaaggtattactacttcagatgatcttcttgtttcctcattttaaacaggaatatgtgtctctactctgtaatacataatttcccactgtgttgttgttaccaatgaaataaaacgactttcaacccaaaaagaagtctattgtatataccatttagctttttgttcatattcaatataatgtgttgttgtttccaatgaaagaatcaaaagacattcaactattctacatatcagannnnnnnnnnnnnnnnnnnnnnnnnnnnnnnnnnnnnnnnnnnnnnnnnnnnnnnnnnnn

SEQ ID NO: 118816 - DNA, 619 bp, Arabidopsis thaliana
  unsure (1)..(619): unsure at all n locations
ttttaagcagtatttgtaagaaaatggcttccaagactttgcttcttttgggtctctttgcatttcttttcatcgtctcagaaatggctgccgcgggcacggtgaagtcagagagtgaggaaactgtgaaacctgaacaacatggtggtggattcggtgacaatggaggaggaagataccaaggaggaggcggccatggtggccacggagggggaggataccaaggaggaggaggacgataccaaggaggcggtgggcgacaaggaggagggggaagttactgccgccacggctgctgctacaaaggttaccatggctgctcaaggtgttgttcatatgccggagaagcggttcagactcagtctggtcactaaatctacataatatatcaaccaccatgagtgtacgatttcatttaatatatacacttacggtgtgtatgtgatattgacaatacacttacgttttgtaaattgaagtgccttaaagtttaagagggggaactttcggaataaagtttcataaatggaatccctttgnggttaatttnaagttgtaatttcccntgnttccaaaaanaanttgttcctagcggccccgatccctgancccgggggnc

SEQ ID NO: 118817 - DNA, 506 bp, Arabidopsis thaliana
  unsure (1)..(506): unsure at all n locations
cgcattgtgttgattctggaattctttgtgggaacgagaaatttgttcttgggagattcatcatggctgatagttgttgtatcagacttcacttattagcctctgttttcttgctcttattttcatccttcaacttgcagggtattgcagcggaaaatctttccaagcagaaactgacctcactgattcttcagaatgagattgtaaaggaagtcaatgagaatccaaacgctggttggaaagctgctttcaatgatcggtttgcaaatgccaccgttgcagagtttaagcgactcctcggtgttatacaaacaccaaagacggcatacttaggtgtacctattgtaagacatgatttatcgttgaagcttcctaaagaatttgatgctagaaccgcttgggcacattgcaccagtatccgaaggaccttaggccgggttaacccctanntccanaaccccggcannaacccanngntnccgggccccccaaggntnggncaaaaa

SEQ ID NO: 118818 - DNA, 473 bp, Arabidopsis thaliana
tccacacggacccacttttgaagaacttcaggggttatgcaaccaaaagctcccaacattgcccatctcccatggatcacctcaagagctctgtttttggcaaaggcttcagggtctgcggataaaccggcggtgtcccaaccataatcgccagggaattctccggtgaggtaagacggagtttgaacggaaaagggtcctaagtacttcactctgtcaggtccataccaaagatcatttcccatagtgtacttgggagatccgagagagacaacatcacgaagggggttaaagcttgaggctttagtctggccaaggaatgttgttggggtaagaaccactgcttgagctcgtgaatgttgatgccattgtctctctcggcttgagcttttcttttttgcttagtgttgttgttcttctcccttccgtcgtttgggtacgactcagtatagaggcttgcgtcgacccacgag

SEQ ID NO: 118819 - DNA, 691 bp, Arabidopsis thaliana
caacaccatcaagaccgttgatgcggaaaccttcaaccaaacccatgaggatgacttggaagccaaggacggctaaaatgctctgagcatggactaggtttgggttgcctaagtagtccaaaccgccttcggagaagatttgtgaaccggctttgaaccagactggttctttgaagtccacacggacccacttttgaagaacttcaggggttatgcaaccaaaagctcccaacattgcccatctcccatggatcacctgcaaatgatgattagttatttactctgtttttacattgagttgcccatctcccgggactaccctcaagagctctgtttttggcaaaggcttcagggtctgcggataaaccggcggtgtcccaaccataatcgccagggaattctccggtgaggtaagacggagtttgaacggaaaagggtcctaagtacttcactctgtcaggtccataccaaagatcatttcccatagtgtacttgggagatccgagagagacaacatcacgaagggggttaaagcttgaggctttagtctggccaaggaatgttgttggggtaagaacactgcttgagctcgtgaatgttgatgccattgtctctctcggcttgagcttttcttttttgcttagtgttgttgttcttcttgttttgctgtttggtgaaagtattggtctcc

SEQ ID NO: 118820 - DNA, 779 bp, Arabidopsis thaliana
  unsure (1)..(779): unsure at all n locations
gaaanaacttnaattacccgggtaacttgtngaaccnccatntngaaaaggtncaaatggnnaggaatnccaaaggcctttcaagnaaatgcttgaaaaagaaccaacattgnggacatancaatcttcggtcttganctctttcaccttaagctcagnaaaagtaactggatcatcagcgagcccaacgggtcaaagtattgcccaccggggtacaagccgttgccttcgccaacaccatcaagaccgttgatgcggaaaccttcaaccaaacccatgaggatgacttggaagccaaggacggctaaaatgctctgagcatggactaggtttgggttgcctaagtagtccaaaccgccttcggagaagatttgtgaaccggctttgaaccagactggttctttgaagtccacacggacccacttttgaagaacttcaggggttatgcaaccaaaagctcccaacattgcccatctcccatggatcacctcaagagctctgtttttggcaaaggcttcagggtctgcggataaaccggcggtgtcccaaccataatcgccagggaattctccggtgaggtaagccggagtttgaacgaaaaagggtcctaagtacttcactctgtcaggtccatnccgnagatcatttaaaaaaaaaaacttgggagatccgagagagacaacatcacgaagggggttaaagcttgaggctttagtctggccaaggaatgttgttggggtaaccaccctgctttagaaagtgaagcttcatgccattgt

SEQ ID NO: 118821 - DNA, 513 bp, Arabidopsis thaliana
  unsure (1)..(513): unsure at all n locations
gcacaatgnacaaggtttggggtncccnaaagnngccaaaacccgncttcggnaaaaaatttgntaaaccgggcttttgaaccangctgggtcctttaaaaggccaacaccggnccccactttttgaaagcaaccttcagggggttatgcaaccaaaaagctcccaacattgcccatctcccatgggatcacctcaagagctccggttttgggcaaaggcttcagggtctgcggataaaccggcggtgtcccaaccataatcgccagggaattctccggtgaggtaagacggagtttgaacggaaaagggtcctaagtacttcactctgtcaggtccataccaaagatcatttcccatagtgtacttgggagatccgagagagacaacatcacgaagggggttaaagcttgaggctttagtctggccaaggaatgttgttggggtaagaacactgcttgagctcgtgaatgttgatgccattgtctctctcggcttgagcttttcttttttgc

SEQ ID NO: 118822 - DNA, 640 bp, Arabidopsis thaliana
  unsure (1)..(640): unsure at all n locations
gcacccccctcgaggtcgactgtatcgataagcttgatatcgaattcgcggccgccttgaaaatttaagctccaggtgcaaacttagttgcgaaagcccacgcattgttagcaacagggttgtcaagatggtcaaggagattctccaaaggaccttttccagtaacaatggcttgaacaaagaagccaaacatagagaacatagccaatcttccgttcttgatctctttcaccttaagctcagcaaaagtaactggatcatcagcgagacccaacgggtcaaagtattgcccaccggggtacaagtcgttgccttcgccaacaccatcaagaccgttgatgcggaaaccttcaaccaaacccatgaggatgacttggaagccaaggacggctaaaatgctctgagcatggnctagggttggggtgnctaaagtagtccaaaccggctttcggagaagattttgtgaaccggctttgaaccagactnggtcttttgaaggncacacgggcccactttttgaagaacttcagggggtntgaaccaaaagtnccaaaantggccatttcccatgggnacctgnaaatgntggttggtatttccccgggttacattggggggggggttttgggcaccccagggc

SEQ ID NO: 118823 - DNA, 508 bp, Arabidopsis thaliana
  unsure (1)..(508): unsure at all n locations
tccaaaccacccttcgngaagnttttgnaaaccggcttttaacccagacttggttcctttgaaagcccacacggaccccactttttgaagaacttcaggggtttatgcaacccaaaaagctcccaaccaattgcccatctccccatggatcacctncaaagagctctctgttttttcgcgcaagaaggctttcagggtctgcggataaacccggcggtgtcccaaccataatcgccagggaattctccggtgaggtaagacggagtttgaacggaaaagggtcctaagtacttcactctgtcaggtccataccaaagatcatttcccatagtgtacttgggagatccgagagagacaacatcacgaagggggttaaagcttgaggctttagtctggccaaggaatgttgttggggtaagaacactgcttgagctcgtgaatgttgatgccattgtctctctcggcttgagcttttcttttttgcttagtgttgttgttcttcttgttt

SEQ ID NO: 118824 - DNA, 388 bp, Arabidopsis thaliana
  unsure (1)..(388): unsure at all n locations
accaaaaaanccccccaaactttccccaancccccaanggaaaaccctcaaaaaaccccttgtttttggcaaaggccttccagggctctgcggataaaaccgggcggtgtcccaaccataatcgccagggaattctccggtcgaggtaagacggagtttgaacggaaaagggtcctaagtacttcactctgtcaggtccataccaaagatcatttcccatagtgtacttgggagatccgagagagacaacatcacgaagggggttaaagcttgaggctttagtctggccaaggaatgttgttggggtaagaacactgcttgagctcgtgaatgttgatgccattgtctcccccgcctgggcctttccttttttgcttagtgttgttgt

SEQ ID NO: 118825 - DNA, 368 bp, Arabidopsis thaliana
gaataaacagaaggtgtcccaaccaaatacgccaagaatttcaccggtaaagtaagacggagtttgaacgaaaaagggtcctaagtacttcactctgtcaggtccataccaaagatcatttcccatagtgtacttgggagatccgagagagacaacatcacgaagggggttaaagcttgatggctttagtctggccaaggaatgttgttggggtaagaacactgctctgagctcgtgaatgttcacgccattgtctctctcggcttgagcttttcttttttgctgagtgttgttgttcttcttgttttgcgagtgtacgatttcatttatatatacacttacgtgtgtatgtgatatgacaatacact

SEQ ID NO: 118826 - DNA, 1155 bp, Arabidopsis thaliana
  unsure (1)..(1155): unsure at all n locations
agtgtgagtaatttaggaagattcgagtctctcggaaatggcatcacacgaccaccctcatcatcatcacgatcatgagcatgaccacgagaaatcagacggcggagaagggaaggcgtcgtgggtggggaaggacgggaaggtgtaccatagccacgatggactcgcacctcactcacacgaacccatctactctcctggctacttcagtcgccgagctcctccgcttcacgaccgtaacgtctcgctcaagccgaattctgagagagcttttaccgtcggtattggcggtcccgttggcactgggaaaacggcattgatgctggctctttgtagattcttgagggacaaatatagtcttgctgctgtgacaaatgatatattcacgaaagaggatggtgagtttctggtgaagaatggggctcttcctgaggaaaggattagagctgttgaaacaggtggatgtccacacgctgctatccgtgaagatatcagtatcaatttgggtcctcttgaggagttatctaacttattcaaggctgatttgcttctttgtgaatccggtggagataatttagctgctaatttcagtagagaactagctgactatatcatctacatcatcgatgtatcggctggtgataaaataccccgtaaaggcggccctggaatcactcaagctgatcttctggtgataaacaagactgaccttgcagcagctgttggggctgacttatcggtcatggaaagggattcactacgcatgcgtgatggagggccatttgtctttgctcaggtgaagcatgggcttggagtcgaggaaatcgtgaaccatgtcatgcactcatgggaacatgcgaccgggaagaagcgccagtgatgatggggttcttaagacccaaaatggataagatatgaaactgaatggaactctttcaatacttatcttgaactcaatttatgcgcaaaagtctatgtaatctgtttgttgtactcaagacataagagaaataaaaggtttgagcatgagactcattacattctaaaaaaaaaaaaaaaaaaagaaaaaaaaaaaaaaaaaaaaaagggcgccagctctagaggatccaagcttacgtacgcgtgcatgcgacgtcatagtaactctantagtgt

SEQ ID NO: 118827 - DNA, 815 bp, Arabidopsis thaliana
  unsure (1)..(815): unsure at all n locations
tatacgactcctatagggaaagctggtacgcctgcaggtaccggtccggaattccctggtcgacccacgcgtccgctcaaagtcaacacatgctaccggaagaagattcgagtctctcggaaatggcatcacacgaccaccatcatcatcatcacgatcattgagcatgaccacgagaaatcagacggcggagaagggaaggcgtcgtgggtggggaaggacgggaaggtgtaccatagccacgatggactcgcacctcactcacacgaacccatctactctcctggctacttcagtcgccgagctcctccgcttcacgaccgtaacttctctgagagagcttttaccgtcggtattggcggtcccgttggcactgggaaaacggcattgatgcttgctctttgtagattcttgagggacaaatatagtcttgctgctgtgacaaatgatatattcacgaaagaggatggtgagtttctggtgaagaatggggctcttcctgaggaaaggattagagctgttgaaacaggtggatgtccacacgctgctatccgtgaagatatcagtatcaatttgggtcctcttgaggagttatctaacttattcaaggctgatttgcttctttgtgaatccggtggagataatttagctgctaatttcagtagagaactagctgactatatcatctacatcatcgatgtatcggctggtgataaaataccccgtaaaggcggcctggatcactcaagctgatcttctggtngataacagactgaccttgcgcagctgttggggctgacttatcggtcatggga

SEQ ID NO: 118828 - DNA, 1883 bp, Arabidopsis thaliana
cgcacgttccacaatcaagtaccctctctctatctctccctccctccctctccaccatggacaccgcaaccaccacatgctctgccgtagatctatctgccctcctatcctcttcttctaactcaacatcttccctcgccgcggcaacctttttatgttcccaaatttcaaacatctccaacaaactctccgacacaacttatgccgtcgacaacacgtatctcctcttctccgcctaccttgtctttgccatgcagctcggtttcgctatgctttgtgctggatcagtccgagccaagaacactatgaacatcatgcttaccaatgtccttgatgctgccgctggagccatctcttactacctcttcggattcgcattcgcctttggtacaccttccaacggattcatcggtcgccaccatagcttcttcgctttaagctcttaccctgaacgccccggctccgacttcagctttttcctctaccaatgggcttttgccatagccgcggccggaatcactagcggttccatcgccgagcgaacgcaattcgttgcttaccttatctactctactttcttgaccggttttgtttacccgacagtctcgcactggttctggtcaagtgatggatgggctagcgcgtcccggtctgacaacaatctcttgtttggctcaggtgctattgatttcgcaggttcaggagttgttcacatggtaggtggaattgccggtttatgtggagcgttagttgaaggaccaagaataggtagatttgaccggtcaggccggtccgtggctttacgtggtcacagtgcatcccttgtcgtgcttggtaccttcttgttgtggtttggatggtatgggtttaaccctggttcctttttaaccattcttaaaggctacgacaagtctcggccatattatggtcaatggagcgctgtaggtcgcaccgcggtcaccacaacgctttctggctgcaccgctgcgttgactactctattcagtaaacggcttttagcaggtcattggaacgttattgacgtatgcaacggacttctaggcggctttgcagctataacctccggatgtgccgtggtggagccgtgggctgctatagtatgtggctttgtggcatcatgggttttaatcggatttaacttgcttgccaagaaacttaaatatgatgacccactcgaggctgctcagctccacggtggatgtggagcatggggattaatctttaccgggctgttcgcaaggaaagaatacgttaacgagatttactccggtgataggccttacggactgttcatgggcgggggaggaaaactgctcgccgcgcagatcgttcagattattgtgatcgttgggtgggtgacggtaactatgggaccgttgttttatgggttacataagatgaatcttttgaggatatcagcagaagatgagatggcaggaatggacatgacacgtcatggaggatttgcttacgcatacaatgacgaagacgacgtgtcgactaaaccatggggtcatttcgctggaagagtggagcctacaagccggagctcgactcctacaccgaccttgactgtttgatactttgattggagaattgagtggtcccaaacgagtcagttttaatgtggtgaagacaagagttcgggcaccaaacatgttggacgcatctttgtgtattattggtcttcttcttcttcttctttttttttctcttggttatcgctctgttgtggacagatagtgtggaactgttaacaataacatgatcagtatgtctttttaattaaagtgaacgtttggtatcaagaaaaaacaaaaagggcgaccgctctagaggatccaagcttacgtacgcgtgcg

SEQ ID NO: 118829 - DNA, 1410 bp, Arabidopsis thaliana
  unsure (1)..(1410): unsure at all n locations
attcaaagcggtggacactggaacacaacacaaacacaagatcaacgagaaaccaaacaacaacagcgaccatcgagagaatccactaagaaaacaaaatagattaaaaaggggtttctcaaagtttctcatcatatccattaaagtagcctcctttttgctttctccgtctctctctcttttgtccaatcaaaaagagtttgtgattcttctttatcgtctccttggagagatatgaatggcgatgagcttcctttcgagagtggtttcgaggtttacgctaagggaactcataagtcagagtttgactcgaatttgcttgatcctcgttctgatcctatttgggatgctataagagaagaagctaaacttgaggcagagaaagagcctattttgagtagcttcttgtatgctggtatcttagcacatgattgtttagagcaagctttagggtttgttctagccaaccgtctccaaaacccaaccttgttggcaacacaactcttggatatattttatggtgttatgatgcatgacaaaggtattcagagttcgattcgccatgatctccaggcatttaaagatcgtgatcctgcttgtctgtcgtatagttctgctattttacatctgaagggttatcatgcgttacaagcatatagggttgcgcataaactgtggaatgaagggaggaaactattagctcttgcattgcaaagccgaataagcgaggtttttggcattgacatacatccagcggcaagaattggggagggaatattgttggatcatggaactggagtggtcattggtgagaccgctgtgataggcaacggtgtctcgatcttacatggtgtgactttaggaggaaccggaaaggaaactggcgatcgccacccaaagataggtgaaggtgcattgcttggagcttgtgtgactatacttggtaacataagcataggtgctggagcaatggtagctgcaggttcacttgtgttaaaagacgttccttcgcatagtgtggtggctggaaatcctgcaaaactgatcagggtcatggaagagcaagacccgtctctagcaatgaaacacgatgctactaaagagttctttcgacatgtagctgatggttacaaaggggcacaatctaacggaccatcactttcagcaggagatacagagaaaggacacactaacagcacatcatgagatctttgtatgcaaatttcttaccatcataagctaattcttgtatgctcttgcttatcatcataagctaatctcagcatttcctcaataagttgtctaataaaagattttgttcactggaagttttcagtctcaacgcaaaagtcncagncaaacataaaagtgtaaatgattcttgcttgaaaatgaaatctnttntctcnn

SEQ ID NO: 118830 - DNA, 1340 bp, Arabidopsis thaliana
ctacgtcagggattcattccgatctgaaatctctctctagatttctctatttttcgaattttaaatgaacgatttgttttccagctcattctctcgcttccgcagcggagaaccatcccctcgccgagacgttgccggcggtggcgacggagttcagatggcgaatcccgcgggatcaaccggtggtgtgaacctcgacaagttcttcgaagatgttgaatctgtgaaagaagagctaaaggagctagatcggctcaacgaaacactctcttcatgtcacgagcagagcaagacgcttcacaatgctaaagccgttaaagatctccggtctaaaatggacggtgacgttggagtcgcgttgaagaaggcgaagatgattaaagttaaactcgaggcgctagatcgtgccaatgctgctaatcggagtctccctggctgtggacctggttcttcctccgatcgaaccaggacctctgtcctcaatggtctcaggaagaaattgatggactctatggatagtttcaaccgattgagggagcttatctcgtccgagtatagagaaactgtacagaggaggtacttcaccgtcaccggcgagaatccggatgaacgaaccctagatcgactgatttccactggagagagtgagagattcttgcagaaagcaatacaagaacaaggaagaggaagggtgttagacaccattaacgagattcaagaaaggcatgatgcggttaaagacattgagaagaatctcagggagcttcaccaggtgtttctagacatggccgtgctggtagagcaccagggagctcagcttgatgacatcgagagtcatgtgggtcgagctagctcctttatcagaggcggaactgaccagctacaaaccgctcgggtttaccagaagaacacgcgaaaatggacatgtattgccattattattctcatcatcatcataactgttgtggttcttgctgttttaaaaccgtggaacaacagcagtggcggcggcggcggtggtggtggtgggggtaccactggaggaagtcaaccaaattcagggacaccaccaaatcctcctcaggcaaggcgtctattgcgttgaagttgaagttgaagttgagtttcgttatttgcatatatattctttctttgaaaaaccttattatcaaaccagctttgtgttactactttctactgctggtttgttgttaatctcccgtttatttggtttttgtgaaagaatttaaaatgtgggttagatgagaaaattagtacaacattctcttgtatctatgtttgctatatgggttatatttacttgatgtgatttcagggtt

SEQ ID NO: 118831 - DNA, 514 bp, Arabidopsis thaliana
  unsure (1)..(514): unsure at all n locations
nnnnnnnnnnnnnnnnnnnnnnnnnnnnnnnnnnnnnnnnnnnnnnnnnnnnnnnnnnnnnnnnnnctaggttaacgtatgatgaccaattggtttccgaacactgattccaggcttcttagtatacagtgttgtggttgtgaagaacagtaacttcagattttgcgtttagactatgaaaatggatttgtatatcttatgttgtgctagttcctagctgttagagctggaattgatctctggatacttagacatgttgttacatgagtggtggtgcgacattgatactgtttttgttgcaggagagagtgagagattcttgcagaaagcaatacaagaacaaggaagaggaagggtgttagacaccattaacgagattcaagaaaggcatgatgcggttaaagacattgagaagaatctcagggagcttcaccaggtgtttctagacatggccgtgctggtagagcaccagggagctcagcttgatgacatcgagagtcatgtgggtcgagct

SEQ ID NO: 118832 - DNA, 582 bp, Arabidopsis thaliana
  unsure (1)..(582): unsure at all n locations
acnacaccaacccnacaccgccaatgtaactnacccagaagccnccaaggcggccaaaagagacggggtggggggactacttcctctcttacctcataatcctccttttggacttttcaataaaaccgcctacttgaatctctcattctctcgcttccgcagcggagaaccatcccctcgccgagacgttgccggcggtggcgacggagttcagatggcgaatcccgcgggatcaaccggtggtgtgaacctcgacaagttcttcgaagatgttgaatctgtgaaagaagagctaaaggagctagatcggctcaacgaaacactctcttcatgtcacgagcagagcaagacgcttcacaatgctaaagccgttaaagatctccggtctaaaatggacggtgacgttggagtcgcgttgaagaaggcgaagattgnttaaagttaaactcgaggcgctagatccgnctgatttcccacttgagagagttnnaganttntttcagaagcaantacaagnnccaagggatgaggaagggtttttagncacccttnaccgggnttnaaagaaggnatntccgggtt

SEQ ID NO: 118833 - DNA, 943 bp, Arabidopsis thaliana
cgagaaaaggaaaaaaaaaaatagaaagagaaaacgcttagtatctccggcgacttgaacccaaacctgaggatcaaattagggcacaaagccctctcggagagaagccatgggaagaaaaaaactagaaatcaagcgaattgagaacaaaagtagccgacaagtcaccttctccaaacgtcgcaacggtctcatcgagaaagctcgtcagctttctgttctctgtgacgcatccgtcgctcttctcgtcgtctccgcctccggcaagctctacagcttctcctccggcgataacctggtcaagatccttgatcgatatgggaaacagcatgctgatgatcttaaagccttggatcatcagtcaaaagctctgaactatggttcacactatgagctacttgaacttgtggatagcaagcttgtgggatcaaatgtcaaaaatgtgagtatcgatgctcttgttcaactggaggaacaccttgagactgccctctccgtgactagagccaagaagaccgaactcatgttgaagcttgttgagaatcttaaagaaaaggagaaaatgctgaaagaagagaaccaggttttggctagccagatggagaataatcatcatgtgggagcagaagctgagatggagatgtcacctgctggacaaatctccgacaatcttccggtgactctcccactacttaattagccaccttaaatcggcggttgaaatcaaaatccaaaacatatataattatgaagaaaaaaaaaataagatatgtaattattccgctgataagggcgagcgtttgtatatcttaatactctctctttggccaagagactttgtgtgtgatacttaagtagacggaactaagtcaatactatctgttttaagacaaaaggttgatgaactttgtaccttattcgtgtgagaaaaaaaaaaaaaaaa

SEQ ID NO: 118834 - DNA, 2027 bp, Arabidopsis thaliana
tcttcctcctgcaacctcttcttccctctctcagtttgatttgaccggagtatatggcggaagtacgatcacgatcacggagaacggagagcaattgggctacaatatgctgctcagctttctcgtgtctccagctctactgggcgcgtattgttctccgtaaatggttcaatgtttctgcttctgaatcagattatagtgctgatagtgacgatgactacgaagatagatcacaagaatttgatccaattagctctggagttaccaatcctcgtgttgatactgacggtgatgtgatatataggcctaagcttagaagacgaaattctgaaactttcaggatgcagtatatagataccaaagcaatcagaatctgtgctgggacatggaatgttggagggagagttccttcatctgacttggatattgatggttggctagacactcttgaacctgctgacatttatgttcttggtcttcaggaaatcgttcccttaaatgctggaaacatttttggtatggaggatgaccagcctgctttggaatgggagaacttgatacgtgatgccttaaaccgagttcaacctagaaagctgaagattaaaagtcacagtgatcccccttctccatcaaagtttaagcaacccgaagaggttccttatagtgtagaagatatgtttgttgaaaccagtcatgatgcttgcgatggaattagttcaatggataacaaactcaactctgttgaaagcacggacgtaccaatcgtaggcgaagattcacttactaatatagacgttttgggttctaccaatgacaatgcgtcttgcttaccaatacaagaatatctacagagacaattttcaacaccaaatacgccagaccgctctctgtcgatgcagattaatagtgattccaaaagggaagaaagatttagttacactgaaagggtaggtttgagctggccagagcctccattaaggctcctaaatcaatatgtttccgaaagacgtggttccttcaagtcagtgaatctgactatcacgaatctgagaaaaccatcgtatgttcggattgtgagcaaacagatggttggagtgtttctcaccatttgggttcggaggaacttgcgcaagcacataagcaacctttgtgtgtctactgttggtgttggtattatgggctacattggtaacaaggggtctgtatctgtgagcatgtcaatctatcaaacaccattttgtttcttgtgcacgcatctgtcatctggagaaaaggatacagatcaagagaaaagaaacgatgatgtacgtgaaatccacagaagaacgcagtttcttcctcattctttaaatgccaatgagcttccaagaagcatctgtaatcatgaaagaataatctggctgggagatctgaactatcggattaacttgtcgtatgagaagacacatgaacttattgcaagaaaggaatggcaaaggttggtaaagtacgaccagctttcaagagaaatgacaaaagggaacctattcgagggatggtcagagggaactttagattttgcaccaacatataaatacgaaatcgattcagaaaattacatcggagatgacccggaatccgggaaacgtagaccggcctggtgtgaccgcatcatttggaacggaaagggaatgaagctcttcaattacagaagaaacgagattaaactatcggatcaccggcctgtcacagccacgttcttggccgaggttgaggttttgtctccacggaaacttcaacatgcgcttacacttacatatgctgagattcaaggccttgacgcctaaacaaccacttccgtcagatcccatttgtgtatagtaatttaacgatttgtatgcccttcatgtataatagtgttcacgtacacagaaatattgtagatagaaatactgactgaaaacaaagaccgtatctttgatgatataaacattggcaattgagttgagatgtaaactatagtgttagtgtaaaaaaaaaaaaaaaaa

SEQ ID NO: 118835 - DNA, 2458 bp, Arabidopsis thaliana
  unsure (1)..(2458): unsure at all n locations
gttggttctttacgggcaacgaaggctgttaaataacagccatagcttttcttcgaaacgaacccaaaaaataatatcagagaattttcatcattacacctttttttttcttttgcctttgcctttgccttcacacgtcttcttgtttgtactctccactttttttttctttgtgtcctttcttcttgttcttgctctagttcgtgtctcttctttaactctctgtcactattataaatatcaaactctgacattttcttctgttcaaattctcctcgaaactcccccaaagaaacaaaatctttttctgagatctaagaagatgaaaacaagacgtgggaaacgtcctgagaggttttggccatcaattgtgatgaataaatggttaaacagaaaacctaaagtttacgattttagcgaagacgaaattgatacagaacctgagagcgaagacgatgtatgttcggtcaaagacgtcccaaatgttcactgtgtaactgatgaagacagccataatggtcgtcgaggtagcgaagctgatcacggcaataatatttcagatggtggtgtgagtgtgaggggtggttaccaaaggaaacaccggcgaggcaaatcggagactttgagagctcaatacattaacacaaaggatatcaaagtgacggtggctacatggaacgtcgccggaaaacgtccctccgatgatctcgagattgaagattggctctctactgataatccttcagatatttacattatcgggtttcaagaagtggttccattaaacgctggaaacgttttcggagcagaagatagaggtccgattccgaaatgggaatcgataattcgtagaacactaaacaaatccaataaagaatcagtttatgatcaatcgccaagctgcaacaacaacgctcttcatagatctcacagcgcgccgtcgtctcctatcttggcacaagaagcaaactccattatctctcatgtcatggtagagaatctagttgcggaccactcgctggatttagctacaaacgagttcatcgatgctgcaaccgctttaccgagccttgaaccacagcggaatccgaacatggactggccggaactagctttagatagcaaccctcagatagttggatcagaggggaagctaaggagggtatttagcagcaacgcgacgctaggatttaagctaccggagaatccatcaggagctagtagatttgcttcggaagcaagacaattgaaacgctcacggagctttgaaactttaaacttgagttggaatgatataaaagaagagattgataataggtcctcctcctcgtccgaagcggaagaagctgcaaaaatcatgcatgatgattcatcagacggagattcgtcttcccaggacgaagaggatggtgacaagatcagaaatagttatggattgccggaagatttggtggaggagtgtcggaaagtgaaagatagtcaaaagtatgtaaggatagtaagtaagcaaatggttgggatctatgtatcggtttggatccgacgacggttaagaagacatgtcaacaacctgaaagtctcaccggtcggagttggcttgatgggctacatgggaaacaagggatcagtgtcgattagcatgacgttgtatcaatcacggatgtgttttgtgtgctcacacttaacttccggccacaaagacggtgctgagcaacgccggaatgctgacgtgtacgaaatcatacgtaggactcgttttgcatcggtttttgacactgatcaaccaaggacgattccatgtcacgatcaagtattttggttcggagatttgaactaccgacttaatatgtcagacggtgaagtaagaaagcttgtctcacaaaaacgatgggatgagctcaagaacagtgatcagttgattagagaattaagaagagggcatgtttttgatggatggagagaaggaccgattaaattccctccaacctataaatacgaattcgattctgatcgttacgccggagaaaacttgagagaaggggagaagaagagagctcctgcttggtgtgataggatattatggttaggaaaaggaataagacaagaatgttataagagatcggagataagaatgtccgatcaccggccggtgacttcgatttttaacgttggagttgaagtgttcgatcaccggaaacttcaaagagctcttcacgttaataacgcagctgcttctgctgttcatcctgaaccttctttttgagtctaataagtgtcttataaaaagaataataatttatacgctaatttctgtaattttttttatacatgggatttgtttgggttttgattttgttattgttttgttccggttaatctataatctaaccaaatttattttttttacttgccaatacgagccttttaatttatctnnnnnnnnnnnnnnnnnnnnnnn

SEQ ID NO: 118836 - DNA, 1627 bp, Arabidopsis thaliana
  unsure (1)..(1627): unsure at all n locations
ggccgaataaaaaacatcattcggcaagttcatcgatccacgaaaaaaaagaaacgatgaggcttaatggggattcgggtccgggtcaggatgaacccggttcgagcgggtttcacggcggaatcagacgattcccgttagcagctcagccggagattatgagagctgctgagaaagacgatcaatacgcttctttcatccacgaagcttgccgcgatgccttccgacaccttttcggtacaagaatcgctcttgcttaccagaaggagatgaagctacttggacagatgctttactatgttcttacgacaggttcagggcaacaaactttaggagaggaatattgtgacattatacaggttgcagggccttatggactctctcctacaccagctagacgtgctttgttcatattgtaccagaccgcagttccatatatcgcagagagaattagcactcgagctgctacgcaagcagtcacctttgatgagtctgatgagttttttggtgatagtcatatccactcaccaagaatgatagatcttccatcttcatctcaagttgaaacttcaacttctgtagtatctaggttaaacgatagacttatgagatcgtggcaccgagctattcagcgatggcctgtggttcttcctgttgcccgcgaagtcttacaactggttttgcgtgccaatctgatgctcttctactttgaaggtttttattatcatatatcgaaacgtgcatccggggttcgttatgttttcataggaaagcaactgaatcagagacctagataccaaattcttggggttttccttctaatccaattgtgcatccttgctgctgagggcttgcgtcggagtaatttgtcatctatcactagctccattcagcaggcttctataggatcttatcaaacttcaggagggagaggtttacctgttttaaatgaagaggggaatttgataacttcggaagctgaaaagggaaactggtctacctccgattcaacttcaacggaggcagtagggaaatgcactctctgcttaagcacccgtcagcacccaacggccactccttgtggtcatgtgttttgttggagctgcattatggaatggtgcaacgagaagcaagaatgccctctttgtcgaacgcccaatacccattcaagtttggtttgtttgtatcattctgatttttaggcacaatgggatcaacaaagacaggcactgcagaaaggcaaagcagctaagacagtgacacctaaggacagtgcatctgctacaggaatggaatctgcttcggcttcagactttttgagtaagatcaacaagttatgagagaagacagaataaatatatttctgacatcattctcgatcccatgcctacctttttctctatgatatttagtgcagaaaccacagaggtttgttgttttacatttcattaaaaagagttggagatgttaggtggtctttcacattctatattacatataataatctcaattggagatctattacaagacaaaaaaaaaaaaaaaagganacaataccattttnnnnnnnnnnnnnnnnnnnnnnnnnnnnnnnnnnnnnnnnnnnnnnnnnnnnnnnnnnnnnnnn

SEQ ID NO: 118837 - DNA, 469 bp, Arabidopsis thaliana
gttaaagcataataaatatttcctttgaaatttgaagagcttgaaaatgagtacagccactttcgtagagattattcttgctatcggctggcctcctctcggcgtctttctcaaatttggttgcaaggttgagttttggatatgtttgattttgacgctgtttggttatcttcccggaatcctttacgctctttatatcatcaccaagtgatttttcctatctcctctgttctttcctcttgctcctcgtaagctctctttctccacgatctctccccctcaatgtatattaatctaatcatacaaacatacatgcgtagcttcgatgaatatagaaccagaatttaagatgaaatatctttgattaactatatatgttttccacaaagaaattacgaatatcttcttaataaaattaaataaaaagaaaaataaattaatgttaggtgaaccacatttttagtgagat

SEQ ID NO: 118838 - DNA, 461 bp, Arabidopsis thaliana
  unsure (1)..(461): unsure at all n locations
cagcataataaatattttctttgaaatttgaagagcttgaaaatgagtacagccactttcgtagagattattcttgctatcatcttgcctcctctcggcgtctttctcaaatttggttgcaaggttgagttttggatatgtttgattttgacgctgtttggttatcttcccggaatcctttacgctctttatatcatcaccaagtgatttttcctatctcctctgttctttcctcttgctcctcgaagaacagctgtttcgtcgtgctcttctccctttgggactgattcatcatttattttatgttatgagcaattgtattctcattgttgtatttgcattattgtatactttctgctgatatcaagaaaaaatcgttggtttatgtgaggaatttatttatttcgtttaatttgtacaattggtaaaatnttncaatgagcaggtttggattccggacc

SEQ ID NO: 118839 - DNA, 2652 bp, Arabidopsis thaliana
  unsure (1)..(2652): unsure at all n locations
cggacgcgtgggaaattttgactcgcaaaatctcaacgaagctcgaaaatggattcacgaaccaaggggaagacggtgatggaagttggtggcgatggcgttgccgtcataacactcatcaatcctcccgtcaattctctatccttcgacgtgctatacaatctcaaaagtaattacgaggaggccttgagcaggaatgatgttaaagctattgttattactggtgcaaaggggaggttctctggtggctttgatatatctggttttggtgaaatgcagaaggggaatgtcaaagagccaaaggctggttacatttcgattgacatcataaccgacttgcttgaagctgctaggaaaccgtctgtcgctgccattgatggacttgccttgggaggaggattagaacttgctatggcttgtcatgctaggatatcagctcctgctgcacagttaggcttgcctgagctgcaacttggtgttattcctggttttggaggaacgcagcgtctcccgcgtcttgttggtctcaccaaagcccttgaaatgattttgacatctaagccagttaaagctgaggaaggtcattctttgggtcttattgatgctgtggtgccacctgcggagttagtaaccactgctcgtcgctgggcccttgacatagtcgggaggagaaaaccatgggtatctagtgtttccaagactgataagttacctcctcttggagaggcaagggagatactgacgtttgccaaggcacagacactcaagcgtgcccccaatatgaaacaccctttaatgtgccttgacgctattgaagtaggtattgtttctggtccaagggctggtttagaaaaggaagctgaagtcgcctcacaagtggtaaaactggataccaccaaaggcttgatccacgtcttcttttctcagcgaggaactgctaaggttcctggagttactgatcgtgggttggtgccaaggaagattaagaaggtagccataattggaggcgggttgatgggatctggaatagctactgcgttgatcctaagtaactatccagtgattctcaaggaggtaaatgagaaattcctggaggctggaattggcagagttaaagctaatctccagagccgtgtaaggaagggaagcatgtctcaggaaaagtttgagaaaaccatgtctctccttaagggttctcttgattatgaaagctttagagatgtggacatggtcattgaggctgttattgagaatatatctttgaagcaacaaatttttgctgatctggagaaatactgtcctcagcattgtatccttgctagcaacacatcgaccattgacttgaacaaaattggggagcggaccaagtctcaggatcgaattgttggagcacattttttcagtccagcacatatcatgccgctacttgaaatagttcggaccaatcatacctctgcccaagtaattgttgacctgttagatgttgggaagaagattaagaaaacaccagttgtggtgggaaactgcacagggtttgcagtgaataggatgttcttcccttacacacaggcagctatgttccttgttgagtgtggagcagatccatatctaatcgacagggcaatcagcaagtttggaatgccaatgggtcccttcagactgtgtgacctggttggatttggtgtggcgattgcaaccgcaacgcagtttatcgagaacttctcagaacggacttacaaatcaatgattattccacttatgcaagaggacaagagagctggtgaagccactcgcaaaggtttctatttgtatgatgataagcgcaaggcgaaacctgatcctgagctaaagaaatatatcgaaaaggcaagaagcatatctggagtaaagcttgaccctaagttggcgaatttgtcggagaaggacattattgaaatgacattcttcccagtagtaaacgaggcgtgtagggtttttgctgaaggtatcgctgtcaaagcagcagaccttgacattgctggcataatgggaatgggttttccaccttacagaggaggaatcatgttctgggctgattccatcggatcgaaatacatttactcgaggctggatgagtggtcgaaggcttatggtgaattcttcaagccttgtgcttttttggctgagaggggatctaaaggagttcttttgagcgctcccgtgaaacaagccagctcacggttgtaaggtcagcgtttcagtggaaccatttctccattggtgcatcttctgtgttttctttatgttcacattttacttagccgggaagtgggtatcttttggcctcagaagcttttaaataaagtctcatctcagacatatgaatctgggaggaagtagggattaagttgtagtagcaataagatttgttttatgttgtgctttgtcatacaacaaagttgtcagatacatttgttgttataaagctatatggagtaagttctatgatttaatgataatgttgtcatttgacaaatcagttaaaaaaaaaaaaaaaaaaaccaaagggcgaccgctctagaggatccaagcttacgtacgcgtgcgtgcgacgtcatagtcttctatagtgcaccnnnnnnnnnnnnnnnnnnnnnnnnnnnnnnnnnnnnn

SEQ ID NO: 118840 - DNA, 798 bp, Arabidopsis thaliana
  unsure (1)..(798): unsure at all n locations
ctaatacgacttactataaggaaagctggtacgcctgcaggtaccggtccggaattcccgggtcggcccacgcgtccgtattgaaatgacattcttcccagtagtaaacgaggcgtgtagggtttttgctgaaggtatcgctgtcaaagcagcagaccttgacattgctggcataaggggaatgggttttccaccttacagatgaggaatcatggggggggctgattccatcggatcgaaatacatatactcgaggctggatgagtggtccaaggcttatggggaattcttcaagccttgggcttttttggctgaaaggggatctaaaggagttcttttgagcgctcccgtgaaacaagccagctcacggttgtaaggtcagcgtttcagtggaaccatttctccatgggggcatcttcggggttttctttaggttcccattttacttaaccgggaagtgggtatcttttggcctcaaaagcttttaaataaagtctcatctcagacatatgaatttgggaggaagtagggattaagttgtagtagcaataaaatttgttttaaggtgggctttgtcaaacaacaaagttgtcaaaaacctttgttgttataaagccaaaaggaggaaggtttaagatttaaagaaaaaggtgtcctttggccaaaannccccaaaaaaaaaaaaaaaaaaaaaaaaaaaaaaaaaaaaaaaaaaaaaagggcggccgcttcaaaagaatccaggctaacgaaggcgtccatgcgacgtcatagttcttctaatagtgtcacctaaat

SEQ ID NO: 118841 - DNA, 1634 bp, Arabidopsis thaliana
ggctattggttctctaacattgtcgttatgatgtccaacggtggtgattcgtcggaaattgtccgggaactggaagagttaaagctcaagaaggcagaaatagagcaccgtatttcgaccctcgaagctaagctccaggatacggcggcagttgaactgtacgacgccgtatccaacggtgactcttatctgacggcaccggagcttgaacatgggttatctccagatcagatttaccgttatagtcgtcaactgttacttccttcgtttgctgttgaagggcagtcaaatcttttgaagtcttcggtattagttattggagcaggaggactaggttcacctgccttattgtatcttgcagcatgtggtgttggtcagttgggtattatcgatcatgatgttgtagagctcaacaatatgcataggcagattatacacacagaagcatttattggacatcccaaagtgaaatctgctgctgctgcttgtcgctcgataaattcaacgatcaaagttgatgaatatgtggaagctcttcgcacttccaatgctttggaaatcctcagccaatatgatatcatagtcgatgcgactgataatcctccaagccgttacatgatcagtgattgttgtgtcttgttaggaaagcctttggtgtcgggtgctgcgcttggtatggaagggcagcttacggtttataatcataacggaggcccgtgttaccggtgtctttttcccactcctccacctacctcagcgtgccaaagatgttctgatagtggagttcttggagtagtgccaggtgttattggttgtctacaagcgctagagacaattaaactcgcaagcctggtgggagaaccactctctgaacggatgcttctttttgatgctttatcagcaaggatgcgcattgtcaagatcagaggcaggtcatcacagtgcaccgtgtgtggagacaattcatctttcaataagcaaacttttaaagattttgactatgaggacttcactcaatttcctttatttgcgggcccattgaacctgcttcctgcagaatcaagaattagcagcaaggagttcaaagaaattcttcaaaagaaggaacaacatgttctgctcgatgttcgaccttcacatcactataagattgtctctctcccggattcactcaacatccctcttgcaaacttagagactcggttaaacgagcttacttcagctcttaaagaaaagggaaatggccatgcgaacactgaatcttgcacaaatcctagtgtcttcgttgtatgcagacgcgggaatgattcacaaagagctgttcaatatcttcgtgagtcgggttttgattcggctaaggatataattggaggactggaagcttgggcagccaatgtcaaccccaacttccccacctactagagggaaacttttttgaaccaacttggttaaatccatagctcaagatgtttggagcagaaacatgtattattagttatgtcatgtaacaaaaccttatcaaatccatgttgaaacctgtctgaatcagagtgagttttagatgttatgataccatgtactcgtttgattcatatcattcatagattactgaaaaaaaaaaaaaaagcggccgc

SEQ ID NO: 118842 - DNA, 2222 bp, Arabidopsis thaliana
  unsure (1)..(2222): unsure at all n locations
agacttaacatttcatatagagaaacttgaaacaacaatctgagcaaagagcgttttatcttgttaattttggaatctccattacgatggaaggtgcggctgatcaaactacgaaagcgttatctgaattagccatggattcttctaccaccttgaatgctgctgagtctagcgctggtgatggagctggacctcggagtaaaaatgctttgaagaaggaacagaaaatgaagcagaaagaggaagagaagagacgaaaggacgaagagaaagctgaaaaggctaaacaagcacctaaagcaagctcccagaaggcagtggcagcagatgatgaagagatggatgcaacgcaatactatgagaacagattgaaatatcttgcggctgagaaggctaaaggggagaatccatatcctcacaagttcgctgtgtcaatgtcgattcctaaatacattgagacgtatggtagtttgaacaatggagatcatgttgaaaacgctgaggagtctttagctgggcggataatgagcaagcgatcttcctcttccaagctcttcttctatgatctacacggtgatgatttcaaggtccaagtcatggctgatgcaagtaagtcaggattggatgaagctgagttcttaaagctccattcgaatgctaagcgtggtgatattgttggagtcattgggtttccaggaaaaactaagaggggagaattgagtatctttccccgatcatttattcttctgtcccattgcctccacatgatgccgagaaaggctgataatgttaatgcaaagaaacctgaaatctgggttccaggtcaaacgagaaatcctgaagcatatgttctgaaagaccaggaatcaagatatcgtcagcgtcatcttgatatgattttgaacgtggaggttcgtcagatattcaggactagagctaaaatcatctcctatgtccgcagattcctcgacaacaaaaatttcttggaggtcgagacacctatgatgaacatgattgctggtggagcagctgctagaccttttgtgacacatcacaatgatctagatatgaggctgtacatgcgaatcgcacctgaactctatctcaagcaacttattgttggtggcttggaacgtgtttacgagataggaaagcaattcagaaacgagggtatagacctgacccacaatccggagttcaccacttgcgagttctatatggcttttgcagactacaatgacctgatggaaatgactgaggttatgttgagtggcatggttaaggaattaacaggtggttataaaatcaagtataatgctaatgggtatgacaaggatccaattgaaatcgactttactccaccattcaggaggattgagatgataggagagttagagaaggttgctaagctcaatataccaaaagacttggctagcgaagaagctaacaagtatctgattgatgcatgtgcgaggtttgatgtcaaatgccctcctcctcagacaacagctcgtctgttagataaacttgttggagaatttctggaaccgacatgtgtgaacccaactttcatcatcaaccagcccgagatcatgagtcctttggctaaatggcacagatcgaagagtggattgacagagagattcgagctgttcatcaacaaacatgaactctgcaatgcctacacggagctaaacgatcctgtggtacagcgccagcgttttgctgatcagctcaaggatcgacagtctggagacgatgaagcgatggctttagatgaaacattttgtaatgctttagaatatgggttggctcctacaggtggctggggattaggaatagacagactctctatgcttttgaccgactcactgaacatcaaggaggttcttttcttcccggcaatgaggccaccacaggaggagtcagcagccgctcaagctcctttaacagaagagaagaaataaggagtctacacaagttttctgactaagcttagtcaattcgctattatgcactctgttctcaagttacttgtaattgcagaccatatttttcaaaaaaaaaataccaattaattattatcaaaaacctttgtaagacttttttgcaattagtagtgatttcacttatattgaagggccttttttaggaaaaannnnnnnnnnnnnnnnnnnnnnnnnnnnnnnnnnnnnnnnnnnnnnnnnnnnnnnnnnnnnnnn

SEQ ID NO: 118843 - DNA, 651 bp, Arabidopsis thaliana
  unsure (1)..(651): unsure at all n locations
ttctgattgatgcatgtgcgaggtttgatgtcaaatgccctcctcctcagacaacagctcgtctgtnagataaacttgttggagaatttctggaaccgacatgtgtgaacccaactttcatcatcaaccagcccgagatcatgagtcctttggctaaatggcacagatcgaagagtggattgacagagagattcgagctgttcatcaacaaacatgaactctgcaatgcctacacggagctaaacgatcctgtggtacagcgccacggattttgctgatcagctcaaggatcgacagtctggagacgatgaagcgatggctttagatgaaacattttgtaatgctttagaatatgggttggctcctacaggtggctggggattaggaatagacagactctctatgcttttgaccggctcactgaccatcaaggagggtcttttcttcccggcaatgaggccaccacaggggggggcagcagccgctcaagctccctttaacagaagggggggaattaaggggcctcacaagttttctgccnagctnagccaattcgcaattatgaccctgtcccaagtacttgaattnngcccattttcaaaaaaaaacccctttttttccaaaccttgangcttttgnaatgggggtcct

SEQ ID NO: 118844 - DNA, 1018 bp, Arabidopsis thaliana
ggaaaaaatggcggagaaaaatgcgagcgcggtggacggtgcaattagggttagtggaatgcagttttcttacgatgttcaagatcctattttcttcgattttaatctcgatcttcccgctggatctcgttgcctcttggttggtgccaatggatctgggaaaactacgttattgaagattcttgctggaaaacatatggttggaggaaagaatgttgtacaagtgcttgatcgctcagcatttcatgatacagagcttgtttgtagtggtgatttgtcttacctaggaggatcatggagtaaaactgctggttctgctggtgatattccactccaaggagacttctcagcagaacatatgatatttggagttgaagggattgatcctttcagaagagagaagttgattgatcttcttgatatcaatcttcaatggcgtatgcataaggtttctgatgggcagagacgtcgagtgcaaatatgtatgggtctattacatccgttcaaggtattactactggatgaagttactgttgacctcgacgttgttgctaggatggatttgttggagttctttaaagaagaatgtgaacagagaggagctacaattgtatatgcaactcatattttcgacgggctcgagacatgggctagtcatttggcttacattaatggaggagagctgaaactctcggccaagttagatgagatcaaggatctcaaaacctcaccaaatctgctatctgttgttgaagcttggctccggtctgaaaccaaagttgagaaaaagacgaagaagaaacctgttgttacctctccatttatgtcgtctagacaaatggcatattaccgatgaatcttaacttgtttatgagatcagtaagaataagagcactgcttctacagatgcctttgttttctatggtacttcattgtttagaatccgataacttttatcacacatgaaagaatttctgtaaaaccacgtttttaattaaattactattttgccaaaaaa

SEQ ID NO: 118845 - DNA, 1217 bp, Arabidopsis thaliana
tctcgaccagataattttgtaacggattggatttttttgtgtcactatccgatttttatttttcctaactccgccgaatccgttcctctgtccttttctttctccactctctgtctctgtctcttcctcttttgattctccgatggaggctaagttactcaaacccgcgttttacaattccccaaacctcaatcttacgaattcttcaagactcatctcgcgattatcaatctggaacgataaatcaaaagttggactatcttctgggtctctcttcctccgtctctccgcagcttctccgatccgatactctagggggctactaagggtagatgagagtgagtatttgaaacttgaaagcattagacactctttgattcgtcaagaggacagtattatctttaatcttcttgaacgagctcagtatcgctacaacgctgatacttatgacgaggatgcctttactatggaagggtttcaaggatctttagttgagtttatggtcagagaaactgaaaagcttcacgcaaaggtggacaggtacaagagtcctgatgagcatccctttttcccacaatgcttgcctgaacctatccttcctcctattcaatacccacaggttttgcatcgttgcgccgaatcgataaacatcaacaagaaggtgtggaatatgtatttcaaacaccttctccccagactggtcaagccaggggatgacggtaattgtggttcagctgctctctgtgacacaatgtgtttgcagatactttcaaagagaattcacttgcgtaaatttgttgctgacgccaagtttcgtgaaaatcctgctgcctatgaaacagctatcaaagaacaagaccggacacagctgatgcaacttctaacgtacgaaacggttgaagaagtagtcaagaagagagttgagatcaaagccagaatttttggtcaagacataacgattaacgacccagaaactgaagctgatccttcctacaaaatacaacctagcttagttgcaaaactctatggagaaaggatcatgcccctcacaaaggaagtccaaattgagtacttgcttagaagactggattaatgttttcaaagaaggaagcataacatttgtattgatcctatttttccgaaaaccataatgttgacataagctgcgcaagctagcaagtcaagttgattttattaaaaaaccctgacgtagctcg

SEQ ID NO: 118846 - DNA, 1387 bp, Arabidopsis thaliana
gttcgttttgtttgtgttgtaagcatccctgttgtgcatttcgtttatccaggtgaattcttgcaaagccttgagcagctttcagatgataaagactttggtctctccttatagtggatttggatctcagaagttgaagtttgacagatcttctgagaaagtgaagacgagagcagtaagaatggagctcacaatcactcaacctgatgattggcatcttcatctccgtgacggtgatcttcttcatgctgttgttccccacagtgcgagtaattttaagagagcgattgtgatgccgaatctgaagcctcctgtcacctccactgcagctgccattatttaccggaaatttatcatgaaagctttgccatctgagagtagctttgatccacttatgacactttatttgactgacaaaactctacctgaagagatcaggcttgcaagggaaagtggtgtggtttatgcggtgaagctgtaccctgccggagcaacaaccaactctcaagatggtgtcacggatctctttggaaaatgcttaccggtactagaagagatggtcaaacaaaacatgcctttgctggttcatggggaggtcacagatccgagtatcgatgtctttgaccgcgagaaaatcttcattgagacagttctgcagcctctaatccaacgccttccgcagctgaaagtagtgatggaacacatcacaaccatggatgctgtgaattttgttgaatcttgcaaagaagggtctgtgggtgcaacagtcacaccacaacatctccttctcaacaggaacgcccttttccaaggtggattacaacctcacaactactgtcttcccgttctcaaaagagaaatacatagagaagccattgtcaaagctgtaactagtggaagcaagaagttcttcctcggcacagatagtgctccacatgaacggagtagaaaagaatcatcctgcggatgtgctggtatttacagcgctcccattgccttgtccctatacgccaaggtctttgatgaggcgggtgcgctggacaagttggaagctttcaccagtttcaatggacctgatttctatggccttccgagaaactcgtcaaagatcacactgaagaaatctccttggaaggttccagacgttttcaacttcccattcggagagatcgtccctatgtttgctggagaaacccttcaatggcaaccgttgaaataatgtggtgatttgaagttgtcaaattttttctcccaaatcagtgaactcgtgtaccttttggattgaattttcttacggctgagttatgccctgcattttttgaggaataaaagcaagatactgaccaataaaaaaaaaaaaaagtttgaatcagaattgaaacaaaaa

SEQ ID NO: 118847 - DNA, 895 bp, Arabidopsis thaliana
  unsure (1)..(895): unsure at all n locations
ccaaattctctccgtgtttccttctgcttcaggtgatattttaacaaagttcttagtacaatgggatctgttgatgctgctaatggaagtgggaagaaacctacagttatatttgttcttggtggtccaggaagtggaaaaggtacccagtgtgcttatattgttgaacattatggttacacacatctgagtgctggagatcttcttagagctgagattaaatcaggttctgaaaatggaactatgatccagaatatgattaaagaggggaagattgtaccttctgaggttactatcaagcttctacagaaagctattcaggaaaacgggaatgacaagttcctcattgatggtttccctcgtaatgaggaaaaccgagcagcatttgaaaaagttactgagattgaaccaaagtttgtcttattcttcgattgtcctgaggaagagatggagaagcgcctgttgggccgaaaccaggggagagaggatgacaatattgagactataaggaagcgctttaaggtgtttcttgaatctagcttaccagtgattcattactacgaagctaaggggaaagttaggaagattaatgctgcaaagcccattgaagctgtcttcgaggaggtgaaggcaattttttctcctgaagctgagaaggttgaagcctaggctgcagcatcgtaaaaagataccgaaaacccgataaattgatcaggtagagttgggtgtgttgcatctttcttacaggaagtctctgcttggccgtatttgtttttttgcttattaaccatatgattgattactgttattattatacacaatttacctattatataatttttgttttgtttcaatttttgtatttgatgggattnnnnnnnnnnnnnnnnnnnnn

SEQ ID NO: 118848 - DNA, 993 bp, Arabidopsis thaliana
  unsure (1)..(993): unsure at all n locations
gctctatacgactcactatagggaaagctggtacgcctgcaggtaccgggtccggaatttccggggtcgaccacgcgtncgattctcttccgtgtttcctttctgttcaagtgatattttaacaaagttcttagtccatgggatctgtggtgcttgtatggaagggggaagaaaccttcaggtatttttggtcttggggggtccaggaaggggaaaagggaccccaaggggcttattttggtggacattattggttccccccttttgattgcctgaaaatcttttaaaagttgaaataaattcaggttctgaaatgggacctttaatccaaattttgattaaagaaggggagaatggtcccttctgaggttcctatcaggcttttacagaaggctattcaggaaaacgggaatgacaagttcctcattgatggtttccctcgtaatgaggaaaaccgagcagcatttgaaaaagttactgagattgaaccaaagtttgtcttattcttcgattgtcctgaggaagagatggagaagcgcctgttgggccgaaaccaggggagagaggatgacaatattgagactataaggaagcgctttaaggtgtttcttgaatctagcttaccagtgattcattactacgaagctaaggggaaagttaggaagattaatgctgcaaagcccattgaagctgttttcgaggaggtgaaggccattttttttccttaaacttagaaggttaaactccaaaggtggggtaatcttttaggaggccaaaaggaaaaaaaaaaatcctaatgacccccttcaatggaaaaggctggaacttaaggctttttccaattttgatccaggaattatggatggtttggtagaattaagaataagccattggcaaccccttggatccaagtctatgtttttcgccaaaaaaaaaaaaaaaggcggcccgctctagaggatccaagcttacgtacgcgtgcatgcgacgtca

SEQ ID NO: 118849 - DNA, 409 bp, Arabidopsis thaliana
gctttgattgttgcattgagtcaaattggctaatcagaagattcttggtaaatgtagggaccataattgggccgtttccaaggttccgtttcccaccttgtgaagaggaagaaatggaattgcaaaacgtatcttcctaatataagcccatgcaaggaaagattaatatacataaagcgaatatttttgtacaagatcttaaaagaggaagatagagatgtaagctaggatttggaaataaaccgatcttgataacgatattggacttgccttgtgtactgtatatatttagttatttacatagcgactctccatctcgcatacataattactaattaaatatttacaaatctagtctattattgcttcattgttgtatatcccaaaatatatgatccaccttttgcgg

SEQ ID NO: 118850 - DNA, 468 bp, Arabidopsis thaliana
aaaagtttgatgttgcaggaagaatttcagctggctttattctgaaataggaaccggaggaatctcttcgctgatcggatatttgatgtatttgatgtgaagcgaaatggagtgatcgagtttggtgaatttgtccggtccttaggtgtcttccatccaagcgcgccggtccatgaaaaagtcaaatgtcattcttctagccccaaaaattgtttcatattcattctatgtgaatttacttgatattcttttcttaattggctaactaacaaagaattttctcatgaatttgcagttgctttcaagcttgtacgggtttacgacaaactggattcatcgagcgagaagaagtgagtccatttacggatactttgttttggtaccctccagattaaacagttttactccactaacgtttatgtgtgttgatctaacatgtatataccataatgaattacattctgatta

SEQ ID NO: 118851 - DNA, 1805 bp, Arabidopsis thaliana
  unsure (1)..(1805): unsure at all n locations
cgcgtcagagcaaacgcaatttagcctcttcataagagagaagtcctctcagagaaacggcagccacatcaaccaacccaaacatcgaaagagagacacttttctctctctctttctctatctccttccaatctctctagggttttcgttacaacggcgaaaagatgttcggtagaggaccctcgaagaagagcgacaacactaagttctacgagatcttaggtgttcctaagagcgcttcaccagaagatctcaagaaagcttacaaaaaagccgctatcaagaatcatcctgataagggtggagatcccgagaagtttaaggagttagcacaagcttatgaagtgcttagtgacccggagaagcgtgagatttatgaccagtatggagaggatgcactcaaggaaggaatgggtggtggaggaggtggacatgatccatttgatattttctcatccttctttggtggaggcccctttggaggtaataccagccggcaaaggaggcagaggcgtggtgaggatgttgttcatcccttgaaggtatctcttgaggatgtgtaccttggtacaatgaagaagctttcactttctaggaatgctctctgctctaagtgtaacggaaagggatcaaaatctggagcctccttgaaatgtggagggtgtcagggatctggtatgaaggtgtctattaggcagcttggacctggaatgatccagcagatgcagcatgcatgtaatgaatgcaaagggacaggtgagaccatcaatgatcgggacaggtgtccacaatgcaaaggagacaaggtcattcctgagaagaaggtgcttgaagtgaatgtggagaagggaatgcaacacagtcagaagatcacatttgaaggacaagcagatgaagcgcctgacactgtcactggagatatagtgtttgtccttcagcagaaagagcacccaaagttcaagagaaagggagaagacctctttgtggagcacacactttctctaaccgaagctttgtgtggcttccaatttgttctgactcacttggatggcagaagtcttctcattaaatctaatcctggggaggtcgtgaaacctgattcatacaaggcaataagcgatgaaggaatgccgatataccagaggccattcatgaagggtaagctctacatccacttcacagtggagttcccggactcgttgagcccagatcagaccaaagcactggaagctgttctacctaagccgtcaacagctcagttgagtgacatggagatagatgaatgcgaggagaccacgctccacgatgtcaacattgaggatgagatgaggaggaaggcacaagctcaaagagaggcttatgatgatgacgatgaagatgatgaccatccgggtggtgctcaaagggtgcaatgtgcccagcagtaagtaactccttagagagactttgacccacatgggtttgggctccaaccaatttgtctcttgctttttcattctaagtgtattggagtctttatgggagtttggtacggtttaagaatttgcccacttcggtggaacatcgaaacttgttttctctttttcctctgactttaaaaattaaggccttattacaattttgtgttttttctttatgattaaatttgtagtaatttaatgtctaagaacatatatactgtgtgttttctataaaaaaaaaaaaaaaaaattcaataaaaaaaaaacaaaagnnnnnnnnnnnnnnnnnnnnnnnnnnnnnnnnnnnnnnnnnnnnnnnnnnnnnnnnnnnnnnnnnnnnnnnnn

SEQ ID NO: 118852 - DNA, 1554 bp, Arabidopsis thaliana
aaagttttcaaaaccaaacaagttagcagccacaacattctccttctccttctcctcgtgaagacttttctctctgtttatttttttttagggttttcgtaagaacagagcaaaaaacatgtttggaagaggaccttcaaggaagagcgataacacaaagttctacgagatccttggtgttcctaagaccgcagcaccagaagatctcaagaaagcttataagaaagccgctatcaaaaaccatcctgataagggtggtgatcccgaaaagtttaaagagttagcacaggcttatgaagttttaagtgatcctgagaagcgtgagatctatgatcaatatggggaagatgcactcaaggaaggaatgggtggtggaggtggtggacacgatccatttgatatcttctcttccttctttggtagtggtggacacccattcggaagtcatagccggggaaggaggcagaggcgtggtgaagatgttgttcatcccttgaaggtttccttagaggatgtttatctcggaacaacaaagaagctctcactttctaggaaggctttgtgctcaaagtgtaacggcaagggttcaaagtctggagcttcaatgaaatgtggtggctgtcaaggttcgggaatgaagatctcgatcaggcagtttggacctggaatgatgcagcaggtgcagcatgcttgtaatgattccaaaggcacaggagagaccatcaatgatcgggacaggtgtccacaatgcaaaggagagaaggttgtctctgagaagaaggtgcttgaagtaaatgtggagaagggaatgcaacacaatcagaagatcacattcagtggacaagccgatgaagcgcctgatactgtcaccggagatatagtgtttgtcattcagcagaaggagcacccaaagttcaaaagaaagggtgaggatctctttgtggagcacaccatctctctaaccgaggccttgtgtggcttccagtttgtcttgacccatttggacaaaagacagcttctcatcaaatccaagcccggagaggtcgtcaaacctgattcatacaaggcgataagtgatgagggaatgccaatataccaaagtccgttcatgaagggtaagctatacattcacttcacggttgaattcccggaatcgctgagcccggatcagacaaaggccattgaagcagttttgccaaagccaaccaaggcagctataagcgatatggaaatagacgactgcgaagagacgactctgcatgatgtgaacattgaggatgagatgaaaaggaaggcgcaagctcaaagagaggcttatgatgacgatgaggaagatcacccaggcggtgctcagcgtgtgcaatgtgcccagcagtgatcaacatgcgcatcttagtgatctccaatatttgcttctgtcttttctccttttcattgtattatttttgggtctttttatagactttgccaattcagtgggaagaacctcgtcctaattcaaatccttgttacaccattttttttggtttgagaaataaacttgtagttcttgag

SEQ ID NO: 118853 - DNA, 797 bp, Arabidopsis thaliana
  unsure (1)..(797): unsure at all n locations
gctggnacgcctgcaggtaccggtccggttttcccggggggacccacgcgtccgtacggctgcgagaagacgacagaagggtacggctgcgagaagacgacagaagggtacggctgcgagaagacgacagcaaggcaaccaaacacataaaagagagatttaatacaaaagaaagagaaaaaagaaagatatggcaggactcatcaacaagatcggagacgcactccacattggaggaggcaacaaggaaggtgagcacaagaaggaagaggaacacaagaaacacgttgacgagcacaagagtggtgagcacaaagaaggtattgttgacaagatcaaagacaagatccacggtggtgaaggtaaaagccacgacggagaaggcaaaagccacgacggtgagaagaaaaagaagaaggacaagaaggagaagaaacatcatgatgatggtcaccacagcagcagcagtgacagcgacagcgattaaggtgaggaagtgaggaggatcgcttgaataaaacagatctggttctggctattattaattaatgttgctgtatgttcttatcatcttagagagaggttaaagacaggagaaccgtgcatctatctttgtttgtaatgtttctgttttcttgtcatgaaaattatgctcatgtatcttatctaaatcaaaaataataatttgatgaatcataacttgtaagacttgttcttttctttttgtaaaaaaaaaaaaaaaaaaaaacgattctcgcccgctctaaaggatccaagcttacgtacgcgtgcctgcg

SEQ ID NO: 118854 - DNA, 979 bp, Arabidopsis thaliana
  unsure (1)..(979): unsure at all n locations
cctggaatnatccagcagatgcagcatgcatgtaatgaatgcaaagggacaggtgagaccatcaatgatcgggacaggtgtccacaatgcaaaggagacaaggtcattcctgagaagaaggtgcttgaagtgaatgtggagaagggaatgcaacacagtcagaagatcacatttgaaggacaagcagatgaagcgcctgacactgtcactggagatatagtgtttgtccttcagcagaaagagcacccaaagttcaagaggaagggagaagncctctttgtggagcacacactttctctaaccgaagcttttgtgtggcttccaaattttgtcctgacttactttggatggcagaagtnttctccattaaatctaaattcctgggggagggtccgttgnaanccctgntttcatnncaaagggcaattangcggttnaaggggattnccgnttattnccnggggggccatttcattgaagggttaggcctctacatccacttcacagtggagttcccggactcgttgagcccagatcagaccaaagcactggaagctgttctacctaagccgtcaacagctcagttgagtgacatggagatagatgaatgcgaggagaccccgctccacgatgtcaacattgaggatgagatgaggagaaaggcacaagctcaaaaagaggcttatgatgatgccgataaagataatgcccatccgggtggtgctcaaagggtccaatgtgcccaccagtaagtacctccttaaaaagactttgacccacatgggtttgggctccaaccaatttgtctcttgctttttcattctaagtgtattgaagtctttatggaagtttggtccggtttaagaatttgcccacttcggtggaacatcgaaaaaaaaaaaaaaagnnnnnnnnnnnnnnnnnnnnnnnnnnnnnnnnnnnnnnnnnnnnnnnnnnnnnnnnnnnnnnnnnnnnnnnn

SEQ ID NO: 118855 - DNA, 517 bp, Arabidopsis thaliana
gcaggtaccggtctcggattcccggctcgacccacgcgtccgaccaaacacataaaagagagatttaatacaaaagaaagagaaaaaagaaagatatggcaggactcatcaacaagatcggagacgcactccacattggaggaggcaacaaggaaggtgagcacaagaaggaagaggaacacaagaaacacgttgacgagcacaagagtggtgagcacaaagatggtattgttgacaagatcaaagacaagatccacggtggtgaaggtaaaagccacgacggagaaggcaaaagccacgacggagtgagcaagaactacttggcaatcgtatgggacaagccgtggatgaaattcagaaatctcacttccttcgagcctgccaataatggtcgcttcctttaagcttttaacatgtaaccgctctttattaatattgcagaaacattaaaaacaaaggagttgaaataaacataagacaattattgtgtctattttatgtaaaaaaaaaaaaaaaa

SEQ ID NO: 118856 - DNA, 443 bp, Arabidopsis thaliana
cggacgcgtgggttacaaagcaaaatgactagtaaggtcgtcttccttcttctcctctctctcgtcgtcctcctcctccctctctacgcctctgcggctgcccgtgtcggtggttggagtcccatcagcaacgttacggaccctcaagtcgtagagatcggtgaattcgcggtctccgagtacaacaaacggagcgaatcgggactcaagttcgagacggttgttagcggcgagactcaggtcgtatctggtacaaattaccgtcttaaggtggcggctaatgacggcgacggagtgagcaagaactacttggcaatcgtatgggacaagccgtggatgaaattcagaaatctcacttccttcgagcctgccaataatgggcgcttcctttaagcttttaacatgtaaccgctctttattaatattgcagaaacattaaaaac

SEQ ID NO: 118857 - DNA, 558 bp, Arabidopsis thaliana
  unsure (1)..(558): unsure at all n locations
aacaaaagcaaacgcaatttagcctcttcataagagagaagtcctctcagagaaacggcagccacatcaaagcaaccaaacacataaaagagagatttaatacaaaagaaagagaaaaaagaaagatatggcaggactcatcaacaagatcggagacgcactccacattggaggaggcaacaaggaaggtgagcacaagaaggaagaggaacacaagaaacacgttgacgagcacaagagtggtgagcacaaagaaggtattgttgacaagatcaaagacaagatccacggtggtgaaggtaaaanccacgacggngaaggcaaaagccacgacggagtnagcaagaactacttggcaatcgtatgggncaagccgtggttgaatttcagaatttnactttcttcgngcctgccattattgttggtttccttttaggcttttaccatgttacccgtcntttattaatttggccggacctttaaaancaatggggttttgaataacctttnggccattttttnggttctttttttttntaaaaantaaaatnttttntt

SEQ ID NO: 118858 - DNA, 725 bp, Arabidopsis thaliana
  unsure (1)..(725): unsure at all n locations
gagggntncccggttctccccttaggaaccccaaataaaatttgggntttttttttaatnccttnccnatttccagggtaaaaaatttnaaatttttaccagtnccatatatccgctttttttttttnctnccatttttgtagttttgttttgccctctcttgtttttttctttacaagggtttttttnccgaggaccacaagaaccacgttgacgagcacaagagtgttgagcacaaagaaggtattgttgacaagatcaaagacaagatccacggtggtgaaggtaaaagccacgacggagaaggcaaaagccacgacggtgagaagaaaaagaagaaggacaagaaggagaagaaacatcatgatgatggtcaccacagcagcagcagtgacagcgacagcgattaaaggtgaggaagtgaggaggatcgcttgaataaaacagatctggttctggctattattaattaatgttgctggatgttcttatcatcttagagagaggttaaagacaggagaaccgtgcatctatctttgtttgttatgtttctgttttcctgtcatgaaaattatgctcatgtatcttatctaaatcaaaaataataatttgatgaatcatgacccgtaagacttgttatttaattttaacctggggtctatgtttctttagaagatccaaacttttatctgttggaaaaaaaaaaaaaaaaaaaaaaaagcgga

SEQ ID NO: 118859 - DNA, 1978 bp, Arabidopsis thaliana
  unsure (1)..(1978): unsure at all n locations
cgcccattttcacagatcaacgataaaccaaatcaaagcagctcctgggaacggttcgattcgagcagagagagagggagagagggagagagggagagagagttatggtttatgagtctctctgtgaacatggggacgaatgatctcgacatcgaagaagggactctggagatcggcatggagtatagaactgtttctggtgttgctggaccattggtcattcttgacaaagtgaagggtccaaagtaccaggagattgttaatattcgcttaggagatggatcaacgagacgtggtcaggttttggaagttgatggcgagaaagcagttgtgcaggtttttgaaggaacatctggaattgacaacaagtttacaaccgtgcaattcacaggagaggttttgaaaacacctgtatcattggacatgcttgggcgcatatttaacggttcaggaaagccgattgataatggccctcctattctgccagaagcataccttgatatttcaggaagttcaatcaaccccagtgaaagaacctatcctgaagagatgatacagacaggcatatcgaccatcgatgtcatgaattccattgctcgtggacagaagattccacttttctctgctgctggtcttccacataatgaaatagctgctcagatttgtcgtcaggctggtctagtcaagcgtttggaaaagactgttgatctacttgaggatcatggagaggacaattttgcaattgtgtttgcagctatgggtgtgaacatggagacagctcagttcttcaagcgagattttgaagaaaatggatcaatggagagagttactcttttcctgaacctggccaatgacccaaccattgagagaatcatcactcctcgaattgccctcacaacagctgaatatctggcttatgaatgtgggaaacacgtccttgttatattgacggatatgagttcttatgctgatgctcttcgtgaggtttccgctgcccgagaagaggttcccggaagacgtggatatccggggtatatgtatacagatcttgcaactatttatgaacgcgcgggacgtattgaaggaagaaagggttccattacccaaattcctatcctgactatgcccaatgacgatatcactcaccctactccggatcttactggttacattactgagggtcagatatatattgataggcaacttcacaacagacagatatacccacccattaacgtgcttccatcactttctcggctgatgaagagtgctattggtgaaggaatgactcgcaaagaccattctgatgtgtccaaccagctatacgcaaattatgcaatcggaaaagatgttcaagcgatgaaagctgttgttggagaagaagcactttcttcagaggatttgctttatctagagtttttggataagtttgagaggaagtttgtgatgcaaggagcttatgatacacgcaacatcttccagtcgctggacttagcttggacattgctccgtatcttcccacgggagcttcttcatcgtatccctgcaaagacacttgaccaattctacagccgcgactcaaccagttaaaatgaggtaatggaggttatcttatcgaaactcttttgagagaaaagtgtgaatttttgtgatgtgtattatttggtgcttattataaagaggaaaaacaaagaaaagctatatattctgtgtctccctatctggtgatattttttttggttctgcattgtgttccaaagtggaaataaaaatcgataaacgatgtcgtattgtagtactttccttttctttgtatgaatttgttaagattggtttataaatgggattataataagtatctttaaaaaaaaaaaaaaaaaaaggcgnnnnnnnnnnnnnnnnnnnnnnnnnnnnnnnnnnnnnnnnnnnnnnnnnnnnnnnnnnnnnnnnnnnnnnnnnnnnnnnnnnnnnnnnnnnn

SEQ ID NO: 118860 - DNA, 1027 bp, Arabidopsis thaliana
  unsure (1)..(1027): unsure at all n locations
ttgacgtcgcttgcacgcgtccgtaagctcggaattcggttcgaggttatatggacggatatgagttcttatgctgatgctcttcgagaggtttccgctgcccgagaagaggttcccggaagacgtggatatccaggttatatgtacactgatcttgcaactatttatgaacgtgctgggcgtatagaaggaagaaaaggttccatcacccaaattccaatcctgactatgcccaatgacgatatcactcaccctactcgggatcttactggttacattactgagggtcagatatatattgataggcaacttcacaacagacagatatacccacccattaacgtgcttccatcactttctcggctgatgaagagtgctattggtgaaggaatgactcgcaaagaccattctgatgtgtccaaccagctatacgcaaattatgcaatcggaaaagatgttcaagccatgaaagctgttgttggagaagaagctctgtcttccgaggatctgctgtatttagagtttctggataaatttgaaaggaagtttgtgatgcaaggcgcatacgatacaaggaacatcttccagtcgcttgacttggcatggacactgctccgtatcttcccacgtgagcttcttcaccgtattcctgccaaaacacttgatcaattctacagccgcgactccacaagctaaaccttttaaaacaagctctatgttgctccattcttatcttatttggaacttaaatcataccgagagaagacaaacaggattggttgcgtgaaaacaaaactcagagaattgtgaagttgggaattttcttttgtttttccatttgtataataaaggtttgtgtagagaaacttcgtacaaaatctatttataaaccacttcagctcctgtcttccaaactggtgaatcatgtcttttttgttgtggtgaaataataatctcttccagcacttttnnnnnnnnnnnnnnnnnnnnnnnnnnnnnnnnnnnnnnnnnnnnnnnnnnnnnnnnn

SEQ ID NO: 118861 - DNA, 822 bp, Arabidopsis thaliana
cacttggccccccctcgtggtcgacggtatcgatacgctagatatcgcattcgcggccgcgatccattacagagggatcgcggagtggtttggtttgatttgatttcgatctgtgacaatggtggagactagtatcgacatggaggaaggaactctcgagatcggaatggagtatagaactgtctccggagttgctggacctttggtcatccttgacaaagtgaagggtccaaagtaccaggagattgttaatattcgcttaggagatggatcaacgagacgtggtcaggtcttggaggttgatggggagaaagctgttgtccaggtttttgaaggaacatctgggattgacaacaagtttaccaccgtgcaattcacaggagatgcactgaaaacgcctgcgtcattggacatgcttgcccgcatatttcacggctcgcgaaagccaatatgataatggccctcctatgctcgccagaggcataccttgatatttctggaagttcaatcactccccagagaaagaacctaccctgaacagatgatactctccgagatctctaccattgatgtgatgaactccatcgctcgcggacagaacatatctctgttctctgacgctggactacctcatgctgagattgctgctcacattagccctcttgctggacttgtgaagcggttggaacacactgatgacttgatttatgaggatcatggaaaggacattatcgccattgtttttgcccctatgggtgtaaacatggagacacctcattttttgaggcgttatttttgatgaacatggtccgatggaaaggg

SEQ ID NO: 118862 - DNA, 582 bp, Arabidopsis thaliana
tatacgactttattagggaacgctggtacgcctgcaggtaccggtccggaatccccgggtcgacccacgcgtccggttcaatcaaccccagggaaagaccctaccctgaagagatgatacaaacggggatttctaccattgatgtcatgaactccattgctcgtggacagaagattcctcttttctctgctgctggtctacctcataatgagattgctgctcatttttgtcgtcaggctggacttgtgaagcggttggaaaagactgagaacttaattcaggaggatcatggagaggacaattttgcaattgtttttgcagctatgggtgtaaacatggagacagctcagtttttcaagcgtgattttgaagaaaatggatcgatggaaagggttacccttttcctgaacttggccaatgatccaaccattgagagaattatcactcctcgaattgccctaacaaccgctgaaatatttggcttatgaatgtggaaagcatgtgcttgttatattgacagacatgagttcttatgcagatgctcttcgtgaggtttctgctgctcaagaagaagttcctgga

SEQ ID NO: 118863 - DNA, 758 bp, Arabidopsis thaliana
  unsure (1)..(758): unsure at all n locations
ctctccctctctccctctctccctctctctctgctcgaatcgaaccgttcccaggagctgctttgatttggtttatcgttgatctgtgaaaatggggacgaatgatctcgacatcgaagaagggactctggagatcggcatggagtatagaactgtttctggtgttgctggaccattggtcattcttgacaaagtgaagggtccaaagtaccaggagattgttaatattcgcttaggagatggatcaacgagacgtggtcaggttttggaagttgatggcgagaaagcagttgtgcaggtttttgaaggaacatctggaattgacaacaagtttacaaccgtgcaattcacaggagaggttttgaaaacacctgtatcattggacatgcttgggcgcatatttaacggttcaggaaagccgattgataatggccctcctattcttgccagaggcataccttgatatttctggaagttcaatcaaccccagtgaaagaacctacccttgaagaggttgatacagacgggcatttcgacccatttgatgtcaatgaactcccatttnntcgtnggncaagaagnattccncnttttcttttntngctgggcttcccnnataattggggttgctgctcaaatttttcggcaaggctttggcctttttaagggggttggaaaangctttggnnctttttttaggggggtccttgggggggcanttttcaatttttttttnacgctttnggggaaaattnggg

SEQ ID NO: 118864 - DNA, 493 bp, Arabidopsis thaliana
ctctgcttgaatccattacagaggtacgtgatttcttcatcagatctttcctcacagttcgattacgtcttcttcctcagactttgattgttggatcgaattttcaattgatttttgatatgttcgcgttctgactctttttccagggattgtggagtggtttggtttgatttgatttcgatctgtgacaatggtggagactagtatcgacatggaggaaggaactctcgagatcggaatggagtatagaactgtctccggagttgctggacctttggtcatccttgacaaagtgaagggtccaaagtaccaggagattgttaatattcgcttaggagatggatcaacgagacgtggtcaggtcttggaggttgatggggagaaagctgttgtccaggtttttgaaggaacatctgagattgacatcatgttaccaccgtgcatttaagtagaggactgtattccctttgtattggacattcttgtcatatat

SEQ ID NO: 118865 - DNA, 462 bp, Arabidopsis thaliana
cccacgcgtccgcggacgcgtgggcggacgcgtgggcggacgcgcagagagccacaccaccttcatcaaacttcttcataacaaatcacatttctctctcttctctgcttgaatccattacagagggattgtggagtggtttggtttgatttgatttcgatctgtgacaatggtggagactagtatcgacatggaggaaggaactctcgagatcggaatggagtatagaactgtctccggagttgctggacctttggtcatccttgacaaagtgaagggtccaaagtaccaggagattgttaatattcgcttaggagatggatcaacgagacgtggtcaggtcttggaggttgatggggagaaagctgttgtccaggtttttgaaggaacatctgggattgacaacaagtttaccaccgtgcaattcacaggagaggtactgaaaacgcctgtgtcattgga

SEQ ID NO: 118866 - DNA, 2056 bp, Arabidopsis thaliana
  unsure (1)..(2056): unsure at all n locations
atgatactgccagctactcnnnnnnnnnnnnnnnnnnnnnnnnnnnnnnnnnnnnnnnnnnnnnnnnnnnnnnnnnnnnnnnnccacgcgtgcgcggacgcgtgggcggacgcgtgggcggacgcgtgggcggacgcgtgggaaaaatcgtctctcgcttgagctgcgaagatgcaagcagtaaaaagatccaggagacatgttgaagaagagccaacaatggtagaacctaaaaccaagtacgatcgtcagctcaggatttggggggaggtaggtcaagcggccttggaagaagcgagtatctgtttactcaattgtggccctactggttccgaggctttgaagaatctcgtacttggtggtgttggtagcatcaccgttgttgatggatctaaggttcaatttggtgaccttgggaacaatttcatggtcgatgcgaagagtgttggccaatcaaaagccaaatctgtttgtgcgtttctccaagagcttaatgattctgttaacgccaagtttattgaggagaatccagacacgttgattactactaacccatctttcttctctcagttcactctcgttatagccactcagctggtggaagattcaatgttgaaacttgatagaatctgtcgagatgcaaacgttaagttggttttggttcgctcttatggccttgctgggtttgttcgcatctctgtaaaggagcaccccataattgactcaaaacctgatcattttcttgacgacctccgcctgaataatccatggcctgaactcaagagttttgtggagaccattgatctgaatgtatcagagccggccgctgcacataagcacataccttacgtcgtcattcttgtaaagatggctgaggagtgggctcaatcccatagtggtaatcttccctcaaccagggaagagaaaaaagagtttaaggatttggttaagtccaagatggtatctacggatgaagataactacaaagaagccattgaagccgctttcaaagtttttgctcctcgaggaatcagctcagaggttcaaaaattaattaatgatagttgtgctgaagtgaattcaaactcctcagctttttgggtgatggtagcggctctgaaggagtttgttttaaatgaaggtggtggagaggcaccccttgaaggttctataccagatatgacctcttcaacagaacactatatcaatttgcagaaaatctatttagccaaagccgagggctgattttcttgtcattgaggaacgagttaaaaacattttaaagaaaatcggtcgagatccgagccagcatcccaaaaccaacaatcaggagcttctgcaagaatgcaaggaaacttaaattgtgcagatatcgtatggtagaggacgagttcagaaatccttctgtaactgaaattcaaaagtatttagcggacgaggattacagtggtgcaatgggattttatattcttcttagagctgcggacagatttgctgccaactataacaagtttcctgggcagtttgatggaggaatggatgaggacatttctcgattaaaaactactgccttgagtcttcttaccgacttgggctgtaacggctcagtactcccagatgaccttatccatgagatgtgtcgctttggtgcctcagagattcatgtggtttctgcctttgttggaggaatcgcatctcaagaagtcatcaagcttgtcacaaagcagtttgttccgatgttggggacttacatcttcaatggcattgatcacaagtctcagttattgaaattgtagaagatctttccttaacacattggcttgaaacagagagaaagagctctatcatatattattcttctgattaaaagataatctttttgctactactgagaaacaaaattttcaatgacagttcagctgagaccatccgactcagaatcttcgaaaaaaaaaaaaaaaggnnnnnnnnnnnnnnnnnnnnnnnnnnnnnnnnnnnnnnnnnnnnnnnnnnnnnnnnnnnnnnnnnnaacgaacgcaaaccaccggccgggggc

SEQ ID NO: 118867 - DNA, 4161 bp, Arabidopsis thaliana
gtgaagtattgaatgagaagaggcaattaaaaatctcccgtgactctcgtctccccatctcgctctctccctctgcccaaatttctggggcaaatttgttcatcagatctactacaatctctctttttcttcgggtatggagggccaacgaggcagcaattcttcgttgagctctggcaatggcaccgaagtcgccaccgacgtttcttcttgcttctatgttcccaatccctctggaaccgatttcgatgccgagtcgtcttctcttcctcctctctccccagctcctcaagtggcattgtcaattcctgcggagcttgccgccgccattcccctcatcgatcgcttccaggttgaagcttttctgcggctaatgcagaaacaaatccagtctgctgggaagcgtggcttcttctattccaaaaagtcctctggctccaatgtccgcgagcgcttcacatttgaggatatgctttgctttcaaaagattccaattccaatccccacatctctcctcaagattaacagcgatctcgtcagccgtgctaccaagttgtttcatctcatcttaaaatatatgggtgttgattcatctgatcgatctacgcctcccagtttagatgaacgcattgacctcgttggaaagctcttcaaaaaaactttgaagcgtgttgaactcagggacgaactttttgcccaaatctccaaacagactagacataatcctgacaggcaatacttgatcaaagcttgggaattgatgtacttatgtgcctcctctatgcctcctagcaaagatatcggtggatatctatctgagtatattcataatgtcgcacacgatgcaactattgaaccggatgctcaggttcttgctgttaacactttgaaagctttaaagcgctctatcaaagctggtcctaggcacaccacacctggtcgtgaagaaattgaagcccttttgaccggtagaaagctcacaaccattgtcttctttctcgatgaaacttttgaagaaatttcatatgacatggctaccacagtgtctgatgctgttgaggtagctggaacaattaaactatcagctttctctagctttagtttgtttgaatgtcgtaaagttgtttcaagttctaaatcatctgatcccggaaatgaggaatatataggattggatgataacaagtatattggagatctcctcgcagaatttaaagctattaaagatcgaaataaaggagagatactacactgcaaactggtatttaaaaaaaaattattccgagagtctgatgaagctgtaacagatctgatgtttgtgcaactttcgtatgttcagctgcaacatgactatttgctaggaaactatcctgttgggaggggcgatgctgcacagctttgtgccttgcaaattcttgttgggattgggtttgtcaatagtccagagtcatgcattgattggacatcacttcttgagcggtttttgccaagacaaatagcaataacccgagcaaagcgtgaatgggaattggatatccttgctcgctaccgttcaatggagaacgtgaccaaagatgatgcaagacaacaatttctacggatactgaaggcactgccatacgggaattcagttttttttagcgtacgcaagatagatgatccgatcggtcttttacctgggcgaatcattttgggtatcaacaaacgtggggttcacttttttcgaccggttcctaaagaatatctgcactctgctgaactacgtgacatcatgcaatttggcagcagtaacactgctgtctttttcaaaatgagagtcgctggtgttcttcacatatttcagttcgagacaaaacagggagaagaaatttgtgttgctttgcaaacacatataaatgatgtcatgttgcgtcgttactccaaagctcgatctgctgccaatagcttggttaatggagatatatcttgtagttctaagccgcaaaattttgaagtgtatgaaaaacgtttgcaagatttgtctaaggcttatgaagagtcccaaaagaagattgagaagttgatggatgaacaacaagagaaaaatcagcaagaagttactctgcgtgaagagttagaagctatacacaatggtttggagcttgaaaggagaaaattgttggaggttactttagaccgagataaacttaggtcattgtgtgacgagaagggaacaactattcaatccttgatgtctgaactgcgaggaatggaagcaaggttggcaaagtcgggcaacacaaaatcaagtaaagagacaaaatcagaattagccgaaatgaataatcagatattatacaagatccaaaaggagttagaagttcgaaataaggaattgcatgtcgcagttgataattcaaagaggttgttgagtgaaaacaagatattggagcaaaatctcaatattgaaaagaagaaaaaagaggaggttgaaattcatcaaaagagatatgaacaagaaaaaaaggtgttaaagcttcgagtttctgaacttgaaaataagcttgaagtacttgctcaagacttggatagtgctgagtctacgattgaaagtaagaattctgacatgctgctgttgcaaaataacttgaaagaacttgaggagttaagagaaatgaaagaggacattgacagaaaaaatgagcaaacagctgccattttgaaaatgcaaggagcccaacttgctgagctagaaatactttataaggaagaacaagttttaaggaaaagatactataataccatagaagatatgaaagggaagattagagtttattgtcgaataagacctctaaatgaaaaagagagttcagagagggaaaaacaaatgctgacaactgtggatgagtttactgttgaacatccatggaaagacgacaaaagaaagcaacacatatatgatcgcgtatttgacatgcgtgctagtcaagatgatatctttgaagacacaaagtatttggtacagtcggctgtagatgggtataacgtttgcatctttgcatatggtcaaactggttctggaaaaacttccactatatatgggcatgagagcaatcctggactcacacctcgagctacaaaggaactgttcaacatattaaagcgagatagcaagagattttcattttctctaaaggcatatatggtggaactttatcaagacacacttgttgaccttttgttaccaaaaagtgcaagacgcttgaaactagagattaaaaaagattcaacgggaatggtctttgtagagaatgtgacaactattcctatatcaactttggaggaactgcgaatgattcttgaacggggatcggaacgacgacatgtttctggaacaaatatgaatgaagaaagctcaagatctcacctcatattatcagttgttattgaaagtattgatcttcaaacccagtctgctgcgaggggcaagctgagttttgtggatcttgctggttctgagagagttaaaaagtcgggctcagctggttgtcaactcaaagaagctcaaagtatcaacaaatcactttctgcattaggtgatgttattggtgctttatcttctggcaaccagcatattccttataggaatcacaagctaacgatgttgatgagcgattcattgggcggcaatgccaagacgttaatgtttgttaatgtgtctccagccgaatcaaatttggacgagacgtacaattctcttctatatgcatcgagagtgagaacgatcgtgaatgatcccagcaaacatatatcatccaaagagatggtgcgattgaagaagttggtagcatactggaaagagcaagccggtaaaaaaggtgaggaagaagacttggtggatattgaggaagatcgtacacgaaaagatgaggcagatagttgaagaaagctgacatgaaattcgtctaggtgaaattgagactatagtatcactggttttcaccattctttttgtaggaagttcctgctttatagtagagtttctatcgaagagtagtcctatatgtctcaaactttctctcttttgatgagatcttcattacaagaaatgaaaaaaaaaaaaaaagggcggcccgtttaaaagaatccaggctaaggaaggggggcatgcaaggtcaagtt

SEQ ID NO: 118868 - DNA, 738 bp, Arabidopsis thaliana
atgatacttcaggtctctacgactcacttatggaaagctggtccgcctgcaggtaccggtccggaattcccgggtcgacctaattctcgagctcgaagaaagagacgaaaatggcactgagaaatgcaattcttcgtcacctgagggttccggtgcaaaccctaggattgaatcagtctaaaattgggttccttggtacgatccggtcattttcttcgcacgatgatcatcttagcagagaagctgtcgtcgatagagtactcgatgttgtcaagagcttccccaaagtcgatccctctaaggtgactcctgaggttcatttccaaaacgatttgggattagatagtttggacacagtggagatagtgatggctattgaagaggaattcaagctggaaattccagacaaagaagctgacaagatcgattcttgctctctcgccattgaatacgtttacaatcatccaatgtctagctaatcgctgtgtgctctctcatggtttctccttcctttttcttgtatgaggttcttctctctttgataatgccataatgggatttgcaaaaaaatcacttttatttggagagcattgttattgactcttttaacggttccagtttcttaaaaagaaaacctttttgcttgaaaaaaaaaaaaaaaaaagggcgaccgctctagaggatccaagcttacgtacgcgtgcgtgcgacgtcataactcttctatagttgtaccta

SEQ ID NO: 118869 - DNA, 907 bp, Arabidopsis thaliana
  unsure (1)..(907): unsure at all n locations
nnnnnnnnnnnnnnnnnnnnnnnnnnnnnnnnnnnnnnnnnnnnnnnnnnnnnnnnnnnnnnnnnnnnnnnnnccacgcgtccgcggacgcgtgggcaaagacactgaataaatccttaaaacaaacttttgaaagaaaaaaatggcttcaaagaactcagcctctattgctcttttcttcgcccttaacatcatattcttcaccttaaccgctgcaacagattgtggttgcaacccaagtcctaagcacaagcctgtcccaagtcctaaacccaagccggtcccaagtcccaaacccaagccggtcccaagtccttcagtaccaagtccttcggtcccaagtcctaaccctaggccggtcacgcctccgagaacccctggctcatctggaaactgtcctatcgatgctctcagactcggtgtatgtgcgaacgttttaagcagtctactcaacattcaattgggtcagccatcagctcaaccatgttgctcgctcatccaaggtttggttgacctcgacgctgccatttgtctttgcactgcgcttagggctaacgttcttggtatcaaccttaacgtcccgatatctctcagtgttcttctcaacgtttgtaacagaaaggttccgtctggcttccaatgtgcttgaaggatatcagctatgcatacgatgtgatgcccgtgcacaaatatcttcttcgaaattgttacagtatgaataaatgcatgtaagctatagagtttatgttttaaattttgaatttgttaaagtgaaataaccaatgtgtgagagtgagactttcttagtttttttttttccgtcaacgttcctgtattccggtcttgtatgcttttgtagcaatctattactattttcaacccgtttaattaaagagattttgtactc

SEQ ID NO: 118870 - DNA, 874 bp, Arabidopsis thaliana
gaagacgacagaaggggattcaataacccttacaacaccgaatataactttgaaaaaaaaaacaaatggcttcaaagaactcagcctctcttgctcttttctttgcgctcaacatcctctttttcaccttaaccgttgcaacaaattgcaactgcaagccaagtcctaaaccaaagccagtcccaagtcctaagcccaagccggtccaatgtcctcctccaccccgtccttcagtcccaagtcctaatcctaggccggtcacacctccacgcacccctggttcatccggaaacagctgtcctattgatgctctcaagctcggtgtatgtgcaaatgtcttaagcagtctactcaacatccagttgggacagccatcctctcaacaatgttgctcgctcatccaaggtttggttgacgtcgacgctgcgatttgtctatgcactgctctgagggctaacgttcttggtatcaaccttaacgttccgatatctctcagcgttcttctcaacgtttgtaacagaaagcttccatctggtttccaatgtgcttgagcaatatccattatgcatacgatgcgatgccagtgcacaatatcgtcttcgaaatttattatagtttgaataaatgcatgtaaggtatagtttatgtatcaatcttaatttgttaaagagaaaaaataaatgtgtgagatttttatagtttttcattttgtttgtaaacgttgtcccccgccttccaagcttttgtatgcttccggtagcaatccatttccatttccatttcaacggaatttaaatggggcggccgctctagaggatcccagcttacgtacgggtgcatgcgacgtcaaagttttctataagtgtcaaaaaaa

SEQ ID NO: 118871 - DNA, 556 bp, Arabidopsis thaliana
  unsure (1)..(556): unsure at all n locations
atgttgctcgctcatccaaggtttggttgacgtcgacgctgcgatttgtttatgcactgctttgagggctaacgtttttggtatcaaccttaacgttccgatatttttcagggtttttttcaacgtttgtaacagaaagcttccatttggtttccaatggggttgagcaatatccattatgcatacgatgcgatgccagtgcccaatacgcgtcttcgaaatttattatagtttgaataaatgcatgtaagggatagtttatggatcaatcttaatttgttaaagagaaaaaataaaggggtgagatttttatagtttttcattttgtttgtaaacgttgtccccccccttccaagctttgtatgcttcgggagcaatctatttctatttctatttcaacgaaattttaatgaaagaaatttcgtttgcaaaaaaaaaaaaaaaaaannnnnnnnnnnnnnnnnnnnnnnnnnnnnnnnnnnnnnnnnnnnnnnnnnnnnnnnnnnnnnnnnnnnnnnnnnnnnnnnnnnnnnnnnnnnnnnnnnnnnnnnnnnnn

SEQ ID NO: 118872 - DNA, 2520 bp, Arabidopsis thaliana
cccacgcgtccggacaagatgagataaatcattcatctcatttcttcaactggctttgcttctttctttcttcttcctcaattataattttttcacaggtttgagatcttatcatagagttttgttttaagtttgtgagatggaattagtgtctggaaaagtagttccaggttgctccaacgcaggcaatcctttccatgagtgtactgctatctgttttgagagagtaaactctccagatgtccacaagaaggagaagaaactctttgggtttggtaagagaactcccagcagggatcagactcctccagctagtccggctcgtggaagcagatcacctctggccagctatttcgccaagaagaaggttgagtcgtcagcagagagttcaccatcctcttatgatcacaccaatggcaacttcttaagtcgcctttccccgctacagggacgcaagatcgagccttcaagcaatgtcgattcgctgccagtttcgccttctctcgctctatactcagggggagactactttgcaaggagggctgatcagcgtggagatgaggatgatgatgtatcaccaaggccttttggaactcagcctaagacccctgaacaccctcttaggacgcctcagcataggccacgcacaccgcaacaccgctctgcacaccaagaggacgctttttcactagaaactaggccgaggactcctgaacgccgatccaatacctctgatactaggccaaggacacccatacatgagtctgcggcaacaggaagaaggcctcaaacaccagaaactagaccaaggactcctgatcaccgatatgccacctatgataataggccgaggacacccatacatgagtctgctgcaacagaaaggaggccccaaacaccagaaactaggccgaggactcctgaacaccgatctgccatccctgacactaggccgaggacacctatacatgagtctgctgcaacaggaaggaggcctcaaacaccagaaactaggccgaggactgcacaacgtagagggaggtcacctgagttcatggaaagatcccccggaccaaggtccaagaccccagagcctcaacctacttacttcgaaccatcctcaaggactccaaaacagcggtccaagacgcctgaacccagccctaggattccccaaactcagcccatgtcccacagatcccttgacaacgctgctcttaaaatgcctcggacagttgaaactaggcctaggacgccagaacaccagccgaggactgtggaaacaaagccaagaatacatgaaagtaggcccaaaactgcagtctatggaggaaggtcacctgatcacagggaaaaaatctcacaagaaatgggtcaaagatcatctcatgcctacaattatcttgggagcaaagctgagtcagtgtacattgagaagaacgaggaatcagttctactctttccagaactgattttgtcacctcaagaaaggccaccctctagacttattacgcttaatcaccgaggatatgaaacacctaacaaacagaaagaacattgtgatgaaatggatgattctgcaagcacagacgacgataaattttcatttgtggatgatcacgacgaacacactgtttcaatttacgctgaaaccacatcgaaatctggaagcagcgaacaagaggaacagcataaagcaaacaacgagccaccggagctgccagatgaatcacagagcttcagtctcgctgagatctctcgtatgaaaggaataattaccaataatgaaataagggacgtgatgcagtctattctatctgagtcttacgtttctgtgggacagtacaaggtcagagctagcgtctcgaccactctacaacacatactccagaagcacggtgacattgcgtctggttccaaactacaatcgcttgctacacgatcctactacctcgacatgcttgcctcggtggtattcgaactccaaacaactcccctgaagtatctcaaggagagccgcgtggtggaaatggtagcgattgttaaagacattgagtccgtgaaaatcaaagcaggttggctcaagcctgtcctggaggagatcgtagaggcggtaaaacactacgatgaacacaagatgagcgtagtggagaaagaggtgtgggagagagatgtgttacttgcgaaacaagaaactgagaaacaggtgaaagaactgggagagaaggagaagaagataaaggagtggagagctaaaatgacggagatggctgcgaagttaggggatcttgatatgaaaagagctcgtctccacaaaagcttcacatttctgagctccaaggtcgaccaagtttccaagggaaaccccttcttcaaggcatcttgtaaccaaccaattagtctggatattcttttgttcatcttgttacccgcaaaataagcgtttgtgaacggtttgctttgggaaagttttatgtattatcaaattttcgtttctaaaaaaactcaagtcttaatatc

SEQ ID NO: 118873 - DNA, 2431 bp, Arabidopsis thaliana
gatctacaaccctgttaccgcccaatttcgcagtcactggttcattcctttctcttcttcctcttccactctctctctagacccaagttttgaaaccatgaaagaccacgatttcgacggcgacaaagggcttgccaagggatttctagagaatttcgccgacgccaatggcaggtctaagtacatggagattctccaagaggtttcaaatcgtaagattcgagctattcaagtcgatcttgatgacttattcaattataaggatgaaagtgaggagtttcttggacggttgacggaaaacactcgccgatatgtttcgatattctccgctgctgttgacgagttgttacccgaaccaacggaagcgtttccagatgatgatcatgatattctcatgactcagagagcagatgatgggactgataatccagatgtttctgatcctcatcagcagattccttctgagattaaaagatattatgaggtttattttaaagctccttcaaagggaaggccatctaccatcagggaggttaaggcttcacacattgggcaacttgttaggatatctggtattgtgacccgttgttccgatgtcaagccattgatggcggttgctgtttacacatgcgaagattgtggtcatgagatttaccaggaagttacatctagagtcttcatgcctttgtttaagtgtccctctagtcgctgtcgtcttaatagtaaagccgggaatcctattcttcagctcagagcatcaaagtttctaaagtttcaggaggccaagatgcaagagttggctgagcacgttcccaaagggcatattccgaggtctatgactgttcatctaagaggagagttgacaagaaaggtatcaccaggtgatgttgttgaattctcagggatttttcttcccattccttacactgggtttaaggcacttcgagctggcttagtagcagacacctatctggaagcaacgtctgttactcatttcaagaagaaatatgaggaatatgagtttcagaaagatgaggaagaacagattgcacgtttggctgaggatggtgatatatacaataagctgtcgcgatccctggcccctgagatttatggacatgaagatattaagaaagctttgcttctccttcttgtgggtgctcctcacaggcaattaaaggatggaatgaagattagaggagatgtgcatatctgtctgatgggtgatcctggagttgccaaaagtcagcttctcaagcacattataaatgttgctccaaggggagtctacacaacaggcaaaggtagcagtggagttggtctaactgccgctgttatgagagatcaagtaacaaatgagatggttttagaaggaggagcactggtgctggctgacatgggaatctgtgcaattgatgagtttgataagatggatgaatcagatcgtactgctattcatgaagtcatggagcagcaaactgtaagcattgcaaaagctgggattaccacgtctttgaatgctcgaacagctgttcttgccgcagccaatccagcctggggaagatatgatttgcgaagaactccagctgaaaacattaatcttccaccagcccttctttcaagattcgatctgctgtggttgatcttagatcgagctgacatggacagtgaccttgaattggcaaagcatgtgcttcacgtacatcagacagaagaatctcctgcgcttggtttcgagccgctggaacccaatattctccgtgcatacatttcagctgcaaggagattatcaccatacgtcccagcagagttggaggaatatatagcaactgcttattccagcatcaggcaagaagaagcgaaatcaaacactcctcattcttacacaacagtgaggacactgctcagcattctgcgcatatccgctgcattagcaaggttgagattttcagaatcagtggcacagagtgatgtggatgaggcgcttagactaatgcagatgtcgaaaatatcattgtatgctgatgaccgacaaaaggcaggactagatgcaatatcagacacatactcaatcataagagacgaagctgcaagatcaaaaaagacccatgtgagctacgcaaatgccctgaactggatctccagaaagggatacagtgaggctcagctaaaggagtgtttggaggaatatgcagctttgaatgtttggcagattgaacctcacacctttgacatccgttttatctgagtaacaccacccaaaaaaaaaaaaatggaaacaaaccaagtctctcttgttatgttgtgtgctttttctctattatcttatcacatttcttaacgtagagaccttagaagtggaatctgtagaagtgatctcttgattgcagaacaaactttacttttggaaatttagatgtgactttgtact

SEQ ID NO: 118874 - DNA, 1111 bp, Arabidopsis thaliana
cttctttatctcaaactctttcttcttccaaatcataaaccatggcaacatgcatagacacatgccgaaccggtaatacccaagacgatgattcccggttctgttgcatcaagaatttctttcgacccggtttctctgtaaaccggaagattcaccacacccaaatcgaagatgacgatgatgtctggatcaagatgcttgaagaagccaaatccgatgttaaacaagaacccattttatcaaactactactacgcttcgatcacatctcatcgatctttagagtctgctttaggtcacatcctctccgtaaagctcagcaatttaaacctaccaagcaacacactcttcgaactgttcataagcgttttagaagaaagccctgagatcatcgaatccacgaagcaagatcttatagcagtcaaagaaagagacccagcttgtataagctacgttcattgcttcttgggcttcaaaggcttcctcgcttgtcaagctcatcgaatagctcataccctctggaaacagaacagaaaaatcgtagctttattgatccaaaacagagtatcagaatctttcgccgtcgatattcatcccggagcgaagatcggaaaagggattcttttagaccatgcgacgggcgtggttatcggagagacggcggtggttggagacaatgtttcgattctacacggagtgaccttgggaggaacagggaaacagagtggtgatcggcatccgaagattggtgatggtgtgttgattggagctgggagttgtatattggggaatataacaatcggtgagggagctaagattggatcagggtcggtggtggttaaggatgtgccggcgcgtacgacggcggttggaaatccggcgaggttgattggtgggaaagagaatccgagaaaacatgataagattccttgtctgactatggaccagacatcgtatttaaccgagtggtctgattatgtgatttaacacaaatgtgtatttctttctttcttgtaactgatgatgatgaaacaagtcttgtctatttcttaatattttactatgtactaatcaaacaagtcttgaaatcaagctcatcgatctttaagaag

SEQ ID NO: 118875 - DNA, 728 bp, Arabidopsis thaliana
  unsure (1)..(728): unsure at all n locations
caaaattcttcctttcatcgtttgaattctttatacgtataataacatcccttgtgatcaaacaagtaaaccattcaaaagatgaaaggaagaattttgattttgagtttgctcataatgagtctggtcatggcacaagttcaagtagaagcaaagatctgctgcccttccaaccaagctagaaatggctatagtgtatgccgtataaggttttccaagggaaggtgtatgcaagtgagtggatgccaaaactctgatacatgccctcgaggttgggtaaacgccattctcgaaaactcagctgatgctaccaatgagcactgcaagttagggtgtgaaacttctgtgtgtggtgccatgaacactctccagaactctgatgcaagtgaaattgtgaatggagcgtcggaacaatgtgccaagggatgttctattttctgtaccaagagctatgtagtcccacctgggccgcctaaactgttgtaatggtcgtatatgtgaaaaaacaaatgctagactcttgctattctggtttgtgtgtgtgtgtgtgcatgtgtcgtagaaggtttgttcgatcactagattgtacatgccctctacttcctataacctaattaaagagttaaacgtacgtgtctttaaaaaaaaaaaaaaaaaaggcagnccgctctagaggatcccangcntacgtacgcgtgcatgcgacgtcatagctctgctatagtgta

SEQ ID NO: 118876 - DNA, 651 bp, Arabidopsis thaliana
  unsure (1)..(651): unsure at all n locations
nnnnnnnnnnnnnnnnnnnnnnnnnnnnnnnnnnnnnnnnnnnnnnnnnnnnnnnnnnnnnnnnnnnnnnnnnnnnnnnnnnnnnnnnnnnnnnnnnnnnnnnnnnnataattataaacccttagtttgatgatgtatgataaaaatgagtttcacaaattacagggattcatcactatacaaaattaacaaatgcaactctatttcaatacacaactttcttattactcaacagaacagttccttaagaatcaaacactatatgaatctcatatgtaagaaaccttcttacaaaagccaaaaccttaatataagaaagcaatgataaagatttagctatacgttgtatgtatgtgtgtgcttaaatattcaagatcaaagaagaagaagacattactctgatcttacattagttcttacgaactctgtccctggctaggtttctgatgccgttcgctttggctttgccgcttactcgcatacgttatagctctatacatatccgaacatgaatacgnaacctcggacattgcctnnaaaagctcggggaggcgagntcgaanactagccagtgacttctctctaanttgatggctttgtctatggtaagcttcttcttcttcttccaacctcttcttaatttgttctaca

SEQ ID NO: 118877 - DNA, 1965 bp, Arabidopsis thaliana
  unsure (1)..(1965): unsure at all n locations
cgcggnnnnnnnnnnnnnnnnnnnnnnnnnnnnnnnnnnnnnnnnnnnnnnnnnnnnnnnnncgggtccgcaacacaaaaacatacacactactaattaaccatgaagcttcttgggttcgccttagctattctattagttgtggcgacttgcaaacctgaagaagagattacttgcgaagagaacgttccattcacatgtagccaaacagatcgtttcaacaaacaagatttcgaaagcgacttcatcttcggtgttgcatcttctgcttaccagatcgaaggcggcagaggtcgtggacttaacgtttgggatggcttcactcaccgatacccagagaaaggtggagccgatttgggcaatggagacactacttgtgactcataccggacttggcagaaagatctagacgtgatggaagagctcgagtctaaaggctacagattctcctttgcgtggtcaagactccttccaaaaggaaagaggagcaggggagtgaacccaggagctattaagtactacaacggtctcatagatggcctcgtcgcaaagaatatgacgccctttgttaccctctttcattgggaccttcctcaaacactacaagatgaatataacggtttcttgaacaaaacgatcgtagacgatttcaaggattacgcggatctatgtttcgagagatttggtgatagagtaaagcactggatcaccatcaaccagcttttcacagtgcctacgagaggctatgcattgggaacagatgcacccggtcgatgttcccaatgggtggataaaagatgttacggtggagattcttccaccgaaccctatatcgttgcgcataaccagcttcttgctcatgccacggtcgttgatctatacaggacgaaatataaggatgaccaaaaaggtatgattggaccagtgatgataactagatggtttcttccatttgatcatagtcaagagagcaaagatgcaactgagcgggctaaaatatttttccatggatggttcatggggcctctaacagaaggtaaatacccagacatcatgagggaatatgttggtgatcggcttccagagttcagtgaaacagaagccgcacttgtaaagggttcatatgattttcttggtctcaactattacgtcactcaatacgcccaaaataatcagacgattgttccttcggacgtacacactgccttgatggactcacgcacaactctcacatctaaaaatgcaactggtcatgctcctggtccaccgttcaatgcagccagttactactacccaaaaggcatttactacgtaatggattacttcaaaaccacttacggtgaccctttaatatatgtcactgagaatggatttagtaccccaggtgatgaggactttgagaaggctactgccgattacaagcggattgattatctctgtagtcatctctgtttcctcagtaaagtcatcaaggagaagaatgtcaacgtgaaaggatattttgcttggtctcttggggataattacgaattctgtaacggatttaccgtcagattcggactaagttacgttgatttcgcaaatatcactggtgatagagacctcaaagcatctggcaaatggttccagaagttcataaacgttaccgacgaagactctacgaaccaagatctactccgctcaagcgtctcctccaagaaccgtgatcggaagagtcttgcagatgcatgaaatatccaatccactatatgtccaccaagatcatcttcatgtttcctctttctacttgctccatagataaggagctttttctaccatatgtattaaaataaaatcctaataaaagatgatcaataataataaagactttgtttaaaaaaaaaaaaaaaagggcggccgctctagaggatccaagcttacgtacgcgtgcaggcgacgtcatagactcttctatagtgctcctaa

SEQ ID NO: 118878 - DNA, 832 bp, Arabidopsis thaliana
  unsure (1)..(832): unsure at all n locations
tacgactcactttagggaaagctgctacgcctgcaggtaccggtccggaattcccgggtcgacccacgcgtccgcgtgtgtttctattcaattctcaaaactcttttaatcattatcgaagcagctctagtgggattcatagtgattgaccgtcactgggagaaggatcttccttatgatccaactggagaactcaatagtcttcgagctttcatcgaagaaaacatcgatatttgcaaatgggtcggaattgttgtggtagcaatgacagtaactggatggctactggctttggttttgagagctatggtttcacctcggcaatcagagcttgatgatgaagatgattttgagaatccgatgagtagagcacgagacaatcttcttggtccacaggcaaaccagacatcttctggatcaagcaatattgacaactggaggtcccgaatcagagagaagtacggattgatcaacagtcagagccacactccatcagcttaactcaaaagactgagttcttgtgtctggaattatcagtactttggtttggttcttctctctgttaactttcgagtgtgcatagatatttacacatttatgttatcgtttgatacttttttcgaaactctgtttagatcgcaacatagctttcattttggtgtacaaaagagttacgagatttgtgtttgaaatgggaacacctgcttattgctctgcttccnnnnnnnnnnnnnnnnnnnnnnnnnnnnnnnnnnnnnnnnnnnnnnnnnnnnnnnnnnnnnnnnnnnnnnnnnnnnnnnnnnnnnnnnnnnnnnnnnnnnnnnnnnnnnnn

SEQ ID NO: 118879 - DNA, 1251 bp, Arabidopsis thaliana
  unsure (1)..(1251): unsure at all n locations
nnatgatttncgactcactatatggaaagctggcacgcctgcaggtaccggtccggaattcccgggtcgacccacgcgtccgcccacgcgtccgcatacatctacatattaaccatgaagcttcttgggttcgccttagctattctattagttgtggcgacttgcaaacctgaagaagagattacttgcgaagagaacgttccattcacatgtagccaaacagatcgtttcaacaaacaagatttcgaaagcgacttcatcttcggtgttgcatcttctgcttaccagatcgaaggcggcagaggtcgtggacttaacgtttgggatggcttcactcaccgatacccagagaaaggtggagccgatttgggcaatggagacactacttgtgactcataccgtgatctgcagaaagatctagacgtgatggaacgagcttgagtctaaaggcctacagattctcctttgccgtggtcaagaatccctcgcgtccgggaaagaggagtaggggaatcaacgaagatggtattaactactacagcggactcatagatggcctgatcgcaaggaacataacgcctttcgttacactctttcactgagaccttcctcaatcatcgcaagatgaatatgaaggtttcttggacagaacgatcatagacgatctcaaagatctacgcggatctatgtttcgagagatctggtgatagagtaaagcactggatcaccatcaaccagcttttcacagtgcctacgagaggctatgcattgagaacagatgcacccggtcgatgttcccaatgggtggataaaagatgttacggtggagattcttccaccgaaccctatatcgttgcgcataaccagcttcttgctcatgccacggccgttgatctatacaggacgagatataagtaccaaggagggaagattgcacctgtgacgataactagatggtttctaccatatgatgacactctagagagcatacaagcaacttggagggccaaagaattcttcttgggatggttcatggagccgctaacaaagggtatatacccatacatcatgaggaaacttgttggctatcggcttcaaagttaacagcacatatgctcgcctttaaagggttcatagattgtcttggtctcactattacgtgactaatacgccacgcncngacccagtnctcggataactactgcatgaggactactcgcaacattactctgttgtgcaatggtcatcccc

SEQ ID NO: 118880 - DNA, 933 bp, Arabidopsis thaliana
  unsure (1)..(933): unsure at all n locations
tacgacacacttagggaaagctggcacgcctgcaggtaccggtccggaattcccgggtcgacccacgcgtccgcccacgcgtccgacagaagctcgccttttaaagggttcatatgattttcttggtctcaactattacgtcactcaatacgcccacgcccttgacccaagtcctccggaaaaactcactgccatgacggactcactcgcaaaccttacatctcttgatgcaaatggtcaaccccctggtccaccgttctctaaaggcagttattaccacccaagagggatgttaaacgtaatggagcacttcaaaaccaaatacggtgaccctttaatctatgtcaccgagaacggattcagtacctccggtggccccatacccttcaccgaagcatttcacgattacaaccggattgattatctctgcagtcatctatgttttctccgcaaggccatcaaggagaagcgtgtcaacgtgaaaggatactttgtttggtctcttggggataattacgaattctgcaacggctacaccgtcagattcggacttagttacgttgatttcaataatgtcactgctgatagagacctcaaagcttctggcttatggtaccagtcgttcttgagagataccaccaagaaccaagatatcctccgctcaagtctgccctttaagaacggggataggaagagcctcacatgaaagaccaaaaccactttatgcccatcgagatcatcttcatgtctcttctttctacttgctccatagataaaaggagcttctacctactgtattaaataaaagatgatcaaacttaataaatattttgtatactaaaaaaaaaaaagggcggccgctctagaggatccaagcttacgtacgcgtgcatgcgacgtcatagctaatctataggtnnnnnnnnnnnnnnn

SEQ ID NO: 118881 - DNA, 698 bp, Arabidopsis thaliana
  unsure (1)..(698): unsure at all n locations
ctccgcccaaacgtcagagactcttccttcggcgatcgctgctcagaagtttgatttcgatatcaagaatcgtgatagaaaaaatgcgacacaattgttgccatgtctcgttcgcttcgattctcaagatccttaattttctccaagctttcatcggtatatcaatcataatctactcgatttggatgctcgatcaatacaatcatcacgttcccgttgaccctcctccgtctcagcctccggcagcttcatcaccggattcttcttattccttctctaattcaataattgagatcaacagtgtttctgattctttgaagaatccgatcgatttcgtatcgggtatcgttctcgggtctggtggtggagattcgggtttcaatctccgttctttagatcttcctgctccatggtttatctactgtttcatggcgattgggattttggtctgcattgtcactatcattggtttcattgcagctgaagctatcaatggatgttgcttgtgtttctattcaattctcaaaactccttttaatcattatcgaagcagctctagtgggattcaaagtggttgaccgtcactgggagaagggccttccttatngtccaactggggacctcaataggcttcgagttatcgaggaaaaacgaattnaaagggcgnatttttggagnccngncncatnacggntggt

SEQ ID NO: 118882 - DNA, 1084 bp, Arabidopsis thaliana
  unsure (1)..(1084): unsure at all n locations
aataccgactcattatagggaaagctggtacgcctgcaggtaccggtccggaattcccgggtcgacccacgcgtccgcccacgcgtccgccccacgcgtccgaaaccatgaagcttcttatgctcgcctttgtttttctattagctttggcgacctgtaaaggtgaccagtttgtttgtgaagagaacgagccattcacatgtaaccaaactaaacttttcaacagtggcaatttcgaaaaaggcttcatcttcggtgttgcatcttctgcttaccaggtggaaggcggtagaggccgtggacttaacgtttgggatagcttcactcaccgattcccagagaaaggtggagctgatttgggaaatggagacactacttgtgactcatatactctnntgcagaaagatatagacgtgatggacgagctcaactctactggctacagattctccattgcgtggtcaagactccttccaaaaggaaagaggagcaggggagtgaacccaggagctattaagtactacaacggtctcatagatggcctcgatcgcaaggaacatgacgccctttcgttaccctctttcactgggaccttcctcaatcatcgacaagatgaatatgaaggtttcttggacagaacgatcatagacgatttcaaagattacgcggatctatgtttcgagagatttggtgatagagtaaagcactggatcaccatcaaccagcttttcacagtgcctacgagaggctatgnattgggaacagatgcacccggtcgatgttcccaatgggtggataaaagatgttacggtggagattcttccaccgaaccctatatcgttgcgcataaccagctttctttgctcatgccacggtcgttgatcttatacaggacgggatataagtaccaaggaggggnagatttgaccntttgattgatacnngnatggtttctnccatatggttgncaacntttgggggncaaacaaagnaactttgngggccaanaattttttttggggtgggtcaatgggcccctnacnaaagggtaantccccttcaanattgggancttttgnaatgc

SEQ ID NO: 118883 - DNA, 578 bp, Arabidopsis thaliana
  unsure (1)..(578): unsure at all n locations
ggnnnnnnnnnnnnnnnnnnnnnnnnnnnnnnnnnnnnnnnnnnnnnnnnnnnnnnnnnnnnnnnnnnnnnnnccacgcgtccgtgcacccggtcgatgttcccaatgggtggataaaagatgttacggtggagattcttccaccgaaccctatatcgttgcgcataaccagcttcttgctcatgccacggtcgttgatctatacaggacgagatataagtaccaaggagggaagattggacctgtgatgataactagatggtttctaccatatgatgacactctagagagcaaacaagcaacttggagggccaaagaattcttcttgggatggttcatggagccgctaacaaagggtaaatacccatacatcatgaggaaacttgttggtaatcggcttccaaagttcaacagcacagaagctcgccttttaaagggttcatatgattttcttggtctcaactattacgtcactcaatacgcccacgcccttgacccaagtcctccggaaaaactcactgccatgacggactcactcgcaaaccttacatctcttgatgcaaatggtcaaccccctg

SEQ ID NO: 118884 - DNA, 1038 bp, Arabidopsis thaliana
  unsure (1)..(1038): unsure at all n locations
tatacgactcatatagggaaagccggtacgcctgcaggtaccggtccggaattcccgtgtcgacccacgcgtccgcccacgcgtccgcttctgcttaccagatcgaaggcggcagaggtcgtggacttaacgtttgggatggcttcactcaccgatacccagagaaaggtggagccgatttgggcaatggagacactacttgtgactcataccggacttggcagaaagatctagacgtgatggaagagcttggagttaaaggctacagattctcctttgcgtggtcaagaatccttccaaaaggaaagaggagtaggggaatcaacgaagatggtattaactactacagcggtctcatagatggcctgatcgcaaggaacataacgcctttcgttacactctttcactgggaccttcctcaatcattgcaagatgaatatgaaggtttcttggacagaacgatcatagacgatttcaaagattacgcggatctatgtttcgagagatttggtgatagagtaaagcactggntcaccatcaaccagcttttcacagtgcctacgagaggctatgtattgggaacagatgcacccggtcgatgttcccaatgggtggataaaagatgttacggtggagattcttccaccgaaccctatatcgttgcgcataaccagcttcttgctcatgccacggtcgttgatctatacaggacgagatataagtaccaaggagggaagattggacctgtgatgataactagatggtttctaccatatgatgacactctagagagcaaacaagcaactttngagggccaaagaatttttctttgggatggttcattggagccgcttaccaaagggtaantnccttttncatcatnggggaacctttttgggnaatcgggttcccaangttnaacaggnnagaggttgccttttaaaagggtccaangatttntttttggcnnaacatttngggnattaanaggccnggccctttccccagncnncggaaaatttttccttgggggttttt

SEQ ID NO: 118885 - DNA, 531 bp, Arabidopsis thaliana
  unsure (1)..(531): unsure at all n locations
cctattnagggaccgggaccggaattacccggggnggcccacgggntccaattacaaataaaccatgaaggcttcttatgctcgcctttgtttttctcattagctttggcgacttgtaaaggtgacgagtttgtttgtgaagagaacgagccattcacatgtaaccaaactaaacttttcaacagtggcgaaatttcgaaaaaggcttcatcttcggtgttgcatcttctgcttaccaggtggaaggcggtagaggccgtggacttaacgtttnggatagcttcactnaccgattcccagaggaaaggtggagcctgattttngggaaatgggnggcacttacttgtgactcatataactcttttngcagaaaggttttagacggtggattgncggngctcaaacttttncttggctncaagaattctncccatttgcngtgggtccaaananntcctttcccaaaagggaaagaaggggccaaggggngttnaccccngggggctntttaaggtcttcaaacgggntcca

SEQ ID NO: 118886 - DNA, 418 bp, Arabidopsis thaliana
  unsure (1)..(418): unsure at all n locations
caagatgaatataacggtttcttgaacaaaacgatcgtagacgatttcaaggattacgcggatctatgcttcgagttatttggtgatagggtaaagaactggatcaccatcaaccagctatacacagtgcctactagaggatatgcattgggaacagatgcacccggtcgatgttctcctaagattgacgttagatgtcccggcggaaattcgtcaacagaaccctatattgttgcacataacccagcttcttgctcatcccggcgccccgttgatgttttccgaggacggaattttaagggtgacccaaaaaggtatnntttggnccnattgntgntaacctaggatnggtttcttnccnttttnatccaaaggnaaggggggcaaaggttcaactnnggcggggttaaaaattttt

SEQ ID NO: 118887 - DNA, 1681 bp, Arabidopsis thaliana
  unsure (1)..(1681): unsure at all n locations
nnnnnnnnnnnnnnnnnnnnnnnnnnnnnnnnnnnnnnnnnnnnnnnnnnnnnnnnnnnnnnnnnnnnnnnnnnnnnnnnnnnccacgcgtccgcacaagttggtgtcaacgctcagacaagaaaggcgtgtgttcattgttgaatcttcccatttcctcatccaaattccgacataactatcctagccgccatttgttctccacattacaaaaccctcagcagcttcaaaactcttccgatctctccctcacgctcgcaattctctcgtctccattttaatagtttttcttctcggaatcacaaatcttcggcttcttgttccttggcgtgtgtgtgtgttgttgaatggctcttgttcagcggattccaatttcctcctccagtattcggaattggcaacaagcgaggaccaatttgactcctatttgttgtttacattacaatactgcatcttcttcttcttcaccctttacagagaagcactctgtggagagataccaaagggatcaatggctgtacaaagcggttgaaccaacgccaccatcgactccatctccatcgccatttgaagatgaagtctttgttagggaaaacgacattgcatcgcagctgcctgagctgaagaagcttttggcagtgctgaaagagaagagagttaaaggatgcaaaggtggtgattgtggaccaggagatgtgtatcttgttgggacagggccaggagatcctgagcttttgactcttaaagctgtcagagttattcaaagtgccgatcttttgctttacgacaggcttgtctccaatgatgtcttggagttggttgctcctgatgctagacttctttatgtcggcaaaactgctggttatcatagcagaactcaggaagagattcatgaactactcctaaattttgctgaagctggtgccactgttgtcaggcttaaaggtggagatcctctggtctttggacggggcggcgaagaaatggactttctgcaacagcaagggattcgagttcaagttataccagggataactgcggcgtcggggatagcagcagagttggggattccactaacacatcgaggtgttgcaactagtgtaaggtttctcactggtcattcaaggaaaggagggacagaccctctgtttgttgcagagaatgcagctgacccggatacaacacttgtcgtttatatgggtttgggaactttaccttctcttgcacaaaaactaatggaccatggtctcccttctgatacaccagctgttgcggttgaacgtggaaccactcctctacagcgtacagtttttgctgagcttaaagattttgcaactgagattcagtcagctggattggtgtcaccaacactcatcatcatagggaaagtcgttgagctctcacctttatggccacattgcacgaaagaatcctcctgccttgtagagacccggtagatatttcactcttattttacgggcgtgtggcttccatcgacattacggtgaagttttaggagctatggagctatgaaggttgagacttgagagatgtaataaacaaaaaggaaagctgatagtttcttatgacgtgtccttcaattgttttgggacaatggtaatggcaatgttaatgtaataaacaagtttcaatcagtgccactgtgactaatttttccacc

SEQ ID NO: 118888 - DNA, 1054 bp, Arabidopsis thaliana
agaaggggacataaaacaaaaggtatagtatataccataaatctccgagattcttttgatgtatctgtccatttcattattacacaaactaggaaactgatatctctctattcacattcctctgattctatttctctttatatatattcacccattaaccatctcaatcttataaccctcaaaatcacaatcttctcttacaaaaaactttgaaagatgaagattcttctagcatcattgtgtttgatcagtcttctcgtaatcttgccttctgtcttctctgcttcttcttcctctgaagattttgatttcttctacttcgtccaacaatggccaggatcatactgtgacacacagaagaagtgttgttatccaaattcaggcaaaccagctgctgattttggcattcatggtctttggcctaactacaaagatggaacttatccatctaactgtgatgcctctaaaccattcgatagctcaacgatatcagatcttctcacttcaatgaagaagagctggccaacactggcttgcccaagcggttcaggtgaagcgttttgggagcacgaatgggagaagcatggtacttgctctgaatcggttatcgatcaacatgaatatttccaaaccgctcttaaccttaaacagaaaaccaatctccttggagctctaaccaaagccgggattaatccggatggaaaatcttactctttggagagcataagagattcgataaaagagtcaattggtttcactccttgggttgagtgtaacagagatggttctggtaatagccaattgtaccaagtctatctttgtgttgaccggtctggttccggtttaatcgaatgtccggttttcccacatgggaaatgtggagctgagatcgaattcccttctttttagtttccaatttctaaattcagtctcttgaaccggcatcgatcttttgttcatggagattggtttggtcaaaaagaagatttaatgtaataaaaatttatgggatattggataatgatatagttcaatttcaataaaaaaaaaaaaa

SEQ ID NO: 118889 - DNA, 1681 bp, Arabidopsis thaliana
gctctctctctctctttagctctttttttttttttgttttcattaaagtttttattttattttctaccaaccaaaagcttttctctttggtttctcttatttagcttctaaccttgaggagaatataccagaggattgaagtttgaaccttcaaagatcaaaatcaagaaaccaaaaaaaaacaaaaaaaatgtgggatctaaacgacgcaccacaccaaacacaaagagaagaagaatctgaagagttttgttattcttcaccaagtaaacgggttggatctttctctaattcaagctcttcagctgttgttatcgaagatggatccgatgacgatgaacttaaccgggtcagacccaataacccacttgtcacccatcagttcttccctgagatggattctaacggcggtggtgttgcttctggctttcctcgggctcactggtttggtgttaagttttgtcagtcggatctagccaccggatcgtccgcgggtaaagctaccaacgttgccgctgccgtagtggagccggcacagccgttgaaaaagagtcggcgtggaccaagatcaagaagttctcagtatagaggtgttacgttttaccggcgtaccggaagatgggaatctcatatttgggactgtgggaaacaagtttacttaggtggatttgacactgctcatgcagcagctcgagcatatgatagagctgctattaaattccgtggagtagaagcggatatcaatttcaacatcgacgattatgatgatgacttgaaacagatgactaatttaaccaaggaagagttcgtacacgtacttcgccgacaaagcacaggcttccctcgaggaagttcgaagtatagaggtgtcactttgcataagtgtggtcgttgggaagctcgtatgggtcaattcttaggcaaaaagtatgtttatttgggtttgttcgacaccgaggtcgaagctgctagagcttacgataaagctgcaatcaaatgtaacggcaaagacgccgtgaccaactttgatccgagtatttacgatgaggaactcaatgccgagtcatcagggaatcctactactccacaagatcacaacctcgatctgagcttgggaaattcggctaattcgaagcataaaagtcaagatatgcggctcaggatgaaccaacaacaacaagattctctccactctaatgaagttcttggattaggtcaaaccggaatgcttaaccatactcccaattcaaaccaccaatttccgggcagcagcaacattggtagcggaggcggattctcactgtttccggcggctgagaaccaccggtttgatggtcgggcctcgacgaaccaagtgttgacaaatgctgcagcatcatcaggattctctcctcatcatcacaatcagatttttaattctacttctactcctcatcaaaattggctgcagacaaatggcttccaacctcctctcatgagaccttcttgaatcttttatatttttaaggtttattattatataagaaaaacaaaaatgaacctttgaaatccccacatgttcttggtcatttcattaatcatcggcttatattttgcttattttcccctaaatcctcttgttaacttaggcgaacaaaaaaaattaatggaaatctttttccctccatcggttacaaaaata

SEQ ID NO: 118890 - DNA, 1841 bp, Arabidopsis thaliana
ctgagagtttcaaagtgtgcttctgttgcagcagaagctttaaggagaaaacgaggcagccaccagtgagcatcaagagactcttcgaagcttactcaagaaacggcaagatgtctttcgatgagcttctaagatttgtgagtgaagtccaaggagaacggcacgcagggttggactacgtgcaagatatcttccacagcgttaaacaccacaacgtttttcatcaccatggacttgttcatctcaacgccttctatcgctacctcttcagcgataccaactctcctcttcccatgtctggccaggtgcatcatgacatgaaggcgccgttatcgcattactttgtgtacacgggacataactcttacttgactgggaaccaagtgaacagcagaagcagcgtagaaccgatcgtgcaggctctcagaaaaggcgtaaaagtgatcgagctcgacttatggcctaatccttcagggaacgctgctgaagttcgtcatggcaggacgcttacttcgcatgaagatttgcagaaatgtctaaccgccattaaggataacgcgtttcatgtgtctgactatccagtcatcatcactctcgaagatcatttgccacccaagcttcaagcgcaagttgctaagatgttaactaaaacatacagagggatgctgtttcgtcgtgtctcagagagttttaagcattttccatcaccagaagaacttaaggggaagatcctgatctctacgaagcctccaaaggagtatcttgagagcaaaactgtacacaccacaagaactccaacggttaaagagacttcgtggaacagagtagcgaacaagattcttgaagaatataaagatatggagagtgaagctgtaggatatagagacttgatagcaatccacgctgcaaactgcaaagatccttcaaaggattgcttgagtgatgatccagagaagcctatacgggtcagcatggacgagcagtggctagacactatggttaggaccagaggaacggatcttgtcaggtttacacagaggaatctggtgaggatatatccaaagggcacaagagtggactcgtcaaactacgatcctcatgttgggtggacacacggtgctcaaatggttgcttttaacatgcaaggacatgggaagcaactatggataatgcaaggaatgttcagggggaatggtggatgtgggtacgttaaaaagcctcgcatcttgctagacgagcacacactcttcgacccttgcaaaaggtttcccattaagaccactcttaaggttaagatttacactggcgaaggatgggatttggatttccatcatacacactttgatcaatactctcctccagatttcttcgtcaagattggaatagcaggagtaccgagagacacggtctcatacagaacggaaacagctgtcgatcagtggtttcctatatggggcaacgacgagttcctgtttcagctgtctgttccagaactggcgcttctgtggttcaaagtccaagactacgacaatgacacccagaatgatttcgcaggacagacatgtcttcctcggccggaactgaagtccggagttagaccgtccggcttcacgatcgaacagcaaggcctacaagaacacgaggcttctcgtcacgttcgccttggatcctccttatacgtttcgttgaatctcgttttctttccgaaataagccacacagtgtgtatctctgtttgcacgtttataaatttataatgtacaattatttgcgccctagctagaacgggataaagtgtgacaacatataaatactattaaagattcgatatttgatgactgt

SEQ ID NO: 118891 - DNA, 1573 bp, Arabidopsis thaliana
caaaaacctctccgttttttcctctctgtttagctttgaattcacaagagtcatgcgaagattcaactgggttctgcggcatgtacaagctcgaagaacttttgattccgcgatcggattgcgtcaagggtctcagaagccgttgttcgagcgatacattcacgctacaggtataaacaactccagtgctcgtaattactatgatgttctcggtgtttctcctaaagctacacgggaggagattaaaaaatcatttcatgagcttgcgaaaaaattccaccctgatacaaatagaaataatccgtcagcaaaaaggaagttccaggaaataagagaggcatatgagaccctgggaaattcggaaagaagagaagaatatgataagctgcagtatcggaattcggattatgtaaataatgacggtggtgattcagagaggttcagacgtgcataccagtccaatttctcggatactttccacaagatttttcctgagatatttgagaacaatcagataaaacctgatattcgggtggaactgtcgctttctctttccgaagctgcagaagggtgcacaaaacgtttgtcttttgatgcatatgtcttttgtgattcctgtgatgggcttggccaccctagcgatgctgccatgagcatttgtccaacatgcaggggggtgtggacgagtaactattcctcctctttacagcatcatgaccagacgtgcaaggggacgggacacattattaaggaatactgcatgtcttgtagaggatcagcgatattgtggaaggcacaaagacaagctgaacttgtgatccctggaggggtggagtctgaagctacaatcacaatcgtaggtgctggtaatgtaagttcaagaacaagtcaacctgggaacttgtatatcaaactaaaggttgctaatgattcaactttcactagggatggctcagatatatatgtggatgctaatattagctttacacaagctattttgggggccaaagttgtggtgccaacactttcaggcaagatacagctagatataccaaaggggactcagcctgatcaacttcttgttttaagagccaaaggactaccgaagcaaggctttttttgtagatcatggagatcagtatgttcgcttccgcgttaactttcctactgaagtgaatgaacgtcagcgtgctatactggaagagtttccaaaggaagaaatcaacaatgagttgagcgactctgctgaaggaagttggtggaatctaacgggtcctcagatcatccgcgacttctcgttaatggtgctgctggcgctattgttgagcaggttaatgggatgaagccaccacgagagatgaaagataaaagcattcaacagaagacaaatgaagactaatttcatctattgctggtagaacccaaagctcaccagcataacagagagtgtcattgtttgacctcataattctattacaaactcatttgatgtgaataataagagacatccaacaagttaagctgaaataaagaaaagaaaaaaaaaagtcctttaaaaaaaaaaaaaaagggc

SEQ ID NO: 118892 - DNA, 1431 bp, Arabidopsis thaliana
  unsure (1)..(1431): unsure at all n locations
atgatcctgccagctcnnnnnnnnnnnnnnnnnnnnnnnnnnnnnnnnnnnnnnnnnnaccacgcgtccgcccacgcgtctaaactcgaaccctaaagaaaaacaaaaatggctgccatagcttctactctctctctttcttcaaccaaacctcagagacttttcgattcttccttccatggctcagccatctccgcagctcctatctccatcggtctcaaaccacgatctttctccgttcgcgccacaaccgctggttacgacttgaacgctttcacgttcgacccgatcaaggaatcgatcgtgtcacgtgagatgacgagaaggtacatgacggatatgatcacttatgctgagactgatgtcgtcgtcgttggtgctggatctgctggtttatctgctgcttatgagatcagtaagaaccctaatgttcaagttgccattattgagcaatctgttagtcctggtggtggtgcttggctcggtggtcagcttttctccgccatgattgttcgcaaaccagctcacttgttccttgacgagattggtgtggcttacgatgagcaagacacctacgttgtggttaagcacgcggctctgttcacatcaaccatcatgagcaagcttttggctcgtcctaatgtgaagctcttcaacgctgtggctgctgaggatttgattgtgaaaggaaacagagttggtggtgtggtgactaactgggctcttgtggctcagaaccaccacacacaatcgtgtatggaccctaatgttatggaagcgaagattgtggttagctcttgtggtcatgatggtccttttggagctactggtgttaagaggttgaagagtattgggatgattgatcatgttcctgggatgaaagctttggacatgaacactgctgaggacgctattgtgaggttgaccagagaggttgttcctggtatgattgttaccggtatggaagttgctgagatcgatggtgcaccgagaatgggaccaacttttggtgctatgatgatatcgggacaaaaggcgggacaacttgctcttaaggctttggggctaccgaatgctattgacggaactctcgttggaaacctaagcccggagctggtcttagccgcagcagattcagctgaaaccgtagatgcttaaaatcaaaaggttttaacgttaagaaaagtttcccttgatccttcggatgttgaaggagtgcaataaaaggagtttaggtgtttaatatgtcttgaacttttctggtgtctttgtttctctcttctgaacttctgtgtaaaatatcgtatccgttcattcgtaatgcgtatgttctcgttaaaaaaaaaccctgacgtagctcgagnnnnnnnnnnnnnnnnnnnnnnnnnnnnnnnnnnnnnnnnnnnnnnnnnnnnnnnnnnnnnnnnnnnn

SEQ ID NO: 118893 - DNA, 635 bp, Arabidopsis thaliana
  unsure (1)..(635): unsure at all n locations
tanctnacacctattnagggaccgggccgggaattncccgggtgancccactgcntccgggttaccgggtatggaagttgctganatcgatggtgcaccgagaatggnaccaacttttggtgctatgatgatatcgggacaaaaggcgggacaacttgctcttaaggctttggggctaccgaatgctattgacggaactctcgttggaaacctaagcccggagctggtcttagccgcagcagattcagctgaaaccgtagatgcttaaaatcaaaaggttttaacgttaagaaaagtttcccttgatccttcggatgttgaaggagtgcaataaaaggagtttaggtgtttaatatggtcttgaacttttctggtgtctttgtttctctcttctgaacttctgtgtaaaatatcgtatcccgttcatttcgnaaatgcgtaatgttcctcggtncttctcccntcctttaatgggctcctaggtacaaggcaagctttcntccgtttggccgttgggcaaataccaaaaannctggnctaaaattttganggggttggannttaangtggttggnatggccggnattccttngncnttcaantncctggataccctaaacccttngaaaaaanaa

SEQ ID NO: 118894 - DNA, 1271 bp, Arabidopsis thaliana
  unsure (1)..(1271): unsure at all n locations
gaaggcgggcccccctgcaggtcccggcccggaattcccgggtcgacccacgcgtccgcccacgcgtccgcccacgcgtccgcggacgcgtgggttttgggattctcaaaaaactcaaaataaactttcctcatttttttttttctttctttggtttggttttctttataaaggagaaagaaagagaaagagagtttccgaaagcttatttgagttgacgagagcaaattctcaggatgggaagaggaaagatagaaataaagaggatagagaactcaacaaatcgacaagtgacgttttgcaaaagaagaaatggacttctgaagaaagcctatgagctttcggtcctttgcgatgcagaagttgcgctcattgttttctccactcgtggccgtctctatgaatacgccaataacaacataagatcaaccattgagaggtacaagaaagcttgttctgatagcaccaacactagcactgtccaagaaatcaatgccgcgtactatcaacaagaatctgctaagctgagacaacagatccaaacgattcaaaactccaacaggaatctgatgggagactctttgagttccttaagtgtcaaggaactaaaacaagttgagaatcgccttgagaaagctatctctaggatcaggtccaagaagcatgagttgcttctagttgaaatcgaaaacgcgcagaaaagggagattgagcttgacaatgagaacatctatctaagaactaaggtagcagaagtggagaggtatcaacaacaccatcatcaaatggttagtggttcagagattaacgcaattgaagctttagcctcacgcaattactttgctcatagcattatgactgctggttctggatctggtaatggaggttcttactctgatcccgacaagaaaattcttcatctcggataatctcgtctgcgaaaaaccgagctgcaataactctctgcatgcatctggggattctttgctcagatttatctctacataaaatatgttttggtgcaaaataattcaaagtacaatgaaggtattggtccttcaagactcattgcaatttgtgttgtgtaatgattaagacatactctagtttttattgcttcgtatcataggatctattctatggtatcttatttagtggnnnnnnnnnnnnnnnnnnnnnnnnnnnnnnnnnnnnnnnnnnnnnnnnnnnnnnnnnnnnnnnnnnnnnnnnnnnnnnnnnnnnnnnnnnnnnnnnnnnnnnnnnnnnnnnnn

SEQ ID NO: 118895 - DNA, 1043 bp, Arabidopsis thaliana
gaagaaacagagaaaccaaagagttaagtggtgaacctcgaagctagttcaaactagtgggaggttgtttcacgtttcaactttcaagtcataaaaccaaatccaactctaaacgtaaacccaaacgtcaaatcatcagatagaaggaaatattctgattgagagatggctcgtggaaagattcagcttaagaggattgagaacccggttcacagacaagtgactttttgcaagaggagaactggtcttctcaagaaggctaaggagctctctgtgctctgtgatgccgagatcggtgttgtgatcttctctcctcagggcaagctctttgagctcgctactaaaggaacaatggagggaatgattgataagtacatgaagtgtactggtggtggtcgtggttcttcttctgctacttttactgctcaagaacaacttcaaccaccaaatcttgatccgaaagatgagatcaacgtgcttaagcaagagattgagatgcttcagaaagggataagctatatgtttggaggaggagatggggctatgaatcttgaagaacttcttttgcttgagaagcatcttgagtattggatttctcagattcgctctgctaagatggatgttatgcttcaagaaattcagtcattgaggaacaaggaaggagtcctcaaaaacaccaacaagtatctcctcgacaagatagaggaaaacaacaatagcatattagatgctaacttcgcagtcatggagacaaactattcctatccgctaacaatgccaagtgaaatatttcagttctagaccatagggtatttgaagactatgtctcacgaatttaaataaccttggtaagtataatatagtgttgttaaatcacacataattaaaataaagcctgtggaacttcgctaggcagttgaaaatctatccgtatgttttatcctcttgttttacatttgttggtgtgaagatgaaatgactgcaagtgtggtgtgtacttataactctttctactttctatctatgttttgaatttatggatt

SEQ ID NO: 118896 - DNA, 2079 bp, Arabidopsis thaliana
  unsure (1)..(2079): unsure at all n locations
tatttttctcgctcgcgaattcctctttctcaccttttctcgctcctgggaatctgaagcagttcttctccgacgcctggatcgtgatttgattcgaactttcacataagatggctatggtagatgaaccgttgtatcccattgctgtgcttatagatgagcttaagaatgatgatattcagcttcgtttgaactcgatccgtcgcttatctactatagctcgtgctcttggagaggagcgtacaaggaaggagttaatcccttttttgagtgagaatagtgacgatgacgatgaggtgcttcttgcaatggctgaggagttaggagtttttattccgtttgttggaggaattgagtttgcgcatgttcttcttcctcctttggaatctctatgtactgttgaagagacttgtgtgagagaaaaagctgtggaatcgctttgtaagattggatctcagatgaaagagaatgatcttgttgaatcttttgttcctcttgtgaagaggttagcgggtggtgaatggtttgcagcaagagtttctgcatgtggtatatttcatgttgcataccaaggttgcactgatgtgttgaagactgagttacgggctacttatagccagttgtgcaaagatgatatgccaatggtgcgaagagctgctgcatctaacctggggaaatttgctacaactgtcgagtctacctttttgattgctgagatcatgactatgttcgatgatcttactaaagatgaccaagattctgtgagactattggctgttgaagggtgtgcagctcttggaaagttgttggaacctcaggattgtgttgcacgcattttacctgttattgttaatttctctcaggataaatcttggagggtgcgctacatggttgctaatcagctatatgaactttgtgaggcagtgggtcctgattgcacgaggacggatttggttccagcatatgtgagattgctaagggacaatgaggctgaagtgcgaatagcagcagcgggaaaagtgaccaagttctgtcggcttttgaatccagagcttgcgattcagcacatccttccttgtgtgaaggaattatcatcggattcttctcaacatgtccgctctgctctagcttcagtaataatggggatggctcctatccttgggaaggactcaaccattgagcatctgttaccaatttttctttcccttttgaaagatgaatttcctgatgtgcgccttaacatcataagcaagttagatcaagtcaaccaggttattggaattgatctactatctcaatccttgttaccggccattgtagaacttgctgaggatcggcactggagagtccgacttgcaataatagagtatgttccactgttggccagccagttaggtataggatttttcgatgacaagctcggagccctttgcatgcaatggctgcaagacaaggtctactctatccgcgaagctgcagcaaacaacctaaagcgcctcgcagaggagtttggtcctgaatgggcaatgcagcacttagttccccaggtattggacatggtcaacaatccgcactacctacacaggatgatggttctacgcgcaatatctctcatggcgcctgtaatgggatcagaaatcacatgctctaagtttcttcctgtggttgttgaagcatcaaaagacagagttccaaacatcaagttcaacgttgccaaacttctgcaatccctcatccccatagtcgaccaatcagtggtggacaaaacaatccgtcagtgtttggtggacctgagcgaagaccctgatgttgatgttcgttattttgcaaatcaagcacttaattccatcgatggttccacagcagcacaatcctgaattgtttttttttcatatgtatgatcgttaagttaagtttctattattcgtgttctctgcaatttatttggtttgtttgtgtaaaacgccattttggttgctggctatgaactgcaactatttttgttagtaaaattgtattaccttttttactctgggaggatnnnnnnnnnnnnnnnnnnnnnnnnnnnnnnnnnnnnnn

SEQ ID NO: 118897 - DNA, 1279 bp, Arabidopsis thaliana
ggaagaactgttgttgttgtgctctttggtttcatcgagagagaacctaaacccgatctgaaccaataacaataagaagacgaatggcgtcttcgtcgttctcagtcacatctccagctgctgctgcttccgtctatgcagtcactcaaacctcctcgcacttcccaatccaaaaccgctctcgcagagtttctttccgtctctctgctaagcccaagcttcgctttctctccaagcctagtcgcagtagctaccctgtggtgaaagcacaatctaacaaggttagtactggtgcatcatcaaatgctgccaaagttgatgggccatcatcagctgaaggaaaggagaaaaactcattgaaggagtcgtctgcttcttctcctgaattagctacagaagagtctatttctgagttccttacccaagtaacaactcttgtcaagcttgtggattcaagagacattgttgagttgcagttgaaacaactcgactgtgaactagtcattcgaaaaaaagaagccttacctcaacctcaagctcctgcatcttatgttatgatgcagcaaccaaatcaaccatcttatgcccagcaaatggctcctcctgctgcacctgctgctgccgcaccagccccttctacgccagcctctctgcctccaccatccccacctactccagccaaatcgtcacttcctactgttaaaagccccatggctggcacattctaccgtagtcctgcacctggtgaaccaccctttattaaggttggagacaaagtgcagaaggggcaagttctatgcattgttgaagccatgaagttaatgaatgaaatagagtctgaccataccggaaccgtagtcgatattgtcgcagaagacggcaagcctgtcagcctcgacactcctctgtttgtggttcaaccgtagaatcggcaccatgagaaatggagaaaagaagctctactaaattcattctctgtgctttggtaatacaaaatttgctgagacttctaaaaacgtttccccttcgcttgtcactgttaaagtctgttaggtttgttagtttggtgaggaagaattgagttttctttagtttctctattcgttaaaaaaaaaaagatgagacatttttttccataagctctgtttttatttctttcctatatacacgaactcttcttgttctgttctatttgcaaattatccaatagaaaaaaaaaaaaaaaaagggcggccgctctagaggatccaagcttacgtacgcgtgcatgcgacgtcaa

SEQ ID NO: 118898 - DNA, 693 bp, Arabidopsis thaliana
  unsure (1)..(693): unsure at all n locations
agggaacctataaaaaattcttgacgtcgcatgcacccgtacgtaagctcggatttcggctcgagaaccctggaccgcacaacaatggcgagaggctcttcccaatcccaacaatcaacctccaccggttcttcaaccgcccggcccggtctggccgctcctcgtggttccgccgccgctactgccggcatgcgtcgccgcaggctcggtggcggtggtggcgtatcctcaggcggcggatctggagttggatcaggatcgagcaacatgctgagattctacacagatgatgctccggggttgaagatctcaccgacggttgttctgatcatgagtctctgtttcatcggcttcgtcactgctcttcacgtctttggaaaactctacctccacaaatccggatcccaagcttagatccggatcaggacctggatcgtttaatcggtgatcgctgttttttttttttttttttaggatgtttccttgtgttttgtttcccttttttagtcttttcgatgagaaccatgtaaatcgctaagcgttgaataaaatacgtcacctttggaaaaaagaaaaaaaaaaaaaaaanaaaggnnnnnnnnnnnnnnnnnnnnnnnnnnnnnnnnnnnnnnnnnnnnnnnnnnnnnnnnnnnnnnnnnnnnnnnnnnnnnnnnnnnnnnnnnnnnnnnnnnn

SEQ ID NO: 118899 - DNA, 1929 bp, Arabidopsis thaliana
  unsure (1)..(1929): unsure at all n locations
ccctgacgtagcaaaacacacatcacacaccattttcacaacatcgtacttatcgccttcctctctctctcaatacctctctcaatttctggatccaccatgcaagctcttcaatcttcatctctccgtgcttctcctccaaacccacttcgcttaccatcaaatcgtcaatcacatcagctaattaccaatgcgagacctttgcgaagacaacaacgttccttcatctccgcatcagcatccactgtctccgctcctaaacgcgaaacagatccgaagaaacgagttgtcattactggtatgggtctcgtctctgtgtttggtaacgatgttgatgcttactacgagaaattgttgtctggtgagagtggaatcagtttgattgatcgtttcgatgcttccaagttccctactcgattcggtggtcagatccgtgggtttagctctgaaggttatattgatggcaagaatgagcgtaggcttgatgattgtttgaaatattgcattgttgctggtaaaaaagctcttgaaagtgccaatcttggtggtgataagcttaacacgattgataagaggaaagctggagtactagttgggactggaatgggaggtttaactgtgttttcagaaggtgttcagaatttgattgagaagggtcataggaggattagtccattttttataccttatgctataacaaatatgggttctgctttgttggcgattgatcttggtcttatgggtcctaactattcgatttcaactgcttgtgctacttcgaattactgcttttacgctgctgcgaatcacaatcatcgtggtgaagctgatatgatgattgctggtgggactgaggctgctattattcctattgggttgggaggttttgttgcttgtagggcattgtcccagagaaatgatgaccctcaaactgcttccaggccgtgggataaagcaagagatgggtttgttatgggtgaaggagctggtgttctggtgatggaaagcttggaacatgcaatgaaacgtggtgctccaattgtagcagaatatcttggaggtgctgttaattgtgatgctcaccatatgactgatccaagagctgatggtcttggggtttcttcatgcattgaaagatgcctggaagatgctggtgtatcacctgaggaggtaaattacatcaatgcacatgcaacttccactcttgctggtgatcttgctgagattaatgccattaaaaaggtattcaagagcacttcagggatcaaaatcaacgccaccaagtctatgataggtcactgcctcggtgcagctggaggtctagaagccatcgccaccgtgaaggctatcaacactggatggctgcatccttccatcaaccaatttaacccagaacaagctgtggactttgacacggtcccaaacgagaagaagcaacacgaggttgatgttgccatatcaaactcgttcgggttcggtggacacaactcggtagtcgccttctctgccttcaaaccctgatttcttcataccttttagattctctgccctatcggttactatcatcatccatcatccatcaccaccacttgcagcttcttggttcacaagttggagctcttcctctggccttttgcggttctttcattccccgtttcttacggttgctgagatttcagattttgtttgttctctctcttgtctgcggaatgttgtgtatcttagttcgttccatatttgcgtaatttataaaaacagaaactgagagaatcttgtagtaacggtgttattgtcagaataatccaattaggggattctcatcttttatttctcaaaaaaaaaaaaaaaaaaaaagnnnnnnnnnnnnnnnnnnnnnnnnnnnnnnnnnnnnnnnnnnnnnnnnnnnnnnnnnnnnnnnnnnnnnnnnnn

SEQ ID NO: 118900 - DNA, 1883 bp, Arabidopsis thaliana
cagtgtgagtaatttagatcatctctagcgttcttaaagtttccaactttttttttttattaatttgggccaacttttttgttttattaatttgggccaaccttttttggtttgagaattgggcgagggagaaagatgggtaaagtggcagttgcaacgacggtagtgtgttcggtggcggtatgtgcggcggcggcgttgatagtacggaggagaatgaaaagcgcagggaaatgggcaagagtgatagagatattgaaagcctttgaagaagattgtgcaacgccaattgccaaattgagacaagtggctgatgctatgactgttgagatgcatgctggtcttgcttctgaaggtggcagcaagcttaagatgcttattagctacgttgataatcttccttctggggatgagactggttttttctatgcgttggatctaggcggaacaaacttccgtgttatgcgtgtgcttcttggtgggaagcacgaccgtgttgttaaacgagaattcaaagaagaatctattcctcctcatttgatgaccgggaagtcacatgaattattcgattttatcgttgatgttcttgccaagtttgtcgctacagaaggcgaggactttcatctcccacctggtagacaacgggaactaggtttcactttctcatttccggttaagcagctatctttatcctctggcactctcatcaactggacaaagggcttttccattgacgatacagttgataaagatgttgttggagaacttgttaaagctatggaaagagttgggctggacatgcttgtcgcagcgcttgttaatgataccattggaacacttgcgggtggtagatacactaacccggatgtcgttgtcgcagttattttgggcaccggcacaaatgcagcctatgtcgaacgtgcacatgcaattcccaaatggcatggtttgctacccaaatcaggagaaatggtgatcaacatggaatggggaaacttcaggtcatcacatcttccattgacagagtacgaccactctctagatgtcgatagtttgaatcctggtgaacagattcttgagaaaatcatttccggaatgtatctgggagaaatcttgcgtagagttcttctgaagatggctgaagaagctgccttctttggcgatatcgtcccacctaagctgaaaataccattcatcataaggacccccaacatgtctgctatgcacagtgatacttccccggatttgaaggttgtaggaagcaagttaaaagacatattggaggtccagactagttctctgaagatgaggaaagttgtgatcagcctatgtaacatcattgcaagccgaggagctcgtttatctgctgcggggatctatggaatcctcaagaaaataggaagagacgcaacaaaagatggagaagctcagaaatctgtgatagcgatggacggtgggctattcgagcattacactcagttcagtgagtcgatgaagagttcattgaaagagttgcttggagatgaagtttcagagagtgttgaagtgatactgtcgaatgatggttcaggtgttggagctgcattacttgctgcttctcactctcagtatctcgaacttgaagatgactctgaaacaagttaatttaaagcttttttgtgtttaaccttcttcttgttgcgtaggttaacaataaaagtagaggtaaatgcctttgggaaattttatttttgacaattttcaggaacaataaaacctggattcttcatcaaagctctgggaaattcaaacgaccagccaatgttgtagaactatacatatatattcgagttctttctatgaaaaaaaaaaaaaaaaaaaaaccttaaattactcacactggc

SEQ ID NO: 118901 - DNA, 537 bp, Arabidopsis thaliana
  unsure (1)..(537): unsure at all n locations
aacccnggggccntttnccnccccggggncnttgggnccccccgggaantgggnnggcccccccccaaagggtggngaacccccngaaacccggggntcccgatggcccggggnctatccgggcattnccccccggtccagtgngccgntgaaggngtccattggaaaagngttgnctgggagatgaagtttccaggggagtgttgaagtgatactgtcgaatgatggtccaggtgttggagctgcattacttgctgcttctcactctccagtatctcgaacttgaagatgactctgaaacaagttaattttaaaagccttttttttgtgtttaaccttcttctttgttttgccgttagggtttaaacaaataaaaaaaaagtaagaaggtaaaaatgcccttttgggaaattttatttttgacaattttcaggaacaataaaacctggattcttcatcaaagctctgggaaattcaaacgaccagccaatgttgtagaactatacatatatattcgagttctttctatgaaaaaaa

SEQ ID NO: 118902 - DNA, 2726 bp, Arabidopsis thaliana
caaaaactacgtgcggggttccgattcaaaatccgccggggacgcagctactccctccgccaaatagctttcaacggtaaattttcacggcgccggttgtcttccttctttgttcttctcaggaatcgctaattgataacttcaattggaagatacaagacaaaaaaagaagatcaatatgggaaacggtgaaagaggaagacctaacaagaagatgaagtatggtggcaaggatgatcaaaagatgaagaacatccaaaacgctgaagattactatgatgatgctgatgaagactctcgtgatggtgaaggagaggagaagaagagagattttactaaattggagttgaagccagatcatggaaacaggcctttgtgggcttgtgctgatggaaggattttcttggagacattttctcctctctataaacaagcttatgactttcttatcgccattgctgaacccgtttgcaggcctgagtcaatgcacgagtataatttaaccccacactcgttgtatgctgctgtttccgttggtcttgagacagaaactatcatttctgttttgaataaactgtctaagactaagctacccaaggagatgattgagttcatccatgcttctactgctaattatgggaaagtaaagctggttttgaagaagaatcggtattttattgagtccccattcccagaggttttgaaaaggcttctcagcgacgatgttataaaccgagctagattttcttctgagccatattatggcggtgatggattctcggtcggcagaacatgcggtgaacttgaagcaggacccggggagctattgaatgaagcggaatttgcagcagcagcagaagagaaagaaactcactcatttgagattgaccctgcacaggtggagaatgtgaagcagcgttgcttaccaaatgccttgaattaccctatgttagaggaatatgacttcaggaacgacaatgttaatcccgatcttgacatggaactgaagccccatgcacaaccgaggccataccaggaaaaaagtttgagcaaaatgtttgggaacgggcgagcaagatctgggattatagtgttgccttgtggtgctggtaaatctctagttggtgtttctgcagctgctcgtataaagaagagttgtctttgtttggcgacgaatgctgtctcagtggatcagtgggccttccagttcaagttgtggtctactataagagatgaccaaatatgtcgtttcacttctgatagtaaagaacgattccgtggaaatgctggtgttgttgtgacaacctataatatggttgcctttggtggtaaacggtctgaggaatcagagaagattatagaagaaatgagaaacagagagtgggggttactgctcatggatgaggtgcatgtggttccagcccatatgtttaggaaagttatcagtatcacaaaatctcactgcaagctaggacttacagccacccttgtgagagaagacgaaaggattacagatttgaacttcctcattggcccgaaactctatgaagccaattggctagatttagttaaaggaggctttattgcaaatgttcagtgtgctgaagtatggtgtcccatgaccaaagagttttttgcagaatatctaaagaaagagaactccaagaaaaagcaggcactttatgtcatgaaccctaacaagttcagagcctgtgagtttctgattcgtttccatgaacaacaacgtggggataaaatcattgtctttgcagacaatctttttgcgcttacagagtatgcgatgaaactccggaaaccaatgatttatggtgcaaccagtcatatcgaaaggacaaaaattctcgaggcgtttaaaaccagtaaagacgtgaacactgtcttcctgtcaaaggttggtgataactccatagatatccctgaagctaatgtgattatccagatttcgtcacatgctggttctagacgtcaagaggctcagcgtttgggtcgtattcttagggctaagggtaaactcgaagatagaatggccggtggaaaagaagagtacaatgcattcttctactcacttgtttcgacagatacacaggaaatgtattattcgacgaaaagacaacagttcttgatagaccaaggttacagctttaaggttataacaagcctcccacctccggacgcgggttcaagcttgagctaccatagtcaagaagaacagttgtctcttcttggaaaggtgatgaatgctggagacgatctggtcggtttagagcaactcgaagaagacacagacggaatggctctacaaaaggcgagacgaagcatgggatcgatgagcgtaatgtccggttcaaaaggaatggtctacatggaatacaactcaggccgtcacaaatccggtcagcaattcaagaaacctaaagacccaaccaaacgacacaatctcttcaaaaaacgttacgtgtgagagaaacaaagagaagctttcaagagttttcggctgtttgtttcgagttgtatgtaacttttgtgcaaatttgttgaaattaacaaataaattacttaaattaataaaaaaatgtatgatgtatcatgtatgtaagtattttttttatttttattttttgtaagtattatgacattgtttaaatatgtaagtgtatgtttctattcgaggaaaaaaagggcggcccgctctagaggatccaagc

SEQ ID NO: 118903 - DNA, 1407 bp, Arabidopsis thaliana
  unsure (1)..(1407): unsure at all n locations
ctttaagtcttaaacgaaacaatggcccttcaagctgcttctttggtctcctctgctttctctgtccgcaaagatggaaaattaaatgcttcagcatcatcatcattcaaagagtctagtctgttcggtatttcactttcggagcaaagcaaagctgactttgtctcttcctcattgagatgcaagagggaacagagcttgaggaataataaagcgattattcgagctcaagcaatcgcgacttcaactccatcagtcacaaaatcttccttagaccgcaagaaaacacttagaaaaggaaacgtggttgtcacgggagcttcttcagggctaggtttagcaacggcaaaggcattagccgagacaggtaaatggcacgtgataatggcgtgcagagacttcctcaaggctgagagagccgctcaatctgcagggatgcctaaggacagctacactgtgatgcatttggacttggcgtctttggacagcgtgaggcagtttgttgataacttcaggcgagctgagatgcctctcgatgtgttggtctgcaatgccgcagtctatcagccaacggctaatcaacctactttcactgctgaagggtttgagcttagcgttgggataaaccatttgggccactttcttctttcaagattgttgattgatgacttgaagaactccgattatccatcaaaacgtctcatcattgttggatccataaccggaaacactaatacattggctggtaatgtacctccaaaggctaatcttggtgatttgaggggactagcaggcgggttgaacgggctaaacagctcggcgatgatagatggaggagattttgttggcgcaaaggcgtataaagatagcaaagtctgcaacatgttgacaatgcaggagtttcataggcgtttccatgaagacaccggcataacttttgcttccctttaccccggttgtattgcaacgactggtttgttcagagagcatattcctcttttccgtaccctcttccctcctttccagaagtacatcacaaaaggttacgtctccgagtcagaggctgggaaaagacttgctcaggtggtggctgatccaagcttgacgaagtcgggagtgtattggagctggaacaagacctcggcttcatttgagaatcagctgtctcaagaagctagcgatgtcgagaaggctcgtagagtttgggaagtcagcgagaagctcgtgggcttggcctaaaatttgatatgagatttttcctcggtgtttcaacctttggtttggcttaagatgagaaacaaacaaaaaaggagacattaataaagcctgtaacaactttgatttantagttgtgttttggctgattctatctgtaatgaaacaaattaattccacttttcaagtttt

SEQ ID NO: 118904 - DNA, 1590 bp, Arabidopsis thaliana
  unsure (1)..(1590): unsure at all n locations
gcagtaccgctccggaattcccgggtcgacccacgcgtccgcccacgcgtccgattcagcaatcacactctctctttgttcgagtaccaacaatggcccttcaagctgcttctttggtctcctctgctttctctgttcgcaaagatgcgaagttgaatgcttcttcatcatctttcaaggactcgagtctttttggtgcctccattaccgaccaaatcaaatccgaacatggatcttcctcgttaagattcaagagagaacagagcttaaggaatctagcaattcgagcccaaaccgctgcgacttcaagccctacagttacaaaatccgtggacggcaagaaaacgttgaggaaaggaaatgtggtggtcactggagcctcgtctgggttaggtctagccacggctaaagctctagctgagacagggaaatggaacgtgataatggcgtgcagagacttccttaaagccgagagagctgctaaatccgtagggatgcctaaagacagctacacagtgatgcatttagacttagcctcgttggacagcgtgagacagtttgttgataatttcaggagaacagagacgcctctcgatgttttggtctgcaatgctgcggtttatttcccgacagctaaagagcctacttacagtgctgaagggtttgagcttagtgttgcgacgaaccatttgggacattttcttctcgcaaggttgttgcttgatgacttgaagaaatctgattacccttcaaagcgtctcatcatcgtcggatccattaccgggaacacgaatacattggcgggtaatgtaccaccgaaggcgaatctcggtgatttgaggggtttagccggcggattaaacggtttaaacagctcagctatgattgatggaggagatttcgacggtgcaaaggcttacaaagacagtaaagtctgcaatatgttgacaatgcaagagtttcacaggcgtttccatgaagaaactggagtcactttcgcttcgctttaccccggttgcatcgcctccacaggtttattccgagagcacattcctctcttccgtgccctcttccctccctttcagaagtacatcactaaaggatatgtctccgaaacagagtcaggcaaaagacttgctcaggtggtgagtgatccaagcttgacgaaatcaggggtttattggagctggaacaatgcttcggcttcttttgagaaccagttatcagaagaagcaagtgacgttgagaaggctcgtaaagtgtgggagatcagtgagaagctcgtgggcttggcctaataaacttgaagtctgttaaatttgatgacacctctcggtaccaatcgaagaaatctagtgaatttccgggatttttagatatctgattctgttgcgaagtttttttatccttattagtgtctgttgagtgtagattgcttggcgagtagcccacaataaagaaataaaaatggcgaatctttagctttaaaaaaaaaaaaaagggaccgaacgcatagnnnnnnnnnnnnnnnnnnnnnnnnnnnnnnnnnnnnnnnnnnnnnnnnnnnnnngtccnnnnnnnnnnnnnnnn

SEQ ID NO: 118905 - DNA, 1308 bp, Arabidopsis thaliana
  unsure (1)..(1308): unsure at all n locations
gactttctatagggaaacctggtacgcctgcaggtaccggtccaaattaacttttataggtaggaggagatagaaatcgaatcttatcgccgcgttaatatgccaccggccggagaactccgacatcaatctccatcaaaggagaaactatcttccgttacccaatccgatgaagcagaagcagcgtcagcagcgatatctgcggcagctgcagatgcggaagctgccggattatggacacagatcaaggcggaagctcgccgtgatgctgaggcggagccagctttagctagctatctatattcgacgattctttctcattcgtctcttgaacgatctatctcgtttcatctaggaaacaagctttgttcctcaacgcttttatccacacttttatacgatctgttcttaaacactttttcctccgatccttctcttcgtaacgccaccgtcgcagatctacgcgctgctcgtgttcgtgatcctgcttgtatctcgttctctcattgtctcctcaattacaaaggcttcttagctattcaggcgcatcgtgtatcacacaagctatggacacaatcacggaagccattagcattagctctacactcaagaatctccgatgtattcgctgttgatatccatccagcagcgaagatcggaaaagggatacttctagaccacgcaaccggagttgtagtcggagaaacagcggtgattgggaacaatgtttcaatccttcaccatgtgacactaggtggaacaggtaaagcttgtggagatagacatccgaagatcggtgacggttgtttgattggagctggagcgactattcttggaaatgtgaagattggtgcaggtgctaaagtaggagctggttctgttgtgctgattgacgtgccttgtcgaggtactgcggttgggaatccggcgagacttgtcggagggaaagagaagccaacgattcatgatgaggaatgtcctggagaatcgatggatcatacttcattcatctcggaatggtcagattacatcatataaagttgttgttataattgtttctgtggttttgaaagtgaaaaactttctgaccattcgcttatagagaggtgctgaggtaagtgagctttgttgtatttgtaatttacaaaacatcttacgatgttcaatacaagaaatggccttaatttgatgttattattccnaaaaaaaaaaaaaaaaaaaaaaaaaaaaaagggcggccgctctagaggatccaagcttacgtgacgcgtgcatgcgacgtcatagatttttctatagtgtcaccta

SEQ ID NO: 118906 - DNA, 1149 bp, Arabidopsis thaliana
atggagagtggttccaacagcacttcttgtccaatggcttttgccggggataatagtgatggtccgatgtgtcctatgatgatgatgatgccgcccatcatgacatcacatcaacatcatggtcatgatcatcaacatcaacaacaagaacatgatggttatgcatatcagtcacaccaccaacaaagtagttccctttttcttcaatcactagctcctccccaaggaactaagaacaaagttgcttcttcttcttctccttcctcttgtgctcctgcctattctctaatggagatccatcataacgaaatcgttgcaggaggaatcaacccttgctcctctttctcttcttcagcctctgtcaaggccaagatcatggctcatcctcactaccaccgcctcttggccgcttatgtcaattgtcagaaggttggagcaccaccggaggttgtggcgaggctggaggaggcatgctcgtctgccgcagccgcagccgcatctatggggccaacagggtgtcttggtgaagatccagggcttgatcaattcatggaagcttactgtgaaatgctcgttaagtatgagcaagagctctccaaacctttcaaggaagctatggtcttccttcaacgtgtcgagtgtcaattcaaatccctctctctatcctcaccttcctctttctccggttatggagagacagcaattgataggaacaataatgggtcatccgaggaagaagtcgatatgaacaatgaatttgtagatccacaagctgaggatagagagcttaaaggacagctcttgcgcaagtacagtggttacttagggagcctcaagcaagagttcatgaagaagaggaagaaaggaaagctccctaaagaagctcgtcaacaactgcttgattggtggagccgtcactacaaatggccttacccttcggagcaacaaaagctcgcccttgcggaatcaacggggctggaccagaaacagataaacaattggttcataaaccagaggaaacggcattggaagccgtcggaggacatgcagtttgtagtaatggacgcaacacatcctcaccattacttcatggataatgtcttggacaatcctttcccaatggatcacatctcctccaccatgctttga

SEQ ID NO: 118907 - DNA, 2897 bp, Arabidopsis thaliana
  unsure (1)..(2897): unsure at all n locations
cacacgcgtccgggaccagatcccgaattcttcttctgaccaccgaacgattgagtttctccgatcagatctcagtttctgggaataattcgaagtgaaaaaatggcgcagcatctgttgcacgggactttacatgctaccatctatgaagttgatgccctccatggtggtggtgttaggcaaggcttccttggcaagattctggcaaatgtagaagagacgattggtgttggtaaaggagaaacacagttgtatgcgacgattgatctgcaaaaagctagagttgggagaaccaggaagatcaaaaatgaacctaagaacccaaagtggtatgagtcgtttcatatttactgtgctcacttggcttctgatatcatcttcactgttaaagatgataatcccattggagctacccttatcggaagagcttacattcctgttgatcaagtcattaacggcgaggaagtggatcagtgggttgagatcttggataatgacagaaaccctattcagggaggatcaaagattcatgtcaagcttcaatatttccatgttgaggaggatcgtaactggaacatgggtatcaaaagtgccaagttccctggagtgccatacacattcttctcgcagagacaaggctgcaaagtttctctgtaccaagatgcccatattccagacaactttgtccctagaattcctctcgctggagggaagaactatgagcctcaaagatgttgggaggatatttttgatactattagcaatgcaaaacacttgatctacattactggttggtctgtttatgctgagattgctttagtgagggactcgaggaggcctaagcctggaggtgatgtgaccattggtgagctactcaagaagaaggctagtgaaggtgtcagggttcttttgcttgtttgggatgacagaacttctgttgatgtgctgaagaaagatgggctcatggctactcatgatgaagagaccgagaatttcttcagggaacgggatgtccattgtattctgtgccctcgtaacccggatgacggtggtagcatagtccaaagtttgcagatctctactatgttcacgcatcatcagaaaatcgttgttgtggacagcgagatgccaagcagaggaggatcagaaatgaggagaattgtgagttttgttggcggtattgatctttgtgatggaagatacgactactccgttccactccttgttcaggacattggacacagtccaccatgatgacttccatcaacctaacttcactggtgctgctatcactaaaggtggtccaagggagccttggcatgacattcactcccgtcttgaaggtccaattgcttgggatgtcatgtacaacttcgagcagagatggagcaagcagggtggtaaagacattctggttaagttgagagatcttagtgatattattatcaccccttctcctgttatgttccaagaggaccacgatgtgtggaatgtccaattgtttaggtccattgatggaggagctgctgctgggtttcccgagtcgcctgaagctgctgcggaagccgggcttgtaagtgggaaagataacatcattgataggagtatccaagatgcttacattcatgcaatcagacgtgctaaggatttcatctacgttgaaaaccagtacttccttgggagttcttttgcttgggcagccgatggtattactcctgaggacatcaatgccctgcacttaatcccaaaagagttgtcgctgaagatagttagcaagattgagaaaggagagaagttcagggtctatgttgtggttccaatgtggccagaaggtctcccagagagtggatcagtgcaagctatattagactggcagaggaggaccatggagatgatgtacaaggatgtgattcaggctctcagggcccagggtcttgaggaagatccaagaaactatctgacattcttctgtcttggaaaccgtgaggtcaagaaagatggagagtatgagcctgctgagaaaccagaccccgacactgattacatgagggcgcaagaagcacgccgtttcatgatttacgtccacaccaaaatgatgatcgttgacgatgaatacattatcattgggtctgctaacatcaaccagaggtcaatggacggtgcaagagactctgagatagcaatgggaggttatcaaccacatcacttgtcccatagacaaccagctcgtggccagatccatgggtttcgtatgtcactctggtacgaacacctgggaatgctcgatgaaaccttcctcgatccaaagctttcggaatcgattgagaaagttaaccgcatttctgacaagtattgggacttttactcaagtgagtcactcgaacatgaccttcctggtcacttgctccgctacccgatcggtgtagccagcgaaggcgacatcactgagcttccaggatttgaattcttcccggacacaaaggcccgtatcctcggcaccaaatcagactacctgcctccaatccttacaacctaatctcactaagcatgtcaagtaatgatctctctctccctctctgctttgctgctgttgtagctttgaataaaacttgagtgtctacctttagaattaagaagtcaaatggttgttatgatgatgcacttctttacccctttggtttttatattcgtacaatgacgtggtgagagaatgtagctttgtgatcttgttttgttgttgttatgtacctttggacttatgaatcttatatctgatccttttctttttatttagtgtgtttcacatccaaaaaaagnnnnnnnnnnnnnnnnnnnnnnnnnnnnnnnnnnnnnnnnnnnnnnnnnnnnnnnnnnnnnnnnnnnnnnnnnnnnnnncg

SEQ ID NO: 118908 - DNA, 864 bp, Arabidopsis thaliana
  unsure (1)..(864): unsure at all n locations
gcctgcggtccggnccggatncccgggtgaccccgcgggcgatgcggtaagaagatggagagatgagcctgtgagaaccagaccccgacactgattacatgagggcgcaagaagcacgccgtttcatgatttacgtccacaccaaaatgatgatcgttgacgatgaatacattancantgttgctgctaatttgggggggaggncaanggacggngcaagagacncagagaaagcaccgggaggggaggaaccacagcacccgccccaaagacaaccagcncgnggccagaaccangggnnnncgagggcacncngggacgaacaccngggaaggcncgangaaaccnnncncgaaccaccaagcngggaaggcattgagaaagtaaaccgcatttctgacaagtattgggacttttactcaagtgagtcactcgaacatgaccttcctggtcacttgctcctgctacccgatcggtgtagccagcgaaggagacatccctgagctttcaggatttgaattcctcccggaccccaagggccggatcctcggccccaaatcagaattcccgcctcccatcctttcaacctaatctcccttagcatgtccagtaatggtttctctttccctttttggcttgccggtggtggaaccttggattaaaccttaatggcctcccttaagaattaagaatccaaagggtggtaatattaagccccttctttcccccttgggttttaatattggtccaatgacgtgttaaaaaaaggaagcttgggcatctggtttggtggtggtaaggacccttgggccttatgccgcccgcaaattcttccagcccggggaagcctggtatttctccagc

SEQ ID NO: 118909 - DNA, 1320 bp, Arabidopsis thaliana
gactcatattaggaaatctggtacgcctaaatgtaccggtccggaattcccgggtcgacccacgcgtgcgtctcgtcttcaagtgaacagattcgcatcaaaccctaagaaactgaagatgaggccgatcctgatgaagggacatgaacgtccattgacgtttctgaggtacaacagagaaggagatctgcttttctcctgcgccaaggaccacacacccaccctctggtttgccgataacggcgagcgccttggaacttaccgtggtcacaacggtgctgtttggtgctgtgatgtctcccgagactcgtcaagattgatcactggtagtgctgatcagactgcaaagctgtgggatgtaaaatctggaaaagaattgttcactttcaagtttaatgcccctacgaggtctgtggatttcgctgttggagatcgtcttgcagtgattaccactgatcacttcgtggaccgtaccgctgctattcatgtgaagcgtattgcggaagatcctgaggaacaggatgctgagtctgtgcttgtccttcattgtcctgatggaaagaagaggatcaatagagctgtttggggtcccctgaaccaaactattgttagttgtggtgaagataaagttatcagaatctgggatgccgagacgggaaaattgctcaagcaatcagatgaggaagtgggtcacaagaaggacattacatcgctctgcaaagcagctgatgactctcacttccttacaggttcacttgacaaaactgcaaagctttgggacatgagaacgctgactcttcttaagacttacaccactgtggtgcccgtaaatgctgtctccctgtctccacttctcaaccatgttgtacttggaggtggtgaagatgcatcagctgtgactaccactgatcatcgtgctggaaagtttgaagctaagttttgcgacaagattctgcaagaggaaattggtggtgtgaaaggtcattttggacctataaatgctttggcattcaatcctgatgggaagagtttctctagtggaggtgaaggcggttacgtgaggctgcatcattttgactccgactacttcaacatcaagatttagattccgactacttgaacgtcaaccttttagaatctttgaaaaagtctcccattccggattttgttttctctctcttttaacattttcatgtttttatttactaccaatacaaataccttgatgataaagcttttgaattttgacagaaaaaaaaaaaaaaaaagggcggccgctttaaaggatacccagcttacggacgggggccagccacgtta

SEQ ID NO: 118910 - DNA, 1964 bp, Arabidopsis thaliana
  unsure (1)..(1964): unsure at all n locations
nnnnnnnnnnnnnnnnnnnnnnnnnnnnnnnnnnnnnnnnnnnnnnnnnnnnnnnnnnnnnnnnnnnnnnnnnnnnnnnngacccacgcgtccgaggagaagaaggataaggatgataacggtaagcgaagtttcctcttactcttcttcttcttcaaacttcgcgtctctgtctcgtctcaatcacaaatcatcttcgagattgcgaagctcttctctttacaaaggaagcttcttctctgtttcgacaaagaccaggaggaacacttgtaaagccaaatcatggaatctcggtcttgttatcaactctagaagctctgaggcttcggtttttgatccgttggggatcaatccagatgaaacttctggtttaagtagcatttgggaaagctttgtgagtcttttgtcaccatcatttgaaagctcttccggtaacaggcgagataagccgtcttctggtagaggcgtggcagctgctattgaggacagttccattgattttggagatttcttcaaagggccattgccagggaagtttctgaagcttcttgggtttttagctctctctcggcttggaatttacataccactcggcggggttaatcgagaagcttttgttggaaatttggatcagaatagcattttgagcactttggatacattttctggtggaggcataggtagacttggtatatgttctctcgggattgttcctttcatcaacgctcagattgtgtttcagcttcttgctcaagtctatccaaagttgcaagatcttcagaaaaaagaaggtgaagctggtagaaaaaagattcttcagtatactagatatgcttcagttggttttgcgatagtacaagcaatcggacaagtgttttaccttcgtccttacgttaatgacttcagcacggaatgggttgtttcttctgttacgttgttaacgcttggttctcttctcactacatatattggagagagaatctctgatctgaaacttggaaatggcacttccctattgattttcacaagtatcatctcttacttgcctgcatcattcggtagaacaacagcagaggccttacaggaaggaaactatactggtcttggaaccatcgttgtttcatttctcctcttggtactcgggatagtatatgttcaggaagcagagaggaaaattccgctcaattatgcctcgcgatacaccagcaaagctggtgggcttcagaaatctgcttatcttccattcaaggtcaatagtgctggagtaatgcctatcatattctccacatcatctcttgctcttcctgctactttagcacgatttaccggcatatctgctttgaagaatgttgcttttgctttaacccctggaggttctttctatcttccaaccaatatacttctcatagctttcttcaactactactacactttcttgcaacttgacccggacgacgtgagtgaacaattaaaacgccaaggtgcatcaatccctctagtccgacctggtaaaagcactgctctcttcatcaaaaccgtccttggccggatatcggttcttggttctgcatttctggctgttctagctgctggtcctgctgtagtcgaacagatcactcacttgacagcattcagaggatttgcaggcacttctgttctgatccttgtcgggtgtgcgacagatactgcaagaaaggttcaagcagagataatctcgcaaaagtacaagaacattgagttttacgagcttgacaagtatgatccatgaactggaccttctgttttacatataatacccatcaaaccaagttactgtgttctcttgtcatagattgtaacaaatgttttaaactttgattagtatataatgcacttttgtcatgagcttgccaaaaagggcgccagctctagaggatccaagcttacgtacgcgtgcatgcgacgtcatagatcttctataggtc

SEQ ID NO: 118911 - DNA, 2818 bp, Arabidopsis thaliana
  unsure (1)..(2818): unsure at all n locations
ctgngctctttcagatcccattatcacaaacacttcgctctctctctctcagagaagaaaccaaagaagaagaaaaagctctcaactttcttcgatttctcagggaactctttcgttaatctcaaactcaatcatgtctaccccagctgaatcttcagactcgaaatcgaagaaagatttcagtactgctattctcgagaggaagaagtctccgaaccgtctcgtcgtcgatgaggctatcaacgatgataactccgtcgtctctcttcaccctgcaaccatggagaagcttcagctcttccgtggtgataccattctcatcaagggtaagaagaggaaggacactgtctgcattgctcttgctgatgagacatgtgaggagccaaagatcagaatgaataaagtagtcagatctaacttgagggttagactgggagatgttatatctgttcaccaatgcccagacgtcaagtacggaaagcgtgttcacatcctgcctgttgatgatactgttgaaggagtgactggaaacctatttgatgcttacctgaaaccttatttccttgaggcataccgtccagtgaggaagggtgatctcttcctagtcagaggaggaatgaggagtgtggagttcaaagttatagagacagatcctgctgagtactgcgtggttgctccagacacagagattttctgtgagggtgagcctgtgaagagagaggatgaagaaaggctagatgatgtaggttatgatgatgttggtggtgtcaggaaacagatggctcagattagggaacttgttgaacttcccttgaggcatccacagctattcaagtcgattggtgttaagccaccgaagggaattcttctttatggaccacctgggtctggaaagactttgatcgctcgtgctgtggctaatgaaacgggtgcctttttcttctgtatcaacggacctgagatcatgtccaaattggctggtgagagtgagagcaacctcaggaaagcattcgaggaggctgagaaaaatgcgccttcaatcatattcattgatgagatcgactctattgcaccgaaaagagagaagactaatggagaggttgagaggaggattgtctctcagctccttacgctaatggatggactgaaatctcgtgctcatgttatcgtcatgggagcaaccaatcgccccaacagtatcgacccagctttgagaaggtttggaagatttgacagggagatcgatattggagttcctgacgaaattggacgtcttgaagttctgaggatccatacaaagaacatgaagctggctgaagatgtggatctcgaaaggatctcaaaggacacacacggttacgtcggtgctgatcttgcagctttgtgcacagaggccgccctgcaatgcatcagggagaagatggatgtgattgatctggaagatgactccatagacgctgaaatcctcaattccatggcagtcactaatgaacatttccacactgctctcgggaacagcaacccatctgcacttcgtgaaactgttgtggaggttcccaacgtctcttggaatgatattggaggtcttgagaatgtcaagagagagctccaggagactgttcaatacccagtcgagcacccagagaagtttgagaaattcgggatgtctccatcaaagggagtccttttctacggtcctcctggatgtgggaaaacccttttggccaaagctattgccaacgagtgccaagctaatttcatcagtgtcaagggtcccgagcttctgacaatgtggtttggagagagtgaagcaaatgttcgtgaaatcttcgacaaggcccgtcaatccgctccatgtgttcttttctttgatgagctcgactccattgcaactcagagaggaggtggaagtggtggcgatggaggtggtgctgcggacagagtcttgaaccagcttttgactgagatggacggaatgaatgccaagaaaaccgtcttcatcatcggagctaccaacagacctgacattatcgattcagctcttctccgtcctggaaggcttgaccagctcatttacattccactaccagatgaggattcccgtctcaatatcttcaaggccgccttgaggaaatctcctattgctaaagatgtagacatcggtgcacttgctaaatacactcagggtttcagtggtgctgatatcactgagatttgccagagagcttgcaagtacgccatcagagaaaacattgagaaggacattgaaaaggagaagaggaggagcgagaacccagaggcaatggaggaagatggagtggatgaagtatcagagatcaaagctgcacactttgaggagtcgatgaagtatgcgcgtaggagtgtgagtgatgcagacatcaggaagtaccaagcctttgctcagacgttgcagcagtctagagggttcggttctgagttcaggttcgagaattctgctggttcaggtgccaccactggagtcgcagatccgtttgccacgtctgcagccgctgctggggacgatgatgatctctacaattagtgataacttctttatcctttttttttttaagttttaaaactcgaattctctacttttggattactggggaaagtgatactgattctttcctcgtgtttttaagttatccgaatctcttgtgtttgggtttttaatcaatgttcttaattttcgtttcaaaaaaaaaaagatcataaaaaagggcggcccctctacgagggtccaagcttacgtaccgccggcgtgcatgcgacgtcaagatcttctatagggtac

SEQ ID NO: 118912 - DNA, 533 bp, Arabidopsis thaliana
ctggacgcctgcaggtaccggtccggatttcccggggcgacccacgcgtccgcccacgggtcccgacggctgcgagaagacgacagaagggtacggctgcgagaagacgacagaaggggacggctgcgagaagacgacagaaggggatgtgattgatctggaagatgactccatcccccctgaaagccgcgggtccatggcagtcactaatgaacatttccacaccgctctcgggaacagcaacccatccgcacttcgtgaaactgggtgtggagggtcccaacgtcccttggaatgatattggaggccttgagaatgtcaagagagagctccaggagactgttcaatacccaggcgagcacccagagaaggttgagaaattcgggatgcccccatcaaagggaggccctttctacgggcctccgggatgggggaacgccccttggccaaggtattggcaaccagggccaagcaaattcatcagtggcaaggggcccgagccccgacaaagggggtggagagagagagcaaag

SEQ ID NO: 118913 - DNA, 649 bp, Arabidopsis thaliana
  unsure (1)..(649): unsure at all n locations
gcctgcaggtaccggtctggaattcccgggtcgacccacgcgtccgcgaaattggacgtcttgaagttctgaggatccatacaaagaacatgaagctggctgaagatgtggatctcgaaaggatctcaaaggacacacacggttacgtcggtgctgatcttgcagctttgtgcacagaggccgccctgcaatgcatcagggagaagatggatgtgattgatctggaagatgactccatagacgctgaaatcctcaattccatggcagtcactaatgaacatttccacactgctctcgggaacagcaacccatctgcacttcgtgaaacttgttgtggaggttcccaacggtctcttggaatgatattggaggtcttgagaatgtcaagagagagctccaggagactgttcaataccccagtcgaggcacccagagaaggttgtaagaaattcggggttgtcttccatcaaaagggagtccttttcttacgggcctccctggatgtggggaaacccttttggccaagntntttncaacgggtgccaaggttatttnacnagtntaaggggcccgnggtttttcaaatnggttttgggnggtaggaattttcggaattttgaaagcngnaacggcnnggttttttttnnng

SEQ ID NO: 118914 - DNA, 2940 bp, Arabidopsis thaliana
gttttttcttctgaagagtgatatatattctacctttctctggttaaagaaactccctgaatccaccggttatgtcttgaccggctttaagcctataaactgatgccctaagacacctttttaggtttctcaataattctccgcatctatcttttcttctccacaagtaagggaaccagaaaaccagggaagaatccgagcaagctagggtttcattgtgtgcacaaaatgggatatacaggcagaagaaaatcgagataaatcaactaaatgatttggataatcatcttgaagatttgaaggatttcgagactaagtccggcgcagaagtcaccatggagaatcctttagaagaagagcttcaagatcctaatcagcgtcccaacaaaaagaagcgttaccaccgtcacacacaacgccagattcaagagctagagtcgttcttcaaggaatgtcctcatccagacgataagcaaagaaaggagctgagtcgcgagctaagcttagaacctcttcaagtcaagttctggttccaaaacaaacgcactcaaatgaaggcacaacatgagaggcacgagaaccagatactgaagtcagaaaatgacaagctccgagcagagaacaataggtacaaggatgctctaagcaacgcaacatgcccaaactgtggtggtccggcagctataggagaaatgtccttcgacgaacagcatttaaggatcgaaaatgctcgtttacgcgaagagattgacagaatctctgccatagctgctaaatacgtagggaagcctttaatggctaattcctcttctttccctcagctctcttcttcacaccacattccctcgcgctcgcttgatcttgaagttgggaactttgggaacaataacaatagccacactggtttcgttggggaaatgtttggaagcagcgacattttgaggtcggtttcgataccttctgaggctgataagcctatgattgttgagttagctgttgcagcaatggaagagcttgtgagaatggctcaaactggtgatcccttatgggtttcaagcgataattctgttgagattctcaatgaagaagagtattttaggacgtttcctagaggaattggaccgaaacctatcggtttgagatcagaagcttcaagagagtctactgttgttatcatgaatcatatcaatctcattgagattctaatggatgtgaatcaatggtctagtgtgttctgcgggattgtatcaagagcattgactctagaagttctctcaactggcgtacgagggaactacaatggggcattgcaagtgatgacagcagagttccaagtcccatcgccgcttgtccctactcgtgagaactactttgtaaggtactgtaaacagcacagtgacggtatttgggcggttgtggatgtctctttggacagcctaagaccaagtccgatcactagaagcagaagaagaccctctggttgtctgattcaagaattgcagaatggttactccaaggtgacatgggtagagcatattgaggtggatgatagatcggttcacaacatgtataaaccgttggttaataccggtttagctttcggtgcaaaacgttgggtggctacacttgaccgccaatgtgagcggctcgccagttccatggccagcaacattccggcttgtgatctttccgtgataacgagtcctgaggggagaaagagcatgctgaaactagcggagagaatggtgatgagcttctgtaccggagtcggcgcgtcaaccgccgatgcctggactacattgtcgaccacaggatccgacgacgttcgggtcatgacccgaaagagcatggatgatccgggaagacctccaggcatcgttctcagcgccgctacttctttctggatccctgtagctccaaaacgagtgttcgattttctcagagatgaaaactcaagaagcgagtgggatatactttccaatggaggcttggttcaagaaatggctcatatcgcaaatggtcgtgatcctgggaatagtgtctccttgcttcgagtcaatagtgggaactcagggcagagcaacatgttgatcttacaagaaagttgtacggacgcatcagggtcctatgtgatatacgcaccagttgatataatagctatgaacgttgtcctgagtggtggtgatccggattatgtcgctttgttaccatccggattcgctattttgccggatggctctgctagaggaggaggaggtagtgctaatgccagtgctggagccggagttgaaggaggaggagaggggaataatcttgaagtggttactactactgggagttgtggcggttcactactcacagttgcgtttcagatacttgttgactctgttcctaccgctaaactctctctcggttcagttgctacagtcaatagtctgatcaaatgcactgtcgagcggattaaagccgctctggcctgcgacggagcctaatcgatgttttcggaaggtaagagtgaaaggggaggtttagggagtttatgataatgtttgtgttcttttggtttttaaagtcttttgagattctccaaaggaagtcaagaacgctcctttttgcgtttaatctcatttccgcgtttgttagcggacgggccaaagaaagaggcttgagaaagaaaaggtaaagaggttcgggtattgacttctgctggaaccaaaaaaaaaggaatcgggtttgttgtgtttcggcggtttagcattttgcgttttctttgttattatttatcattgactagtgaacagtttagcgttctgcttttcgcgtctactgtgaaactccttgttattaagccactctagtggtactgtcattatatattatgaatctatgaaactgtgtttattagtttgtttctttaatccaaacttgagattctcttct

SEQ ID NO: 118915 - DNA, 2012 bp, Arabidopsis thaliana
  unsure (1)..(2012): unsure at all n locations
atattacatgactttagcctaagaaaaacttaagtcagttgtaaaacaatatcgatgtgtgattaagaagagatccaatttaacattacccacacaatcatttgattatttcctcctctccgtatctgtgtctctcttctcttgatcttttagtgttcttgctttgtcgcttcaacgcttaagtttggatttgtgtgagtctgcataatcatggcgaggaagatgcttgttgatggtgagattgataaggtggcggctgatgaagccaacgcgacgcactatgattttgatttgtttgtcatcggtgccgggagtggcggtgttcgtgctgctaggttttcggctaatcatggcgctaaggttggtatttgtgagcttccatttcaccctattagctctgaggagattggaggcgttggtggaacctgtgttatccgtggttgtgttcctaaaaagattctcgtctatggagctacttacggtggtgaacttgaggatgctaaaaattatgggtgggaaataaatgagaaagtcgacttcacatggaagaagcttttgcaaaagaagactgatgagatactaagactgaataatatctacaagcggttattggcaaatgctgcggtgaaattgtatgaaggtgaaggaagagtagttggtcccaacgaagtggaggtgagacaaatagatggcacaaaaataagttataccgcaaagcacatattgattgccactggcagtcgggcgcaaaagcctaatattcctggacatgagctggctattacatctgatgaagctttgagcttggaagaatttcccaagcgtgctatagtgcttggaggagggtatattgctgtggagtttgcatcaatatggcgtggaatgggtgctactgtagatttattcttcaggaaggaacttccgctaaggggttttgatgacgaaatgagggcactagttgctagaaatcttgaaggaaggggcgttaatctgcatccacaaacaagtttgactcagttgacaaaaacagaccaggggatcaaagtcatatcgtcccatggggaggaattcgtggcagatgtcgtcctatttgctactggcagaagtcctaataccaaaagattgaatttagaagctgttggtgttgaacttgatcaggctggagctgtgaaggttgacgagtattcacgaactaatatacctagcatatgggctgtaggagatgccacaaaccgaattaaccttacacctgttgcgttaatggaggccacctgttttgcgaacactgcttttggtggaaagcctactaaagcagaatacagcaatgtcgcctgtgctgtattttgcataccaccactagctgtagtgggtctcagcgaagaagaagcagtagaacaagcaaccggtgatattctggtcttcacctcaggctttaatccaatgaagaacaccatttctggacgccaggaaaagacattgatgaagctaatagttgatgagaagagtgataaggttattggagcatccatgtgcggtcctgatgcagctgagatcatgcaggggattgcaattgcgctcaagtgtggagcaaccaaagcacaatttgatagcacggttgggatacatccatcttctgcagaggaatttgtgacaatgcgcagtgtgaccagacgcattgcccacaaacccaaacctaagacaaatctatgaaccgcaaaatataaagagctatatagcatgaaaactcggtacacttagtttgatcaaagagtcagacaacgatgagtttaatcatactcgtgtcccaataaaggatttgtaatttttgtttgtttgtatgatgcttctcttcttacttacttgagaaaacatcaaggtttcttctcttattgcttagtggaactttattacaaagaattattctctgaaaaaaaaaaaaaaagnnnnnnnnnnnnnnnnnnnnnnnnnnnnnnnnnnnnnnnnnnnnnnnnnnnnnnnnnnnnnnnngtaac

SEQ ID NO: 118916 - DNA, 5484 bp, Arabidopsis thaliana
acaaccaaataagcgacggcgattagagagtcctgcgtagtcgtgctcactgatcactcttagctcgtgccgtgatctgagactgagaaaacatcaccggttgggttttctctacgattccggtgcaccgtacacttcaccgcagtggataaatctctgcttccattttgactttttgaaaaataaaaactacaacagtcgcagagagattaaacttcgaaatccgatcgatcgctttctccctcggcgtttcttctcaggagcttcattccatggctctacagtctcccggagctaccggagcttcatcttccgtttcccggcttctctcttccgcgaaattaagctctactaagactatcttctctgttgacttcgtcagatcctactgtatttctaaaggaaccaaacggcgtaacgaactctccggctttcgcggctacagtccactgctcaagtcctcgctgaggtctccgttttcggtgaaagcgatccttaattctgaccgagccgctggtgatgcatcgccctccttttctgatctgaaacctcaggtggcttatttggaagatataatatcggaaaggggagcatgtggtgttgggtttattgcaaacttggagaataaggctacacataagattgtaaatgatgctcttatagcacttggttgtatggaacacaggggaggttgtggttctgataatacttctggtgatggttctggtttgatgacttccattccttgggatctatttaacgaatgggctgagaagcaaggaatcgcctcttttgataggacgcatacgggtgttggaatgctgtttctaccgagagatgacaacattaggaaagaagccaagaaagtgattacaagtatttttgagaaagagggcctggaggtgcttggatggagagatgttcccgtggaagcgtccattgttggccataatgcaaaacagacgatgccaaacacggaacaggtctttgttagaattgtcaaagacgataaagtagacgacgttgaacgagaactttacatttgcaggaagctgatcgaaagagcagttgcttctgaaagttgggcctctgagctctactttagctccttgtccaatcagaccattgtttacaagggaatgcttcgttctgaagttcttgggttattttaccccgaccttcaaaatgatctttataaatctcctttcgccatctatcatcgaagatttagcacaaatactagtcccagatggcatcttgctcagcccatgaggtttcttgggcacaatggggagatcaataccatacaggggaacctaaactggatgacgtctcgagaagcatctctaagatcacctgtctggcatggacgtgaaaatgacattcgtccaattagcaatccaaaggcttcagactctgctaaccttgacagtgcggcggagctattgataagaagtggccggactccagaggaatctcttatgattcttgtcccagaggcgtataaaaatcacccgactttaatgattaaataccctgaggctgtagacttctatgactattacaaggggcagatggagccctgggatggacctgctttggtattgttcagtgatggaaagactgttggagcttgccttgaccgcaatggacttcgaccagctagatattggcggacaagtgataatgttgtctatgtagcctctgaggtcggagttcttccaatggatgaatcgaaagtcaccatgaagggtcgtctaggacctggtatgatgatatctgttgacttagagaatggacaggtatatgagaacacagaagtgaagaagcgggttgcatcatataacccatatggaaagtgggttagtgaaaacctgcgaaacctgaagccttctaattatctctcgtcagcgatcctggagactgatgagaccttaagacgccaacaggcgtttggctactcgagtgaagatgttcaaatggtaattgagtcgatggctgcacaaggaaaagaaccaacgttttgcatgggggatgatactccagtggcagtattgtctcaaaagccacatatgctttatgattatttcaagcagcggtttgctcaggttacaaatccagctattgaccctctccgggaaggattagtcatgtcccttgaagttaatattggaaagcgtggaaatatattggaggttgggcctcagaatgtttcacaggttgttttgtctggtcctgtgctaaatgaacgggagcttgagggtttgcttggtgatccactgttaaaatctcaaatcttgcccacattttttgacattcgtagaggaattgaaggatctttgaagaagggtcttctaaaactttgtgaagctgcagatgaagctgttcgtaatggttcccaagtacttgttctctcagacagatctgataatccggaaccaactcgacctgcaattccaatgttgttggctgtgggtgctgttcaccaacatctgatccagaacggtcttcggatgtcagcttcgataattgcagatacagctcagtgctttagtacacatcactttgcctgtttgattggatatggagcaagtgctatatgcccgcacctagcactggagacgtgtagacagtggcgtctgagcaacaagaccgtgaacatgatgagaaacggaaaaatgcctactgtaactatggaacaggctcagaagaattaccgcaaggctgttaacactggtcttcttaaggttctctctaagatgggcatctcgttattctctagttattgtggagcacaaatatttgaaatttatggattgggaaatgaggttgtggaattttcgttccgtggtagtgcatctcaaattggtggattaactttagatgagctggctagggagacgttaactttctgggtgagggcattttctgaggatacagccaaacggctagagaacttcggtttcattcagtttaggcctggaggtgaatatcatggaaacaacccagaaatgtctaaattacttcataaagccgtccgcgaaaagagtgagacagcctatgcagtctatcagcagcatttagccaaccgtcctattacggttttccgcgatcttcttgagttcaaaagtgaccgtaaccctatccctgttgggaaggttgagcctgcttcctctatcgtggaacggttttgtacaggtggaatgtctcttggagcaatctcaagagaaactcatgagacaattgctattgcaatgaacagattaggaggaaaatccaactcaggggaaggaggcgaggatccgatccgctggaagccgctaacagatgttgttgatgggtattcttcaactctgccacatcttaaaggtcttcgaaatggggatacggctacaagtgctattaagcaggttgcctcagggcgttttggtgtcactccgacgtttttggttaatgcggaccagttggaaattaaagttgctcaaggggcgaagccaggtgaaggtggccaacttcctgggaaaaaagtcagcgcatatattgctagacttagaaattctaaaccaggagttccgcttatttctccacctccacatcatgatatttattccatagaggatctggcacagttgatctttgatctccatcaggtcaaccccaaggcaaaagtgtcagtcaagcttgtatcagaaactggaataggaacagttgcctccggagtagcgaaggctaatgccgatatcatacagatatcaggatatgatggtggaactggagccagccctataagttccattaagcatgctggtggcccgtgggagctgggactagctgaaacccagaagactctcattggaaatggactaagggaaagagttattatcagggttgatggcggattcaaaagtggtgtggatgtgttgatagctgcagctatgggcgctgatgagtatggttttggtactctggcaatgattgccacaggatgtatcatggctcgcatttgccacactaataactgccccgttggtgttgccagtcagagagaggaactgcgtgcacgtttccccggtcttcctggtgatcttgtcaacttcttcttgtatattgcagaggaggtgaggggcatattagctcagctgggatatgaaaagttggatgatataattgggcggacagatttgctaaaggctagggatatctcgctcgtgaaaactcatctcgacctcagttatctcttatcttctgttgggctaccaaaacgaagcagtacttccattaggaagcaggaggttcattcaaatggtcctgttcttgatgatactctacttcaggatccagagataatggatgcaattgagaatgaaaagacggttcacaaaaccatgagtatatacaatgtagatcgttctgtttgcggtcggattgctggggtgattgcgaagaaatacggagacactggttttgctggacaactgaacctaacgttcactggaagtgctggccaatcttttgcatgtttcctaactcctggaatgaatatacgtcttgtgggtgaagccaacgactatgtgggaaagggaatggcgggaggtgaagttgtgatattaccagtggaatcgactggttttcgtcccgaagacgcaactattgtaggaaacacttgtctgtatggtgcaactggtggtttattatttgtcagaggcaaagcaggggagagatttgcggttagaaactctctagctcaagctgttgttgaaggcactggagatcattgctgtgaatatatgactggtggttgtgtcgttatacttgggaaagttggtagaaatgtagccgctgggatgacaggtggattggcatatatccttgacgaagacaacactctcctccctaagatgaacaaagagatagtgaagatccaaagagtgacttcaccagtgggacaaacacagcttaaaagcctgatccaggctcatgtggagaaaacgggaagcagcaaaggggcaatgattgtggaagagtgggataagtatctagcaatgttctggcaacttgtacctccgagtgaagaagacacacctgaggctaactcagaccacatcctgaaaacaaccacaggagatgaagaacaggtttcaagcacattagcagagaagtaaaacctacacatttgatcgtggtttcctctttgtacagtcaaagtcgtggtggaggagataagtaagtctctcagttgctgagaacataacaatttcaaagttcaccacttgattttgatgtggttttaattcgttctggactcgcttatcttttggtttacttcgtcccagtcacgttagtaataaaacgaaatccagcatgcttgtactttgtatggaaacatcattagtcttccgattcccgattattaagaaagggttttcgattttaggaaaaaaaaaaaagggcgaccgctctagaggatccaagcttacgtacgcg

SEQ ID NO: 118917 - DNA, 2884 bp, Arabidopsis thaliana
gtcgacaaaagcgatgtcatacacataattacaatttagtccctatattttcttctcagtttcgatatctttaaagctgtctcaatcacacacgtcggcactaaaacatacatctaattacaatttagtccctatattattttaaagtttcgaaagaaattcacatgaatttaaaaatagatttgaagaaacagaaacagatagacaaatggacgacaacggatacatcgccaaaatatagccgttggggcgaagaaatcacagtaacggctaatttctcctttttcttatattagaaagaaagctttctctcatctcacaaatcgctaatcaaattctatagtaagctttacttcacactactctctcactttctgggcagaaactttgtggatctagaagaacacactaatcagaagagtatgttgtattttctttgattttctcttgtttgattctgttacaatcactgcgattctctctgattcttgtaaaattgttgactttcaggtgaaaaagatgaacgacttgatgacgaaatcgtttatgagttacgttgacttgaaaaaagcagcgatgaaggatatggaagcaggacctgactttgatcttgagatggcttctacgaaagcagacaagatggatgagaatctgtcatctttcttagaagaagcagagtatgtgaaagcagagatgggtttgattagtgagacgctggctcggatcgaacagtaccatgaagagagtaaaggtgttcacaaggcagagtctgtgaagtctcttcgtaacaagatctctaacgagattgtgtctggtttgaggaaggcgaaatcgattaagtcgaagctggaagagatggataaagccaacaaggagattaaaaggctctctgggactccggtttataggagcagaaccgctgtgactaatgggctgaggaagaaacttaaggaagtgatgatggagtttcaggggctgaggcaaaagatgatgagtgagtacaaggagactgttgagagaaggtacttcactgtcactggagaacatgctaatgatgagatgattgagaagatcatcactgataacgctggaggtgaagagtttctcacgcgagcaattcaggaacatggtaaaggaaaggtcttggaaactgtggttgagattcaagacaggtatgatgcagcaaaggagattgagaagagtctgttggagcttcaccaagtgtttcttgatatggctgtgatggttgaatcgcaaggtgaacagatggacgagatcgagcatcatgtgattaatgcgagccattacgtggctgatggagctaatgagctgaagactgcaaagagtctggggagaaacagcagaaaatggatgtgcattggtatcattgtgctgcttttgatcattctcattgttgtcatccccatcattaccagtttcagctcttcttgagatactggctatgttcactccttttgttttgtttcgctcttctttgtaccaatggatgtcttaatccttttgtgttcttcaaggatgtcttaatcctttcgtgtcttgtatccaatttcaatgaaatggtgaatgtttacaaagatacccagttgacttaatcctcttgatcattctaaatgttgtcatccccattgttaacactttcagctcttcttgaggtactatgtttaccaatcgttgtttgtttcgctcaaaggatgtttaatccttgtgttttctgtatccaattgttatggaatgatgatgactgtgtacaaaaatattactttatatgaaccgaacacagtatgtataatatagtttgtacaacaatggtggttcttgtttctacctgaccttcctgattggcaaagctttcccaaacaatttttcaacctcacttgcttccattttgatctcatccaaaaactccatctcttctttacttaactctctcacgaaattctcctcgtcttgcttcagttcattaaatccttcagccaatctctggaacaaggtcatctcagtcctaccgaccttctccacttccttctctacctcttcttctatctcttcaacctcttttacgattatcctttcaccttcttccactgtcttctcaattctctccacgagcgcaggttcaggaccacatgtgttatccgttctaatgaatgtgctgaagtctctgcctatgctttttgctgctttttcgagttctggtataatgctattgggtaatacagaacttctcgtgtatacaactgcaccaccatatccatcccaagcatcgtttcgcccacggtagtatacaaatatatagtcttcaggtttattctctatctttgatgacaggatatacctgcaaaaatcatatgaaagcttgttaggccaaagaagaatagcagcactatcaagactctccctcgtgggtggatacaagatgttattaccagtcatcttgatagtgaaggtactcgttgtcatgattgtagagaacaccaggttggttaggatcttgcacgaatttttgtacggctgacctagtaaagaatccactgtctagggtctttattctccaagagatgtttccaacaagcttgttgtcaccttctgtgtggaactcatgcagctggcagtcgaaggcatcaaaggttggattcaagccacttgtaatgtaccacttcccgttaaagtccgagatgttgaagttctgtacaagaacagaagggtctggggcaggaaattctccgagatcagattttctaggaacacactttttgctcgacacagcacactcgttgaactcatcaacaacactgttctcaaacagatccccacatttaatctgatataatataagccacataattataaccaaaatcattgg

SEQ ID NO: 118918 - DNA, 1555 bp, Arabidopsis thaliana
ttttttttttttttttatccaattgttatggaatgatgatgactgtgtacaaaaatattactttatatgaaccgaacacagtatgtataatatagtttgtacaacaatggtggttcttgtttctacctgaccttcctgattggcaaagctttcccaaacaatttttcaacctcacttgcttccattttgatctcatccaaaaactccatctcttctttacttaactctctcacgaaattctcctcgtcttgcttcagttcattaaatccttcagccaatctctggaacaaggtcatctcagtcctaccgaccttctccacttccttctctacctcttcttctatctcttcaacctcttttacgattatcctttcaccttcttccactgtcttctcaattctctccacgagcgcaggttcaggaccacatgtgttatccgttctaatgaatgtgctgaagtctctgcctatgctttttgctgctttttcgagttctggtataatgctattgggtaatacagaacttctcgtgtatacaactgcaccaccatatccatcccaagcatcgtttcgcccacggtagtatacaaatatatagtcttcaggtttattctctatctttgatgacaggatataccagtcatcttgatagtgaaggtactcgttgtcatgattgtagagaacaccaggttggttaggatcttgcacgaatttttgtacggctgacctagtaaagaatccactgtctagggtctttattctccaagagatgtttccaacaagcttgttgtcaccttctgtgtggaactcatgcagctggcagtcgaaggcatcaaaggttggattcaagccacttgtaatgtaccacttcccgttaaagtccgagatgttgaagttctgtacaagaacagaagggtctggggcaggaaattctccgagatcagattttctaggaacacacttttttctcgacacagcacactcgttgaactcatcaacaacactgttctcaaacagatccccacatttaatctggcactcggtttcatctggacggttattgcaggtctgaaggcacgcgacattggctgcacaggcagggttggcaatgcactttgcgagttctatcctgcatcccttcaataagcatgcacaagttttaagtgcatcaactgcatctgcagatggaacaataaggaacgcgcaagctaaaacacccacgagttttagcaacagcggagcggtcagctctttcagctcattctttgatggtaatggcacaatgtcaaatatccccttagagaatcctgacctgaatgcagataaaggacgtgaggatctcccaccagttgttctgagatcagcactttggattggaggtaaaatcttgagcaagaaagtgccattgatcctctttcttgtaatgccaagcctaccaataccatcatcacttgagaaaaatcgaatacggtcatgacaaggtgaagtgaaacaatgtgtagctactgccattcttcacactatctaatcttccccacaccaagccggacgcgtgg

SEQ ID NO: 118919 - DNA, 1187 bp, Arabidopsis thaliana
acaaatcgctaatcaaattctatagtaagctttacttcacactactctctcactttctgggcagaaactttgtggatctagaagaacacactaatcagaagagtgaaaaagatgaacgacttgatgacgaaatcgtttatgagttacgttgacttgaaaaaagcagcgatgaaggatatggaagcaggacctgactttgatcttgagatggcttctacgaaagcagacaagatggatgagaatctgtcatctttcttagaagaagcagagtatgtgaaagcagagatgggtttgattagtgagacgctggctcggatcgaacagtaccatgaagagagtaaaggtgttcacaaggcagagtctgtgaagtctcttcgtaacaagatctctaacgagattgtgtctggtttgaggaaggcgaaatcgattaagtcgaagctggaagagatggataaagccaacaaggagattaaaaggctctctgggactccggtttataggagcagaaccgctgtgactaatgggctgaggaagaaacttaaggaagtgatgatggagtttcaggggctgaggcaaaagatgatgagtgagtacaaggagactgttgagagaaggtacttcactgtcactggagaacatgctaatgatgagatgattgagaagatcatcactgataacgctggaggtgaagagtttctcacgcgagcaattcaggaacatggtaaaggaaaggtcttggaaactgtggttgagattcaagacaggtatgatgcagcaaaggagattgagaagagtctgttggagcttcaccaagtgtttcttgatatggctgtgatggttgaatcgcaaggtgaacagatggacgagatcgagcatcatgtgattaatgcgagccattacgtggctgatggagctaatgagctgaagactgcaaagagtcatcagagaaacagcagaaaatggatgtgcattggtatcattgtgctgcttttgatcattctcattgttgtcatccccatcattaccagtttcagctcttcttgagatactggctatgttcactccttttgttttgtttcgctcttctttgtaccaatggatgtcttaatccttttgtgttcttcaaggatgtcttaatcctttcgtgtcttgtatccaatttcaatgaaatggtgaatgtttacaaa

SEQ ID NO: 118920 - DNA, 522 bp, Arabidopsis thaliana
  unsure (1)..(522): unsure at all n locations
ggttaggatcttgcacgaatttttgtacggctgacctagtaaagcatccactctcgggggcctttattccccaagaggtgtgttccaaaacaagccttgttgtcaccttcctgtggggaacccatgcagctggcaagtcgaaggcatcaaaggttggattcaagccacttgtaatgtaccacttcccgttaaagtccgagatgttgaagttctgtacaagaacagaagggtctggggcaggaaattctccgagatcagattttctaggaacacacttttttctcgacacagcacactcgttgaactcatcaacaacactgttctcaaacagatccccacatttaatctggcactcggtttcatctggacggttattgcaggtctgaaggcacgcgacattggctgcacaggcagggttggcaatgcaccgtgcgcgtgcgcggacgcgtggtaattggnnnnnnnnnnnnnnnnnnnnnnnnnnnnnnnnnnnnnnnnnnnnnnnnnnnnnnnnnnnnnnng

SEQ ID NO: 118921 - DNA, 1261 bp, Arabidopsis thaliana
  unsure (1)..(1261): unsure at all n locations
gaacttatgtagcaaaatgtaaacacatgaaatcatttattaattcgggtcctacgtgacccaccacaccacagaaactcattaaatagtattttttttataaaacttaagttatatgcatggatacatgaacgatactcctatataaagagaacagcattcaaaaggtcttatcatcttcttcactaaacaaaaaaaaacccttcaaaacatttccttattctttcttcttcatctacaacaatggctggagttgcctttggttcctttgatgattcattcagcttggcttctctaagagcttacctcgctgagttcatctccactttactctttgttttcgctggtgttggctctgccattgcctacgcaaagctgacgtcggacgctgctcttgatacaccgggactagtggccatcgcggtttgtcatggttttgctctcttcgtggccgttgcaatcggagccaacatctccggtggccatgtgaacccagccgtcacttttggtcttgctgtcggtggtcaaatcacagtcatcaccggagttttctactggatcgctcagcttctcggctccaccgccgcttgtttcctccttaaatacgtcaccggtggattggcggttccaacccacagcgttgcggctggactaggatcgatagaaggagtagtgatggagatcatcatcaccttcgctttggtctacactgtctacgccaccgccgctgatcccaagaagggttctctcggaaccatcgctcctctcgccattggtcttatcgttggtgccaacatcctcgccgccggtccattctccggtggatccatgaacccagcacgttcctttggaccagctgttgctgccggagacttctctggtcactgggtctactgggttggaccactcatcggtggtggacttgccggacttatctacggaaatgtcttcatgggttcttccgaacatgttcctcttgcttctgctgatttctaaggaaacaagtgatgattcttgattcatgtttctgtgtttggttactttgcctcgatctttcttgttttgtttggagtttggtccggtttcgttgtaatttttatccaatttgtatgaatattatttaatggatggctgttttggttataaactaaataactcacactggaatatatagtttcacctaaaaaaaaaaaaaaannnnnnnnnnnnnnnnnnnnnnnnnnnnnnnnnnnnnnnnnnnnnnnnnnnnnnnnnngagagc

SEQ ID NO: 118922 - DNA, 747 bp, Arabidopsis thaliana
  unsure (1)..(747): unsure at all n locations
cagctctactacgactcactatttggaaagctggtccgcctgcaggtaccggtccggaattcccgggtcgacccacgcgtgcgcctatatgaagagaacagcattcaaaaggtcttatcatcttcttcactaaacaaaaaaaaacccttcaaaacatttccttattctttcttcttcatctacaacaatggctggagttgcctttggttcctttgatgattcattcagcttggcttctctaagagcttacctcgctgagttcatctccactttactctttgttttcgctggtgttggctctgccattgcctacgcaaagctgacgtcggacgctgctcttgatacaccgggactagtggccatcgcggtttgtcatggttttgctctcttcgtggccgttgcaatcggagccaacatctccggtggccatgtgaacccagccgtcacttttgggtcttgctgtcggtggtcaaatcacagtcatcacccggagttttctactggatcgctcaggcttctcgggtccaaccggcggttgtttcccccttaaaaaacgcaacccggtggagttgggggggtccaacccacaaaggggttggggttggacaagggtccaaaaaggggaagttatgggggtcaacaacaacctcgggtttgggcaaaatggttaggcaacnccgtgatcccaaaagggtccccggaaaatggccccccgcaatggttcatggtggggaaaacccacggggt

SEQ ID NO: 118923 - DNA, 603 bp, Arabidopsis thaliana
  unsure (1)..(603): unsure at all n locations
ctcaaacaaaaaaaaacccttcaaaacatttccttattctttcttcttcatctacaacaatggctggagttgcctttggttcctttgatgattcattcagcttggcttctctaagagcttacctcgctgagttcatctccactttactctttgttttcgctggtgttggctctgccattgcctacgcaaagctgacgtcggacgctgctcttgatacaccgggactagtggccatcgcggtttgtaatggttttgctctcttcgtggccgttgcaatcggagccaacatctccggtggccatgtgaacccagccgtcacttttggtcttgctgtcggtggtcaaatcacagtcatcaccggagttttctacctgggttcggtcagccttctcggtcttcaacgccgnttgtttcctccttaaataacggaaaccggtggatttggcgggtccaacccacacaggggtttcggcttgactaggntcggttagaaggagtagttgttggggtcataattaccttcggtttggcctaaattttttgggaccgcggtgtccaaanaagggtttttggaccaatgtnctttgcattggntntggtggg

SEQ ID NO: 118924 - DNA, 749 bp, Arabidopsis thaliana
  unsure (1)..(749): unsure at all n locations
ttaaaagtgaagttatagaatattgtagggttttttctatttcaagctagcattttatactgtaggtttcatttcgcactagtaggcaaattctggaggcattttaattaataaaaactaatgaacgagcgctaaaactattgaaaacgcaggcggttccaacccacagcgttgcggctggactaggatcgatagaaggagtagtgatggggatcatcatcaccttcgctttggtctacactgtctacgccaccgccgctgatcccaagaagggttctctcggaaccatcgctcctctcgccattggtcttatcgttggtgccaacatcctcgccgccgggtccattctcccggtggatccatgaacccagcacgttcctttggaccaagctgttgctgccggagacttctctggtcactggggtctactgggtgtggaccacccatcggtggtggacttgcccggacttatctacggaaatgccttcatggggtcttccgcacatgtccctcttggttctgctgattcctagggaaacaagtgatgattcttgattcacgattctgtgtttggttactttgcctcgatctttcttgttttgtttggagtttggtccggtttcgttgtaatttttatcccatttgtatgaatattatttaatgaaaaaaaccaaaaaagnnnnnnnnnnnnnnnnnnnnnnnnnnnnnnnnnnnnnnnnnnnnnnnnnnnnnnnnnnnnnnnnnnnnnn

SEQ ID NO: 118925 - DNA, 392 bp, Arabidopsis thaliana
  unsure (1)..(392): unsure at all n locations
acccatgaaccccagcacgtcctttggaccagctgttgctgccggagacttctctggtcactgggtctactgggttggaccactcancggtggtggacttgccggacttatctacggaaatgtcttcatgggtccttccgaacatgttcctcttgcttctgctgatttctaaggaaacaagtgatgattcttgattcatgtttctgtgtttggttactttgcctcgatctttcttgttttgtttggagtttggtccggtttcgttgtaatttttatccaatttgtatgaatattatttaatggatggctgttttggttataaaaaaaaacccggggtaaatatttgtccagtgtaaactaaaattcataatctgacctcagaattccttagc

SEQ ID NO: 118926 - DNA, 1398 bp, Arabidopsis thaliana
  unsure (1)..(1398): unsure at all n locations
tgannnnnnnnnnnnnnnnnnnnnnnnnnnnnnnnnnnnnnnnnnnnnnnnnnnnnnnnnnnnnnngggtcgacccacgcgtccgacaatttctcttcttctaaatccatggagtgatgatgatgatagatagattgaatccaaacacaaaccggatccgagattaaaaacaatccggattgtttatatttactttagatcggagaaagatgccgccggcgaccggagatatcgatcgtcagatcgagcagcttatggagtgtaaagcgttatctgaaacggaggtgaagatgttgtgtgagcacgcaaagacgattcttgtggaagagtataatgttcaaccggttaaatgtccggttaccgtctgcggtgatatccacggccaattttacgatctaatcgagctttttcgtatcggtggttcttctcctgatactaattatcttttcatgggtgattatgttgatcgagggtattattctgtggagacagtctcacttttggtagcactgaaagttcgttacagagatagacttactatcctaagagggaatcatgaaagccgtcaaattactcaagtgtatgggttttatgatgaatgtttgaggaaatatggaaatgctaatgtatggaagcacttcactgatctttttgattatcttccacttacagctcttattgagagtcaggttttctgtttacatggaggactttcaccttctttagatacacttgacaacatccgatctttagatcgaattcaagaggttccacatgaaggaccaatgtgtgatctcttatggtctgatccagatgaccgatgcggttggggaatatctcctcgtggtgcaggctacacttttggacaagatatcgctactcagtttaaccacaccaatggactctctctgatttcaagagcacatcaacttgtcatggaaggttttaattggtgccaagaaaagaacgttgtgactgtatttagtgccccaaactattgctaccgttgtggcaacatggctgcgattctagagatcggtgagaacatggaccagaatttccttcagtttgatccagctccacgtcaagtcgaacccgaaaccactcgcaagactccagattattttttgtaagtaccaaaagaactaaagctgcaattccacacactagctcttcgtctcttttgcttctattcttaaccactttttgtaatttcatattccttacgtctatttctgtttgttaaactctccattgtcttttaaaatccgtaaacttttgtgtgcaaagattctggtacaagtaaaaaaacccaaagnnnnnnnnnnnnnnnnnnnnnnnnnnnnnnnnnnnnnnnnnnnnnnnnnnnnnnnnnnnnnnnnnnnnnnnnnnnnnnnn

SEQ ID NO: 118927 - DNA, 1689 bp, Arabidopsis thaliana
  unsure (1)..(1689): unsure at all n locations
ccggcannnnnnnnnnnnnnnnnnngcgtccgttatatatttagcataatatctttcagaagtgtgaggccttgttaattaagctcttcttctctatctctctctctccctctcaacctctcaccatggtagctcaagctcctcatgatgatcatcaggatgatgagaaattagcagcagcgagacaaaaagagatcgaagattggttaccaattacttcatcaagaaatgcaaagtggtggtactctgcttttcacaatgtcaccgccatggtcggtgccggagttcttggactcccttacgccatgtctcagctcggatggggaccgggaattgcagtgttggttttgtcatgggtcataacactatacacattatggcaaatggtggaaatgcatgaaatggttcctggaaagcgttttgatcgttaccatgagctcggacaacacgcgtttggagaaaaactcggtctttatatcgttgtgccgcaacaattgatcgttgaaatcggtgtttgcatcgtttatatggtcactggaggcaaatctttaaagaaatttcatgagcttgtttgtgatgattgtaaaccaatcaagcttacttatttcatcatgatctttgcttcggttcacttcgtcctctctcatcttcctaatttcaattccatctccggcagtttctcttgctgctgccgttatgtctctcagctactcaacaatcgcatgggcatcatcagcaagcaaaggtgttcaagaagacgttcaatacggttacaaagcgaaaacaacagccggtacgttttcaatttcttcagcggtttaggtgatgtggcatttgcttacgcgggtcataatgtggtccttgagatccaagcaactatcccttcaacgcctgagaaaccctcaaaaggtcccatgtggagaggagtcatcgttgcttacatcgtcgtagcgctctgttatttccccgtggctctcgttggatactacattttcgggaacggagtcgaagataatattctcatgtcacttaagaaaccggcgtggttaatcgccacggcgaacatcttcgtcgtgatccatgtcattggtagttaccagatatatgcaatgccggtatttgatatgatggagactttattggtcaagaagctaaatttcagaccaaccacaactcttcggttctttgtccgtaatttctacgttgctgcaactatgtttgttggtatgacgtttccgttcttcggtgggcttttggcgttctttggtggattcgcgtttgccccaaccacatacttcctcccttgcgtcatttggttagccatctacaaacccaagaaatacagcttgtcttggtgggccaactgggtatgcatcgtgtttggtcttttcttgatggtcctatcgccaattggagggctaaggacaatcgttattcaagcaaaaggatacaagttttactcataaacgctatgtaattccactaattaagaaacatatctttatattaatatatgtgtgaagaagtttttaagagatcaacacgagacatttatagaagaatcaatggtctggtctgaatctaaatgtagcttttagggtttgtattttcgtgtgtgttatatatattatataaaacaataatattttgctcaaaaaaatttaaaaaaaaaaaaaaaagggcggccgc

SEQ ID NO: 118928 - DNA, 1636 bp, Arabidopsis thaliana
cccgggtcgacccacgcgtccgcaatcgtgaaatcgaaacaaacaaaataattaaaaaaagaaataagaggaggcgatggcgatcaaagacctgacggcgacgaccggtgattcatctcttcctttaataaaatctccgccgtctgaaacaaccggcggtgacagaacctctgctcttcaaacgctcggtaacattatcgtctccatcgtcggtacaggcgtccttggtcttccttacgcattccgcatcgccggttggttagccggatctctcggtgtcattatcgtcggattcgccacctattactgcatgctcctcctcattcagtgcagagataagctagaatcggaagaaggagaagaagaatcgaaaacttatggtgatttaggtttcaaatgtatgggaacaaaaggtcgatacttaaccgaattcctcattttcactgctcaatgtggtggatcagtagcgtatttagtgttcataggtcgaaacttgtcatccatatttagttcgtatgggttaagtatggtttctttcatattgattctggttccaatcgaagttggattgtcgtggatcacttctttatcagctctctcgcctttcagtatctttgctgatatatgcaacatcatagcaatgtgttttgttgtcaaagaaaatgtggaaatggtgattgaaggagacttctcgtttagtgatagaactgctatttcgtctaccattggtagtttaccttttgctggaggagttgcggtgttctgttttgagggttttgcaatgacgttggctttggagagttctataagggaaagagaagctttccctaaattgttagctaagtgcttgccgggattacgtttgtctatgtgttgttcgggttttgtgctgatatggcattatggtgatcaaacaaagaatatcatcactcttaacctcccaaataattggtctgccattgctgttcagattgggttatgtgtgggattgacgtttacatttccgatcatggtacatccgcttaacgagatcatagagcagaaactgaagaggatagactggcttcaaaagcatcataatgggtacagcaacgaaacaggttcagtctcaaaatttgcaatctttacaacgaggacacttttggtggtaggacttgcagcaatcgcgagtttagtcccagggtttggtacatttgcatctcttgttggaagtactttgtgcgcactcatctcctttgtgttgccggcttcttatcacctcacgctgctcggtccatcactaaatgtatggaacaaatccatcgacgtattcattgtgatttgcgggttgatctttgctgtttatggtacgtacaacacaatcgtcggagtgtgaaaagggatagcatgtgatctgtgtaaagcaacgaatataactacaagaagtttggtaagacagacaagaaaaaatgtatagatcttttacatgaatctgaaatagaaagatggtgagaaagttgagattgttgtatgatcatttaatggtgtcaggatgcagagtcttaaacaattaacacaccgattttcttttttagtcttcctaattcaattttccaaaaaaaaaaaaaaaaagggcggccgctctagaggatccaag

SEQ ID NO: 118929 - DNA, 2586 bp, Arabidopsis thaliana
  unsure (1)..(2586): unsure at all n locations
ttaggtgcaactatagaagagctatgacgtcgcatgcacgcgtacgtaagctcggaattcggctcgaggaaaaaagttataattccacttttgtccttttagagagagaaaaaggccaaggcgtttttcttctctcgttcctccattttctacagagagatatatcaaaaattccattttctacagagagagagagagagagagagagagagagagggacgaaatattaatcatcgatcaagttgcttcaatcgcgaaaaaatccatgaataaaactatggaatggaatgtgaatcaaaggatttggttatggtgatgacgcgatcttcgattcgattcggtgattaaaagatttggaagctcagatctcaagctcggatttctaatttttgttggattatctaacccaaaagccaaaaaaaaaaaatgaacggtggtgacgatgccgctactagtggtcctcctccgtctttagagtggagattctctcaggtcttcggtgagcgaaccgccggagaagaagttcaggaagttgacatcatttcagccatcgaatttgataaaagtggagaccatctcgcaactggtgaccgtgggggccgagtagttctttttgaaaggacagatactaaagatcatggagggtccaggaaggatcttgagcagacggattacccagttaggcatcctgagtttcgatataaaacagaatttcagagtcatgaaccagagtttgactatctcaagagtttggagatagaggagaaaatcaacaaaatcagatggtgtcagccagctaatggtgcattgtttctgctttctacaaacgataaaaccatcaaatattggaaggtacaagagaagaagatcaagaaaattagtgaaatgaatattgatccgtcagaaagttcaaatatccctcctcaattagttactaatggattacctgctgataaagggcatgactacctgagcaaggacttttctttcccgccaggaggcattccatctctgcgtttgcctgtggtagttaccagccaggagactaaccttgtggctagatgccgaagagtgtatgcccatgctcatgattaccatattaattcaatctccaatagcagtgacggagaaacctttatttcggctgatgatctgcgagtaaatctctggaatttggaaattagcaaccagagtttcaatattgttgatgttaagcccacaaacatggaggacttaactgaggttattacatcagctgagtttcatcctatccattgtaatatgctcgcatatagtagttcaaaaggctccattcgtttgattgatatgcgtcaatcagctctgtgtgattctcatacgaaattatttgaagaaccggaagcacctggttcaagatcatttttcacagagataattgcctcaatttcagatattaaattctcaaaggatgggagatacatacttagtcgcgattacatgacgctcaagctgtgggacataaacatggattctggtccggtcgcatcttaccaggttcatgaacatctgagacccaggctatgcgatctatatgaaaatgactccatctttgataaatttgagtgttgtctgagtggcgatggattgagggtagcaacaggttcttacagcaatctattccgcgtatttggagcgtctcaaggaagtactgaagctgcgactttggaagctagcaaaaacccgatgaggaggcaaatccagacacctgcaagaccatccagatctataggcagtatgacacgcgtggttagacgaggatcagagagtcccggaacagaggcaaatgggaacgcctacgatttcacaacaaagttgctgcatatggcttggcacccaacagagaactcaattgcttgtgcagcagcaaacagcttgtacatgtactatgcatgagttgggaagagagagagaagacataaacatggaatcagcttgctccaatttaactttccctttcttcttttcccgggtctctctctcactctctttctctctttcttttaacaaccaaagtcatgatgtaaccagaaaaggtgtagtagtaacagagtaatgctgtgaccaagaccaaagcctgaccagtcaccgcgacgagtcaacggaagaagcagcaacagtaatctttcaggagttagtaaggtaaaaagtgttgggttgggaaagaaaacaagaagaggccttttgtttacctgaagaagggtaatgtcttaaatatccgaaccacccctcctacttaggttgtcttttttttgggttgctgcactaaggataaattttattttattttttttagtatcgattctattaccttttttttttcaattaagaaacaaattatggtgtgtgggattttttagtatgagacgattgggagggatgtgcttcaaaatttgtttattgattcttttgtcataaaaaaaaaaaaaaaaaaaaaaaaggnnnnnnnnnnnnnnnnnnnnnnnnnnnnnnnnnnnnnnnnnnnnnnnnnnnnnnnnnnnnnnnnnnnnnnnnnnnnnnnnnnnnnnnnnnnntagctggcagtatcat

SEQ ID NO: 118930 - DNA, 1480 bp, Arabidopsis thaliana
tgaatcgggaatctgattcatatgtttggggtttaatagtctcagctcaaataaatctaggttaaactgtgtggatcgattcatatatcctccgtcaaaaccaaaaccaaaccgatttgtcataattttttcttatcatccactttcattggctagagggacattgtaacggtgtcgtcgtcgccaaacgatttgcctcttcctaaaggagattctttcctacataggaattgagtttaaggtggaattcttctgttattttgttgttgcacgaaaatggaggacattgagaacatagaagaagatgagtatgggttttcaagaaactacttcttggcaaaagaattgggtggggcgagtaagcgttctgcccacaagctctctgatatacatattgttgatgagcaggagcttagagaaacggcttctacaattgaaatgaagcactcgaaagagatatctgagcttatgagtgattacaagactatgtactcaaagtgggtctttgagctcaggtgtggctttggccttctaatgtatggctttggatctaagaaagctttagttgaagattttgcttctgcttctttgactgactattctgttgtggtcatcaatggctacctcccttccgtaaatctaaagcaggttcttttggcattagctgaacttctatccgagcttttgaaatgtaaaagaaagagttccgggagtttgtctaaaggtcaagaaacatttccttcacgctccatggatgatattctttcctttctacatggtccacagtctggagataaagactgcttcatatgcgttgttgttcataacattgacggccctgctctaagagatcccgaatcacaacaaactcttgcccggctttcttcttgttcacacatacgcttggttgcctctattgaccatgtcaacgctccattattgtgggacaagaaaatggtgcacaaacagtttaactggctatggcaccatgttccaacatttgcaccatacaatgtcgaaggtgtattcttcccgttggttcttgcacagggaagcacagcccaaaccgccaaaacagcagccattgttttacagagtttaacaccaaacggtcagaatgtcttcaagattcttgctgagtaccaactttcacacccagatgaagatgggatgcccactgatgatctgtattcagcgtctcgggaacgcttctttgtgagcagtcaagtgactttaaactctcatctcacggaatttaaagaccacgaactggttaagaccaagagaaactccgatggtcaagagtgtttgaatataccgctcacttcggatgcaattcgacagcttttgcttgatctcaatcagtagcctgaaattgtatttctgatatgattcatttttattgcttgaacgagttattatagttcacacagtttacatgtttaattgaatgttatagtcagcactcacagctcttatt

SEQ ID NO: 118931 - DNA, 3824 bp, Arabidopsis thaliana
  unsure (1)..(3824): unsure at all n locations
acaaagccgacacaggcaagacttagaggaagaagaagaagaagaagcaaaaatgagaaaccattgcttagaactctcttccaattgttcctccattttcgcttcttccaaatccaatcctcgtttctctccttccaagctctcctattccactttcttctctcgctctgccatctattacagatcaaaaccaaaacaagcctcgtcttcttcttccttctccactttccccccatgtctcaatcggaaaagctccctcacgcatgttctcaaacccgtctcagagctcgccgacaccactaccaagcctttttctccggagatcgtcggcaagagaaccgatctgaagaagattatgattctcggcgctggtccgattgtcattggacaagcttgtgagtttgattactctggtactcaagcttgtaaagccttaagagaagagggctatgaggttatcctgatcaattcgaatcctgccactatcatgactgatccggaaactgctaatcggacttatatcgctccgatgactcctgagcttgtcgagcaggttattgagaaagagaggcctgacgctttgttaccaaccatgggtggtcaaaccgcattgaacctcgcggttgctcttgctgagagtggtgctttggagaaatacggtgttgaattgataggagctaagcttggtgcgattaagaaagctgaagatcgtgagttgttcaaggatgcgatgaagaacattgggctaaagactccaccttcagggattgggaccactcttgatgagtgttttgacattgctgagaaaattggtgagttccctttgattatccgtcctgcgtttactttaggtggtactggtggtggaattgcgtataacaaagaggagtttgagtctatatgtaaatcgggtttggctgcgagtgcgacaagtcaagttcttgtggagaaatccttgttgggttggaaagaatatgagcttgaggtgatgagagacttagctgacaatgttgtcattatctgttccattgagaatattgatcctatgggtgtgcacactggtgattccatcactgtggcacctgcacagactctaacggatagagagtaccagcggcttagggattattccattgcgattatacgggagattggtgttgagtgtggtggatctaatgtgcagtttgctgtcaacccggttgatggtgaagttatgatcatagagatgaaccctagggtctcaagatcttctgctcttgcttccaaggctacagggtttcccattgctaaaatggctgccaagttgtctgttggctataccttggatcagattcctaatgatatcacgaggaaaacaccggctagcttcgagccctccatcgattatgtggtgactaagattcctcgatttgcatttgaaaagtttccaggatctcagccattgctaacgacccagatgaaatctgttggggaatctatggctctcggccgtacattccaagaatctttccagaaagctctgaggtctctggagtgtggattctcgggttggggttgtgcaaaaattaaagagctagattgggactgggatcagctgaaatacagcctaagagtcccaaatcctgacaggatccatgcgatatatgctgccatgaaaaagggtatgaaaattgatgaaatctacgagttgagcatggtggacaagtggttcctaacccagcttaaagagctcgtggacgtcgaacagtatcttatgtccggaaccttgtcagagattacaaaagaagacctttacgaagtcaaaaagcggggatttagtgacaagcaaatcgcttttgctacaaagacaaccgaggaagaagtccgtaccaagcggatttctctaggagttgttccatcttacaagagagtggatacatgtgctgcagagttcgaagcgcatacaccatacatgtactcttcatatgatgttgaatgtgaatcagctccaaacaacaagaagaaggttttgattttgggtggagggccaaaccgcattggtcaagggattgaatttgattactgttgttgccacacatctttcgccttacaggatgctggatatgagaccataatgttgaactcaaatcctgaaacagtatccacagattatgatacaagcgataggctctattttgaacctctcacaatcgaggatgttctcaatgttatcgaccttgagaaacctgatggcataatagtgcaatttggtggtcaaactcctctgaaacttgctctgccgatcaaacattatttggataagcacatgcccatgagcttgagcggagcgggacctgttcgcatctggggtacatcacctgactccattgacgctgctgaagacagagagaggttcaatgcaattctcgacgagctgaagattgagcagcccaagggaggcattgcaaagagcgaagctgatgcattagccatagcaaaggaggtagggtacccagttgtggtaagaccttcttatgttctaggtggacgagcaatggagatcgtttatgatgacagtagactaataacctatttggaaaatgcggtacaagttgacccagagagacctgttttggtagataaatatctttctgatgccattgagatcgacgttgatacccttactgattcctatggaaatgtggtgattggtggaataatggagcatatcgaacaagctggtgtgcattctggtgactcagcttgtatgcttccaacacaaaccatcccagcttcttgtttgcaaactattcgaacatggaccactaagctggcgaagaagctaaatgtatgtgggctgatgaactgtcagtacgcaatcacaacatctggggatgtttttttgctggaagccaatccccgagcttcccgtactgtcccttttgtgtcaaaagccattggacaccctcttgccaagtatgcagcgctggtcatgtcgggcaaatctctcaaagatcttaactttgaaaaagaagttatccctaaacatgtctctgtgaaagaagctgttttcccgtttgagaagttccaaggatgcgatgtgatactcgggccagagatgagaagcacaggagaagtgatgagcatcagttctgaattctcaagtgcgtttgcaatggctcagatcgctgcaggtcaaaagctacctctatcaggcacagtcttcctcagcttaaacgatatgaccaaaccgcacctggagaaaatcgcggtgtccttcctcgagcttgggttcaaaatagttgccacctcgggaacagctcatttcctggaactgaaaggcattccagtggagagagtgttgaagttgcatgaaggaagaccacatgctgctgatatggtggcgaatggtcagatccatttgatgttgatcacaagctcgggtgatgctcttgatcagaaagatgggagacagctcagacaaatggctctagcatacaaggtacctgttataaccactgttgctggtgcattggccactgctgagggaatcaagagcttgaagtcaagtgccattaaaatgaccgctcttcaggacttctttgaggtaaagaatgtatcttctttgctcgtctgagttagtttttttgttgtgtgttgatcgtttgtgtggaacttttttacgataaattttaacggattttgttacccataagcatttctatgaataatcttcgaaaatgcagcgcgcccgtgatttatcaatcggctttgttcctttaattcagatatacacaagcctttgattgtatcatgtcatgttacgcttggcttaaacnnnnntt

SEQ ID NO: 118932 - DNA, 668 bp, Arabidopsis thaliana
  unsure (1)..(668): unsure at all n locations
acccacgcgtccgggagaagaaacaaagccgtacaacgagggctcttcctgggcaacaaaaccaccattttcgttttatctcaatcttcgtctctttcgaaagatctaaccacaacaactccttaagatggataagtatcaacgagtggtgaagccgaaagcggatacgccgattgatgcgaatgagattcgtatcactagtcaaggcagggcacgaaactacatcacctatgcgatgactcttcttcaggataaagggtcaactgaagttgtattcaaggcaatgggaagagctatcaacaagactgtgaccattgtagagctgattaagagaaggatccctgatcttcatcagaacacatctattggatccacagacatcacagacacatgggaaccaacagaggaaggccttctacctttggagactacaaggcatgtgtcaatgataaccattaccctatccaagattgagcttaatacctcctctgttgggtaccagtgcccaattcctattgagttggtgaagccaatgggcgatattgattatgaaggacgagagggttcacctggtggcagagggaggggaagaggaagaggaaggggaagaggaagngggcgaggtngcagagggaaatgcttatttgaaccgttngagcatnaagatt

SEQ ID NO: 118933 - DNA, 774 bp, Arabidopsis thaliana
gaacacccggccgcgcgagcgcctaatcttcttctccaatcaatctcagagaaaaaaagaaatggcaacaaaccctaaagtctacttcgacatgaccgtcggtggcaaatccgccggtcgtatcgtgatggagctttacgccgacacaacaccagaaaccgccgagaatttcagagcactctgtaccggagagagaggaatcggtaaacaaggtaagccattacactacaaaggatcaagctttcaccgagtgattccgaaattcatgtgtcaaggaggtgatttcacagccgggaatggtaccggaggtgaatctatctatggatcgaagttcaaagacgagaactttatcaagaaacatacaggaccaggtattttgtctatggctaacgctggtgcgaacacgaatggatctcagttttttatttgtactgagaagacttcgtggctcgatgggaaacatgttgtgtttggtcaagttgttgagggattgaatgttgttagagatattgagaaggttggatctgactctggaagaacttctaagcctgttgtcattgctgattgtggtcagatttcttagatctgtctgagattgttgatgatgatgatgatgatcttgaggatccaatggtagctttgtgttgtttctctttgatgttttctggtttatgtttttggattttgatgtttattgctgttgtgaaactttgagtttggctaccattgaataagaagaatgagaataaaatcttgagatccaaatttttgttt

SEQ ID NO: 118934 - DNA, 861 bp, Arabidopsis thaliana
gctggtacgcctgcaggtaccggtccggaattcccgggtcgacccacgcgtccgtacggctgcgagagggcgacagtacgggaaggagaaactcaatgagagaattgcaaagctctctggtggagttgctgtgattcaggttggagcacaaactgagacagaactcaaagagaagaagttgagagttgaagatgctcttaatgcaacaaaggccgctgtcgaggaaggtattgttgttggtggtggttgcactctgcttcgtcttgcttccaaggttgatgccattaaagccacgcttgataatgatgaagaaaaggttggagcggatatagttaaaagagcactaagttaccccctaaaactaatcgccaagaatgctggtgttaatggaagtgtagttagcgagaaggtgctttccaacgataacgtgaaattcggttacaatgctgcaaccggcaagtacgaggatttgatggctgcaggaatcatcgatccaacaaaggttgtgagatgttgcttggaacacgcagcttcggttgcaaagactttcttgatgtcggactgcgttgttgttgagatcaaggaacctgaaccagttcccgtcggcaacccaatggacaactcaggatatggatactaagaggagataggctaatattgaaacggattactttagcttgcgagtgtaatgattttgaacaagagaatgtgtaatgtgaaactgaaattttgaattaatcatcatatgaataaatcatgattccctccaaaaaaaaaaagaaaaaaaaaagggcgagcggccgctctagaggatccaagcttacgtacgcgtgcatgcgacgtcatagatcttctatagtg

SEQ ID NO: 118935 - DNA, 1174 bp, Arabidopsis thaliana
  unsure (1)..(1174): unsure at all n locations
nnnnnnnnnnnnnnnnnnnnnnnnnnnnnnnnnnnnnnnnnnnnnnnnnnnnnnnnnnnnnnnnnnnnnnnnnnnaaacctacccacgcgtccggcttcagctccccttttcttatccggaaaccaaaaacttccggtgataaaacctccttcgtcatctctctacttcttggataaaatggcgtcaactttcactgccacatcttctattggttcaatggttgctccgaatggtcacaaatctgataagaaacttatcagcaagttgtcttcaagctcatttggaaggagacaaagtgtgtgtcctagacccagaagatccagttctgcaattgtgtgcgcagcaaaggaattacatttcaacaaagatgggactaccattaggagacttcaagctggtgtcaacaagctcgcagatcttgttggtgttacacttggacccaaaggacgaaatgttgttcttgagagcaagtatggatcaccacgaattgttaatgatggtgtgactgttgcaagagaggttgagttggaagacccggttgagaacattggtgcaaagcttgtaaggcaagcagctgcaaagaccaatgacttggctggtgacggtacaacaacatctgttgttcttgcacaaggttttatcgctgagggtgtcaaggtggtggctgctggtgcgaaccctgttttgatcaccagggggattgagaacactgcaaaggctttggttaccgagctcaagaaaatgtctaaggaggttgaagacagtgaacttgcagatgttgcagctgttagtgcgggtaacaacgacgaaattggaaatatgattgctgaagcaatgagcaaagtgggcaggaaaggtgtggtgacccttgaggagggtaaaagtgccgagaacaacctctacgtcgtagaaggaatgcaatttgaccgtggttatatctctccttactttgtgacagacagcgagaaaatgtccgtcgagttcgacaattgcaagttacttctcgttgacaagaaaattaccaatgcaagggatcttgttggtgttttggaggatgcaattagaggcggatacccaatattaattattgctgaagacattgaacaagaagctttagcgactcttgttgtaaacaagcttagaggtacactgaagatagcagctctcagagct

SEQ ID NO: 118936 - DNA, 1505 bp, Arabidopsis thaliana
tatacgactcacttaagggaaagacggtacgcctgcaggtaccggtccggaattcccgtttcgtccctcgcgtccggcgaaggctccgcttcaatcatttgtagcagtaagaacgaattcgagacctagaaattcatcgaaccgtctcgtttctgtattcggacgcaagtcttcttctccttcatttgttactctcagagttgtttcatcgatggcttacgagaaagagcttgatgctgctaagaaagctgcttcactcgctgctcgtctctgtcagaaagttcaaaaggctttgttgcaatcagatgtgcaatcaaaatctgataaaagtccagtgaccgttgctgattatggttcacaagcagttgttagtttagtcttagaaaaagagctcagttctgaacccttttcattggtggctgaagaggactcaggcgatctacgcaaggatggttctcaggatactctggagcgcatcacaaaactcgtgaacgacactttggctaccgaggaatcgtttaatggctctactttgtctactgatgatctacttagagccattgactgtggaacatctgaaggtggtccaaatggtcgacactgggtcttggatccaattgatggcactaaaggatttctgaggggagatcaatacgcagtagcactaggattgctcgaggaagggaaagtagttttaggtgtgcttgcttgtccaaacttgccgttagcatccatagcaggaaacaacaagaacaaatcttcgtcagacgaaattggatgcctcttctttgctacaattggttcagggacatatatgcagctcctagattcaaaatcttctcctgtaaaagtgcaagtctctagtgttgagaatcctgaagaggcatcgttcttcgagtcattcgaaggagctcactctctacatgacttatccagctccattgccaataaactcggtgtcaaagctccaccagtccgtattgatagccaagcaaagtatggagctttatcaagaggagatggagctatatacttacggtttcctcataaaggataccgcgaaaagatttgggaccatgtcgctggtgctatagttgttacagaggcgggtggaatagtgacagatgcagcaggaaagccactggatttctcgaaagggaagtatcttgatttggacacaggcattatcgttgctaacgagaagctaatgcctctgcttttgaaagcagttcgtgactccatagctgagcaagagaaagcttcagctctttgatttgtttttttctctcgtacgttctttgtttctctgtaactgttgtttcattttctttcaccgaatttcaccagtgagaatttcttccattttcgaaaaagaaataaaaatgaaattctgttttgggctaaaaaaaaaaaaaaaaaaaaaaaactcgagtctagaggatccaagcttacgtacgcgtgcaggcgacgtcataactcttctatagttgctacctaatacaatt

SEQ ID NO: 118937 - DNA, 770 bp, Arabidopsis thaliana
acccacgcgtccgaaatacatcacatttttcagacaaaactccaatttcacagtgaactcaaaaacaatgacaagctccgataaatctctgtcgcacgacgttttcgtctacggcagtttccaagaaccatccgtcgtcaatctgatcctcgaatgttctccggtcatggttcccgctcaactccacggctatcacgtatatagactcaaaggtcgcttacatgcatgtatctctccttctgagaatggactaatcaacggcaagatactaactgggttaacagattctcagttagagaatttagatatgattgaaggaagtgaatatgtgaggaagactgttgaagttgttttgactgatactttggagaagaagcaagttgagacctatgtatgggcaaacaaggatgatcctaatttgtatggagaatgggattttgaggaatggagacggcttcacatggataaatttatcgaggcgtcgacgaaattcatcgagtggaagaagaatccggatgggagaagttgggaagagtttgagaagtttgtatccgatgatcctccggcttcggcttgaagaagttgtttgcgttttatctatcttttatgtcttcgtgtttcatatatcaaggtgctgcataataaaagggtctttcctttcgggggcataataggaaaggctttgtttttgagtatttgagaataatgcattttatgtttggtgcattttgtcttcttaagaacaagtttgattttagtccaaaaaaaaa

SEQ ID NO: 118938 - DNA, 661 bp, Arabidopsis thaliana
  unsure (1)..(661): unsure at all n locations
agctctctacgactcactatttggaaagctggtccgcctgcaggtaccggtccggaattcccgggtcgacccacgcgtgcgccacgcgtccgcaatgacaagctccgatcaatctccgtcgcacgacgtcttcgtctacggcagtttccaagaaccagccgtcgtcaatctgatcctcgaatgtgctccggtcatggttcccgctcaactccacggctatcacgtgtatagactcaaagggcgcttgcatccatgtatctctccttccgacaatggactaatcaacggcaagatacttaactggattaacagattctcagttagagagtttagatatgattgaaggaacctgaatatgtgaggaagactgttgaagttgttttgactgatactttggaggagaggcaagttgagacctttgtatgggcaaacaaggatgatcctaaatttgtattggagaatgggnttttttagggattgggaccggcttcacatgggtaaaatttatccgaggcggncgacggnaaattcatccgggtggaagaaggatnccngnttgggggaattagggaagggntttaggaggtttttttcggtgacccccccnntnctgtttnaatnncccttnaaanaagccttttaaannccccntttttccccg

SEQ ID NO: 118939 - DNA, 509 bp, Arabidopsis thaliana
  unsure (1)..(509): unsure at all n locations
ggaagactgttgaagttgttttgactgatacttcggagaagaagcaagttgagacctatgtatgggcaaacaaggatgatcctaatttgtatggagaatgggattttgaggaatggagacggcttcacatggataatttcatcgagncttcgacnaaattcatcgagtggaagaagaatncggatgggagaagtagggaagagtttgagaagtttgtatccgatgatcctcccactgcggcttgaagaagttgtcaagatatgtcttcttcttttatatcaagatttgtaaaagatcactctcttttactgcgaataaaatggtcttaatcttcgaagacaataagaggctttgtgagttggggtccctaagcctcttgttgtatctatattgtttgtgagcattgtggtgtatgtgaatgttgtttcatcatttttagtgtatttgagttaaaagcaaatctgtgttttaagggcggctcactnnnnnnnnnnnnnnnnnnnnnnnnn

SEQ ID NO: 118940 - DNA, 367 bp, Arabidopsis thaliana
tgcggttgtttgggcttcggagaagaagcaagttgagacctatgtttgggcaaacaaggatgatcctaatttgtatggagaatgggattttgaggtttgaaaccttacttcttgaatgttgtgttgctttaatggggttttagtgaaatgtgtgtgtggattttggtaggaatggagacggcttcacatggataaattcatcgaggcgtcgacgaaattcatcgagtggaagaagaatccggatgggagaagtagggaagagtttgagaagtttgtattcgatgatcctcccactgcggcttgaagaagttgtcaagatatgtcttcttcttttatatcaagattttgaaaagatcactctctttta

SEQ ID NO: 118941 - DNA, 1517 bp, Arabidopsis thaliana
ttaggtaccactatagaagactatgacgtcgcacgcacgcgtacgtaactttatacgaatagcagcaagatgattgatttggctactttatagtttaatggaagcagttcgttcaacaacaaccttatctaattttcatctactgaatattttagtcctgcgttctctcaagcctctgcatcgtctatctttctctttctctgcctcagcaatggagagtgatgcatcttgtagcttagttttgtgtgggaaatcctctgtggaaactgaggtagcaaagggtttgaagaacaagaactctcttaaactcccagataataccaaagtttcactcattttagaatctgaggctaagaatttggttaaagatgatgataattccttcaatctttcactctttatgaactcgattataactcatcggtttggacggtttctcatttggtctccgcgtttgtcttccactcacgatgttgtttctcataacttctctgagcttccagttggttcagtttgtgtcactgatatccagtttaagggtcgaggcagaacaaagaatgtatgggaatctccaaagggttgtcttatgtattcttttactctagaaatggaagatggtcgagtcgtgcctttgatacagtatgtggtatctcttgctgtaactgaggcagtgaaagatgtttgtgacaagaagggtttgccgtacattgatgttaaaataaagtggccaaatgatctgtacgtgaatggtcttaaggttggaggcattttgtgtacctctacgtatagatcaaagaagttcaatgtcagtgttggtgtggggttgaatgtggacaacgggcaaccgaccacgtgcttaaatgcagtactaaaaggcatggctcctgaatcaaacctacttaaaagagaggaaatccttggtgccttctttcataaatttgaaaaattcttcgatctattcatggaccaaggttttaaatctctcgaagagctttactacaggacatggctacacagcgagcaaagagtgattgttgaagacaaagtagaggaccaagttgttcaaaatgttgtgactatccagggtttgacttcttctggatatttgctggctgttggagatgacaatcaaatgtatgagcttcaccctgatggcaatagttttgactttttcaaaggtctggttcgaagaaaaatatgatccaaagattttcttgctggtgaaagtagatgttgtgcgttgttttagtaccatggacacaactattatcagttccaatttttcaatgtactgtggatagtcctttattccccttgtatccaatttctggtcattttaacccgataagaggttcttgaggctacacgtacaagagattactagatgggacatcttaagtttcaactttattttgctttacctctatgtaacaacacagtactttgttgcataatctctgacgtgttaactcttgaagtgaaacatacgacatctgattatctaaagagtttcgaga

SEQ ID NO: 118942 - DNA, 1315 bp, Arabidopsis thaliana
  unsure (1)..(1315): unsure at all n locations
ttcagttctagggttttaatttgatacgaggtcagcgaatccggcgacgataaggggttttgttcttagtaaaaaaaagtaaggatttgtgtccatggcagctttgcaaacgcttcgtgaatggatcggtatccagcagttcccacctgctactcaatctaaattgctcgagatccttgggaagtataaagaagaggatgtgagctcgctaacggtccttgtaatggggaaaggtggtgttggaaagtcatcaactgtgaattcagttataggcgagaaagctgctgcagttagtactttccagtctgaaggactgaggcctaccttggtctctcgcacaagatcgggatttacattgaatatcatcgacactcctggtcttattgagggaggatatgtgaatgatcaagccatcaacattataaaacgatttctcctcaacatgactatagatgtgctactatacgtagaccgtttggatgtgtaccgggtggatgaccttgataggcaagttgtcggtgctataactgatgcatttggtaaagagatatggaagaagtctgctcttgttctcacccatgctcagttctctccaccagacgggttaaattataaccactttgtctccaaaagatctaatgctcttctaaaagttatccagacaggcgctcaactgaagaaacaggatttgcagggtttttctattcctgtcattcttgttgagaacagcggaagatgccataagaacgaaagcgatgaaaagattcttccatgcgggactagttggattcccaatctgttcaacaaaatcacagagatctcttttaatggcaacaaggcgattcatgttgacaagaaactggtcgaagggccaaacccaaacgaaagaggaaaaaaactgattcctttaatgtttgcattccaatacttgctggtgatgaagccattggttcgagcaatcaagtccgatgtttcgagagagagtaaactggcgtgggagctgcgagactccggtttagcaagtcgaaggtcttgagttgtggacacgagttttgtttggtttgtttgtctatctgagagattgttctgtagttgaaattgtgatacaactcgagaaatgtggttcacagataattactgtcgcaaagttctctcatcttaattacatcttctttagcctctcgttaaagataatgataattttcaatgtaatattaaaaaaaaaaaaaaaaaaagggcggccgctttaaaggatcccagcttacggacgggggcaatccacgnnnnnnnnnnnnnnnnnnnnnnnnnnnnnnnn

SEQ ID NO: 118943 - DNA, 616 bp, Arabidopsis thaliana
  unsure (1)..(616): unsure at all n locations
ggatactccnnnnnnnnnnnnnnnnnnnnnnnnnnnnnnnnnnnnnnnnnnnnnnnnnnnnnnnnnnnnnnnnnnnnnngccacgcgtccgatcaatcatcttcaaaagtcaatttcagttctagggttttaatttgatacgaggtcagcgaatccggcgacgaatatccgccactagtaactctagctcaggtaaggatttgtgtccatggcagctttgcaaacgcttcgtgaatggatcggtatccagcagttcccacctgctactcaatctaaattgctcgagatccttgggaagtataaagaagaggatgtgagctcgctaacggtccttgtaatggggaaaggtggtgttggaaagtcatcaactgtgaattcagttataggcgagaaagctgctgcagttagtactttccagtctgaaggactgaggcctaccttggtctctcgcacaagatcgggatttacattgaatatcatcgacactcctggtcttattgagggaggatatgtgaatgatcaagccatcaacattataaaacgatttgctctcacatgactatagatgtgctactatacgtagacccgttggatgtgtaccgggtggatgaccttg

SEQ ID NO: 118944 - DNA, 1362 bp, Arabidopsis thaliana
  unsure (1)..(1362): unsure at all n locations
tgatgtgttgatgaaaaatggaaccacaattctttttctctatctctcactcttcattctctccctaaacttcttcttcacgaatcttaaaccaaggctagtccgcctcttccagccttctttagaatctcgtgtcaagaccgctcttttatcccgaaaggaagtagccgcgtttcttgattctcccattgtcgaagacgaagaaggcgaagaaagagaagaggaagaagaaggaggtatcgtttcaaatgccaactttacgtttgagtttgatccatacatgatgagcaaagccgaatcagtgaacaaagctctagaagaagcaattccagtcggagagccactcaagattcatgaagccatgcgatacgcgattcttgcggctggaaaacgtgttaggccaatactctgccttgcttcttgcgagctagtaggtggccaagaaaatgcgacaatacccgccgcttgtgcggttgagatgatccacacgatgtctctaatcaaagacgatttgccttgtatggacaacgacgatttgcgtcgtggaaagcccacgaccgacaaagtctacggcgaaggagttgccattctctctggtggggctctcttgtctcttgcctttgagcacatgaccaccgcggaaatatcctcggagagaatggtttgggcggtgagagaattggctaggtctattgggacaagaggtttagtcgcgggacaagcgatggatataagcagtgaaggtttggacttaaacgaggtcggattagagcatttggagtttatccatgttcataaaaccgcggttttgttggaaactgccgcggttcttggcgccataattggtggtggatctgatgaagagattgaaagtgtgagaaagtttgcaaggtgcattggattgttgtttcaggtggtggatgatattttggacgagacgaagtcgtcggaggaattgggaaaaaccgccgggaaagatcagctcgccggaaagctaacgtatccaaagttgatagggttggagaaatcgaaagaatttgttaagagattgacgaaagatgcacggcaacatcttcaagggtttagttctgaaaaggttgctcctttagtagctcttactacttttattgctaatagaaataagtgattatatatttgccctgtttgtgtgtgttgggtttatgtatacatgctaaagtagtgtgttcccttatttttaagtgtaaccacattttaagatgtttattaatgaatatttaaaaatgtaaaaaaaaaaaaaaagnnnnnnnnnnnnnnnnnnnnnnnnnnnnnnnnnnnnnnnnnnnnnnnnnnnnnnnnnnnnnnnnnnnnnnnnnttcattc

SEQ ID NO: 118945 - DNA, 1754 bp, Arabidopsis thaliana
  unsure (1)..(1754): unsure at all n locations
gtcgacggacgcgtcaaaccacgcatccgcgcatcttcctcctcagattctctttcactaaacagaaacaaagatggttttgacaaaaaccgcaacgaatgatgaatctgtctgcaccatgttcggatctcgctatgttcgcactacacttcccaagtatgagattggtgagaattcgataccgaaagacgctgcgtatcagatcataaaagatgagctgatgcttgatggtaacccaaggcttaacctagcttcttttgtgactacatggatggaaccagagtgtgacaaactcatcatggactctatcaataagaactacgttgatatggatgagtaccctgtcacaactgagctccagaaccgatgtgtaaacattatagctcgactgttcaatgcgccactcgaggaatctgagacggcggtgggagtagggacagttggttcttcagaagccatcatgttagccggattggccttcaaaagaaaatggcagaacaaacgcaaggctgagggtaaaccctatgacaaacccaacattgtcactggagccaatgttcaagtttgctgggagaaattcgctcggtacttcgaggtggagctaaaggaagtaaacctaagtgaaggttactacgtgatggatccagacaaagcagcagaaatggtagacgagaacacaatctgtgtcgcagccatattgggatccacactcaacggtgagttcgaagacgtgaaacgtctcaatgacttgctagtcaagaaaaacgaggagactggttggaacacaccgatccacgtggatgcagcaagtggagggttcatagctccgtttatctatcctgaattagaatgggactttagacttcctttggttaagagtatcaacgtgagtggtcacaagtatggactggtctatgctggtattggttgggtcgtgtggagggcagcagaggatttgcctgaagagcttatctttcatattaattatcttggtgctgatcaacccactttcactctcaatttctccaagggatcgagccaaattattgctcaatactaccagctcattcgtcttggattcgaggggtacaaaaatgtgatggagaattgcatagagaacatggtggttctcaaagaagggatagagaaaacagagcgtttcaacatagtctcaaaggaccaaggagtgccagtcgtagccttctctctcaaggaccatagtttccacaacgagttcgagatctctgagatgctacgtcgttttggctggatcgtcccagcttacactatgcctgccgatgcacagcacatcacggttctgcgtgttgtcatcagggaagatttctcaagaacactcgcggagagacttgttgctgatatttcgaaggtgcttcatgagctagataccttgccttccaagatatctaagaagatgggaatagaagggatcgcggaaaatgtaaaggagaagaagatggagaaggagattctgatggaagttattgttggatggaggaagtttgtgaaggagaggaagaagatgaatggtgtgtgctaagcaagtgtgttgcctttgtgtggaaatgaagaggtacttgcgaggactttgcgtttatcagtttatgtgtttgtatatctatttgatccagttattatggattatatacgcttgaaactcattttaagccattgttattgaacgtttatcaaatactttattatgccccaaaaaannnnnnnnnnnnnnnnnnnnn

SEQ ID NO: 118946 - DNA, 479 bp, Arabidopsis thaliana
tgccttttaataataatattatattattattgattatattattattgatattcgaatgagtcaaattcaacagcgatacataatagagagataaaagacatcaaacataaccaacatgaaatcaactagaactcaaaacaagaccagacttaaacatcatcaattagttgattttactttaaattcatttaaacataaaaagcaaagaagaaacttcttaaaagaagaatccaaaggccatcaccgctacggaggcgaagaaagtagggataaatgaggaagcatcggaggtagggctaggcgcgggagcgtcaaccgctgcaaccgtctggtgaactgtagagaacgctatcactgccaccaaaaccaccacgtaaagcttcatcttcattgcctccattgttagtatttttcgatttgagactcaaatgaagagaagaaaagaggttttggtgctcattgttgtgttgttgtttttg

SEQ ID NO: 118947 - DNA, 485 bp, Arabidopsis thaliana
  unsure (1)..(485): unsure at all n locations
aataataatattatattattattgatattcgaatgagtcaaattcatcagcgatacataatagagagataagagacatcaaacataaccaacatgaaatcaactagaactcaaaacaagaccagacttaaacatcatcaattagttgattttactttaaattcatttaaacataaaaagcaaagaagaaacttcttaaaagaagaatccaaaggccatcaccgctacggaggcgaagaaagtagggataaatgaggaagcatcggaggtagggctaggcgcgggagcgtcaaccgctgcaaccgtctggtgaactgtagagaacgctatcactgccaccaaaaccgccacgaaaagcttcatcttcattgcctccattgttagtaaatgaagagaagaaaagaggttttggtgcttactgttgtgttgttggtcgacncngggncgccgggatccgnccggactgagggncagttnccanagggg

SEQ ID NO: 118948 - DNA, 474 bp, Arabidopsis thaliana
gtaccggtccggaattcccgggtctacccacgcgtcccgggcacgcgtacgtttgatccagttattatggattatatacgcttgaaactcattttaagccattgttattgaacgtttatcaaatacttaaactgataaacgcaaagtcctcgcaagtacctcttcatttccacacaaaggcaacacacttgcttagcacacaccattcatcttcttctgaccctggacaagttaaagaaatgcatccattcaatggtatggtttaccccgaagatgaggaaagaagagggagtgcccattttgcactaactccaaaccaaaatcctcataccggaattgtaacatttaaacagcctgtagtttccatttcttctgctgtgaaagacactgattatatagacgacgaaccctcatgttcttgcccaaggaacgcctccctgccccgctaaaacaaaaattaaaaacaccagtggg

SEQ ID NO: 118949 - DNA, 3299 bp, Arabidopsis thaliana
  unsure (1)..(3299): unsure at all n locations
cttcttcttctctatcctctgtttcttcttcatggagacttgaaagcttttaaagtatatctaaaaacgcagtcgttttaagactgtgtgtgagaaatggctctgtttagagatattgttcttcttgggtttctcttctgcttgagcttagtagctactgtgacttcagaggagggagcaacgttgctggagattaagaagtcattcaaagatgtgaacaatgttctttatgactggacaacttcaccttcttcggattattgtgtctggagaggtgtgtcttgtgaaaatgtcaccttcaatgttgttgctcttaatttgtcagatttgaatcttgatggagaaatctcacctgctattggagatctcaagagtctcttgtcaattgatctgcgaggtaatcgcttgtctggacaaatccctgatgagattggtgactgttcttctttgcaaaacttagacttatccttcaatgaattaagtggtgacataccgttttcgatttcgaagttgaagcaacttgagcagctgattctgaagaataaccaattgataggaccgatcccttcaacactttcacagattccaaacctgaaaattctggacttggcacagaataaactcagtggtgagataccaagacttatttactggaatgaagttcttcagtatcttgggttgcgaggaaacaacttagtcggtaacatttctccagatttgtgtcaactgactggtctttggtattttgacgtaagaaacaacagtttgactggtagtatacctgagacgataggaaattgcactgccttccaggttttggacttgtcctacaatcagctaactggtgagatcccttttgacatcggcttcctgcaagttgcaacattatcattgcaaggcaatcaactctctgggaagattccatcagtgattggtctcatgcaagcccttgcagtcttagatctaagtggcaacttgttgagtggatctattcctccgattctcggaaatcttactttcaccgagaaattgtatttgcacagtaacaagctgactggttcaattccacctgagcttggaaacatgtcaaaactccattacctggaactcaatgataatcatctcacgggtcatataccaccagagcttgggaagcttactgacttgtttgatctgaatgtggccaacaatgatctggaaggacctatacctgatcatctgagctcttgcacaaatctaaacagcttaaatgttcatgggaacaagtttagtggcactataccccgagcatttcaaaagctagaaagtatgacttaccttaatctgtccagcaacaatatcaaaggtccaatcccggttgagctatctcgtatcggtaacttagatacattggatctttccaacaacaagataaatggaatcattccttcttcccttggtgatttggagcatcttctcaagatgaacttgagtagaaatcatataactggtgtagttccaggcgactttggaaatctaagaagcatcatggaaatagatctttcaaataatgatatctctggcccaattccagaagagcttaaccaattacagaacataattttgctgagactggaaaataataacctgactggtaatgttggttcattagccaactgtctcagtctcactgtattgaatgtatctcataacaacctcgtaggtgatatccctaagaacaataacttctcaagattttcaccagacagcttcattggcaatcctggtctttgcggtagttggctaaactcaccgtgtcatgattctcgtcgaactgtacgagtgtcaatctctagagcagctattcttggaatagctattgggggacttgtgatccttctcatggtcttaatagcagcttgccgaccgcataatcctcctccttttcttgatggatcacttgacaaaccagtaacttattcgacaccgaagctcgtcatccttcatatgaacatggcactccacgtttacgaggatatcatgagaatgacagagaatctaagtgagaagtatatcattgggcacggagcatcaagcactgtatacaaatgtgttttgaagaattgtaaaccggttgcgattaagcggctttactctcacaacccacagtcaatgaaacagtttgaaacagaactcgagatgctaagtagcatcaagcacagaaatcttgtgagcctacaagcttattccctctctcacttggggagtcttctgttctatgactatttggaaaatggtagcctctgggatcttcttcatggccctacgaagaaaaagactcttgattgggacacacggcttaagatagcatatggtgcagcacaaggtttagcttatctacaccatgactgtagtccaaggatcattcacagagacgtgaagtcgtccaacattctcttggacaaagacttagaggctcgtttgacagattttggaatagcgaaaagcttgtgtgtgtcaaagtcacatacttcaacttacgtgatgggcacgataggttacatagaccccgagtatgctcgcacttcacggctcactgagaaatccgatgtctacagttatggaatagtccttcttgagttgttaacccgaaggaaagccgttgatgacgaatccaatctccaccatctgataatgtcaaagacggggaacaatgaagtgatggaaatggcagatccagacatcacatcgacgtgtaaagatctcggtgtggtgaagaaagttttccaactggcactcctatgcaccaaaagacagccgaatgatcgacccacaatgcaccaggtgactcgtgttctcggcagttttatgctatcggaacaaccacctgctgcgactgacacgtcagcgacgctggctggttcgtgctacgtcgatgagtatgcaaatctcaagactcctcattctgtcaattgctcttccatgagtgcttctgatgctcaactgtttcttcggtttggacaagttatttctcagaacagtgagtagtttttcgttaggaggagaatctttaaaacggtatcttttcgttgcgttaagctgttagaaaaattaatgtctcatgtaaagtattatgcactgccttattattattagacaagtgtgtggtgtgaatatgtcttcagactggcacttagacttcctataagttcttgcctatctaagtttttctaaaaaaaaaaaaaaaaaaaagnnnnnnnnnnnnnnnnnnnnnnnnnnnnnnnnnnnnnnnnnnnnnnnnnnnnnnnnnnnnnnnnnnn

SEQ ID NO: 118950 - DNA, 1541 bp, Arabidopsis thaliana
ttcttcttcttcttattaatgttcaacaaaattcgacatttttgggtctaatccagctcaaaagtttacgtttttatttgtgtgtgtcggtctgtaagagttagttcgatttcttatccaagtaaaggggtttcattggctaaaattgacaatcggggcgggccctagaagaaaatatgaactgtcaattgtagcagacggttcgtgattcatcgttttcatggccgattcgattccgatttccccatgagggtttgtcgttgatattaacgcctcccctgggatttccataatttgccttgtttagttcgtgttatgatggatctttgaaagctattcccttttttttgggtgtcgaaatcgagaatctgagagttgttgtcacttgaagaatctggattctggaaggctgttgttggtgtgataaatgttgattggaagatgaatccaggccgtagctaggacacgaagggtttgttgtatatttgcgtttgaaaaatctcggtttttgttgctttagagattgttggagaaaatatggatcttgtgattggtggaaaatttaagcttgggaggaaaattggtagtggttcctttggagagctttatctaggtataaatgttcaaaccggagaagaagttgctgtcaagctggaatctgtgaaaactaagcatccccaactccactatgagtcgaagttgtatatgctgcttcaaggaggaactggtgttcctaacctcaagtggtatggagttgaaggggattacaatgtaatggttattgaccttctaggtcctagtcttgaagacttgtttaactactgtaatagaaaactctctttaaaaaccgttctcatgcttgcggaccagctgattaacagagtcgagtttatgcatactagaggttttcttcaccgtgatattaaacctgacaacttcttaatgggccttggtcgcaaagcaaatcaggtttatatcattgattttggattggggaagaaatacagagaccttcagactcacaggcacataccgtacagagaaaacaaaaacctcactggaacagctcggtatgcaagtgtgaacactcaccttggagtcgaacaaagtcgaagagatgatttggaagcacttggttatgtgctgatgtatttcctcaaagggagcttaccctggcagggattaaaagctgggacaaagaagcagaagtatgacagaattagtgagaaaaaagtagcaactcctatagaggtcttgtgtaaaaatcaaccgtctgagtttgtttcgtactttcgttactgccggtctctacggtttgatgacaaacctgattactcttaccttaagaggctattccgcgacttgtttattcgagaaggttatcagtttgattatgtatttgactggacagttctgaagtatcctcagattggttccagctctggttctagttcacggacacgggtagtttatgctgctttctcttttggttcttaagtttctctctattcaagcctaaaaatgtgtaaaacacttttttg

SEQ ID NO: 118951 - DNA, 1367 bp, Arabidopsis thaliana
gcgcggagctgtatactgactcacttagggacagctggcacgcctgcaggtaccgggccggtaattcccgggtcgacccacgcgtccgcacacatctcacatccccctatctctctctctcttcaaacgttttagttccccaaaaaaatatcaaaagaactaaaagaaaaaccctagaagccgaagaatctcctactcgttgtcgatcggatcacctaactaattactcgttgataatcattatatcgagaaatatgattaattttgaggccacggagctgagattagggctaccgggtgggaatcacggaggagaaatggctggaaaaaataatggtaaaagaggattttctgagactgttgatctcaaactgaatctttcatcgacggctatggattcagtttccaaagtcgatttagagaatatgaaggagaaggtcgtaaaaccaccagccaaggcacaagttgtgggatggccaccggtacgatctttccgcaagaacgtcatgtccggccaaaaaccgaccaccggagatgccaccgaaggaaacgataagacttctggcagcagtggagccacctcatccgcctccgcatgtgccaccgtggcttatgtgaaggttagcatggacggtgcaccgtacctacggaaaattgacttgaaactctacaaaacttaccaagatctctccaacgccttaagcaaaatgtttagctcttttaccataggcaactatggaccacaaggaatgaaagatttcatgaatgagagtaaattgatcgatcttctaaacggatcagattatgttccaacatatgaagataaagatggcgactggatgcttgtaggagacgtaccgtgggagatgtttgttgattcatgcaaacgtatacgaataatgaagggatcagaagcaatcggacttgctccaagggcattagaaaagtgcaagaacagaagttgagttctcgacgacatttcgtgttcttacctaaaaaaggaagaaagcctgtttcgatcggttggatatctcgaaccgagaaagctaaaccggctcgaaactattgttccgagcaaggagtttgcttataatattaattaataataatattaatattgtggtgtattacattttaaaaaattaaatcgtttttgttatatgtattatatacatatattaatatgtatatttaattaggttgcatctatttccgttaaaaccaacttttgtttttacgcaaaaaaaaagagttcacatggtctgtgtccgtaaggcatcttaatgtgttactttgacgtaccaaattaatacttgcggccgcgaattcgatatccagcttattgataccctcgacaaccagggggg

SEQ ID NO: 118952 - DNA, 675 bp, Arabidopsis thaliana
cggatcagattatgttccaacatatgaagataaagatggcgactggatgcttgtaggagacgtaccgtgggagtgagtatttttatatctttaaatttatatatgaattattattataaatacgtctatacaaaatatttatttacatgttgtttggactattttaggatgtttgttgattcatgcaaacgtatacgaataatgaagggatcagaagcaatcggacttgctccaagggcattagaaaagtgcaagaacagaagttgagttctcgacgacatttcgtgttcttacctaaaaaaggaagaaagcctgtttcgatcggttggatatctcgaaccgagaaagctaaaccggctcgaaactattgttccgagcaaggagtttgcttataatattaattaataataatattaatattgtggtgtattacattttaaaaaattaaatcgtttttgttatatgtattatatacatatattaatatgtatatttaattaggttgcatctatttccgttaaaaccaacttttgtttttacgcattatcgtgttgtctatatggtctgtgtccgtaaggcatcttaatgtgttactttgacgtaccaaattattacttacattatttcatttctcaacagtctttttttatccaacattttcaaccaccttaaatt

SEQ ID NO: 118953 - DNA, 1186 bp, Arabidopsis thaliana
tgctacgccggctctatacgacttacttagggaaagctggtacgcctgcaggtaccggtccggaattcccgggtcgacccacgcgtccggcgacacaccaacaccaatgtctgcttcttctttatttaatctcccattgattcgcctcagatctctcgctctttcgtcttctttttcttctttccgatttgcccatcgtcctctgtcatcgatttcaccgagaaagttaccgaattttcgtgctttctctggtaccgctatgacagatactaaagatgctggtatggatgctgttcagagacgtctcatgtttgaggatgaatgcattcttgttgatgaaactgatcgtgttgtggggcatgacagcaagtataattgtcatctgatggaaaatattgaagccaagaatttgctgcacagggcttttagtgtatttttattcaactcgaagtatgagttgcttctccagcaaaggtcaaacacaaaggttacgttccctctagtgtggactaacacttgttgcagccatcctctttaccgtgaatcagagcttatccaggacaatgcactaggtgtgaggaatgctgcacaaagaaagcttctcgatgagcttggtattgtagctgaagatgtaccagtcgatgagttcactcccttgggacgtatgctgtacaaggctccttctgatggcaaatggggagagcatgaacttgattacttgctcttcatcgtgcgagacgtgaaggttcaaccaaacccagatgaagtagctgagatcaagtatgtgagccgggaagagctgaaggagctggtgaagaaagcagatgcaggtgaggaaggtttgaaactgtcaccatggttcagattggtggtggacaatttcttgatgaagtggtgggatcatgttgagaaaggaactttggttgaagctatagacatgaaaaccatccacaaactctgaacatctttttttaaagtttttaaatcaatcaactttctcttcatcatttttatcttttcgatgataataatttgggatatgtgagacacttacaaaacttccaagcacctcaggcaataataaagttttcgtttttatcttaaaaaaaaaaaaaaaaaaaaaaaaaaaagctacgtcagggaggatccaagcttacgtacgcgtgcatgcgacgtcatagccccc

SEQ ID NO: 118954 - DNA, 1069 bp, Arabidopsis thaliana
  unsure (1)..(1069): unsure at all n locations
ggaaatttccgggtcgacccacgcgtccggtcttctttttcttctttccgatttgcccatcgtcctctgtcatcgatttcaccgagaaagttaccgaattttcgtgctttctctggtaccgctatgacagatactaaagatgctggtatggatgctgttcagagacgtctcatgtttgaggatgaatgcattcttgttgatgaaactgatcgtgttgtggggcatgacagcaagtataattgtcatctgatggaaaatattgaagccaagaatttgctgcacagggcttttagtgtatttttattcaactcgaagtatgagttgcttctccagcaaaggtcaaacacaaaggttacgttccctctagtgtggactaacacttgttgcagccatcctctttaccgtgaatcagagcttatccaggacaatgcactaggtgtgaggaatgctgcacaaagaaagcttctcgatgagcttggtattgtagctgaagatgtaccagtcgatgagttcactcccttgggacgtatgctgtacaaggctccttctgatggcaaatggggagagcacgaacttgactacctgctcttcatcgtgcgggacgtgaagcttcaaccaaacccagatgaagtggctgagatcaagtacgtgagccgggaagagctgaaggagctggtgaagaaagcagatgctggcgaggaagctgtgaaactatctccatggttcagattggtggtggataatttcttgatgaagtggtgggatcatgttgagaaaggaactatcactgaagctgcagacatgaaaaccattcacaagctctgaactttccataagttttggatcttccccttcccataataaaattaagagatgagacttttattgattacagacaaaactggcaacaaaatctattcctaggatttttttttgctttttatttacttttgattcatctctagtttagttttcatcaaaaaaaaaaaaaaaaaaagnnnnnnnnnnnnnnnnnnnnnnnnnnnnnnnnnnnnnnnnnnnnnnnnnnnnnnnnnnnnnnnnnnnnnnn

SEQ ID NO: 118955 - DNA, 500 bp, Arabidopsis thaliana
cttcatttcatctcagatccctccttccttctctctcttcttcttcttcttcttcctcttcccgatttgcccctccccgtctttctccgatccgatctccggcgccgaggactcagctgtctgttcgcgctttctcagccgtcaccatgaccgattctaacgatgctggaatggatgctgttcagagacgactcatgtttgaagacgaatgcattctcgttgatgaaaatgatcgtgtggtgggacatgacactaagtataactgtcatctgatggaaaagattgaagctgagaatttacttcacagagctttcagtgtgtttttattcaactccaagtatgagttgcttctccagcaacggtcaaaaacaaaggttactttcccacttgtgtggacaaacacttgttgcagccatcctctttaccgtgaatccgagcttattgaagagaatgtgcttggtgtaagaaatgccgcacaaaggaagcttttcgatgagctc

SEQ ID NO: 118956 - DNA, 609 bp, Arabidopsis thaliana
  unsure (1)..(609): unsure at all n locations
ccaggctctaatacgactcactttagggaaaggtggtacgcctgcagggaccgggccggaattcccgggtcgacccacgcgttcggaccaatggctggttgttctttaattaatctcccattggttcggcttagaactttcggtctttcggactctttttcttctttcccatttgcccatcggcctctggcatcgatttcaccgagaaaggtacccgaatttccgggctttctctggcaccgctttgaacagatcctaaggaggctggtatgggtggctggtcagagaacgtctcatgtttgaggatgaatgcattcttggtgatgaaactgatcgtgttgtggggcatgacagcacgtataattgtcatctgatgggaaatattgaagccaagaatttgctgcacagggcttttagtgtatttttattcaactcgaagtatgagttgcttctccagcaaaggtcaaacacaaaggttacgttccctctagtgtggacctaacacttgttgcagccatcctctttaccgtgaatcaaaggcttttccagggcaatnnnnctagggtnttangganttnttgcnncaaggaaaggttttnggatgggctt

SEQ ID NO: 118957 - DNA, 1581 bp, Arabidopsis thaliana
cgttaacttcgcgtgtgagtatgattagtcaacacagatcagaatctgaggctttggccgagacgagagaagcagaagaagaaaatggcggagactgtacattctccgatcgttacttacgcatcgatgttatcgcttctcgccttctgtccacctttcgtcattctcctatggtacacaatggttcatcaggatggttctgttactcagacctttggcttcttttgggagaatggagttcaaggacttatcaacatatggccaagacccactttgattgcttggaaaattatattttgctatggagcatttgaagctattcttcagctgcttctgcctggtaaaagagttgagggtccaatatctccagccggaaaccgaccagtttacaaggccaatggtctggctgcttactttgtgacactagcaacccatcttggtctttggtggtttggaatcttcaaccctgcaattgtctatgatcacttgggtgaaatattttcggcactaatattcggaagcttcatattttgtgttttgttgtacataaaaggccatgttgcaccttcatcaagtgactctggttcatgtggtaacctaataattgacttctattggggcatggagttgtaccctcgaattggtaagagctttgacatcaaggtgtttactaattgcagattcggaatgatgtcttgggcagttcttgcagtcacgtactgcataaaacagtatgaaataaatggcaaagtatctgattcaatgctggtgaacaccatcctgatgctggtgtatgtcacaaaattcttctggtgggaagctggttattggaacaccatggacattgcacatgaccgagctggattctatatatgctggggttgtctagtgtgggtgccttctgtctacacttctccaggcatgtaccttgtgaaccaccccgtcgaactcggaactcagttggcaatatacattctcgttgcaggaattctgtgcatttacataaactatgactgtgatagacaaaggcaagagttcaggaggacaaacgggaaatgtttggtttggggaagagccccgtcaaagattgtggcgtcgtatactacaacatctggtgaaactaaaactagtcttctcttaacgtctggatggtggggattggctcgtcatttccattatgttcctgagatcttaagtgctttcttctggaccgtaccggctctcttcgataacttcttggcatacttctacgtcatatttctcacccttcttctctttgatcgagccaagagagacgatgaccgatgccgatcaaagtatgggaaatattggaagctgtattgtgagaaagtcaaatacaggatcattccgggaatttattgattgtaacgaagtctgttgttctcattttctacttattacgttaattcgaacgttggaatcatcaaaagaccgagccaaaacaaaaatgcaaattgatgcgatagacattcttttgctgaaaaaaaaaaaataggttttcaaatctctagctacacttatgcctttccctagattatcaaagttagcctgccgtttaat

SEQ ID NO: 118958 - DNA, 2050 bp, Arabidopsis thaliana
cgcctgcaggtaccggtccggaattcccgggttgacccacgcgtccgcgtctaaatctcaccaatccatttcttctcttcttctttgcgttttttgtttggaactgaatcgaaaaagatggatgctaatttcgagatgcctccagtcggtggaatgaacgacgacgacgacatggatttcggtgacggcgcctcgtttcttaaagtcggtgaagagaaagagatccaacaaggtttgaagaagaagcttcttaaagaaggtgaaggatatgaaactcctgagaatggcgatgaagttgaagtgcattacactggaactttgcttgatgggacgaagtttgattcgagtcgtgatagagcaacgcctttcaaattcactcttggacaaggtcaagttattaaaggatgggatattggtattaagacgatgaagaaaggtgaaaacgctgttttcactatacctgcggagctagcatatggggaatctggttccccgccaactattcctgcgaatgctacgcttcagtttgatgtggagttgcttaaatgggacagtgtgaaggatatatgtaaagatggtggtgtgtttaagaagattcttgctgttggagagaagtgggagaatccaaaggaccttgatgaagttcttgttaagtttgaggcgaaacttgaggatggtactgttgttgggaaatctgatggtgtggagttcactgttaaagatggtcatttctgccctgcacttactaaggctgtgaaaactatgaaaaagggtgaaaaggtccttctgacagttaaaccacaatatggttttggggagaagggcaagccagcctctgctggtgaaggcgcggttcctcctaatgcgacgctcgagatcaatttggagttagtttcgtggaaaacagtgtcagaagtaactgatgataacaaggttgtgaagaaagtcttgaaggaaggggatggatatgagcgtcctaacgagggggcagttgtgaaagtgaaattgatagggaaacttcaagatggtactgtatttttgaagaaaggtcatggtgagaatgaggaaccgtttgagttcaaaacagatgaagagcaagttgtcgatggacttgatagagctgtcatgaagatgaaaaagggtgaagtggcattggtgaccatagaccctgagtatgcctttggttctaatgagtcacaacaggaattggctgtggtgccgccaaactcaactgttacttatgaggttgacctattgactttcgacaaggaaagggaatcgtgggacatgaacactgaggagaagattgaagctgctagtaagaagaaggaagaaggaaattccaagtttaaaggaggcaaatattccctggcttccaagagatatgagaaggctgtcaaattcgttgaatacgacacatccttcagtgaggaagagaagaagcaagcaaaagcattgaaggtggcatgcaatctaaacgatgcagcctgcaaactcaaattgaaagattacaagcaggccgaaaaactatgcacaaaggtgttagagctagaaagcaccaatgtgaaggccttataccggagagcgcaagcgtacatggagttgtctgatttagacttggccgagtttgatgtcaagaaggcccttgaaatcgatcccaacaacagggaagtgaagctagagcagaaaaggttgaaggagaaaatgaaggaattcaataaaaaggaagccaaattttatggaaacatgtttgcgaaactaagtaaggaataatcaaaagatggagaggcaatgagcacctgaggtcttgaaaacgttgcaagaactctgcatttttcattttctactcttttggtttgttgcaatgttttctagtttttcaacctgagcgttagtgagacactaagacttataaaacagtgagagattatcccaatgtgttgcttttttcgtctgattgttggtagaaacttggagctattgatagcaaaaaaaacctaactttccagattaatttgagttcttcatatgatatcgagaaaaaaaaaaa

SEQ ID NO: 118959 - DNA, 2598 bp, Arabidopsis thaliana
  unsure (1)..(2598): unsure at all n locations
nntttcttctttatgtctaatctcatcggacgaaggtagttggcacacccacacttctctaacttgcagtcgatcaatttttttatttttattcagggtcatcgtacgtcgtcatgtggaagttgaagataggaaagggaaatggagaagatccgcatttattcagcagcaataacttcgtcggacgtcaaacatggaagtttgatcacaaagccggctcaccggaggaacgagctgccgtcgaagaagctcgccggggtttcttggataaccgttttcgtgttaaaggttgcagtgatctattgtggcgaatgcaatttctaagagagaagaaattcgaacaaggcataccacaactaaaagctactaacatagaagaaataacgtatgaaacaacgacaaatgcattacgaagaggcgttcgttacttcacggctttgcaagcctccgacggccattggccgggagaaatcaccggtccgcttttcttccttcctcctctcatattttgtttgtacattaccggacatctggaggaagtattcgatgctgaacatcgcaaagagatgctaagacatatctattgtcaccagaacgaagatggtggatggggattacacatcgaaagcaagagtgttatgttctgcaccgtgttgaattacatatgtttacgtatgcttggagaaaatcctgaacaagacgcatgcaaacgagctagacaatggattcttgaccgcggtggagtgatctttattccttcttgggggaaattttggctctcgatacttggagtctatgattggtctggaactaatccgacgccaccagaactcttgatgctgccttcttttcttccaatacatccagggaaaattttgtgttatagccggatggttagtatacctatgtcgtatctatatgggaagaggtttgttggtccaattacacctcttattttactcttgcgcgaagaactttacttggaaccttatgaagaaatcaattggaaaaaaagtcgacgtctatatgcaaaagaagacatgtattatgctcatcctttggttcaagatttgttatctgacactcttcaaaactttgtggagcctttacttacacgttggccattgaacaagcttgtgagggaaaaagctcttcagcttactatgaaacacatacactatgaagacgaaaatagccattacataaccattggatgtgttgaaaaggtactgtgcatgctagcttgttgggttgaaaatccgaatggagattatttcaagaagcatctggctagaattccagattatatgtgggtcgctgaagatggaatgaaaatgcagagctttggatgtcaactgtgggataccggatttgctattcaagctttgcttgcaagtaatctccctgatgaaactgatgatgcactaaagagaggacataattacataaaggcatctcaggttagagaaaacccttcaggtgattttaggagcatgtaccgccacatttcgaaaggagcatggacattttctgatcgagatcatggatggcaagtttcagattgtacagctgaagctttaaagtgttgcctgctgctttccatgatgtcagctgatatcggcggccagaaaatagatgatgaacaattatatgactctgttaacctcttgctgtctttacagagcggaaatggaggtgtcaatgcgtgggagccatcccgtgcatataaatggttggaactgctcaatcctacagaattcatggctaataccatggtcgagcgggagtttgtggaatgcacctcatctgttatacaagcacttgatctatttagaaaattgtatccagatcacaggaagaaagagatcaacaggtccatcgaaaaagctgtgcaatttatacaagacaatcaaacaccagacggttcatggtacggaaattggggtgtttgcttcatttacgctacttggtttgctcttggaggcctagcagcagctggtgaaacttacaacgattgtttagctatgcgcaatggtgtccactttttgctcacgacacaaagagatgatggaggttggggtgaaagctatttatcatgctccgaacagagatatataccatcagaaggagaaagatcaaaccttgtgcaaacatcatgggctatgatggctctaattcatacgggacaggctgagagagatttgattcctcttcatcgtgctgccaaacttatcatcaattcacaacttgaaaacggcgattttcctcaacaggaaatagtaggagcgttcatgaatacatgcatgctacactatgctacatacagaaacaccttcccattatgggcactcgcagaataccgaaaagttgtgtttatcgttaattaatcatttacttatttatgtaatttttttctttttaaatgagatgaatgtttttccagcgacggaatacaccgaatattaaaagatgaacacaaaaatatttgaatgaataaataatgatttagtcttctaaaaaaaaaaaaaagnnnnnnnnnnnnnnnnnnnnnnnnnnnnnnnnnnnnnnnnnnnnnnnnnnnnnnnnnnnnnnnnnnna

SEQ ID NO: 118960 - DNA, 930 bp, Arabidopsis thaliana
  unsure (1)..(930): unsure at all n locations
acgatctttttgggtaatagggtttctaatctctgggacaaactccaatcgtttcgaatccgcaatgcccagatggtcgatcaatagacgcgtcgagaaactccaattccaaaggctaaatctttgagatctttttttttataaatttctctgaaattaataaactttgaggggaaatgagcgcttcgaggttcgtaaagtgcgtgacggttggtgatggagctgtcggaaaaacttgtttgttgatttcttacacaagcaacactttccctacggattatgtgcctaccgttttcgataatttcagtgccaatgttgtggttaatggaagcactgtgaatcttggattgtgggacactgcagggcaagaggattacaatagattaagaccactgagttaccgtggagcagatgttttcattttggccttctctcttatcagtaaagccagttatgaaaacgtctccaaaaagtggatcccggagttgaaacattacgcgcctggtgtccccatcgtccttgttggaacaaagcttgatcttcgagatgataaacagttctttatcgaccatcctggtgctgttccgattactactgctcagggagaggagctgaggaagcaaataggagcacctacttacatcgaatgcagttccaaaactcaagagaatgtgaaggcggtgtttgacgcagccatccgagtggtgttgcaaccgccaaagcagaagaagaagaagagcaaagcgcagaaggcatgctccattctatgatgattggaaatctctgtttttatgtatttggttttggtatattaatcttatatcaatgaatgaattaatgtgttaatggacagacacccaagtttgactggtcctttttgttcttaatattaatggagtttgtcggnnnnnnnnnnnnnnnnnnnnnnnn

SEQ ID NO: 118961 - DNA, 1860 bp, Arabidopsis thaliana
acaaaaggaaataattagattcctctttctgcttgctataccttgatagaacaatataacaatggtgtaagtcttctcgctgtattcgaaattatttggaggaggaaaatggagtgtgttggggctaggaatttcgcagcaatggcggtttcaacatttccgtcatggagttgtcgaaggaaatttccagtggttaagagatacagctataggaatattcgtttcggtttgtgtagtgtcagagctagcggcggcggaagttccggtagtgagagttgtgtagcggtgagagaagatttcgctgacgaagaagattttgtgaaagctggtggttctgagattctatttgttcaaatgcagcagaacaaagatatggatgaacagtctaagcttgttgataagttgcctcctatatcaattggtgatggtgctttggatcatgtggttattggttgtggtcctgctggtttagccttggctgcagaatcagctaagcttggattaaaagttggactcattggtccagatcttccttttactaacaattacggtgtttgggaagatgaattcaatgatcttgggctgcaaaaatgtattgagcatgtttggagagagactattgtgtatctggatgatgacaagcctattaccattggccgtgcttatggaagagttagtcgacgtttgctccatgaggagcttttgaggaggtgtgtcgagtcaggtgtctcgtaccttagctcgaaagttgacagcataacagaagcttctgatggccttagacttgttgcttgtgacgacaataacgtcattccctgcaggcttgccactgttgcttctggagcagcttcgggaaagctcttgcaatacgaagttggtggacctagagtctgtgtgcaaactgcatacggcgtggaggttgaggtggaaaatagtccatatgatccagatcaaatggttttcatggattacagagattatactaacgagaaagttcggagcttagaagctgagtatccaacgtttctgtacgccatgcctatgacaaagtcaagactcttcttcgaggagacatgtttggcctcaaaagatgtcatgccctttgatttgctaaaaacgaagctcatgttaagattagatacactcggaattcgaattctaaagacttacgaagaggagtggtcctatatcccagttggtggttccttgccaaacaccgaacaaaagaatctcgcctttggtgctgccgctagcatggtacatcccgcaacaggctattcagttgtgagatctttgtctgaagctccaaaatatgcatcagtcatcgcagagatactaagagaagagactaccaaacagatcaacagtaatatttcaagacaagcttgggatactttatggccaccagaaaggaaaagacagagagcattctttctctttggtcttgcactcatagttcaattcgataccgaaggcattagaagcttcttccgtactttcttccgccttccaaaatggatgtggcaagggtttctaggatcaacattaacatcaggagatctcgttctctttgctttatacatgttcgtcatttcaccaaacaatttgagaaaaggtctcatcaatcatctcatctctgatccaaccggagcaaccatgataaaaacctatctcaaagtatgatttacttatcaactcttaggtttgtgtatatatatgttgatttatctgaataatcgatcaaagaatggtatgtgggttactaggaagttggaaacaaacatgtatagaatctaaggagtgatcgaaatggagatggaaacgaaaagaaaaaaatcagtctttgttttgtggttagtg

SEQ ID NO: 118962 - DNA, 705 bp, Arabidopsis thaliana
tatacgactcactttagggaaagctcgtacgcctgcaggtaccggtccggaatttctttcgtataatcagtgacgtagagatcgaagacgatgatgagctctgcatccgccatgaaagctgttggatttttgcttctgcttaccattctaacattagcttatgcgaagaagtcaggtgatgtgacagagttgcagattggtgttaagtacaagcctcagaaatgtgatctccaggctcacaaaggggataagatcaaggttcactatcggggaaagttaactgatggaactgtctttgattcaagttttgagagaggtgaccctattgagtttgagcttggaactggtcaagtcatcccaggatgggaccagggtttattgggagcttgtgtaggtgagaagagaaagttgaaaatcccatccaagcttggttatggtgataacggctcaccaccaaaaatcccgggtggggcgacactgatattcgacaccgagcttgttgctgtgaacggagaaccatccagcgaagcgaaatcaaagaatgagctttgattacaccataattgtttttcatttaaaaggaaaccttgagtagtcatcgatgttggcatttgaatcttaaacagcctagaatcatttactttgctagtcttaaacagcctagaatcatttactttgctagttgaagacaataattatattttg

SEQ ID NO: 118963 - DNA, 862 bp, Arabidopsis thaliana
  unsure (1)..(862): unsure at all n locations
nnnnnnnnnnnnnnnnnnnnnnnnnnnnnnnnnnnnnnnnnnnnnnnnnnnnnnnnnnnnnnnnnnnnnnnnnnnnnnnnnnnccacgcgtccgcccacgcgtccgtacggctgcgagaagacgacagaagggggacgtatagatcgaagacgatgatgagctctgcatccgccatgaaagctggtggatttttgcttctgcttaccattctaacattagcttatgcgaagaagtcaggtgatgtgacggagttgcagattggtgttaagtacaagcctcagaaatgtgatctccaggctcacaaaggggataagatcacggttcactatcggggaaagttaactgatggaactgtctttgattcaagttttgagagaggtgaccctattgagtttgagcttggaactggtcaagtcatcccaggatgggaccagggtttattgggagcttgtgtaggtgagaagagaaagttgaaaatcccatccaagcttggttatggtgataacggctcaccaccaaaaatcccgggtggggcgacactgatattcgacaccgagcttgttgctgtgaacggagaaccatccagcgaagcgaaatcaaagaatgagctttgattacaccataattgtttttcatttaaaaggaaaccttgagtagtcatcgatgttggcatttgaatcttaaacagcctagaatcatttactttgctagttgaagacaataattatattttggtcataacattagttatgttggcagttctaaaaaaaaaaaaaaaaaaaagggcggccgctctagaggatccaagcttacgtacgcgtgcatgcgacgtcaaagtcttctatannnnnnnnnnnnnna

SEQ ID NO: 118964 - DNA, 876 bp, Arabidopsis thaliana
  unsure (1)..(876): unsure at all n locations
nnnnnnnnnnnnnnnnnnnnnnnnnnnnnnnnnnnnnnnnnnnnnnnnnnnnnnnnnnnnnnnnnnnnnnnnnnnnnnnnnnnccacgcgtccgagcgattatggcgagcaagatgagtctccgttactctctctttttgatcttcttctctctcatttcactccaaggttttgccaagaagaccggagatgtgtcggaattgcagatcggtgtcaagtttaagccaaaaacatgtgaagttcaggctcacaaaggtgatacgatcaaggtgcactatagggggaaacttactgatggaactgtattcgattcgagttttgaaaggggtgatccgtttgagtttaaattaggaagtggtcaggttatcaaaggttgggatcaaggtttgctaggagcgtgtgtaggtgagaagaggaagttaaagatacctgctaaacttggatatggagaacaaggctctccacctactatccccggtggtgcaacactgatctttgacacagagcttattgcggtaaatgaaaaaccagctggtggtgaagaatacggaggggatgaagatgatgagggatatggaaatgacgagctatgatccggtctccgttctttaacgattttgcttcaagagttctctggataatacaaagaaaccatctatgggagggttttttctagtcttttggcttttaggcgtaaagactgcagatgattgttatggtgatatttaacattttcttttcttaaaaaaaaaaaaaaaaaaaaaaaaaaaaaaaaaaaaaaaaaaaaaaaaaaaaaaaaaagggcggccgctctagaggatccaagcttacgtacgcgtgcatgcgacgtcaagactcttctataggtgcacctaa

SEQ ID NO: 118965 - DNA, 2758 bp, Arabidopsis thaliana
  unsure (1)..(2758): unsure at all n locations
taaaatatttaaaatttagaagcctgttattgtaaaaataaataaaattggaatctattttaattatgttttttgttaatggattttagaaaaatatgggagccaangatcaacgaatgcctacaaaaccaataatttgacatgttaacaaaaaattgtaaaatccaaaaanaaaggtaattgaagctgataaccctcttgttcagcgagtgggttanagtgtgaccgagatatacgagcacggcatcgttttacgtatcgtgatctgttggatctcaactcggttttcttaataatcagaatccggttagagattgaatttgggttttgttagttttgcttcttctctctgcaaaaatcctccatccgcttcctcacgaaaaaccctagcacagctccgagatcccttttgtcgccatgggagactccggcgatcctttcttgcgtaatccaaacgccgctgttcaagctcgcgctaaagttcagaacagagccaatgttcttcagcttaagctgatgggtcagagccaccctactggcttaacaaacaatctcttgaagctttttgagccacgtccgccattggagtacaaaccaccaccagagaagagaaagtgcccgccttatacaggtatggctcagtttgtaagtaactttgctgagcctggggatccagaatacgctccacctaagccagaagttgaattaccttcgcagaaaagggaaagaattcataaattgcgactggagaaaggtgttgaaaaggctgctgaggacttaaagaaatatgaccccaataatgatccaaatgctactggagatccatacaagacattgttcgtttcaagacttaactacgaatcctcagagagtaagattaaaagggagtttgaatcttatggaccaattaaacgggtaggttattctgagcattcccttgctggttcggtaagaatttgtgtaatggcttccctctctagagctctttgctcaatttgttttattttatctacaaaagtcttccaaggttagaatttttcagtcccttataaatttgcatcttttctgctagaccaaaaggccattctacatttgctttgttttgcatgccttctttagactgtgtaaagccatcaagtctcttagacctttctcaataactgaatatatagatgcataagtgcttctcatataatgacacagctcctctctccatggtgtttgtttgagatgttttcggtaaatttggcctggtatttttatttccttgtcccttcagagagcaaatacttttacaatgatatatcatatagagtggttataggcacacggtttacctaatcaattagttgttttctgaatctataatgagctcaactcatcctgctgtaagcaacttataaaatattatctgcccatatcccaaagccattcaaatgctttattttcaagcaaccaaggttggattatcgaaaacccttctctcttttcctatcttaacatctatatatattcagtatctgggacttgggctactatgaaggtgatctggttcactttttaatacatttttagttatctaagtttctataccctggtaaggggtggtttattagactcttcaaaaatggtaattttgctgcaatacatccatttttctgccaattcttgatgtgggtggtgacattctcggatttggacacaacataaaggttgcctgccttatagagctgcatgtttgtttgatatgaaacacttttatcttgaatctgattttgttctcacagatttgatttgttaattgtcttcttctgaaacttctcaggttcatttggtgactgatcagctgaccaataaacccaaaggatatgctttcattgagtacatgcacacccgtgacatgaaagctgcatataagcaagctgatggacaaaagattgacggcagaagagttttggttgatgtggagagaggtagaaccgtcccaaactggcgtccacgcaggcttggtggtggacttgggacctcaagagtgggtggtggtgaagaaattgttggggaacaacaaccgcaaggaagaacctcccagtcagaggagccatcgagaccacgggaagagcgtgagaaatctcgggaaaagggaaaagaaagggaaaggtctcgtgagctgtctcacgaacaacctcgagagaggtctcgtgacagaccgagagaggataagcaccacagagaccgagaccaaggaggcagagacagggatagggacagcagacgtgatcgtgaccggacccgtgacagaggagacagagaccgccgtgaccgtgacaggggacgggatcgtacttcaagggatcatgaccgagaccgcagtagaaagaaggagcgggattatgaaggaggtgaatatgagcatgagggtggtggtcggtcccgtgagagagatgcagagtaccgtggcgagccagaagaaactcgtggctactatgaagacgatcaaggggacacagaccggtacagtcatcgctacgataaaatggaggaagatgacttcagatatgaacgtgagtacaagcggtctaagagatcagaatcgcgagagtatgttcgttgatgtttcattcggctgtttaaaactctaaaaacttaagaatcctttttgtttattctaaatcaaaacttgatgcaattctgtttgttacctctgaacttgattgctattttttctcttttgaagtttgtcatattattaatcaaaatc

SEQ ID NO: 118966 - DNA, 554 bp, Arabidopsis thaliana
  unsure (1)..(554): unsure at all n locations
ctaagccagaagttgaattaccttcgcagaaaagggaaagaattcataaattgcgactggagaaaggtgttgaaaaggctgctgaggacttaaagaaatatgaccccaataatgatccaaatgctactggagatccatacaagacattgttcgtttcaagacttaactacgaatcctcagagagtaagattaaaagggagtttgaatcttatggaccaattaaacgggttcatttggtgactgatcagctgaccaataaacccaaaggatatgctttcattgagtacatgcacacccgtgacatgaaagctgcatataagcaacctgatggacaaaagattgacggcagaagagttttggttgatgtggagagaggtagaaccgtcccaaactggcgtccacgcaggcttggtggtggacttnggacctcaagantgggtggtggtnaagnaatttttggggaacaacaaccgcaaggaagaaccttccagtcaanagggncccttnntggccncggggagancnttntaaaattttgggggaaaaggggtaaa

SEQ ID NO: 118967 - DNA, 1068 bp, Arabidopsis thaliana
agtaaacaatcagacccaaaaaatagaaaattccaattaatgttctccaattggagttgattctgcccttattagagagatctgatctttccccaattccataacccgaaaaatggaagaaatcgccgataaaaccttcttccgatactgtctcctcactcttattttcgccggcccaccaaccgccgtccttctgaaattcctccaagctccttacggtaaacacaaccgtaccggatggggtcccaccgtatctccaccgattgcttggttcgtcatggagagcccaaccttgtggctcactctcctcctcttcccctttggtcgtcacgctctcaaccctaaatctctacttctattctctccttatctcattcattacttccaccgcaccatcatttaccctcttcgcctcttccgcagctccttccccgccggtaaaaacggatttccgatcaccatcgccgccttggctttcacctttaatctcctcaatggttatatccaggcgaggtgggtttcgcattacaaggatgactacgaagacggaaactggttctggtggcggtttgttatcggtatggtggttttcataaccggcatgtatataaatatcacgtcggaccgcactttggtacgattgaagaaagagaaccggggaggttatgtgataccgagaggaggctggttcgagttggtaagccgtccgaattattttggagaggcgattgagtggttgggctgggctgttatgacttggtcttgggccggtattggattttttctgtacacgtgttccaatttgtttccgcgtgcacgtgcgagtcacaagtggtacattgccaagttcaaggaagagtatcccaagactcgtaaagctgttattccttttgtgtactgagaattgagaaagttgaaaactagtttatcatatgttatgtgtcaatttgtttccaaactacctttgtcaaaatttccagtaaccggtttaattccaacacggtttagatcttatgttggtatcttcaacaatgcacaacaaactgtgtattctttagacaaatttta

SEQ ID NO: 118968 - DNA, 1423 bp, Arabidopsis thaliana
gcctcgcgaagaagcaaactctcaagctccgtcgggaaaaaaaggaaaaccagatcggaaagttcacgtttttcaaatcttctccggagaaatcagattacttgattcttcaaacaatggatgtgattaagacgcaacagatttcagcaaggacgatcgagaaagtggttgttcatccactagtcttgcttagtatcgtcgaccattacaatcgcgtcgctaaggattcaagcaagcgtgtcgtcggtgttcttctggggagcagctctcgtggtgttgttgatgtcaccaacagctatgcagtgccctttgaggaggatgacaaagacccaagcatctggtttcttgatcacaactaccatgagtcaatgttccacatgttcaagagaattaatgccaaggagcatgttgtaggttggtacagcacaggccctaaacttcgagagaatgatttggacgtccatgcgttgttcaatggctatgttccaaatccagtgttggtcattattgatgtccaacctaaagaacttggaatccccacaaaagcttactatgcagtggaggaggtcaaggagaatgctactcagaaaagccagaaagttttcgttcacgtgtctacagaaattgctgctcatgaagtcgaggaaatcggcgtggagcatttgctcagggatgtgaaagatacaacaatcagtaccctagcgactgaggtcactgcaaaacttactgctttgaaggggttggatgcacgtcttcgggagatccggagttatcttgaccttgtaatcgaaggaaagctccctctaaaccatgagattttataccatctacaggacgttttcaacttgcttcctaacctgaatgtgaacgagttggtcaaggccttctcagtgaaaacaaatgacatgatgctcgttatctatctatcatccctcatccggagtgtaattgcgctccacaacttgatcaacaacaagttactgaacaaggaacatgaaaaagcagaggactcaaagcctgtggccatacctgccaccagctagatcaggttttctcgtgacttactgtagtcatcattgcccgcgatgaaggcagctattgtgtgttctcttccccaaaacaaaggtcaagtcagggtgggggaacgaacgagtttagtttgatatcgacattgttgatttctctcagttgttctgattcagaatgtatcaaagagtcttttttcattttatctttcaagttcgttaggcttaggcctctttttgagggggttttaagatacaaaagttcacgtcaatgtgtcgaaatctcttcagagatggtcttaacctattgaaattaagatattttttttcacattaaaaaaaaaagggcggccgctctagaggatccaagcttacgtacgcgtgcatgcgacgtcaaa

SEQ ID NO: 118969 - DNA, 1309 bp, Arabidopsis thaliana
  unsure (1)..(1309): unsure at all n locations
ctcctacctgtcgacccacgcgtccgcggaaaccctaaatctccactctctcgcgccttttaccccttctcagaatcttaaccatggcggcgacgagcgagcacaccatcttgcaatttgtgtctccgtcatcaacggcgtccgctacaacctctgtactcacggcgaggatccaccctctcgttatctttaacgtctgtgattgcttcgtgagacgtcctgactcagctgaacgagtcatcggaactctcctcggatctatcttacctgacggaaccgtcgatatccgcaattcatacgccgtccctcacaatgaatcatccgatcaggttgctgtggatattgattaccaccacaatatgttagcttcacaccttaaggtgaattcaaaggaaactattgtcggctggtattcaactggtgctggggttaatggcggtagttcgctgattcatgatttctatgctagagaagtacccaacccaattcacctaactgtggatactgggtttactaatggtgagggtactatcaaagcttttgtctcttcaaacctctcactcggtgatcgacaactcgttgcacattttcaagagattcctgttgatctccgcatggttgatgctgagagagtcggattcgatgtacttaaggcaacatctgttgacaaactcccaaatgacttggaaggaatggagttaacaatggagaggctgttaactctaatcaacgatgtctacaaatatgttgacagtgtcgtgggaggtcaaatagctccagacaacaacattggacgattcattgcagatgcagtagcctcccttcccaagttacctccacaagtcttcgataacctcgtgaatgatagtctccaggaccaattgcttctgttgtacctatcaagcataacaaggacacagttgagtctagcggagaagctaaacacagctgctcaaatgctataataagcttggaaacacaaggttttgctaaaaatggggaatgctgcttttttggtttcgaattttcttttaacaagtttatgtaagaatcagcttcttgttgtagtgttcctaaattgcaagtttaagaaagacaaaatgctctgtttcgtgaattaaggtctttaaaagggatttttagttggtgtgcctaattttaaacaatatacatataaatgagctttgttcttttnnnnnnnnnnnnnnnnnnnnnnnnnnnnnnnnnnnnnnnnnnnnnnnnnnnnnnnnnnnnnnnnnnnnnnnnnnnnnnnnnnnnnnnnnnnnnnnnnnnnnnnnnnnnnnnnnnn

SEQ ID NO: 118970 - DNA, 557 bp, Arabidopsis thaliana
atgatcctgccagctactaatacgactcaccttagggaaagctgctacgcctgcaggtaccggtccggaattcccgggtcgacccacgcgtccgaaggaatggagttaacaatggagaggctgttaactctaatcaacgatgtctacaaatatgttgacagtgtcgtgggaggtcaaatagctccagacaacaacattggacgattcattgcagatgcagtagcctcccttcccaaggtacctccacaaggcgttcgattacctcgtgaatgatagtctccaggaccaattgcttctggtgtacctatcaagccttacaaggacccaggtgaagtctgccggagaagcttaacacagctgctcaaatgctttattaagcctggaaccccaaggttttgcttaaaatggggaatgctgcttttttggtttccaattttcttttaacaagtttatgtaagaatcaccttcttgttggagggttcctaaattgccagtttaagaaagacccaatgctctgtttcgggaattaaggctttaaaaaggatttttaagttggg

SEQ ID NO: 118971 - DNA, 547 bp, Arabidopsis thaliana
  unsure (1)..(547): unsure at all n locations
cgacccacgcgtccgggaaccaatggcgtttaagccagagaggtttatggaagaagcggtggacataaccggaagcagagggataaagatgatgccgttcggagcgggtagaaggatttgtccagggattgggctagcgatgctgcatctggagtactatgtggcgaatatggtgagggagtttgactggaaggaggtccaaggtcatgaagtggacttgacggagaagctcgagtttaccgtagtcatgaagcatccgcttaaggcccttgctgttcctaggagaagtcactagttgtctacttcttaaacttcagtttagtattcaccaaagactaggtgatgtatgaagaattgaagttatgggcattttgttagctgaagtcaactatggaactatcttttttattaaagtacattttgtaccttggaataaatgatagaaacaacaatccttttaaaaaaaaaaaaaaaagnnnnnnnnnnnnnnnnnnnnnnnnnnnnnnnnnnnnnnnnnnnnnnnnnnnnnnnnnnnnnnnnnnnnnnn

SEQ ID NO: 118972 - DNA, 2024 bp, Arabidopsis thaliana
atttccttcggagcctggccggcgaatccgacaggtcgtttcagctgtgtccgaaggaaagttccaatttttatctgtttttcttcacggaaatccagttaaggtttccacattgcacagctgtaccatttgtcgagatcacaacacgcaagtctcttagatttagcaagcttatggcttcattgcagttgtacggagttaaaactccagggcttgctttaagttcaaagaggcttgagtttgcttcaaagggggcatgtttttcagttacgttgccctcaagtagtgctgtctttagagacgtagagcattcttgtaggaatataggtttgagagttagttgtgaagctctaagagtcgatttgcttcaaagaaaagagcctgagacgtgcgattcaagcggaactggcaaagagttgacatgtgtaatgaaatttggcggttcatcagtgggatcagcagagaggatgaaagaagttgccaatcttatattcagctttccagatgagaggcccgtcattgtgctatcagcaatgggaaagacgattaataagcttttgaaggctggagagaaggctgttacttgcggtgtcactaacgtaggaagtattgaagaattgagctttataaaggaactccatttaagaactgctcatgagcttggagtggaaacaacggttattgaaaaacacctagaaggactacaccagcttctcaaaggcatatcaatgatgaaagagctaaccttacgcacaagggactacttggtttcatttggagagtgcatgtccacaaggcttttctctgcgtatctcaataaaattggccacaaagcgcgtcaatatgatgcatttgagatcggatttatcaccacagacgactttactaatgctgatatacttgaagcaacataccctgccgtctcaaaaacacttgttggcgactggagcaaggaaaatgcagtccctgttgttactggctacctcggaaagggatggaggtcttgtgctatcactacgctgggtaggggtggcagtgatttgacagctacaacgattgggaaagcgctaggactgcgggaaattcaggtttggaaagatgtggatggagttttgacttgtgatcctaacatatatcctggagctcaatctgttccgtacttaacgttcgatgaggcagctgagcttgcttactttggtgcccaggtgttgcatccactgtctatgaggccagcaagagatggcgacattcctgtgagggttaagaactcgtacaaccccactgctccaggaactgtcatcaccagatcaagagacatgagtaaggctgtgctaaccagcattgttctgaaacgtaatgtgaccatgttggacatagcaagcacccgtatgcttggccaatatggtttccttgccaaggtgtttaccacatttgaagatttaggtatatcggttgatgttgtggcaacaagtgaagttagtatatcattgacattggatccagcaaagctctggggtagagagttaattcagcgagtaaatgaactggataatttggtggaagagctagagaagattgctgttgtgaaactacttcaacgcagatcaatcatctctctcataggaaatgttcagaaatcctcactcatattagagaaggtgttccaagtatttagaagcaatggagtgaatgtgcagatgatctcgcagggcgcatctaaggtaaacatctcattgatagtgaatgatgaagaggcagagcaatgtgtgagggctctccactccgccttctttgagaccgatccttagtgcaacacagagcacccatctctctccttcaactctgcttctgtgcgtagtttaatgctaagaatgtgtcaagacttggaactatttcaaattcttgtccattgttgttgttgttgttgttgttgttgttgtgatacaatacatcataatttgagccaaaaaaaaaaaaaaagcctataatcttttaatttaaagagtacatagacaagctcaaag

SEQ ID NO: 118973 - DNA, 3476 bp, Arabidopsis thaliana
ggagagctaatctgagtcgttgcctctgtccactggctcggaccgacctcgtacctctttcatttgtcctcgagcttataatagacgtacgccgtcgccgccacctccgctccatccattcacggccaagcgacgactccaccgcttaggcttggcgtctgaggtatactgatcaacgctttctgttttcggaggagcgaggcgagatcagcttctcttatgtctactcaaacatatcattcttctttagccactcgatttcttctctagcggctccagaggtttcgtcgctacagagtcaagttcctcttttcaggttttgtggtgaacaagattttagttacaaaaaaatggtgggactggaagatgatactgagagagagaggtcaccagtcgtagagaatggtttttccaatgggtctcggtcttcttcttctagcgcaggtgttttgtctccatcacgaaaggtcactcaggggaacgatacactttcttatgccaatattcttcgggcaagaaacaagtttgctgatgcgcttgctctctatgaggctatgctggagaaagatagcaagaatgttgaagctcacattggaaaagggatatgcttgcagacgcagaacaaagggaatctagctttcgattgtttttctgaagcgatcaggttggatccgcataatgcttgtgcccttacacactgtggtatacttcataaagaagaaggacgcctcgtagaagctgctgagtcctaccagaaagcattgatggcagatgcatcatacaagccagcagcagagtgtttagccattgttttgaccgaccttggaactagcctgaagctggctgggaatactcaggaaggaattcaaaagtattacgaagcccttaagattgacccacactatgctcctgcatattacaacttaggtgttgtatactccgaaatgatgcaatatgacaatgccttgagctgctacgagaaggctgcacttgagaggcctatgtatgctgaagcatattgtaacatgggtgtcatttataagaaccgtggtgacttggagatggcaatcacttgttatgagagatgtctagctgtgtctccaaactttgagattgcgaagaacaatatggccatagctctgacagatttaggaacaaaggttaaacttgaaggcgatgtaacccaaggagtggcatattacaagaaggctctctattataactggcactatgcagatgctatgtacaatcttggggtggcttatggagaaatgctaaagttcgacatggcgattgtcttctatgagcttgctttccactttaatccacattgtgctgaggcttgcaacaatttgggagtactttacaaagaccgtgacaaccttgataaagctgtggagtgttatcagatggctctatcaatcaaaccaaattttgcacagtcgcttaataaccttggtgtcgtctatacagtccaggggaaaatggatgctgctgccagcatgattgagaaggctatacttgctaatcccacatatgcagaagcttttaacaacctaggtgttctttacagagatgctggaaatataactatggctatcgatgcttatgaggaatgccttaagatagatccagattctcgcaatgctggccagaaccgattgcttgccatgaattacataaatgaaggactcgatgacaaactatttgaggctcacagagactggggttggcgcttcacaagattacaccctcaatacacttcatgggataatctgaaagatccagagcgacctatcaccattggatatatctcaccagatttcttcactcattcagtatcttatttcattgaagctccccttacgcatcatgattatacaaagtacaaagtggtggtttattcagcggtagttaaggcagatgcaaaaacatacaggtttagggataaagtgttgaagaaaggtggagtttggaaggatatatacgggatagatgagaaaaagatagcaagtatggtcagagaggacaaaatcgacattttggtagaactcactggtcatacggcaaacaacaagttgggaacaatggcctgcagaccagcaccggttcaggttacttggatcggctatccaaatactacgggtttgcccactgttgattacagaattacagattcgttggctgatccaccagataccaaacaaaagcaggtcgaggagctggttaggcttccggactgttttctttgttatacaccttccccagaggctggtcctgtttgtccaacacctgcgctttctaatggctttgtcacatttggtagtttcaacaacctcgcaaagataactcctaaggtgctgcaagtgtgggctaggatactgtgtgcagttcccaattctcgtctagtggtaaaatgcaaacctttctgctgcgatagcattaggcagaggtttctcaccacgctggagcagcttgggttagaatcaaagcgtgttgatctcttgcctttgattcttttcaatcacgaccatatgcaagcctattccttgatggatattagtttggacacattcccttatgctggaactaccactacctgtgagtctctctacatgggagttccatgtgttacaatggctggctcagtacatgctcataatgttggtgtcagtcttctcactaaagttggattaggacacctggttgccaaaaatgaggatgagtatgttcagctatctgttgatctagcctctgatgtcacagctctttctaaattgagaatgagtctccgggatctaatggctggatctcctgtttgtaatggtccttcctttgctgttggtcttgaatccgcatatcggaatatgtggaaaaagtactgcaaaggtgaagtgccgtccttaaggcgaatggaaatgctgcaaaaagaggtccatgatgatcccttaatctcaaaagacttgggaccatcaagagtcagcgttactggagaagccactccgtctctcaaggccaatggttctgctcctgtaccttcctctttaccaacccaatccccgcagctctcaaagagaatggactccactagctagataaccagcaaatcgacgtgctgcgaaatgccggcagagagtcttgacccatctggaaaaggtgtgaaagaaagagtcgatgagcttttcctgctatttacttccaagacaataggaactagactttagattactgcttgtgtagtaaaaagaatagtaaaaccagctctttcttttgttgtatctctttctactcttagtttagctttacatgattcttgggaagtcgttaggtggtagtggatttggagtttttcttctcatttgagagatcaagttgttgtgtatcgattagggttttaaggctttttaggatgttttcatgtgttggattttgactcatatgatagtaaatatagttatagaaagcttttcggtgcc

SEQ ID NO: 118974 - DNA, 982 bp, Arabidopsis thaliana
  unsure (1)..(982): unsure at all n locations
cccacattatagagcaaaaagctttttcccggaaagttgttctcatcttggaaaatcaaatctcggaaacgcagtcttcagctaaatcatgagcaacgagtacgattatctgttcaagcttttgttgatcggtgactcctctgttggaaaatcgtgtcttcttctccgattcgctgatgatgcttacattgacagctacataagcaccattggtgttgacttcaaaattaggacgattgagcaggatgggaagacgattaagctgcaaatttgggatactgctggacaggagcgtttcaggaccatcactagcagctattacagaggagctcatggaatcattattgtttatgactgtactgagatggaaagcttcaacaatgtgaagcagtggttgagtgagatcgatagatatgccaatgagagtgtttgcaagcttttaatcggtaacaagaatgatatggttgaaagcaaagttgtttccaccgaaactggaagggccttagcagatgagcttggaattccctttcttgagaccagtgccaaggattctattaacgttgaacaggcattcttaactattgctggcgagataaaaaagaaaatgggaagccaaacgaatgcaaacaagacatctggtcctggaactgtccaaatgaaaggtcagccaatccaacagaacaatggcggttgctgcggtcagtagtttaaaaaatgttttaatcaaaactatctgagactctttttttacttcctttttaactaagtgttgtgaaaaccaatggctgtttaaaacaactaagaaatgtaatattccatgtcgctgtgtcttgaataagctatggtgttagttgcaagacacttctctttaatatagttcagtcttgactttgaccnnnnnnnnnnnnnnnnnnnnnnnnnnnnnnnnnnnnnnnnnnnnnnnnnnnnnnnnnnnnnnnnnnnnnnnnnnnnnnnnnnnnnn

SEQ ID NO: 118975 - DNA, 1018 bp, Arabidopsis thaliana
cgaccggacgcgtgtggttttgcctttagcatctccgagtaaggaatccaggtccaaagcctcttctcttcctcctcctcgcttccttctcacgcaaccttggatccaccgcagctatgaagatcaccgccttgctcgttctcaagtgcgctcccgaagcttctgatcccgtcatcctctccaacgcttcggacgtctctcacttcggttatttccagcgatctagcgtcaaggagttcgtcgtctttgtcggtcgcactgtcgctagccgaacccctccttcccaacgccagtctgttcaacacgaagagtacaaggttcacgcttacaatagaaatggcctttgcgcggtgggtttcatggacgatcattaccctgttcgaagtgctttctctcttctcaatcaggtcctagatgagtaccagaagagttttggtgagtcatggaggtctgcaaaagaagactccaatcagccttggccatacttaaccgaagctttaaacaaatttcaggacccagcagaggctgataagctgttgaaaatccagagggagttggatgagacaaagattatccttcataaaaccattgatagtgttctagcccgtggtgagaagctggacagcctagtggagaagagctcagatttgagcatggcatcacagatgttttacaagcaagcgaagaaaacaaattcatgctgtactattctgtgagctggaagtcctgctgggtatatagtcaaccaaacttttgctggggggagactgttttttctatcgtcttatctatacatataattccgtctgtagtttgcatgcattattttgattccataagtctcgagtcgtgtggtgtgtttatccaaatacataatgtcaacttctgcaagatttgaattgtctttcccagatttggtctgaaaaaaaaaaaaaaaaaaaaaaaaaaaaaaagcggccgctctagaggatccaagcttacgtacgcgtgcatgggacgtcatagtacttctatagtg

SEQ ID NO: 118976 - DNA, 1053 bp, Arabidopsis thaliana
atacgactcactttagggaaagctcctacgcctgcaggtaccggtccggaattcccgggtcgacccacgcgtccgtacggctgcgagaagacgacagaaggggacgacgaaaagaaaggggaaaaaaaaaaggaaggaaaaaagtgaaaaccgtcggcttgagaaggaactttgatatttggtgactcttgaaaaaagcaagctctttcttcttccttctttcgcttttttcacacctcaaaatcaaagatccgaaacacgatttcggaggaagcttcgattctacctattttcagatctgaaatagttgtgtttgagaagcgggattggtgatcggagctggaatttggttggtaatcggaggtcagagagaagtcaacggatatgccggaggaagaatcgatagatatcaaattcaggttgtacgatggctccgatatcgggccttttcggtattctgcggcttctactgttgactttttgaagcagagggtcgtctctgattggcccaaaggcaaaacagttgttccaaaggggataaacgaagtgaagctgataagctcgggtaagatcttggagaacaacaagactgttgggcagtgtaagacaccatttggagatattgctggtggagtcattgtgatgcatgttgttgtacagccttctctagctaaatccaaaacagagaagaaggttgataaagcaccaaaggcagtaatctgcacatgcaccattttgtgaagggaggaagaccaatgtatctatcatacacatcgtttcaattcttccggtacagaagaaaacaaaatcaaaaaaagaaagctaaaagtaaagtaaagcttccctttaagctgtggagttatttatcatctttgaatgtgtagaaaatgaactataaattcttttcaagtaactctttgtcccttatttgttttttcttcttactttcccaatgtatggaagctgtataggttactaggtccattacgttacgtgtgatgaagataattatatatctatctatttttaaaaaagattgtgcctttgtgtttt

SEQ ID NO: 118977 - DNA, 1419 bp, Arabidopsis thaliana
  unsure (1)..(1419): unsure at all n locations
nnnnnnnnnnnnnnnnnnnnnnnnnnnnnnnnnnnnnnnnnnnnnnnnnnnnnnnnnnnnnnnnnnnnnnnnnnnnnnnnacgccacgcgtccggtttgcttaacgcggaacatatatacactcaagtatttaaagaagatcacgcgcggcgattgattaagcgagaacgacgctacagtaaaccaaaaccaaatctagatctgtgcctctccggtcacggtgcttctcaccggtggccggagagggcttctccctcttctcctttcctctctcttatctcctctgcctctcctttgaagctccggtggtgttcaaatctggcttgctcttcgtctcttgttggtggtatgcggcgagtggtcacgcacggagcaaaggacgtgcggcgtgtctctctccgtttaaggcagtggctttgatgagacgactgtagcggttgtgcggctcctatcgacgggaccatcttccagatctgataaattggtggtgcatcgccatgtttcttcagacatcgtcgttcttctttgatttgggcacaacggtgagttttcggtgtggcagatcttctcttctcgggtctctctacctgttttttctccagctctggtgatggtgtgattgatccgacgggcttctcttgtggaggcaatccaaggagtcgtttggctcttgtggattgttcgtggtggttagtggcgttgtgggttttgtttggtggtcgacgtctctcctccattggtgggcagttgagggtggtagcctcttcggccatgggtatggattctctgtgtccattgggtttcgtcccttttgcttcatctctggtttgctttcaggtggagttttgttgttcatggtgttgtcggtgttggttcatttggtgaaggtgagcctttgggtgttatggctatgttcaccgagggttgaatagaggcggcggataggtctaagtggcatcactaactcaacgagttagtgtagaagtccgcggttgtctttacgtttttgcgttagttctttgagaatctgtaggcacctatctcgaggtttgtggacggatctcagatagttgagctcgtggcaacaacgatgaggattccaatacttcggtattgtggcaatcacgcaaatttccaagtttcgcggacttgaaatcggtgtttcccttcgcaacttagtcataattactcagctgcaatccgaagttttttgagtagtaatgttgtttttaattttctgtagtgtgctttaatccgttcttgtattttctgtaacttctgtcaaaaatcttaaaatggtataaaatttaactttttaccaaaaaaaaaaaaaaaaaaaaaaaaagnnnnnnnnnnnnnnnnnnnnnnnnnnnnnnnnnnnnnnnnnnnnnnnnnnnnnnnnnnnnnnnnntgtcctaa

SEQ ID NO: 118978 - DNA, 560 bp, Arabidopsis thaliana
  unsure (1)..(560): unsure at all n locations
tangggggacccnncccccagggaagaccctnnncccaggggncccccccttggncaacccgggntncctccaggggggctttgttgcccacggcgttccccggtgtggtccattgggagaaggggcccctggggggttatggctatgtcccccgggggttgaatagagccgccggataggtctcaaggggcattccctacctcaaccgggttagtgtaagaacccccccggtgtctttacgtttttgccgttagttctttgagaatctgtaggcacctatctcgaggtttgtggacggatctcagatagttgagctcgtggcaacaacgatgaggattccaatacttcggtattgtggcaatcacgcaaatttccaagtttcgcggacttgaaatcggtgtttcccttcgcaacttagtcataattactcagctgcaatccgaagttttttgagtagtaatgttgtttttaattttctgtagtgtgctttaatccgttcttgtattttctgtaacttctgtcaaaaatcttaaaatggtataaaatttaactttttacc

SEQ ID NO: 118979 - DNA, 2443 bp, Arabidopsis thaliana
accacgaatccgcgtcaatcagatcaaaacttctccaactctttcaatatctatctacgtgcatccacctctctcttcttcttcttgtgaccactcttcctgtctgttcactggaggtgaattttgatttttttggccgatcggatttgagtttttgaatctctgattgctgagaaaatgccggcgttttacggaggaaagcttacgaccttcgaggacgatgagaaggagagcgagtatggttacgttcgtaaggtttcaggtcctgttgttgttgccgatggtatggccggtgctgctatgtatgagttagtgcgtgttggtcatgataatttgattggtgaaatcatccgtcttgaaggagattctgccaccatccaagtttacgaggaaacagctggattgacagttaatgatcccgttcttcgaacacacaagccactttctgtggagctcgggccaggaatattgggaaatatctttgatggaattcagaggcctttgaagactattgcaagaatatccggtgatgtgtacattcctcggggtgtgtctgttccagctcttgacaaagattgtctttgggagttccagcccaataaatttgtcgagggagacacaataactggtggtgacttgtatgctactgtctttgagaacactttgatgaatcacctcgttgcccttccgccggatgccatggggaagatcacttacattgctccagctggtcaatattcgcttaaggataccgtgatagagcttgaattccaggggatcaagaaatcttacaccatgcttcagagctggcctgtacgtacgcctaggccagttgcatcaaagcttgctgccgatactcctctacttacggggcagcgtgttcttgatgcccttttcccttctgttcttggtggaacctgtgccattcctggtgcttttggctgtgggaaaactgttatcagtcaggcactttccaagtactccaactctgatgctgttgtgtatgttggttgtggagagagaggaaatgaaatggctgaggttcttatggacttcccacaattgacaatgacgttgcctgatggccgtgaggaatctgtcatgaaacgtaccacacttgttgctaacacctctaacatgcctgtggctgctcgtgaagcctcaatttacacaggaatcacaatcgctgaatattttagagatatgggctacaatgttagtatgatggcagactcaacttcccgttgggcagaagcattaagagaaatttcaggacggctggctgaaatgcctgctgacagtggatatccagcctatctagcagcacgtttagcatctttctatgaacgtgctggtaaagtaaaatgtcttggtggaccagaacgtaacggaagtgttacaattgttggtgcagtttcgcctcctggaggagacttttcagatcctgtgacttcagcaacccttagtattgtgcaggtcttctggggtttggacaaaaagcttgcccagagaaaacattttccctctgttaattggttgatttcttactcaaagtattcaacggcactggaatctttctatgagaagttcgatccagatttcatcaacatcaggacaaaggccagagaggtgttgcagagggaagacgatcttaatgaaattgtccagcttgtaggaaaagatgcgctagcagaaggggacaaaatcacattggaaacagctaagctattgagggaagattaccttgctcaaaacgcgtttacaccatatgacaaattctgtcctttctacaagtccgtgtggatgatgcgtaacattatccatttctacaacctagccaaccaggcggttgagagagcagctggaatggacggtcaaaagattacctacactcttatcaagcatcgcttaggagatcttttctaccgtttagtgtctcagaagttcgaagacccagcagaaggggaggatacactggtggaaaaattcaagaaattgtacgacgatctcaatgctggattccgtgctttggaagatgaaactcggtaagctgtcgagtctccaccgcaagtaaaaaaaatccacagaattgggttgtttttggagaaagagggtttcattcatggtctctttcttgtgtttttgaaccaacaactatcatagtggtcggtattttatttatcggtttggtcgatcgattgagttttagctctgtgagcgtcatgattctccggctgtgctgtgctgtgtaatatgtttgattcgttgttttcatgtttttatttcggtggtaataaggtacagccaatgtgagtcatatatttgatttgatgtaccctctcaattcaataagttaattttatgtccaaaaacatattggggataccgttatttttctcataataaataccatcattttgtaaaaaaaaaaaaaaaaaataat

SEQ ID NO: 118980 - DNA, 1107 bp, Arabidopsis thaliana
gcgaaaaaacgaaaatggcggcgaacggagtagcgacggcgggacgtcaggtatcagagaaagaagctgatatccagatgatgttatcagccgatgttcaccttggtaccaaaaactgcaactatcagatggagcgttatgtcttcaaaagacgcgacgacggtatttacataatcaatcttggaaagacatgggacaagcttcagatggctgctagggttattgtagcaatcgaaaacccaaaagacataattgttcaatcagccaggccttatggacaaagagctgtcttgaagtttgctcagtacactggtgttaatgcgattgctggaagacacactcctggtactttcactaaccaaatgcagacttctttcagtgagcctaggttgttgattctcaccgacccaagaaccgaccatcagccaatcaaggaaggtgctttgggaaacattccaactattgccttctgtgacacggattctccaatgggatttgtcgacattggtattcctgctaacaacaagggaaaacacagcattggttgcttgttctggcttttggctcgtatggttctccaaatgcgtggaaccattctcgcagctcagaaatgggatgtcatggtggatctgtttttctacagggagcccgaagaagcaaagcaagagggtgatgaagaagctgaagtacaggccgattatggaatggttggtggtgaccagtggaccactgctcaaatatctgatgctgcatggtctggtgaagtcgaacagccaatttctgctgcacctgcagttggcgttaccgttgctgctggatgggaggctgcttctgttccagctgctggttgggagtaaaagctctcttattagtttagctcgaactcggttagatgtagacctgatttttttgttttcgagatttggagaggattaggaccatattagcttgctttacttcttgtctcttgagaattgcgaccatgagattaggtgcatttttgccggtatttccaagtttcaaccatataacggtattttatcgttgattctttcattgaattgaacattggtcttctatttaagtcatattattcattgatattgc

SEQ ID NO: 118981 - DNA, 1512 bp, Arabidopsis thaliana
aaaccggggccggcccaccctacgcgtgctccgatctgagttttttttagcaatggcgaaactaaaccctaaattcatctctttgattcttttcgctctcgtggtgatcgtctctgctgaagttatcttcgaggagaaattcgaagatggatgggagaagagatgggtaaaatctgactggaagaaagatgataatactgctggggaatggaaacacacagctggaaattggtctggtgatgctaacgataaaggtatccaaactagcgaggactacagattctacgctatatcagctgaattccctgagtttagcaacaaggataagaccttagtcttccaattctctgtcaagcatgagcagaagcttgactgtggtggtggctacatgaagttgctaagtgatgatgttgaccagacgaaattcggaggagacactccttacagcattatgtttgggccagatatttgtggctacagcactaagaaagtacatgctatccttacttacaatggaaccaaccatttgatcaagaaggaggtcccatgtgagactgatcagcttactcacgtgtacaccttcgtcctccgtccagatgctacttacagtattttgattgataatgttgagaagcaaactggtagcctttactctgactgggatcttctcccagcaaagaagattaaggatccaagtgctaagaagcctgaggactgggatgacaaagagtacattccagatccagaagacactaagccagcgggatatgatgacatcccaaaggagattccagacactgacgcaaagaagcctgaggactgggatgatgaagaagatggtgagtggactgcccctaccattcccaaccccgagtacaatggtgaatggaagcccaagaaaattaagaaccccgcttacaagggcaagtggaaggctccaatgatcgacaaccctgaattcaaggatgacccagaactctatgtcttccccaaattgaagtatgttggagttgagttgtggcaggtgaaatctggttccttgttcgacaatgtcttggtcagcgatgacccagagtacgctaagaagttggccgaggaaacctggggaaagcacaaggatgcggagaaagcagcatttgacgaagctgagaagaagagagaggaagaggaatcaaaggatgctcctgctgaatccgacgctgaggaagaagcagaagatgatgacaatgaaggagatgactcagacaatgaatcaaagtctgaggaaaccaaggaggccgaggaaaccaaggaagccgaggaaaccgatgccgcccatgacgagctctaagcaaaggtggaggattaaaaagttttcagagtcttaattgttcttttaaacttttcttttaaaaggaattctttagctctagtttggttggaatgtagaactttttagctattattatggtgaaatggttgtggtaactttgttttagactttgagaaaatcctgactttctccttctcttt

SEQ ID NO: 118982 - DNA, 1375 bp, Arabidopsis thaliana
  unsure (1)..(1375): unsure at all n locations
aattaagggccgaccacgcgtccgggaagctccgatctgagttttttttagcaatggcgacaatgattcctagcctcgtctctctaattcttatcggtcttgttgcgatcgcctccgccgcagttattttcgaggagcgctttgatgatggctgggagaacagatgggttaaatctgagtggaagaaggatgataacactgctggggagtggaagcacactgcgggaaattggtctggtgacgctaacgataaaggtatccagaccagtgaagactacagattctacgccatttcagctgagttccctgaattcagtaacaaggacaagaccttagtcttccaattctcagtcaagcacgagcaaaagcttgactgcggtggtggctacatgaagctactaagtggtgatgttgaccaaaagaaatttggtggagacacaccatacagtatcatgtttggtcctgatatctgtggctacagcacaaagaaagtgcatgctatccttacctataatgaagccaaccacctgatcaagaaagatgttccatgtgaaactgaccagctcacccatgtgtacacatttatcctccgcccagatgctacttacagcattctcatcgacaatgttgagaaacaaactggtagcctttactctgactgggatcttctcccacccaagaagatcaaggaccccagcgccaagaagcctgaggactgggacgaacaagaatacatttctgaccctgaagacaagaaacctgacggttacgatgatatccctaaggagatcccagacaccgactcaaagaagcctgaggactgggatgatgaagaagatggtgagtggactgccccaacaatccccaaccctgagtacatgggtgaatggaagcctaagcaaatcaagaaccccaactacaagggcaagtgggaggctccattgattgacaaccctgacttcaaggatgacccagagctctacgtcttccccaagctgaaatatgttggactcgaattgtggcaggtgaaatcaggatcattgttcgacaatgtcttgatctgcgggtgacccaggctttgccaagaagttgccagattgaaacatgggggaagctcaaggttgccggagaaagcagctttcgatgaggctgagaagaagaatgaggaaganggatccaagncgnacctgcggaatctgatgctgaagncgaccagaggtnnttnaggagngntgatcccgntctggatctaaggccnggnggccaatcagtgantcnggnacccctngaaancgcnccgnccatgtggcntggtaaggttantttagcaagtttgccctatgttacggtnctttagantttnccagttccggga

SEQ ID NO: 118983 - DNA, 795 bp, Arabidopsis thaliana
  unsure (1)..(795): unsure at all n locations
tccgggtctttcgacgcgtacggacacctgacggttacgatgatatccctaaagagatcccagacaccgactcttttaagcctgaggactgggatgaagaataagatggtgagtggactgccccaacaatccccaaccctgagtacatgggtgaatggaagcctaagcaaatcaagaaccccaactacaagggcaagtgggaggctccattgattgacaaccctgacttcaaggatgacccagagctctacgtcttccccaagctgaaatatgttggactcgaattgtggcaggtgaaatcaggatcattgttcgacaatgtcttgatctgcgatgacccagactatgccaagaagttggcagatgaaacatggggaaagctcaaggatgcggagaaagcagctttcgatgaggctgagaagaagaatgaggaagaggaatccaaggacgcacctgcggaatctgatgctgaagacgaaccagaggatgatgaaggaggagttgtttccgattctgaatctaaggccgttggagaccaaatcagtagaatagcgaggataacctctgagaaagacgccaccgctcatgatgagctataggtgaaaggtggaagatttgaaaccccgaagtttttcaggcctcttttattagttttattcgctcctctttttggaaagtattttttagcaatcctagcttttgttccggcaagataggaaaaacaaaggtttttttaaggcaaaaaacctaaaaaggggggggggatnnnnnnnnnnnnnnnnnnnnnnnnnnnnn

SEQ ID NO: 118984 - DNA, 387 bp, Arabidopsis thaliana
  unsure (1)..(387): unsure at all n locations
cgcttncgatgggctggaagagatggggaagaggaatccaaggacgcacctgcggaatctgatgctgaagccgacccagaggatgatgaaggaggagatgattccgattctgaatctaaggccgaggagcccaaatcagtagatagcgaggaaacctctgagaaagacgcccccgctcatgatgagctataggtgaaaggttgaagatttgaagaccaaagttttcagtctctttattgttttatcgttttcttttgaagtattttagcatctagtttgtcggagatagaaacaagttttagcaaaactaaaagggggatacaatgtctgtcagatgctcattttagactttaaaaaaccatgaagaagttttgcagttgcttccct

SEQ ID NO: 118985 - DNA, 1577 bp, Arabidopsis thaliana
  unsure (1)..(1577): unsure at all n locations
ttgacgtcgcatgcacccgtacgtaagcccacgcgtccgaattctgaaaaatgggattacctcaaaataagctcagttttttctgcttcttcttcctcgtctctgtactaactcttgccccattggctttctccgagatcttcttagaggagcatttcgaaggtggatggaaaagtaggtgggtcttgtctgattggaaaagaaacgaaggcaaagctggaacctttaagcacactgccggtaaatggcccggcgatcctgacaataaaggtattcagacttataatgatgccaagcattatgcgatttctgcaaagattcctgagtttagcaacaaaaaccggactcttgttgtccagtactcagtcaagattgaacaagacattgaatgtggtggtgcttacattaagctcctgtctggctatgttaaccagaagcagtttggtggtgatactccatacagtctaatgtttggaccagatatatgcggaacacagacgaagaagcttcatgttatagtttcatatcagggacagaattatccaatcaaaaaggatttgcaatgtgaaacagacaaattaaatcatttctacacatttattctgcgtcctgacgcttcttacagcgttctggtggataataaagagagagaatttggcagtatgtacacagactgggacatccttcctccaaggaagatcaaggtcaagaatgcaaagaagccagaggactgggatgatagagagtacatcgatgaccccaacgatgtcaaacccgagggttttgattctattccacgtgaaattccagatcgtaaagctaaagagcccgaggactgggacgaggaagaaaatggtttgtgggaacctccaaagatcccaaattttgcgtacaaaggtccttggaaagcaaagagaatcaagaacccgaactacaagggaaaatggaagaacccatggatagataatccagaatttgaagatgatccagatctttacgttctgaagtctatcaaatatgcaggcattgaagtatggcaggtgaaggctggctcaatctttgacaatatattgatctgcgatgacccggcatatgcaagaagcatcgtggatgactattttgcccaacacagggagtctgagaaggagttatttgcggaagcagagaaagaaagaaaagctagagaagatgaggaagctcggatagcacgggaagaaggtgaacgcaggcggaaagaaagggaccaccggtatggagacaggaggaggcgttacaaacggccgaatccacgtgattatatggatgattaccatgacgagctatgaggcgcagagtggtgggcatttggcaaagcattgggggaaattatctatattttgctttgaatgtgtgtttgtaatttcataatttgtaaccttttgtattcatattcttataatgtattttggcatgaaaacttgacttgttaaaaaaaaaaaaaaaaaaaaaggnnnnnnnnnnnnnnnnnnnnnnnnnnnnnnnnnnnnnnnnnnnnnnnnnnnnnnnnnnnnnnnnnnnnnnnnnnnnnntgagttgta

SEQ ID NO: 118986 - DNA, 2375 bp, Arabidopsis thaliana
  unsure (1)..(2375): unsure at all n locations
gctttagcttgcatctgtagtcatttgtcaaagataattgaacagagagtaatttagttcgtggtcaagggtttaggagattctgggttttggcgtgattttgaggggaaagattgaaactttccccgtgaatggtaagacagtgagagatgtctgggtacgtgggtgttgtcgtttctgatccatggctacagagccagttcactcaagtcgaacttcggactctcaattccaagtatgtgtcggtgaagaatcagaatggaaaggtcactattgaagatctccctcctctatttgcaaagctgaaggcacttagtgcaacatttaaggaagacgaaatcaagggtatgctaggggaattgggttctgatacaagcactgatgtgagttttgaagagtttctcaagatatatctcaacttactaagtaaagcagctgagaaatctggtggtcatcataagaactcatcctcgtttctgaaagcttgtacaacgacacttcttcacgctatatatcagtcggagaaaggtccttttgttcagcacatcaatagatatctaggggatgacccctttttgaagcagttccttcctcttgaccctcattctaatcaattgtatgaacttgtgaaagatggtgtccttctatgtaagcttataaatgtagctgttcccgggacaattgatgaacgagcgatcaacactaagagggtacttaatccgtgggagagaaatgagaatcacacgctttgtctcaactctgctaaagctgttggatgctctgttgttaatattggcacacaagacctggccgaaggacggcctcacctggtgctcggattgatttcacaactcataaagattcaagtacttgctgatctcaatttaaagaagacgcctcagcttgttgagttgcttgaggacagcgatgatgtcgaggagttgctgagattaccccctgagaaagtcttactgaaatggatgaacttccatcttaagaaagggggttacaagaaaaccgtctcaaacttttccgcagatttgaaggatgcacaagcgtatgcctttctgctcaatgttctcgcacctgaacactgtgacccggctacactagatgcaaaggatcctcttgaaagagctgaattggttctcagtcatgcagagagaatgaactgcaagcgatacttgactgcagaggagatcgttgaaggatcttcaactttgaatcttgcctttgtggcacaaatcttccatgaaaggaatggtctaaacaaggatggtaagtatgcatttgcggagatgatgaccgaagacgtagagacttgtagagatgaacgatgctaccggctatggatcaacagcctcgggattgacagttatgtcaataatgtatttgaagatgttagaaatggatggattcttcttgaggttcttgacaaggtctctcccagttcagtcaactggaagcatgcttccaaaccaccgattaagatgccgtttagaaaagtagagaactgcaatcaagtcataaagatcgggaaacagctaaaattctcacttgtaaatgtagctggaaatgacatagttcaagggaataagaagctcattcttggtctcttatggcagttgatgagattccatatgctccaacttctcaagagtctcagatctcggacactaggtaaagagatgactgatgcagatatcctcagctgggccaacaggaaagtaagaacaatgggacgaaaattgcaaatcgagagtttcaaggacaagagtctatcgagtgggttattcttcctcaaccttctatgggcggttgaaccaagagttgtgaactggaatcttgtcaccaagggtgaaacagatgatgagaagaggttgaatgctacatacatagttagtgtcgcaagaaagctcggttgttcggttttcttgttacctgaagatatcgtggaggtgaatcagaagatgatcctaattttaacggcaagtataatgtactggagtcttcagagacattcacgggagagttcagattcgtcgtcaactcagagcaccacaacgacgtgcaccagcacagcctcgtcccctgccccatctgtcacagaagaggaggaagtctcctcattgagcggtgaagtcacgagcttggccgttggtgatgcggtttctgaaatcaccacggtctcagaggaagcatccatcgaatagagagagcgagatcacatatatactgatatacatctcttgctatagcaaagtagctgttataatagtgacttctctgtaatcttttgtttttttgtttcatcaactaaaattaccaaaaataataacaatgttacaaacactcaaannnnnnnnnnnnnnnnn

SEQ ID NO: 118987 - DNA, 1175 bp, Arabidopsis thaliana
ctaaacccctttctccacgatcttccttttcctctctctgcgacttgaagcaaagtttccagaaaaagagatgaacaacgtcaaagttccaaagataccaggtggtggtgccatttcgacgttgcttaaggttgggattattggtgggcttggcctctatggtgctacgcacagtctctacaatgttgaaggaggacatcgagccatcatgttcaatcgtttagtcggtattaaagataaggtttaccctgagggtacacaccttatgattccttggtttgaaaggccggtcatctatgacgttcgtgctcgaccttaccttgttgagagtacatccggaagccgtgatcttcagatggtgaaaattgggcttagggttctcacacgtcccatggcagaccagttacctgaaatctacagaagccttggtgagaactacagcgagagagttctaccttctataatcaacgagactttgaaagctgtggttgctcagtacaatgcaagccagcttattactcagagagaggcggtcagtagggagatcaggaagattctgactgaacgagcagcaaacttcaatgttgcgcttgacgatgtgtccatcacaaacctgacattcgggaaggagttcacagctgccattgaagcaaagcaggtggcggctcaagaggctgagcgggctaagttcattgttgagaaggccgaacaagacaagagaagtgctgttatccgcgcccagggagaagccaagagtgctcagctcattggtcaagcaattgcaaacaaccaagcgtttatcacgctcaggaagatcgaggctgcaagagagattgcacaggccatagcaaactcggcgaacaaggtttacttgagctcagacgatcttttgcttaacctacaagggatgaatttggatgttgatgcaaagaactagagaggtttcttaagtaaaactgcatgtgggtcattttgtcttttaagttcctagaatccgttggaacaaaagcttgatttgtactactaaatactacttttaaaattcttgggatcagtctatctcaaggtgaaagttgaaaaagaagatactgtcttgctgaatgagttaattgtaataaacttgtcgtttgggggagaaaaacacttgcatttggattaaaaaaaaaaaaaaaaaa

SEQ ID NO: 118988 - DNA, 651 bp, Arabidopsis thaliana
agagaaatcaggaaaatcctaactctaagagccgcaaacttccccattgcactggatgatgtgtccatcacaggcttgacattcggaaaggagttcacgccagccatagaaggaaagcaggtcgctgctcaagaggccgaacgggctaagttcattgtcgagaaagctgaacaggacaagagaagtgctgttatccgcgccgagggagaagccaagagtgctcagctcattggtcaagcaatcgcaaacaaccaagcgttcttaacactgaggaagatcgaagcagctagagagatcgcacagaccatctctaggtcggcgaacaaggtttacttgagctctaacgatctgttgcttaacctacaggctatgggccttgatgtgaagccgaagaagtagagaatgatatgattaaaccacaccagagctcttcttccataatcgtattttcaattcgcggattcttagaccaaaagctatgagttctatcttgtgaatttcagacactatcgtgcgtttgtagtctttcttttgtgagatcaagaagaaaagaaaagatttatgtttttaaaaaaaaaaaaaaagggcggccgctctagaggatccaagcttacgtacgcgtgcatgcgacgtcaagactcttctatagtg

SEQ ID NO: 118989 - DNA, 1253 bp, Arabidopsis thaliana
attcacgcgtccgaaaaccctaagcttcgccggcagctccgatcgtgatctttcataaatcctaccatcgccgtcgattaagagctgagctcaggaaatgagtttcaacaaagttcccaacattcctggagctcctgctctctctgcccttcttaaggtcagcgttattggtgggctcggtgtctatgcccttactaatagtctctacaatgtcgatggaggacaccgtgctgtcatgttcaaccgattaactggtatcaaggaaaaggtgtacccagaaggcacacattttatggtgccatggtttgaaaggccaatcatctatgacgttcgtgcacgaccttaccttgtagagagcaccactggtagtcatgatcttcagatggtgaaaattggattaagggttctcacacgtcccatgggtgaccgtttgcctcagatttaccgaacccttggcgagaactacagcgaaagggttcttccttccatcatccatgaaaccctaaaagcagtggtagctcagtacaatgcaagccagctcattacccagagagaagctgtgagcagagagatacgcaagattctgacagagcgggcttctaactttgacattgctcttgatgatgtctccatcacgactctgacattcggcaaagagttcaccgcagctatcgaggcaaaacaagttgctgctcaggaagctgaacgggctaagttcattgtggagaaagccgaacaagacaggagaagtgcggttatccgtgcgcagggagaagctaaaagtgctcagcttatcggacaagcaattgcgaacaatcaggcattcatcactctgagaaagattgaagctgcgagagagattgcacagaccattgcacaatctgctaacaaggtttacctgagctccaacgatctgttgcttaaccttcaagaaatgaacttggagcctaagaagtaaaagagaaggaacgagtaagtttcttcatttcatattcatttcatttaaaacctctctccgccttggaagtaaaggatgggttggtgtttgaccaaatgaccctttctcgtgactgattctgaaaatagtctttaagaggacatattgagagagacgcagattggctttggtcagtattattcatcattttcaatgaaactttttgttgatattttcctgtgtttccccggacaattgatgaagttgaatttaaaactcaataatattcatatgatctgatcaaaaaaaaaaaaaa

SEQ ID NO: 118990 - DNA, 1336 bp, Arabidopsis thaliana
  unsure (1)..(1336): unsure at all n locations
nnnnnnnnnnnnnnnnnntccagctctctacgactcactatagggaaagctggtacgcctgcagggtaccgctccggtgttctcaaatcccttcttccttcttcttctctctcgattcaagataatccacacgcaaaaatgggaagccaacaagcggctgtttcgttcctttccaatttggcgaaggctgctttcggtcttggaacggcggcgacggtgctgaatacatcgcttttcaccgttgacggcggagaaagagctgttatcttcgatcgattcaggggagtgatggatcagactgtgggtgaagggactcatttcttgatcccgattcttcagaggcctcacatcttcgatatccgcacgaagcctcacacgttctcttcaatctctggtactaaggatctccagatggttaatctcactcttcgtgttctctctcgtcctgaggtgtcgcgtctcccgtacatcttccaaactttgggtctagagtatgacgagaaggttcttccttcgattggaaatgaggttttgaaagctgtggttgcacagttcaacgctgaccagcttctcactgagcgtcctcacgtctcagcacttgttcgggagtcactaatcacccgtgcgaaggacttcaacattgtgcttgatgatgtagctatcacgcatttgtcctatggtgtggagttttcaagggctgttgagcagaaacaagtggctcagcaagaggcagagaggtctaagtttgttgtgatgaaggctgatcaagagaggagagctgcggttataagagctgaaggtgaaagtgaagctgctcagttgatttctgatgctacggctaaagctggtatgggacttatcgagcttaggaggattgaagcttcaagggagattgcgtctacacttgctaggtctcctaatgtggcctacttacccggtggccagagcatgctctttgccctgaaccgttgatcttgatcagatatgatggttgtttgggagcattttgcgatattttaatgatcaagttgtgaatctgattgaatcaaaaaggtgaaatgctcttttgttttgatgaactctgaagaagaaaaagaaactagttgtttgagttgtcattattgtgttctgaatctcggcaaaatttactctacctgaagaatctttgttttcagcatcatgtttatctaattctcaacaaataaatgattttggctgaaaaaaaaaaaaaaaaaaaaaaaaaaaacaaaacacnaagggcggccgctctagaggatccaagcttacgtacgcgtgcatgagacgtcaagctcttgtaagagtcacctaatacaat

SEQ ID NO: 118991 - DNA, 552 bp, Arabidopsis thaliana
  unsure (1)..(552): unsure at all n locations
cagcaggaagccgaaaggtcacagtttgtggtgatgaaggctgatcaagagaggagagctgcggttataagagcagaaggtgagagtgaagctgctcagttgatatcagatgcaacagctaaagcaggaatgggactaattgagcttaggaggattgaagcttcaagggaggttgcggctactctggctaggtctccgaacgtggcttacttacctggtggacaaagcatgctctttaatctgaaccctggtcgttgagctataacattggtgggaagaggagcttcagtggagacaaaacgacggagctgtgaagtttattaacgttgatgctcttttatttctgatgaacacgatgtgaaaaaagataattgttttgagccgttctatcttttctgactctagaagtaaagactatgccattgttgtcgaaacccgatcattccaatgaaaggcttcaccaaaaaaaaaacaaaaagggcggccgctctagaggatccaagcttacgtacgcgtgcgatgcgacgtcnnnnnnnnnnnnnnnnnnnnnnn

SEQ ID NO: 118992 - DNA, 550 bp, Arabidopsis thaliana
  unsure (1)..(550): unsure at all n locations
ggattgatttaggtgacctatagaagagctatgacgtcgcatgcacgcgtacgtaagctcggaattcggctcgaggattgaagcttcaagggagattgcgtctacacttgctaggtctcctaatgtggcctacttacccggtggccagagcatgctctttgccctgaaccgttgatcttgatcagatatgatggttgtttgggagcattttgcgatattttaatgatcaagttgtgaatctgattgaatcaaagaggtgaaatgctcttttgttttgatgaactctgaagaagaaaaagaaactagttgtttgagttgtcattattgtgttctgaatctcggcaaaatttactctacctgaagaatctttgttttcagcatcatgtttatctaattctcccccnntnnnnnnnnnnnnnnnnnnnnnnnnnnnnnnnnnnnnnnnnnnnnnnnnnnnnnnnnnnnnnnnnnnnnnnnnnnnnnnnnnnnnnnnnnnnnnnnnnnnnnnnnnnnnnnnnnnnnnnnnnnnnnnnnnnnnnnnnnnnnnnnn

SEQ ID NO: 118993 - DNA, 702 bp, Arabidopsis thaliana
  unsure (1)..(702): unsure at all n locations
nnnnnnnnnnnnnnnnnnnnnnnnnnnnnnnnnnnnnnnnnnnnnnnnnnnnnnnnnnnnnnnnnnnnnnnnnccacgcgtccgtcaaactctgctagcgaagtcacaatatcactcgaagatggctaatcacaacagtagtaggcacacaatcatcttgttgcagaattctccgagcagagctacgaggactttcatggactatgactctataggccaagctatggatggtatttgcggcttatatgaaaggaagttgaaggaaattaacccttctctcagaaatattagctatgacattgctgacctttacaattttattgatggtcttgctgacttgagcgctttggtctatgaccactcgataagtgcatatctgccatatgacaggcaatggattaagcagaaggcatttcaccatctgaagagaattgccaatggaggcagatgaagaagaagcatcatatgaaattgtcttacctgaagaaacatatgttgagagaggccatttaaagcatcatcactcgttattatatatatttgccaatgtaacattaattaatatgcatagaaagagttgtggttctcttggatgtgttagcccctaaaagtatttttgctatcccaaaaaaaaaaaaaaaaaaaaaagggcggccgctttaaaggattccagcttacgtacgcgtgcatgcgacgtcgtag

SEQ ID NO: 118994 - DNA, 1368 bp, Arabidopsis thaliana
ccgtggacccatcacacaatcctcaaaacagagtaacccaaaaaacagagcaatctctaaaaaatctcaagaaacctcactaaaatgggttcaacggcagagacacaattaactccggtgcaagtcaccgacgacgaagctgccctcttcgccatgcaactagccagtgcttccgttcttccgatggctttaaaatccgccttagagcttgaccttcttgagattatggccaagaatggttctcccatgtctcctaccgagatcgcttctaaacttccgaccaaaaatcctgaagctccggtcatgctcgaccgtatcctccgtcttcttacgtcttactccgtcttaacctgctccaaccgtaaactttccggtgatggcgttgaacggatttacgggcttggtccggtttgcaagtatttgaccaagaacgaagatggtgtttccattgctgctctttgtcttatgaaccaagacaaggttctcatggaaagctggtaccatttgaaggatgcaattcttgatggtgggattccattcaacaaggcttatggaatgagcgcgttcgagtaccacgggactgaccctagattcaacaaggtctttaacaatggaatgtctaaccattccacaatcaccatgaagaagattcttgagacctataagggttttgaaggattgacttctttggttgatgttggtggtggcattggtgctacactcaaaatgattgtctccaagtaccctaatcttaaaggcatcaactttgatctcccacatgtcatcgaagatgctccttctcatcctggtattgagcatgttggaggagatatgtttgtaagtgtccctaaaggtgatgccatattcatgaagtggatatgtcatgactggagtgacgaacattgcgtgaaattcttgaagaactgctacgagtcacttccagaggatggaaaagtgatattagcagagtgtatacttccagagacaccagactcaagcctctcaaccaaacaagtagtccatgtcgattgcattatgttggctcacaatcccggaggcaaagaacgaaccgagaaagagtttgaggcattagccaaagcatcaggcttcaagggcatcaaagttgtctgcgacgcttttggtgttaaccttattgagttactcaagaagctctaaaaacaaacaatgttcctatgaagatgatttatatgtaaacattatctcatatctccttccacggttccaaaactatgctgtttaataatggtttttacaagaatttgattatgagtttgtatttttgtttgtttggaacaaaattatgtgattatagggaaaaataaaatgagctattattgaagaaaaaaa

SEQ ID NO: 118995 - DNA, 1086 bp, Arabidopsis thaliana
  unsure (1)..(1086): unsure at all n locations
nnnnnnnnnnnnnnnnnnnnnnnnnnnnnnnnnnnnnnnnnnnnnnnnnnnnnnnnnnnnnnnnnnnnnnnnnccacgcgtgcgcggcgcgtccgcggactcgtgggatgctggactacaaaatggaatggttttgatatttgacatgcgtcaaaccacgggacctttcgcatcgatgacaggcttaacaaccaatccagttcatactgtccatcatctctctggcaattccactccagctgcgtgatgtccgtaccctcttatctgcttcttccatcgggctgtgtcagtggaacattagtggtagcgagggaagcccatcattagtttcggaaacgggaaacccaggtgtatgcatatcctcctcgtactgtccccgcagcaatcatatagtagcttcttatagaccaagagttggatcatctgatgatacagtcccgactcagccctcattgactcaaacaggagtcagtaatagtaatagtaatggtgtagatggatttcatgtttgtcacaagagaagaggtgttgattcgtattaccagaaactatcctccacacaagctattgtagatcccatccgtttgccaagaacagcgattatagactttggtggggaaaggaaacaactttttgcatcttgtgacgagtccactcgggagctcatcttgcaagatccttcgacttttactatttctcaacggttgccattgtcaagtcatcttccgcttcaagatgtgaaatactgtcacgtcaatggttcggatctgctcggtctcttaacggatgatagattgcagattcttaggaacgaatctccatgaagattaaaaaagattgatagtcttgcaaggatggtgtttgttgaagagaaaacatgtatgtaaagcggctaactagtctatctatcttttgtaatctggagatgctatagagtagcgagccatcacttaaatattattatcttagttatgaacctattgctgcaatgcagcctgctcaaaaaaaaaaaaaaagnnnnnnnnnnnnnnnnnnnnnnnnnnnnnnnnnnnnnnnnnnnnnnnnnnnnnnnnnnnnnnnnnncac

SEQ ID NO: 118996 - DNA, 495 bp, Arabidopsis thaliana
  unsure (1)..(495): unsure at all n locations
caaaacagagtaacccaaaaaacagagcaatctctaaaaaatctcaagaaacctcactaaaatgggttcaacggcggagacacaattaactccggtgcaagtcaccgacgacgaagctgccctcttcgccatgcaactagccagtgcttccgttcttccgatggctttaaaatccgccttagagcttgaccttcttgagattatggccaagaatggttctcccatgtctcctaccgagatcgcttctaaacttccgaccaaaaacccctgaagctccggtcatgctcgacccgtatcctcccgtcttcttacgggtcttacttccggttttaaacctggttccaaccggtaaaacttttccgggtgaatgggggttgaaccgggggttttaggggggtttggtcccggttttcaaaggtttttnccccaaaggaccggaagattggggtttccaattggngggcntttggttttttnnacccaaggcaaagggtt

SEQ ID NO: 118997 - DNA, 634 bp, Arabidopsis thaliana
tctctacgactcactattgggaaagctggtccgcctgcaggtaccggtccggaattcccgggtcgacccacgcgtgcgatcgaagatgctccttctcatcctggtattgagcatgttggaggagatatgtttgtaagtgtccctaaaggtgatgccatattcatgaagtggatatgtcatgactggagtgacgaacattgcgtgaaattcttgaagaactgctacgagtcacttccagaggatggaaaagtgatattagcagagtgtatacttccagagacaccagactcaagcctctcaaccaaacaagtagtccatgtcgattgcattatgttggctcacaatcccggaggcaaagaacgaaccgagaaagagtttgaggcattagccaaagcatcaggcttcaagggcatcaaagttgtctgcgacgcttttggtgttaaccttattgagttactcaagaagctctaaaaacaaacaatgttcctatgaagatgatttatatgtaaacattatctcatatctccttccacggttccaaaactatgctgtttaataatggcttttacatgatgaagatcccatccgtttgccaagaacagcgattatagactttggtggggaaaggaaacaa

SEQ ID NO: 118998 - DNA, 978 bp, Arabidopsis thaliana
  unsure (1)..(978): unsure at all n locations
acccaaaaaacagaccaatctctttatttttcagaaacctcactaaaagggttgggtgttatatacacagggaacggcggtgcaagttaccaacgaccaaactgtcctcttcgacatgcaactagccagtgctttcgttcttacgatggctttaaaatccgtcttagagcttgaccttcttgagattatggccatgaatggttctcccatgtctcctaccgagatcgcttctaaactttccgaccaaaaatcctgaatgctccggtcatgctcgaccgtatcctccgtcttcttacgtcttactccgtcttaacctgctccaaccgtaaactttccggtgatggcgttgaacggatttacgggcttggtccggtttgcaagtatttgaccaagaacgaagatggtgtttccattgctgnncnttgtcttatgaaccaagacaaggttctcatggaaagctggtaaaggtgagagagaggcacaaagtgtcaaaggacaattcaggacaaattacaggacaatacgacacgtaaccatttgaaggatgcaattcttgatggtgggattccattcaacaaggcttatggaatgagcgcgtgcgagtaccacgggactgaccctagattcaacaaggtctttaacaatggaatgtctaaccattccacaatcaccatgaagaagattcttgagacctataagggttttgaaggattgacttctttggttgatgttggtggtggcattggtgctacactcaaaatgattgtctccaagtaccctaatcttaaaggcatcaactttgatctcccacatgtcatcgaagatgctccttctcatcctggtatattaacattttcctaacatttcgcaaaatgagattttcttggaagattatgtcatcttatgactaaattaatgtaggtattgagcatgttggaggagatatgttttgaagtgtcccttaaggtgatgccatat

SEQ ID NO: 118999 - DNA, 1313 bp, Arabidopsis thaliana
  unsure (1)..(1313): unsure at all n locations
acttaacgtctctctctattcctctgcttctctctttctccctgtgaaaaaatggactcggtggctctctactgcaccgctggtctcattgccggcgccgtctactggttcatatgcgtcctaggtccagcagaacgaaaaggcaaacgagcctctgatctctccggcggctcaatctccgcagaaaaagtcaaagacaactataaccaatactggtctttcttccgcaaaccaaaagagatcgaatcagccgagaaagtacctgacttcgtcgacacgttctacaatcttgtcactgatatctacgagtggggatggggacaatctttccatttctctcctcatgtccctggaaaatccgacaaagacgccacaagaatccacgaagaaatggccgtcgatctcatcaaagtgaaaccgggacaaaagattcttgacgctggttgcggcgtgggtgggccgatgagagccatcgcggcccattccaaggcccaagtcactggaatcactatcaacgagtaccaagtgcaacgagccaagcttcacaacaagaaagctggacttgattctctctgcaacgtcgtttgtggtaactttttaaagatgccgttcgatgaaaacacgtttgacggagcttactcgatcgaagctacgtgtcacgctcctaagctcgaagaagtatactcggagatcttcagagtgatgaaaccaggatctttgttcgtgtcctacgaatgggtcaccactgaaaaatacagagacgatgacgaagaacacaaggacgtgattcaagggatcgagagaggagacgcacttcctggactaagaagctacgctgatatagccgtgacggcgaagaaagttgggtttgaggtagtgaaggagaaagatttggctaaaccaccgtctaaaccgtggtggaaccggttaaagatgggaaggattgcttattggagaaaccatgttgtggttgtgattctttctgctattggggttgctcctaaaggaactgttgatgttcataagatgttgtttaagactgctgattatttgaccagaggtggtgagactggaatcttctctccgatgcatatgattctctgtagaaaaccagagaaagcttctgaatgaatgattgagaatacttcttccttgttctcgttttcttcttctttctttctaagttcatgtttttccccttaagaatctctttgtccgtcgtattaatgttatcactttgttgtttattgtatttttttttttcaatttgctaaattactcctgatgatggggcncctggnaaaaaaaaaaaa

SEQ ID NO: 119000 - DNA, 1918 bp, Arabidopsis thaliana
  unsure (1)..(1918): unsure at all n locations
gttgttcgaacaaacaaaaaaagaaatagagagagactcaagaagagaagagagactagagagagatccccattcagaaaataaaaatagaacccaacaaaaccaaaattcccaaattgaccccaaaatttacgttcctcgtcaatgaccccgcgttccctggacctcccgccgctgttcctggggtagtcgagccactggtgcccggcgccggagcagatcccggcgaaggagcagagcccggtgctgcatcttctgtgaaactcaacacacggtgggagcccaaattatcaggaccgaaaggatgtacaccgggacgaccgttggtaacattgccgccgatctgccatacctgattcacactatcagctcccgccggaaccttaaccgtcgtgaaaatggcgatcctaccgccgcttaacgactcggcgcgtagattccaaaaatcaaaagcaagtttaccttcgacgagactgctgtagctgctaatgttgtacgtcttcacgaccggagccgcaccaccgccggatctgtaagcgaggaaggcttgagaaccagccatcttagtccccgtagggttaatagcccaagcgacccagccaccgttggcttgagatggagtggcgacgaaagcgacggagagagatgaatttgaggaattgtaggtgtaatggaggtaggaattgagtaccggaaggtcttcgcaactatcgaacggaccggcggagttcaagttctgtgatttgcaagcctgttgtgaaatcgccggtgagattagcgagacgaaacaagcaacggctaggattagaagagaagaagaagaagaagccatggctgagttctgttctgaaaaaacgacggtggatccacttctgagagatttggatgagaagaaagagagtttccggcgaaacgtggtgtctctggctacggagctgaagcaagtgaggggccgtttggtttctcaagaacaatcttttcttaaagagaccattactagaaaagaagcagagaaaaggggaaagaatatggaaatggagatttgtaaattgcagaagagattggaagaaaggaattgtcagcttgaagcttctgcatctgctgctgataagtttatcaaagagttggaggaatttagattaaagcttgatacaaccaagcaaaccgcagaggcaagtgctgattctgctcaatctacaaagatccaatgctcaatgctaaagcaacaacttgacgacaaaacacgttctctcagagaacaagaagaccgtatgactcagcttggtcatcagcttgatgatctacagagaggtctgagcttgagagagtgctcagaaaagcagcttagagaagaagttaggagaatcgagcgtgaggttactgaggccattgcaaaagcgggaataggtggcatggacagcgagctccagaaacttctagaagatgtgtctccaatgaaatttgagaggatgaataggctagttgaagtaaaagacgaagagattacaaaactgaaagatgagataaggttaatgtcaggtcaatggaaacataagactaaggaactcgaatctcagctggagaaacagagaagaactgatcaagatttgaagaagaaggtattgaagctagagttctgtttacaagaagctcgaagccagacaagaaagctgcagaggaaaggggaaagaagggacatggagatcaaagagataagagatcttatatcggagaagcaaaaccttaacaatgagtcttgggataaacagaagttctgggacaattcagggttcaagattgttgtatcaatgtctatgttgatgttagtggtagtctccaagagatgatgaattttgtaatgtataaatttagttgcagatagttgatgaggatnnnnnnnnnnnnnnnnnnnnnnnnn

SEQ ID NO: 119001 - DNA, 759 bp, Arabidopsis thaliana
  unsure (1)..(759): unsure at all n locations
gttnnnnnnnnnnnnnnnnnnnnnnnnnnnnnnnnnnnnnnnnnnnnnnnnnnnnnnnnnnnnnnnnnnncttttttttttttttttaagaagataagatgatctcaatctcatgatagtaatggtccatacaatccaataactctaagtaatgtggtgaaacaaagtaaatggccctaagactaaaacagtacaaaagtatggggctccattattgttcgaacaaaccaaaaaaaaaaaaaaaatagagagagcctcaagaagagaagagagactagagagagatccccattcagaaaataaaaatagaacccaacaaaaccaaaattcccaaattgaccccaaaatttacgttcctcgtcaatgaccccgcgttccctggacctcccgccgctgttcctggggtagtcgagccactggtgcccggcgccggagcagatcccggcgaaggagcagatcccggcgaaggagcagagcccggtgctgcatcttctgtgaaactcaacacacggtgggagcccaaattatcaggaccgaaaggatgtacaccgggacgaccgttggtaacattgccgccgatctgccatacctgattcacactatcagctcccgccggaaccttaaccgtcgtgaaaatggcgatcctaccgccgcttaacgactcggcgcgtcggacgcgtggnnnnnnnnnnnnnnnnnnnnnnnnnnnnnnnnnnnnnnnnnnnnnnnnnnnnnnnnnnnnnnnnnnnnnnnnnnnnn

SEQ ID NO: 119002 - DNA, 190 bp, Arabidopsis thaliana
caacggaccggcggagttcaagttctgtgatttgctagcctgttgtgaaatcgccggtgagattagcgagacgaaacaagcaacggctaggattagaagagaaggagaagaagaagccatggctgagttctgttctggtgtggtttggtgtttgataagaggtccgttcgatagttgcgaagaccttccg

SEQ ID NO: 119003 - DNA, 1427 bp, Arabidopsis thaliana
  unsure (1)..(1427): unsure at all n locations
ccccttttcgggttgacccacgcgtccgcgtttctttccttcaaaccataacaatctcaatcccttattcccagggcaacgaaagattcaagtaagttgcggtggtaagagtgaggtgttgaagagtgatacaatggaacctcatgaagcagaaacgtttgtgaacaagagaaccctttatgctcccattgagccatatagcagtggaaatttaaaggtttcagatgttcacactctctactgggagcaatcaggcaaacccgatggacacccggttgtttttcttcacggcgggccgggaggagggacggctcctagtaataggagattcttcgatccggagttttatcggattgttctgtttgatcagagaggtgcggggaagagtacaccgcatgcttgtttggaggaaaacaccacatgggaccttgtgaatgatattgaaaaactaagagaacatttgaaaatacctgaatggctggtttttggaggatcatggggaagcactctagctcttgcatacagtcagtctcaccctgacaaggttactggtttggtccttagagggatctttttgttgcgtaaaaaggagattgattggttttacgagggcggtgctgctgctatttaccctgatgcttgggaggagttcagagatcttattccagaaaacgagagaggtagtagccttgtggacgcgtatcacaaaagattgaattctgatgatctggaaattcaatacgcagctgcaagagcttggactaaatgggaaatgatgactgcttatcttcgtccaaatcttgaaaacgttcaaaaggcagaggatgataaattttcattggcgtttgcaaggattgaaaatcactactttgttaacaaaggtttcttcccgtcggactcacacttgctagacaatgttgataaaatacgacatatcaagaccaccattgttcagggaaggtatgacgtatgctgtcctatgatgtctgcttgggatctgcacaaagcatgcccagaggcagaactcaagattgtttatgatgctgggcactcggcaaatgagccaggaatatcagcggaactcgtggttgccaatgaaaagatgaaagcacttatgggatgaagtatttgatggaatgaaagctgctcattttgttcatttctttgggacctttgttcatattttcaagtttgttgctgcaaagtaaacatcacattcagagtttgttgttaacgcgaaaccgaatgttatttccatggacgtttatacccaaatgaaaaagacaatgacataggtgcagtgttttaaacccggactataagcaccaatgtaaccaatgaaaaaaaaaaaaaaaggannnnnnnnnnnnnnnnnnnnnnnnnnnnnnnnnnnnnnnnnnnnnnnnnnnnnnnnnnnnnnnnnnnnn

SEQ ID NO: 119004 - DNA, 1633 bp, Arabidopsis thaliana
  unsure (1)..(1633): unsure at all n locations
aaaaaacctttgacgccgttttcttcttcgatcttcttcttcctccagagaaaacaacatggccatggcaacaaggactctaggctttgttttgcctacgagcttatcttcccagccttccttcgaccgtcgcggcggtggatttagggtttctgtcatccgttgctccacttctccactcacttttcccacttctggtgttgtggagaaaccttggacttcgtacaatgctaggcttgtgttagaagatggttctatctggcctgctaagtcttttggtgctcctggaacccgtattgctgaattggtgtttaacacttccttgacagggtatcaagaaattttaactgatcctagttatgctgggcagtttgtgctaatgacaaacccacaaattggtaatactggtgtcaatcctgatgatgaagaatctgggcaatgctttcttactggtttggtgataagaaacctaagcattagtacctcaaactggagatgcacgaagacacttgctgattatctaaccgaaagggacatcatgggagtttatgatcttgacactcgagcaataacccgtcggttaagagaagatggtagtcttatcggggtgttgagcacagaacagtccaaaacagatgatgaacttctgcaaatgtctcgttcatgggatatcgtaggtattgatctaataagtgatgtttcatgtaaatctccctatgaatgggttgacaaaacaaacgctgaatgggatttcaacacgaattcacgagatgggaaatcctacaaagttattgcttacgattttggaatcaagcaaaacatcctaagacgcctttcatcttacggatgtcaaatcactgttgttccgtccacatttccagctgccgaggcgctgaaaatgaatccagatgggattttgttcagcaacggtcctggagacccttctgctgtgccatatgctgttgagacagttaaagagcttctcggtaaagtccctgtttacggaatctgtatgggccatcagttgcttggtcaagctttggggggtaaaaccttcaagatgaagtttggtcatcatggaggaaaccacccagttcgtaacaacagaactggtcaggtggagatcagtgctcagaatcacaactatgcggttgatccagcttcacttcccggaggcgtagaagtaacacatgtcaatctcaatgatggaagctgtgcgggtctatctttcccggaaatgaatgttatgtcactccagtaccaccctgaagcctcccctggacctcacgactctgataacgcatttagagagttcatagagcttatgaagagatcgaaacaaagctcctgatcaatgagaagtactctttgtttttgtacgttgctgtttttaatcatggcacttaaattaaaaccaactgttttgttagtgataatggattggcattattgtttctttgctttgactgtattgagcaaccatccaacctataaaataagtaagattttgtaaaagtaataaagagataaagagatgtgagagtttgtgtcttttgatataaaaaaaaaaaaaaaagggcggccgctnnnnnnnnnnnnnnnnnnnnnnnnnnnnnnnnnnnnnnnnnnctat

SEQ ID NO: 119005 - DNA, 2163 bp, Arabidopsis thaliana
  unsure (1)..(2163): unsure at all n locations
gccacgcgtccgcccacgcgtccgcgcaagcgtccggagattttggataacagaagaaatttaatatcgttaccttgtaattttatattttctgtttccattttaatttgaagatccttccctttctttctttctctctctctctcgctcgccgggaaaaaatcgctgtccaaatctccggtcatttctccgaggatctcttctatcaatccaacggttttgttttcatcttctcagatctcacagaacaatagtcaaagactgatgcagaagaagcgttagtacaaggtttttgttggaaagcaattgaatctgaattcatctttcattttcacgctttgatccaatttgagttctctcttccactgaatccctcatacgtaaaacctagggtttctaaattagggttctcctgaggtctgtttatagtgcgtaaagccatgtttaagaagatcatgaaaggggcaaatcgaaaagcctctaaagctgaggcgaatgattcgtctatgtatgggtttgatccaccaggtaggtcaggtcctggatccaatatgattgtaaatcacgcatctcgtggttcgcttgttccttcttctccaaattcaatggcggcggccaccacacaaccgcctcctatgtattcagtcgagcctcttcccttgttcagagacgtctctgtctccgagcgtcaatccttgttcttgaggaaactccagatttgttgttttcaatttgattttacggatacgttgaagaatgcgagagagaaggagattaagaggcaaacgttattggagctagttgattttatacagtctggagcagggaagctcactgaagtttgtcaagaagaaatggtaaagatgatttcggttaatatattccggtgtcttcctccggcttcacacgagaatacaggtcaagagcctgctgatcttgaggaagaggagccttatttggaaccatcttggcctcatttacagctaatttatgagttgctgctgagatacattgttccttctgacacagatacaaaagttgcaaaacggtatattgatcattcttttgtgttgaggttgcttgaattgtttgaaactgaagatcctagagaaagggagtacttgaaaacgattcttcataggatttatggcaagtttatggttcacaggccctttattaggaaagcaatgaaccatattttctataggtttatttatgagacagagagacatagtgggattggggagcttttggagattctcggtagtattattaatgggtttgccttgccaatgaaggaggagcacaagctctttttgattagggcgttgataccgctgcataagccaaaaccaatcgctatgtatcaccaacaattgtcttactgcatcgttcagtttgtggagaaagattataagcttgcggatacggtgatcaggggcttgttaaagttttggcctgtgacaaattgtacaaaagaggttctctttcttggtgaacttgaagaggttcttgaggcaacacaaactgttgagttccaacgctgtatggtccctctgttccaacagattgctcgatgcctcagtagctctaattttcaggttgcagaacgagctctgttcttgtggaacaacgagcatgtggtgggtctaatagctcagaaccgaggagtgatccttcccatcatatttgcatccctggagaaaaacatagagtctcattggaaccaagcggtacacggtctaagtgcgaatataaagagaatgttcatggagatggaccctgagctctttgaagaatgtcagcaacagtacgaagaaaaacaagccaaatctaaacaagtggaagagcaacgccaaaataggtggaggagattagatgaagcagtggaggaacgagaaagagaagatcctatgatcacttcttagaaaaaaatatatcaaatcatcaaagtaataatattctctctcacttcttctcattttctctaatcgttgcaaattattatattttatttatttattttgaggtctggaaaaaaaaaagtcgcggccgcgaattcnnnnnnnnnnnnnnnnnnnnnnnnnnnnnnnnnnnnnnnnnnnnnnnnnnnnnnnnnnnnnnnnnnnnnnnnnnnnnnnnnnnnnnnnnnnnnnnnnnnnn

SEQ ID NO: 119006 - DNA, 2295 bp, Arabidopsis thaliana
  unsure (1)..(2295): unsure at all n locations
nnnnnnnnnnnnnnnnnnnnnnnnnnnnnnnnnnnnnnnnnnnnnnnnnnnnnnnnnnnnnnnnnnnnccacgcgtccgcccacgcgtgaattcgcggcggaaaatcttagccgtccgatcaaccaccgtgtactccgagaagatctcttcgattacttcaacgttcttctgattttcaccagctcagatctccgacaacattccggtatcatttctcgcttttttttcctccaaatccttatccgccagattacgaaaatgaggagcttgatccgagagaggcatagtgaaagcttatctgtgaattcttaggatttgaatctgaatactcaggctttttgattccttctccgttacatgctgattcaattttgagctcccctgctagtgtaaatctcctcagctcggaaacttagggtttagtttggggtcctttgctcttcgttgcgtaagccatgtttaagaaaatcatgaaaggtgggcatcgaaagccctctaaatccgaagctaatgaaccgtctagttatgggattggtctacctgataataggtcaggtcctggctccaatgtggtcgttagtcacgcttctcgtggtgcattggttaattcttctccgtcgccagtgactgcaactccacctcctccgcctttgggctcggtggagccactcccgttgtttagagatgtgccggtttcagagaggcaaactttgttcttgaggaaacttcagaattgctgtttccttttcgatttcactgacacgattaagaatgctagagacaaggagattaagaggcaaacgttgttggagctggtggattttatacagtctggatctagtaagatctcagagtcgtgtcaggaagaaatgattaagatgatttctgttaatattttccggtctctcccaccagcatcacacgagaatacgggtcaagagcctgcagatcctgaggaagaagaaccttatttggaaccttcttggcctcacttacagctagtttacgagttgctcctgagatatgttgtttcgactgacactgatacaaaggtggccaaacggtatatcgaccattcttttgtgttaaagttgctcgatttgtttgattctgaggacccaagagagagggagtatttgaaaacgattcttcataggatatatgggaagtttatggtccacagaccctttattaggaaagcaatcaacaacatattctataggtttatttatgagacagagagacacagtgggattggggaactcttggagattctaggcagtatcataaacgggtttgcattgcctatgaaggaggaacacaagctattcttaatcagggtgttgataccattgcataagccaaaaccaatcgttgtatatcatcagcagttatcttattgcatcgttcagtttgtggaaaaagattataagcttgcggatacagtaatcaggggattgttaaagtattggcccgtgacaaactgctcaaaggagaatctcttccttggagaacttgaagaagttcttgaggcaacacagcctgtcgagttccagcgttgcatggttccattattccaacaaattggtcgctgtctcactagctcccactttcaggttgcagaacgagcactgttcttgtggaacaacgagcacattgtgggtctaatcgcgcaaaaccgaagcgtgatccttccaatcatatatcccacactggagaagaacatccagtctcactggaaccaagcagttcatggtctaaccacaaatatcaagaaaatgttcatggaaatggatcctgaactgtttgaagaatgtcagagacagtatgaagagaaacaagcgaaatccaaagaagtagaagaacaacggcaatatacatggaagagattagcagaagcagcggcggagcgagatggaggaggaggagaagaagatcatatgatcacttcctagatcgatcaaaaagggtataattctttcacttttttttttgtttgttctcattttatcaaatgagttactatattaattttcttatcaaacttggatttgtttgttgttttgagaatcatgggttcaaaatctgattgctcagagaagtagagagagagaagtgagccattactatcagagaatatgtctttagtactaagaaatgtgtttgtgatcttctgtctaattttgttcgtggaaaggcactttaaaattttgtaaaattttaattatatatactgtggatggatgtttgtagcttgtgttattagccatctcaaaatccgcggccgcgaattc

SEQ ID NO: 119007 - DNA, 2274 bp, Arabidopsis thaliana
  unsure (1)..(2274): unsure at all n locations
ggagaaaaagtagctgtttttacagggtttatcacaaagatccttccttttttacttgaagctcgccattttcttagggtttctcttgatttcattcatctccagtgcccagatctctctctctactcatctgccatttgtaagctcctcttcttcctcctctctccaaagtttacattttgttgttttctctggatcttcttaagctaatctttgattctgtttatgagattgtgtttccgattatgaatttaggctttgtctacatgcagggctgtgttcaatgattagggttttgatttagaaccaaagcttttgggttttactggtttagtttaggcttgttgcgaagtagagaaaaaaagggaagggttttggcccttttgtggggagataatttagggtttctgtaattatgatcaaacagatatttgggaaattgcccagaaaaccttcaaaatcttcgcataatgactcgaatccaaacggagaaggtggggttaattcatattacattcccaattcgggtattagtagtatctcgaagccttcttcgaaatcatccgcatcgaattcgaatggagcaaatggaactgttattgctccttcttcaacgagctctaacagaaccaatcaagtcaatggagtttatgaagcattgccaagctttagagatgttcctacctcggagaaacctaatctgtttatcaagaagttgagtatgtgttgcgttgtgttcgacttcaatgatccgtcgaagaatctgagagagaaagagataaagagacagactttgcttgagcttgttgattatattgcaacggtttctacaaagttgagtgatgctgcaatgcaagagattgcgaaagtggctgttgttaatcttttcaggacgtttccttctgcgaatcacgagagtaagattctcgaaacgcttgatgtggatgatgaggaacctgctttagagccggcttggcctcatcttcaagttgtctatgagcttcttcttagatttgtggcctcgcctatgactgatgcaaagcttgcaaagagatatattgaccattcatttgtcttgaagctcttggatttgtttgactctgaagaccagagagagagggaatatctaaagaccattcttcatcggatatacgggaaattcatggtgcaccgaccctttatcagaaaggcgatcaacaatatcttctacagattcatttttgaaaccgaaaagcataacggtattgcagagttgcttgagatactaggaagtataatcaacggtttcgctttaccgttaaaagaagagcataagctcttcctaatccgggcattgattccactccacagacctaaatgtgcatctgcttatcatcaacagctttcttattgcattgttcagtttgtagagaaagacttcaagcttgctgatacggtcattagaggacttctaaagtattggcctgtgactaatagttcaaaggaagttatgtttcttggagagttggaagaagttttggaagcaactcaagcagctgagtttcagcgatgtatggttcctttatttcgtcaaatcgctagatgcctcaacagttcacattttcaggtggctgaaagggctctatttctatggaacaacgatcacataagaaacctgattactcaaaaccataaagtgataatgcccattgtgttcccggctatggagagaaacacacgggggcattggaaccaagcagttcagagtctgactttgaatgtgagaaaggtaatggcagagacagaccaaattctgtttgatgaatgcttagccaagttccaagaagatgaagcgaatgaaaccgaggttgtagccaaacgagaagcaacatggaagcttttggaagagttagcagcttcgaaatccgtaagcaacgaggcagtgctcgtcccccgattttcatcttcagttactcttgcaaccggtaaaacttcgggtagttgaacactttctgctctctatcaccgagacatactttcaaacaatccagcagaattgtatcgatccgttcgagcatcaggatcagtccttgaagaagattaagcacgatgattaagaagggcaatatcatcagtgaatacttaattataacatttttttcaggtttatggaatcatgggttcaattgtttgttgcttctgatcctttttttttcgcttactcagctcttagttgaataacaatctgaggtgtaagaaatatggcttatagatatagtncttgagaggacgact

SEQ ID NO: 119008 - DNA, 938 bp, Arabidopsis thaliana
gcaataacaagccgagaaggttgaatagagaagatccaaggggaaagagaaattaaattatttatttatttctgtcatcttctccttttctatttcaaaatcccaaatctaaagcactcctcgagaaaagtgtaacaatggcgagaagaccggacgaagaatacgactacttgtttaaagtggttttgatcggagactccggtgtcggcaagtctaatctcctctctagattcactcgcaacgagttctgcttagaatccaaatccaccattggtgtcgaattcgctactcgtactctccaagtggaaggaaggactgtgaaagctcagatatgggacacggctgggcaagaacgatacagagccataactagcgcctattacagaggtgcacttggagctcttttggtctatgatgtcaccaagccaacaacgtttgagaatgtaagcaggtggttaaaagaactaagagaccatgcagattccaatatagtgatcatgttgattgggaacaagacagatctgaagcatctcagagcagttgccacagaggatgctcagagctatgcagagaaagaaggcttatctttcatcgagacatcggctctcgaggcattaaacgtagaaaaggcttttcagacgattctctcggaggtttataggatcatcagcaagaagtcgatatcttcagaccagacaactgcaaatgccaacatcaaggaaggccaaacaattgatgtggctgctacttctgaatcaaacgctaagaagccttgttgctcatcgtcttgaaaggctttgtttgtgttgcacttaaaaaaagccaaatatctatgagactttatttcaaggcttgcgttgtatttgttttctttcttttttctgttgttgataatataactcaaagataattttttatatcaattgtggagttcggaa

SEQ ID NO: 119009 - DNA, 791 bp, Arabidopsis thaliana
gctcttttaagatctttccttcttatgttttgtctctttgtaatcccatctctctcatctgattctgatcctttacaagacttctgcgttggcgatctcaaagcttctgcttccatcaatggctttccatgcaaatcagccgtttctgcttctgacttcttctactcccggtttaggtggccccttaggccacgtcaaaccctaacgggagtaaccgttgctcccgccaacgtcttaaccttcccgggtctaaacactttaggaatctcgatgaataacgttgagctagctccaggaggtgtaaatccgcctcacttgcacccgcgtgcaaccgaagtaggaactgtgatcgaaggctcggtgtttgtcggattcttgagtaccaacaacactttgttctcaaaagttttgaatgcaggagaggcgtttgttatccctagaggattggttcatttccaatggaacgttggccaagtgaaagcgcgaatgataaccgcttttaacagccagctcccaggagcagttgttttgcctagtactctgttcggctcgaaacctgagattccaaacgcagtcctgaccagagcgtttaggactgatgatacaactgtgcagaatctcaagtccaagtttgctgtttgaatctttttatttatgttttctaaaataatctttcacaataagctttatagcaatattggtatacacttgtctctgtaataatcggtatgaatattcgaaacaaaacaataataagattgatctctttctctctcaaaaaaaaaaaaaaa

SEQ ID NO: 119010 - DNA, 1016 bp, Arabidopsis thaliana
  unsure (1)..(1016): unsure at all n locations
cgtccgtctgccgtaccggtccggaattcccgggtcgacccacgcgtccggagagtcccaccaccaccactaccacaatcccaatggcttcaccaactcttactctcctcctcctcctcaccaccgtctccttcttcatctcctcctccgcagatcctgacatgcttcaagatctctgcgtcgctgatcttccctctggaatcaaaatcaatggcttcccttgcaaagacgcagctacagtcacatcagccgatttcttctcacaaggattagctaaaccaggtcttaccaacaacacattcggtgccttagtcacaggagctaacgttatgacaatcccaggactcaacacacttggtgtctccctctctcgtatcgactacgcaccaggaggcttaaacccacctcacacccacccacgtgccactgaggtcgttttcgtcctcgaaggaacacttgacgttgggtttctcactactgccaataagctaatctctcaatctctcaagaaaggagatgtctttgctttccccaaaggacttgtccatttccagaagaacaatggtgatgtccctgcttctgttattgcagctttcaatagtcagcttcctggaactcaatctcttggtgctactttgtttggtttactcctcctgttcctgacaacatttggctcaagcctttcagacttctccaggaactgttaaacacatcaaatccaagttccaacccaagaaatgatcatcacccttcctttatattcattactacagttctgtttttttctaaagggaagatctttttatcttctttgatttgtcttctgtaataaaaaaggaacaataactgatgatcttcagtgtgcatttgagctccatagtctcatgtattcgtcttcttgtataatccatattatttttggttcaaagttgactaaagacaggtaagaagtcgaggttgatcttnnnnnnnnnnnnnnnnnnnnnnnnnnnnnnnnnnnnnnnnnnnnnnnnnnn

SEQ ID NO: 119011 - DNA, 908 bp, Arabidopsis thaliana
cacacacatataaaagtctttgaaaagcattagcatatccctttgtttcaaaatgagggtttccaagtctctcatcctgattaccttatcggctttggtcatttcctttgctgaagcttatgatccaagtccacttcaagatttctgtgtggccattgatgacctcaaaaatggtgtttttgtgaatggaaagttctgtaaggatcccaagcaagcgaaggcagaagatttcttcttctcaggcctcaaccaggcaggaagcactaataataaagtcagatccaacgtgacaacagtcaatgtcgaccagattccagggttaaacactatgggaatatccttggtccgcatagactatgcaccatatggacaaaacccgcctcacacgcaccctcgtgctactgagatccttgtccttatcgagggaacgttatatgttggttttgtctcttccaatcaagacaataaccgtctattcgccaaagttctgtacccgggtgacgtgtttgtgtttcccataggaatgatccattttcaagtgaatatcgggaaaacgcctgcggtggccttcgctggattgagtagtcagaatgctggtgttatcacgatcgctgatactgtgtttgggtcaacgcctccgattaatccagatattttagctcaagcatttcaattagatgtcaatattgtcaaggatcttgaggccaagtttagaaactaaatctagtcaccacaatacgagtgtttatggttgtaacacttaagtaatgatgtaacaagagttaaagatttatgctcaatataataaagaaaggtgttgttcacctaatttgataaaaaaaaaaaaaaaagggcggccgctctagaggatccaagcttacgtacgcgtgcatgcgaagtcatagctg

SEQ ID NO: 119012 - DNA, 720 bp, Arabidopsis thaliana
aaccgtttatgatcaacgtcactgtgaccacaaccgccaacctcccaggtctaaacacagtgggccttacaatggccaggctagacttcggaggctctggtgttgtcccaccgcacgtgcacccacgcgcctccgaagtgacagtctgcctcgacggtgtccttctcgtcgggttcgtggatacgtcgggtcgggtctttacgcaggagcttcatccgggtgagacattcgtgtttcccaaaggtttgatccattttctatataacattgatacggtgagctcagctttggcagtctctgggctgagtagtcagaatcctgggactcagattgtatctttgtcgtctttcatttcaaagcctccgtttctggtagaggttttgaagagtgcttatgatatcaacggccaggatgttgctaggatccgcaaaagtcttgaaggctaaaaatgctaaaagcctaaaactatatataactacatggccaaccaataactatatacaaatgtatatgactaactcaaaactatattatgacaacaacaaaaaaaaacgtataaacaataaaatgtcactaaaaaaggctatacactcaattccgaattgagtttttctgcaattctttagctatcttgttaactatgaatgtttttggaatgtgaacgatttatgatccatagaactatgtaaagagcattaaattaaaaaaaaaaaaaaaaaa

SEQ ID NO: 119013 - DNA, 951 bp, Arabidopsis thaliana
  unsure (1)..(951): unsure at all n locations
nnnnnnnnnnnnnnnnnnnnnnnnnnnnnnnnnnnnnnnnnnnnnnnnnnnnnnnnnnnnnnnnnnnnnnnnnnnnnnnataacatcttacaaacaacaacaatcaacaatggcaacttccatgatccctatattcgtcaccttcatgctcgtggccgcccacatggccctcgccgatacaaatatgcttcaagacttttgtgttgctgatctctccaacggtttgaaagtcaacggatacccttgcaaagacccagcaaaagtaacaccagaagacttctacttcataggcttagccactgctgcagccacagccaactcttcaatgggctcagctgttacaggagccaacgttgagaaagtgcctggcctcaacactctgggagtctccatctctcggatcgactacgcacctggcggacttaacccaccacatcttcacccaagagcctctgaagccatcttcgtccttgaaggccgtctcttcgtcggtttcttaaccactaccgggaaactcatctccaaacacgtcaacaaaggagacgttttcgttttccccaaagctctcctccatttccagcagaaccctaacaaagctcctgcttccgtcctcgctgctttcgatagccagcttcccgggactcaagttgttggaccatctctgtttggttctaacccaccgattcctgatgacctgcttgccaaggcgttcggggctgcagcaccagagattcagaagattaagggaaaattcccaccaaagaaataaataagtttcagaccagagcactaatctaataatgatatacaatgatgaacataaaaatgtaaacttctaagcaaaagcttgtaactttttttcattcttttctttattattgtagatactcttttgactatatttggcccattgattacgatgagaccagttttcacaaaaaaaaaaaaaaa

SEQ ID NO: 119014 - DNA, 1444 bp, Arabidopsis thaliana
cacaaagagaaaacaaaaaaaaagtaaagaaaatgaaaattgtgaagcggtgaaaacaagagttccaaaaaggtggctcctttttgtttctggagatgcgttattgtgacccttctttgaaatttagggttcattttctcagatttcgagttcgttgtgtttgaatctctattgggtttactttcttattcgatttgggggaaatggctgattggtatcagcttgcacagtctataatctttggtttgatcttcgcttaccttctcgctaagctaatctctatcctcctcgcttttaaagacgagaatctctcactcactcgtaaccacacgactcaatcggagtatgagaacttgcgaaaggtcgaaactttaattgggattagcggcgagactgattctcttatagctgagcaaggtagcttgagaggtgatgaagatgaatcagatgatgatgattgggaaggtgtcgaaagtacagaacttgatgaggcatttagtgctgctacggcttttgttgctgctgctgcatcggataggctttcgcagaaagtttctaatgagttgcaacttcagctttatggattgtataaaattgctactgaaggaccttgtactgctcctcaaccatcagctcttaaaatgactgctcgtgccaagtggcaagcatggcagaaattgggtgctatgcctcctgaggaagcgatggagaagtatatcgaccttgttactcagctttacccagcttgggttgaaggtggctcgaaacgaagaaatcggagtggtgaggctgcaggcccatgggaccggtttttagctcattggtgtacgaagaggaatctgacaatgagttgaagattgacgccatacacgcctttgctagagaaggagaagtcgagaatctattgaaatgcatagaaaatggcatacccgtaaatgcaagagatagtgaaggtcgaacaccactgcattgggctatagaccgtggccatcttaacgttgctgaagctctggttgataagaacgcagatgtgaatgctaaagacaatgaaggccaaacctctctacactatgctgttgtgtgcgaaagagaagcactcgccgagtttctggtgaagcagaaagctgatacaaccattaaagacgaagacggaaactcgcctcttgatctctgtgaatcagaatggtcttggatgcgagagaagaaggattccaattagtgttttttaagtctttaaaattgtgtgtcaaagctagatgcttgtgtttttcttacatttcctctgagcctctttgcttcctcttaagcttatgttttaacatacaacaacacaagttacatatgatatagtagctctagtttttattggttactatattgaacccagagagatcatcatcatcaatcatcataactcaataatagttttttttttgttaaaaaa

SEQ ID NO: 119015 - DNA, 879 bp, Arabidopsis thaliana
tttcctctgttcgtgtcattcttctcgtatatctcgagagagagccttaaggaaattaaaaaaggttggattttgatcgatgggttcttcgtcaggacaacccgaatttgattacttgtttaaggttttattgatcggagattctggtgttggaaagagctctcttttgttgagtttcacatctaatacctttgatgatctttctccaacgattggtgtggattttaaggttaagtatctgacaattggagaaaagaaactcaagcttgcgatttgggatacagctgggcaagagagatttaggacgctaacaagttcgtattacagaggagctcagggtataattatggtatatgatgtgacacgaagagacacgttcacaaacctatcagacatatgggctaaggaaatcgacctctattcgactaatcaggattgcattaagatgcttgtcgggaataaagttgataaggagagtgaaagagctgtttctaaaaaagaaggcatagactttgctcgggagtacggatgtttgtttctggagtgtagtgcaaagactcgagtcaacgttgagcaatgttttgaagagcttgttcttaagatattggaaacgccgagtcttactgctgaaggttcgtctggcggaaagaagaacatcttcaaacaaaaccccgcacagaccaccagtacctcgtcgagctactgctgctcgtcttagacatggttttacagtttatgacaaattacactcttgctcatcatcttgttcttgattgtctctttgttttcctaaaccgcagcatcttggatgtaaatctcaaccctgatttgaaagttgtgttcactagtttcgaatctcggatttttctctgttctttg

SEQ ID NO: 119016 - DNA, 917 bp, Arabidopsis thaliana
ttttcccccaaaaagaaaaaggatataagaagataatggcatctagagaaatgctgatcataatctcggtcctcgctactacactcattggtttaacagtagctactgaccataccattggtggtcctagtggttggactgtaggagctagtcttcgaacttgggctgcaggacaaacatttgctgttggagacaatcttgttttctcctaccctgctgcgttccacgacgtcgttgaagtcacaaaacccgaattcgatagctgtcaagcggttaaaccgcttataacgtttgctaatggaaactccttggttcctcttactactcctggaaaaaggtacttcatttgtggaatgccgggacattgtagccaagggatgaaacttgaagtaaacgttgttccaaccgcaaccgtagcaccaaccgcaccgcttccaaacaccgtcccatctctaaacgcgccttcaccttcttctgttctacctattcaacctcttttacctcttaaccctgtcccagttctctctccatcttcttctactccacttccttcctcctctctgcctctcattcctccactttctccggcactatctccggctactgcagcggggacttctctgccgttattcccaggctcaccaggtagctctagcagcacaacatccaccaaaaccgtcgggaccttcccttctagtactaccggtacaacggccgatcttgctggcgcagactctcctccggctgactcctcctctgccgcgaaaacacttgttttaggatttggattcatggttgctatgatgcttcatttgttctaagtgttctttttttaagtggagagaaatttgtttgtagagggaaatgttgtttgtgtttacttgggtgctttcttgtgaaatttaccactatctccg

SEQ ID NO: 119017 - DNA, 915 bp, Arabidopsis thaliana
aacgaatcacaatttataatcaagaaaaacggacaagagagtaagaagaattatgtcgccttcttgttcatcttgtgtcaatgtgttactcatcatgtgccttatgcttctgagtttatcagctgatgcgtacaagaactacactgtgggagagtccacgggatggttcgatattcaagagagaccctctgctaattatcagaaatgggccgattccaaatccttttctttgggtgatttcctcatattcaacacagatagcaaccattcggtggttcagacatatgatttcaaaacatacaaagattgtgattacgacaacaatgaaaacaatgatacaacagagtggtcggctgcaaatccttcagcaacatctcctgttcccgtctcaataagtgttcctcttgttaaagaaggttccaattatttcttctcgggaaactatgatggcgaacaatgtaaattcggtcagcattttatgatcaatgtaacacatggtcagggcttaccagattcatcatcaccagatgatgctgctgcacctggacctagcgaatcctctcagtccggtgatgatgaagttgctcctgataccatcgtcccggccaatttcgatcatcctaaagatattgaaagtgctgatgatgataaagaggttcatagtaaaaaaagttcttcttccacaacaaaaactagtttgttttgttttgtctttatggggctctttgcatcattttaatcaaatattctttcatatttgtatgtatatgcattctgttttcttctttttcataactaggataataataatcaaagaaacaaaagagtattagtggaaattttaaagcagtgagggaataaagaaaaaaagagtaaagatcatgagttatcctttttttaaaaaaaaaaaaaaaa

SEQ ID NO: 119018 - DNA, 1716 bp, Arabidopsis thaliana
  unsure (1)..(1716): unsure at all n locations
nnnnnnnnnnnnnnnnnnnnnnnnnnnnnnnnnnnnnnnnnnnnnnnnnnnnnnnnnnnnnnnnnnnnnnccacgcgtccggaaaaagtttaatagtaaaataatcgatcctcttctcttctcttctctgaggctcgttggaaatctgaattctccgatcgaatcgaaccaatcgcagaggctaagaagaggacctttgagagaatctccgagtcaggatcagaaaaaacggtgatacggaagctagttctagggctaatgggcgccgcgggctccaaactcgagaaagctctcggcgaccagttccccgaaggtgaacgctactttggattcgagaatttcggcaacacttgctactgtaacagcgttttgcaggctctttatttctgtgttcctttccgtgaacaactgctcgaatactataccagtaataaaagcgtggccgatgctgaagagaatcttatgacctgcctggcagacttgttttcgcagataagttcccagaagaagaaaacaggtgttattgcgcctaagcgatttgtacagaggttgaagaaacaaaatgagctgtttcggagttatatgcaccaggatgcacatgaattcctgaattatttgctgaatgaagttgttgacatactggagaaagaggcaaaagctacaaaaactgaacatgaaacctcgtcatcatcatctcccgagaagatagcaaatggactgaaagttcctcaggcaaatggtgttgtgcacaaggagcctattgttacatgggtgcacaatatttttcagggcatacttaccaacgagacaaggtgtctgcgatgtgaaacagtgacagcaagagacgaaacattcctagacctaagccttgatatcgaacagaacagttcgataactagctgtttgaaaaacttcagctccacagagacgcttcacgctgaagacaaattcttttgtgacaaatgctgcagcttacaagaagcacaaaagcggatgaagatcaagaagccaccacacatcctagtgattcatctaaaacgattcaaatacattgaacagctaggccgctacaagaagctctcctatagagttgtcttccctttggagctaaaactgagcaacacagtggaaccatacgcagacgtggagtactctctgtttgcagtggtggttcatgtgggaagtggacccaaccatggtcattacgtaagccttgtgaaaagccataaccattggctcttctttgatgatgagaatgttgagatgattgaagaatcagctgttcaaacattctttggatcgtctcaggagtattcgagcaatactgaccatggttacatcctgttctatgagagccttggaccgaccaagtgaaagctgagaaagcagaaagaaggactttcttcgttttttttctcttaactattattagtaatggtatatgtttgtcttaaaagtcaaactcaattgacagtaactttttttttttttggtttttgttctttctctgtgtctctctcccaaagatatttggtgagttttaaaattggaagttttaactggaatttgtatactttgaaaaaggccatgtacagtttatggcaaataactccttgtctttgtatctttagcaaaggaagaaggttacaatnnnnnnnnnnnnnnnnnnnnnnnnnnnnnnnnnnnnnnnnnnnnnnnnnnnnnnnnnnnnnnnnn

SEQ ID NO: 119019 - DNA, 2285 bp, Arabidopsis thaliana
gttgttgttggttgagctacccagccagtatcaagagaggaaggtagagaggagtgagagagagctttgggttcgatttcatgtcgtagatctttcactctgggtttgcgttccacaaaatcctaattcgcggaactctggatttgatcggcgatggcggtaggcgatcagacggagcagaattacttgccgaagaagaagaaatccgaaacggaagatgataagaggaggaagaaaattgttcccgggagcttgttgaaagctgtggtgcgacctggaggaggtgattcgagccccgttgatggtgatcaggttaataattttggttttgtttttgcttctcgtggtcaattttggttgtttatgagtgttttttcgtcaggttatttatcactgcactgtacggacactggatggtgtagttgtggaatctacgaggtcagaatctggagggagaggtgtaccgatcagagatgtcttgggaaagagcaaaatgattcttggattgctcgaaggaattcccacgatgcacaagggtgaaattgcaatgttcaagatgaaacctgaaatgcactatgcagagattgattgtccagtctcagctccagaaaattttccaaaagatgatgagcttcattttgagattgagttgttggatttttctaaagccaagattgcaagtgatgatctgggggtcatcaagaagattctaaatgaaggtgagggctgggaatctcccagagaaccctatgaagtgaaagccagaatatctgctaaatccggtgatggacacgtgatcttctctcacacagaagaaccttatttcttcacatttggaaaatctgaggtgcctaaaggtcttgaaatcggaattggaaccatggctcggaaggagaaggcagtgatatatgttcgcaagcagtacttgactgaatctcctttgttgcatatagatcaagaccttgaggaagttcattttgaggttgaactggtacatttcattcaggtgcgggacatgcttggagatggacgtctcataaaacgtcgaattcgagatggaagaggcgagtttccaatggattgtcctctccaagatagtcgtttaagcgttcactacaagggcatgcttctcaatgaagagaagactgtcttctatgatagcaagattgacaataatgatcaaccgttggagttcagttcaggagaaggactggtccctgaagggtttgagatgtgtactcgtttgatgctacctggggagattgctcttgttacatgcccccctgattatgcatatgacaaatttccgagaccacctggcgtgtctgaaggtgcacatgttcagtgggagattgaactccttggtttcgaaacgccaagagactggactggcttgaacttccagagcatcatggacgaggcagataaaatcagaagcacgggtaataggcttttcaaagaaggaaaatttgagctcgcaaaagcaaagtacgaaaaggtgctccgggaatttaatcatgttaacccacaagatgaagatgaaggaaaaatatttggtgacacaaggaatatgttacatctgaatgttgcggcttgcttgcttaaaatgggagagtggaggaagtctatagagacatgcaataaggtcctagaagcaaagcctggtcatgtgaaaggtctataccgccgcggaatggcttacattgcaggtggagagtatgatgacgctagaaatgacttcaatatgatgatcaaagtggataaatcatcagaagctgatgcgaccgctgctctattgaaactgaagcagaaggaacaggaagcggagagcaaggctagaaaacagttcaaaggattattcgacaagagaccgggggagataaccgaagttggttcagaaataagagaggagtctaaaactatagaagaagtagatgagacaaaggataatgatgatgatgaaacactggaagaaggagctacgacagtgagcacggaaaggaagaggaaatggtcggagaaagcctggccgtttctgaagaacgtgatgctccaaatcggaatccagcttggtgttgttctgatagggattttgattttccagtttgtgagcgccaaatttacatgagagagatatgaatgaataaacaaaccaacggcactgtagactcagaaaatataaaactaatggattaaacgttaagcttaaaaaaaaaaaaaatggtttagttaaaaaaaaaaaaaaaagggcgaccgctctagaggatccaagcttacgtacgcgg

SEQ ID NO: 119020 - DNA, 1279 bp, Arabidopsis thaliana
tgaataccgggccgaccgacgcgtccgccccgagaaaacgaaaaccctagtttcagaggcatctccagacaccgaaaatggcggaaggactcgttttgaagggcaccatgcgtgcacacactgacatggtgacggcaatcgccaccccaatcgataacgcagacatcatcgtctcagcttcccgcgacaaatccatcattttgtggaaactcaccaaggacgacaaagcctacggtgtagctcagaggcgtctcactggtcactctcacttcgttgaggatgttgttctctcctccgatggacaattcgcgctttccggcagctgggacggcgagctccgtctttgggatcttgctgctggtgtctccactcgtagattcgttggacacaccaaggacgtgctctccgtcgccttctcactcgacaaccgtcagatcgtctctgcatctcgtgaccgtacgatcaagctgtggaacactcttggtgagtgcaagtacaccatttcagaaggtggtgagggacaccgtgattgggttagctgcgtcagattcagccctaacacgcttcagccgacgattgtatctgcttcgtgggacaagaccgtgaaagtgtggaacctttcgaactgcaagctcagatcgactcttgctggtcacaccggttacgtgagcactgtggctgtatcacctgatggttctctttgtgcaagtggaggcaaagacggtgttgttttgctgtgggatttggctgaggggaagaagctttactctcttgaagctaactctgtgatccatgctctttgcttcagtcccaacaggtactggctctgtgctgcaactgaacatggtattaagatttgggaccttgagagcaagagcattgttgaggatttgaaggttgatctcaaggctgaggctgaaaaggctgacaacagtggtcctgctgccaccaagaggaaggttatttactgcacaagccttaactggagcgctgatggaagcaccctcttcagtggttacaccgatggagtcattagagtttggggtattggtcgttactagtaatctcatcacttgtgctgtcgttgctctctgctatctgcttgttggttttatctatcacttatgtttttatcgacaactcatgaagtaccttgaggtttttggaaggatgtttgttttcttgtccatctagggtttcgctcaaacccatagggcgaccgctctagaggatccaagcttacgtacgcgtgcgtgcgacgtcatagctcttctatagt

SEQ ID NO: 119021 - DNA, 852 bp, Arabidopsis thaliana
aaaccacgcaccaaccccccgcacaaccaacacctccacccaagccaagacaaaaatttgatggaacatccgtaaacaaccaccggaccggaaaacccgggacgacccacgcgtccgaccaaggacgacaaagcctacggtgtagctcagaggcgtctctctggtcactctcacttcgttgaggatgttgttctctcctccgatggacaattcgcgctttccggcagctgggacggcgagctccgtcatttgggatcttgctgctggtgtctccactcgtagattcgttggacacaccaaggacgtgctctccgtcgccttctcactcgacaaccgtcagatcgtctctgcatctcgtgaccgtacgatcaagctgtggaacactcttggtgagtgcacgtacaccatttcagaaggtggtgagggacaccgcgattgggttagctgcgtcagattcagccctaacacgcttcacccgtccattgcatctgcttcgtgggacaagaccctgaaagtgtggaacctttcgaactgccagctcagatcgactcttgctggtcacaccggccacgtgagcactggggctgcatcacccgagggctctctttgtgccagcggaggccaagcaccggggttgttctgctggggggacataggctcgaggggaagaaaaactttaccttctcttgaaaaactaacttcttgtgagacccatgcccctttgggcttttaaatcccccaacacaaggaacctggggccttttgtttctttgtagaccctgggacccctgggtgtttttaaaaaaatttggggggcccccttgagaaaaacaaacaacccctttttttttg

SEQ ID NO: 119022 - DNA, 1490 bp, Arabidopsis thaliana
agagttttaccatagacgaacgccttttattcgtcgtggcgaacgaaaccctaatcatcacttctccacttttgttcgtcatcctcttcaaaatttcttcaatttgattctgcaatttccttaatctctctctggttaagtttcagtttcttcttagcccgccatggatgctcagcgagctctgttggacgaactaatgggcgcagctcgtaatctgacagacgaagagagaagaggattcaaggaggttaagtgggacgatagagaagtatgtgcattctatatggttcgattttgtcctcatgacctctttgttaacacgaaaagcgatcttggagcatgctcgagaattcatgatccaaagttgaaagaaagcttcgagaactctccgaggcatgattcctatgtgcctaaattcgaggctgagcttgcacagttttgcgagaagttggtgaatgatcttgataggaaagttaggcgtgggcgagaacgtcttgcacaagaagttgaaccggttccaccaccttctctatcagcagagaaagctgaacaattgtctgttttggaggagaaagttaagaaccttttggaacaagtggaagcacttggtgaagaaggcaaagtggatgaagctgaagcgctaatgaggaaggtggaagggctaaatgctgagaagacggtgttgttacaacgaccaactgacaaggtactcgcgatggctcaggagaagaagatggcattgtgtgaggtttgtggttcatttcttgtggctaatgatgcagtagaaagaacgcagtctcatgtcactggaaagcaacatgttggctatggcttggttcgggattttattgctgaacaaaaagctgctaaagataaaggaaaggaagaagaaagactagtaagaggaaaagaagcagatgataagaggaaaccaagggagaaggaaagcgagagtaagaggagtggttctagtgatagagaaagatatcgtgatcgagaccgaaacagagatggtgacagacacagagaccgtggtagagattatagaaagccttatgacaggagatcgaggagtgggagagaggaccgagatcgaagcaggtcacgatctcctcatggaaggtctggtcacagaagggtgtcgagaagccccattcgccaatactagtttgagaccctcgtggaaggtctggtcacgaaagggtgttgagaagcaccatttgccagtactagtttgagataaggtgttgtcactatgtcttggggccaggaactttgcaaattaatgaggtagacaatgtgataccccctttggtttcataagcatgtgttgtcttttggaacttccttgttaaaatttatggataaaatttgtctttctaccggatgacagctattctaagagtttgagaccttaccgattctccttcatcggttatttgttaagaggtcaaaagcgttgaggtaggtattacgcgtaaaacttttac

SEQ ID NO: 119023 - DNA, 1197 bp, Arabidopsis thaliana
  unsure (1)..(1197): unsure at all n locations
atgatttnnnnnnnnnnnnnnnnnnnnnnnnnnnnnnnnnnnnnnnnnnnnnnnnnnnnnnnnnnnnnnnnnnnnnnnnnnccacgcgtccgtacggtgcgagcccttcaataagtttcaatgtcataaaaccaaaaaaaaaaaaaatagtgaagacgacgaacctttgaggacactcttcggtttctccaatccttcatatgatgtcggacggaggagcaccgtcgagatacgtgaagttgacgaaggaacaagctccggtcgatgagattcatcccggtgaactcaatcagcccattgaagtttctcatctagctgttcacaaatgcaatgagtgtggccaacctttgcctgagaattttgaagctcctgctgatgagccctggactaccggaatattcggctgcactgaggacatgaatagtttttggctgggacttttctgcccaagtgttctatttggacgtgtctatgaaactctgagtgatgaggaaacctcgtggaagaaagcatgtatttgccattccattgtagtagaaggcggtcttactgctgcatcgatgcttgcttgtgttcccggtattgatccgcatacttctttacttatatgggaaggtttgttgtttgtttggtggatgtgtgggatatacactggaaatgtccgtcaaactctacaaaggaaatatcatcttcagaatgctccatgtgatccatgtatggtgcattgttgccttcacttttgtgcggtttgtcaagagcaccgtgagatgaagaatcgtctttcggataactttgtgatgcctatgactgttatcaacccaccaccggttcaagagatgagtgcttctggtgacagagaccaacaccaccacaactctgttccggtttcacaccatagctctgatcttgagatgaggccattgtagtcctcaatggttccccatcagattcaaggttttgttttgcctgaatctaactttatatatgtaaaccgatttggtttgtttcaaactcatatagatagattcggattctggttttccttgtgtaatcatgatttatcattatctcaaaattaagattttctatgcctgnnnnnnnnnnnnnnnnnnnnnnnnnnnnnnnnnnnnnnnnnnnnnnnnnnnnnnnnnnnnnnnnnnnnnnnnnnnnnnnnnnnnnnnnnnnnnnnnnnnnnnn

SEQ ID NO: 119024 - DNA, 2486 bp, Arabidopsis thaliana
  unsure (1)..(2486): unsure at all n locations
tgatactccagctctcnnnnnnnnnnnnnnnnnnnnnnnnnnnnnnnnnnnnnnnnnnnnnnnnnnnnnnnnnnnnnnnccacgcgtgcgggaaaacactccaactacgaatctaccccacgcgtccgcatacaaagaggaagatttcaaatccaatcatcaatcatctcttttgaatgatccgattccatctacttgctctttaaatttattgttgatcctttgaatttggtgcggagatctcgaagatgaagcagcttctgtgttatcttccatggctgcttcttctctctcttgtggtttccccttttagcgaggctagattcgttgtgagtaatgagaagaatagtttgtcggtgacgtcgccggagagtataaaaggaacacatgatagtgcaattggtaacttcgggattcctcaatacggtggaagtatggctggtacggtggtttatccgaaagagaatcagaaatcgtgtaaggaatttagcgatttctcgatttcgttcaagtctcagcctggtgctttacctactttcctcttagttgatcgtggagattgtttcttcgctttgaaggtatggaacgcacagaaagcaggtgcttctgctgttcttgtggctgataatgttgatgagcctttgattacaatggatacacctgaagaagatgtttcttctgcaaagtatatcgagaatattactataccttctgctcttgttactaaaggttttggtgaaaagctgaagcaagctattagtggaggtgatatggttaacttgaatcttgactggagagaggctgttccacatcctgatgaccgtgttgagtatgagttgtggactaatagtaatgatgaatgtggggttaagtgtgatatgttgatggagtttgtgaaggattttaagggagcggcgcagattcttgagaaaggcggttttacgcagtttaggcctcattatattacttggtattgtcctcatgctttcacgttgagtcgacagtgtaagtctcagtgtatcaataaaggaaggtactgtgctcctgatccagagcaggactttagctcgggatacgatggaaaagacgtggttgtggaaaatttgagacagctttgtgtttacaaggtggcgaatgaaaccggcaaaccttgggtctggtgggattatgttactgatttccagatcagatgtccaatgaaggagaaaaaatacaacaaagattgtgctgagtctgtaatcaaatctcttggaatcgatagcagaaaaattgacaagtgtatgggagaccctgatgctgacttggacaatccagttttaaaggaagaacaagatgctcaagttggcaagggtacaaggggtgatgttaccatattgcctaccttagttgtcaacaacagacagtaccgaggcaagttggagaagagtgcagtactcaaggctctatgctctggttttgaggagtcaactgaaccagctatatgcctcagcacagatatggagacaaacgagtgcttagataacaatggcggttgttggcaagataaatcagccaacataactgcttgcaaggatacgtttcgtggaaaagtatgcgtgtgtcctatagttgatggtgtgcgattcaaaggagatggttacagccactgtgagccaagcgggccagggagatgtacaatcaacaatggaggttgttggcatgaagagagagatggacatgcgttctctgcttgtgtggacaaggacagtgtgaaatgcgagtgtcctccaggatttaaaggagacggtgttaagaaatgtgaagacatcaatgagtgcaaagagaagaaagcatgtcagtgcccggaatgtagctgtaagaacacctggggaagctatgagtgctcttgtagcggggaccttctctacatgagagaccatgacacttgcatcagcaagacgggttcacaagtgaaatcagcgtgggcgggcgtttggcttataatgttatcattgggacttgcagctgctggtgcatacctcgtttacaaatatagattgaggcaatacatggactcagagatcagagccataatggcacagtacatgccactggacagccaacccgaggtcccgaaccacacgaatgatgaacgtgcctaagagaacgaaatggtccaactatttattcccccggaaaggaatcaatgcgaagcgttcttttaattgatgtggcccttgatgccggtgttctttttcgcatctgtatctctgtaactctttgtaccaaacagtgtatcctatgttcttgtcaattgtgtccatgtgacttctgtaatagggaaacttcgatgtagcttcggagaactggacaagctagtcaatagaatcaaaacatcaaagtgttaaagttaaaaaaaaaaaaaaaggacaagttagacgactctctctttgtagtttacacataatgtcttaagatttatggtaaattaagacaacatcagatcg

SEQ ID NO: 119025 - DNA, 1690 bp, Arabidopsis thaliana
  unsure (1)..(1690): unsure at all n locations
ccacgcgtccgcatctcttgttctctccgcccatctctgctctcttttattttcccagaaagttttttttttttttttccgaattccgttaatctcattggggtttccattgatagcaatggcgacggctttcgctcccactaagctcactgccacggttcctctgcatggatcccatgagaatcgtctcttgctcccgatccgattggctcctccttcttctttcctcggatccacccgttccctctcccttcgcagactcaatcactccaacgccacccgtcgatctcccgtcgtctctgtccaggaagttgtcaaggagaagcaatccaccaataataccagcctgttgataaccaaagaggaaggattggagttgtatgaagatatgatactaggtagatctttcgaagacatgtgtgctcaaatgtattaccgaggcaagatgtttggttttgttcacttgtacaatggccaagaggctgtttctactggctttatcaagctccttaccaagtctgactctgtcgttagtacctaccgtgaccatgtccatgccctcagcaaaggtgtctctgctcgtgctgttatgagcgagctcttcggcaaggttactggatgctgcagaggccaaggtggatccatgcacatgttctccaaagaacacaacatgcttggtggctttgcttttattggtgaaggcattcctgtcgccactggtgctgcctttagctccaagtacaggagggaagtcttgaaacaggattgtgatgatgtcactgtcgcctttttcggagatggaacttgtaacaacggacagttcttcgagtgtctcaacatggctgctctctataaactgcctattatctttgttgtcgagaataacttgtgggccattgggatgtctcacttgagagccacttctgaccccgagatttggaagaaaggtcctgcatttgggatgcctggtgttcatgttgacggtatggatgtcttgaaggtcagggaagtcgctaaagaagctgtcactagagctagaagaggagaaggtccaaccttggttgaatgtgagacttatagattcagaggacactccttggctgatcccgatgagctccgtgatgctgctgagaaagccaaatacgcggctagagacccaatcgcagcattgaagaagtatttgatagagaacaagcttgcaaaggaagcagagctaaagtcaatagagaaaaagatagacgagttggtggaggaagcggttgagtttgcagacgctagtccacagcccggtcgcagtcagttgctagagaatgtgtttgctgatccaaaaggatttggaattggacctgatggacggtacagatgtgaggaccccaagtttaccgaaggcacagctcaagtctgagaagacaagtttaaccataagctgtctactgtctcttcgatgtttctatatatcttattaagttaaatgctacagagaatcagtttgaatcatttgcactttttgctttttgtttggtgttactaaattatcacaaggttcttcttgtagatcgttgggttttcattggttaccacttcccagagnnnnnnnnnnnnnnnnnnnnnnnnnnnnnnnnnnnnnnnnnnnnnnnnnnnnnnnnnnnnnnnnnnnnnnnnnnnnnnnnnnnnnnnnnnnnnnnnnnnn

SEQ ID NO: 119026 - DNA, 721 bp, Arabidopsis thaliana
  unsure (1)..(721): unsure at all n locations
atgatactccagctctcnnnnnnnnnnnnnnnnnnnnnnnnnnnnnnnnnnnnnnnnnnnnnnnnnnnnnnnnnnnnnnnccacgcgtccgcttgttctctccgcccatctctgctctcttttattttcccagaaagttttttttttttttccgaattccgttaatctcattggggtttccattgatagcaatggcgacggctttcgctcccactaagctcactgccacggttcctctgcatggatcccatgagaatcgtctcttgctcccgatccgattggctcctccttcttctttcctcggatccacccgttccctctcccttcgcagactcaatcactccaacgccacccgtcgatctcccgtcgtctctgtccaggaagttgtcaaggagaagcaatccaccaataataccaaccttggttgaatgtgagacttatagattcagaggacactccttggctgatcccgatgagctccgtgatgctgctgagaaagccaaatacgcggctagagacccaatcgcagcattgaagaagtattcgatagagaacatgcttgcaaaggtagctagagctaaagtcaatgtgttaaagtattgacgtgttggtaataggaagagtttgtcacttttttcacttttttttattatttttatcatttttaaattttaatatcttatttcattatttttatcttttttttaataattttttaatt

SEQ ID NO: 119027 - DNA, 582 bp, Arabidopsis thaliana
  unsure (1)..(582): unsure at all n locations
ctgnctttttcgcagcntnagggaccnggcctgaatcccgggctgcccactgcgtccggaatgggcaagaggntgtttctacatggctttatcaagctccttaccaagtctgactctgtcgttagtacctaccgtgaccatgtccatgccctcagcaaaggtgtctctgctcgtnctgttatgagcgagctcttcggcaaggttactggatgctgcagaggccaaggtggatccatgcacatgttctccaaagaacacaacatgcttggtggctttgcttttattggtgaaggcattcctgtcgccactggtgctgcctttaagctccaaagtacagggagggaagtcttgaaacaggaattgtaatgatgtcactgtcggcttttttcggagatggaaccttgtaacaaacggncaagttctttcgaggtgtctcaacaatggttgtcctctataaactgcccataaaccttttgtggccggggaaaacctttttgggccaattgggcatgnctcactttagggccattttttcaccccgggggttttgaagaaaggccccnnatttggngtccctggggg

SEQ ID NO: 119028 - DNA, 1709 bp, Arabidopsis thaliana
  unsure (1)..(1709): unsure at all n locations
nnnnnnnnnnnnnnnnnnnnnnnnnnnnnnnnnnnnnnnnnnnnnnnngtccgccgcatgtcactgtttcgtatcgccattttctgtttgcatacacttgtatatatttatattaacagtccaaaattcttcgaaattgtcccgagctttgagcatataaaaaatgtcttcgataatccatggagctggagctgctacgacgacgttatcgacgtttaattccgtcgattccaagaaactcttcgttgctccttctcgcacaaatctttcagtgaggagccagagatatatagtggctggatctgatgcgagtaagaagagctttggttctggacttagagttcgtcactctcagaaattgattccaaatgctgttgcgacgaaggaggcggatacgtctgcgagcactggacatgaactattgcttttcgaggctcttcaggaaggtctggaagaagagatggacagagatccacatgtatgtgttatgggtgaagatgttggccattacggaggttcctacaaggtaaccaaaggccttgctgataaatttggtgacctcagggttctcgacactcctatttgtgaaaatgcattcaccggtatgggcattggagctgccatgactggtctaagacccgttattgaaggtatgaacatgggtttcctcctcctcgccttcaaccaaatctccaacaactgtggaatgcttcactacacatccggtggtcagtttacgatcccggttgtcatccgtggacctggtggagtgggacgccagcttggtgctgagcattcacagaggttagaatcttactttcagtccatccctgggatccagatggttgcttgctcaactccttacaacgccaaagggttgatgaaagccgcaataagaagcgagaaccctgtgattctgttcgaacacgtgctgctttacaatctcaaggagaaaatcccggatgaagattacatctgtaaccttgaagaagctgagatggtcagacctggcgagcacattaccatcctcacttactcgcgaatgaggtaccatgtgatgcaggcagcaaaaactctggtgaacaaagggtatgaccccgaggttatcgacatcaggtcactgaaaccgttcgaccttcacacaattggaaactcggtgaagaaaacacatcgggttttgatcgtggaggagtgtatgagaaccggtgggattggggcaagtcttacagctgccatcaacgagaactttcatgactacttagatgctccggtgatgtgtttatcttctcaagacgttcctacaccttacgctggtacactggaggagtggaccgtggttcaaccggctcagatcgtgaccgctgtcgagcagctttgccagtaaattcatatttatccgatgaaccattatttatcatttacctctccatttcctttctctgtagcttagttcttaaagaatttgtctaagatggtttgtttttgttaaagtttgtctcctttgttgtgtcttttaatatggtttgtaactcagaatgtttgtttgttaattttatctcccactttctttttnnnnnnnnnnnnnnnnnnnnnnnnnnnnnnnnnnnnnnnnnnnnnnnnnnnnnnnnnnnnnnnnnnnnnnnnnnnnnnnnnnnnnnnnnnnnnnnnnnnnnnnnnnnnnnnnnnnnnnnnnnnnnnnnnnnnnnnnn

SEQ ID NO: 119029 - DNA, 667 bp, Arabidopsis thaliana
  unsure (1)..(667): unsure at all n locations
ccgctcttctccactcttcttctctgttctatcgcagacatttttgtttatatgcatacataataataatacactcttgtcaggatttttgattctctctttggttttctcggaaaaatgtctgcgatactccaaggagctggagctgcaacggctctctcgccgtttaattctatcgattccaacaaactcgttgctccttctcgctcttctctttcagtgaggagcaagagatacattgttgccggatctgatagtaaaagctttggttctagcctcgtagctcgtcgctctgagccgttgataccaaatgctgttacgacgaaggcggacactgctgcgagctctacttcatcaaagcctggacatgagctattacttttcgaggctcttcaagaaggtctagaagaagagatggacagagatccacatgtatgtgtcatgggtgaagatgtaggccattacggaggctcatacaaagtaactaaaggcctagctgataagtttggcgatctcagggttctggacactccaatctgtgaaaacgccttcaccggtatgggcatttgtgccgccatgcaggcttaagccccggcatcgcaggtttgccatggggtttnctttagctttacccaacttcnccanctnnggttgttccttaaacccg

SEQ ID NO: 119030 - DNA, 864 bp, Arabidopsis thaliana
  unsure (1)..(864): unsure at all n locations
gagggccgacccacgacccacgcgtacgtgagaatcataagacgagatcctggtgagtcgtacttcctagttttgcgacgatgaattccggggttcccaagaaactcgtcgttgctccttctcgcacaaatctttcagtgaggagccagagatatataggggctggatctgatgcgagtaagaagagctttggttctggacttagagttcgtccctctcagaaattgattccaaatgctgttgcgacgaaggaggcggatacgtctgcgagcactggacatgaactattgcttttcgaggctcttcaggaaggtctggaagaagagatggacagagatccacatgtatgtgttatgggtgaagatgttggccattacggaggttcctacaaggtaaccaaaggccttgctgataaatttggtgacctcagggttctcgacactcctatttgtgaaaatgcattcaccggtatgggcattggagctgccatgactggtctaaggcccgttatttgaagggtttgaaccatggggtttcctcctcctcgccttcaaccaattctccaacaacttgtgggatgcttcactcacacatccggtgggcagatttacggtccccggttgtcaattccggggcccttgggggggtgggcccgcatctttggtgctgagcattcacagggggttagaatnttactttaagnccatcctgggntncaaatggttgctttctcaanctcctttcaacgccaagggttnttgaaaccgaataagagngganccnttngttttttngaanaagggtggtttaaatttaggggaatccggtnagttcattnaccttanngntantggaaccctgggg

SEQ ID NO: 119031 - DNA, 502 bp, Arabidopsis thaliana
  unsure (1)..(502): unsure at all n locations
nnnnnnnnnnnnnnnnnnnnnnnnnnnnnnnnnnnnnnnnnnnnnnnnnnnnnnnnnnnnnnnnnnnnnnccacgcgtccgcaatctctctctctggcattaggatttggaagtgctttttgtatatatatccaacaaaggaatcagatcggagatgtcggatgtttccggtgacggagatttatcggcgacggttactgaacatgaagtaactccacaaccgccggtttcttcggcgacgtatccgtcattaacggtgtcggcgtcttacaaagagagcagcggaggtaaaagctcgtcgaagaggagaccaataaggccgagtttcgacgctgcggctgataatgagtttattactttgcttcatggctcggatccagtgaaagtggagcttaatcgactagagaatgaagttagagataaggatcgggagttaggagaagcaaacgctgagatcaaagcgcttaggttgtctgagagacaaagagagaaagctgttgaa

SEQ ID NO: 119032 - DNA, 604 bp, Arabidopsis thaliana
ctcttgtttccatcactacaaaaaaaaaaaaaaaaacgaacgatctctctgaaactatctctttctctctagatatgttgtcgagactctgatttgaaatcccagagaaaagcatttggatcctctctagaaatctgcattttgaagctacttttttgtttgcatctgagtgtgtatagatcctgaggaattttgatgtgttgttgaatcggaaggaatttagatcggagtagtcggagatgtctgacgtttcggctgacggtggttttttgtcggcggagcaagctacaacgcctgttgcgattccgacgccgtatccgtcattgacggtgtcggcgtcctataaggagaaaagttctgggaggaggagaccggttaggcctagttttgatgcagctgctgatcatgagttcattactttgcttcatggctcggatccagtgaaagttgagcttaatcggcttgagaatgaaggtagagataaggatcgagaattaagtgaagctaatgctgagatcaaagcgttgaggttatctgagagacaaagagagaaagcttgtgaagagcttactgatgagctagctaagttggatgggaagctcaa

SEQ ID NO: 119033 - DNA, 1714 bp, Arabidopsis thaliana
  unsure (1)..(1714): unsure at all n locations
agctctcttcggccctcaattatagggaaagctggtccgcctgcaggtaccggtccggatttcccgggtcgacccacgcgccccctctgatgtgaagaagccatggaagagaagaagaaggagcttgaagagttgaagtatcaatcaggttttggtaaccacttctcatcggaagcaatcgccggagctttaccgttagatcagaacagtcctcttctttgtccttacggtctttacgccgaacagatctccggtacttctttcacttctcctcgcaagctcaatcaaagaagttggttgtaccgggttaaaccatcggttacacatgaaccgttcaagcctcgtgtaccagctcataagaagcttgtgagtgagtttgatgcatcaaatagtcgtacgaatccgactcagcttcggtggagacctgaggatattcctgattcggagattgatttcgttgatgggttatttaccatttgtggagctggaagctcgtttcttcgccatggcttcgctattcacatgtatgtggctaacacaggaatgaaagactccgcattttgcaacgctgatggtgacttcttgttagttcctcaaacaggaaggctatggattgaaactgagtgtggaaggcttttggtaactcctggtgagattgctgttataccacaaggtttccgtttctccatagatttaccggatgggaagtctcgtggttatgttgctgaaatctatggggctcattttcagcttcctgatcttggaccaataggtgctaatggtcttgctgcatcaagagattttcttgcaccaacagcatggtttgaggatggattgcggcctgaatacacaattgttcagaagtttggcggtgaactctttactgctaaacaagatttctctccattcaatgtggttgcctggcatggcaattacgtgccttataagtatgacctgaagaagttctgtccatacaacactgtgcttttagatcatggagatccatctataaatacagtccttacagcaccaactgataaacctggtgtggccttgcttgattttgtcatatttcctcctcgatggttggttgctgagcatacttttcgacctccttactatcatcgtaactgcatgagtgaatttatgggcttaatctacggtgcatacgaggcgaaagctgatggatttctccctggcggtgcaagtcttcatagctgtatgacacctcatggtccagatactaccacgtacgaggcgacaattgctcgagtaaatgcaatggctccttctaaactcacaggtacgatggctttcatgttcgaatcagcattgatccctagagtctgtcattgggctctggagtctcctttcctggatcacgactactaccagtgttggattggcctcaagtctcatttctcgcgcataagcttggacaagacaaatgttgaatcaacagagaaagaaccaggagcttcggagtaaagaacacataattcacctgcaccactttcaatacccaagctgtacagacttttcaccatatacttgtataagaaagaagcatataacaagtacatatgtaataataagtaggtaatgtttcttcatgtcactttaaatacactatttgtactctgaagctaatataacggtgttggtttggatnnnnnnnnnnnnnnnnnnnnnnnnnnnnnnnnnnnnnnnnnnc

SEQ ID NO: 119034 - DNA, 2592 bp, Arabidopsis thaliana
  unsure (1)..(2592): unsure at all n locations
cccaagccttcggttccgcgccaattactctctaatcggaaaagagccccgacgacaacgaccaccgtccctccgtcatgccggagatagacgcgttgtttgaatcgatcaatgttcgggaccttctcgccggacacgatctaaacgatcccacaactccgttatctgcaccggatctccgtctcctcataaaccgcttagagtctcattctctgcggatcaagtccaaagttcagtcttatctcgtcgctcatcactctgatttctcggagctattttctctttgtcaagacaccgtctcgaggactcgtctgatctccgatgacgtctccgatgtcctacaattggtttctgaccgtccgattgatgttgagatacgcagtgtggtagatgagataacggaaaagactaaggaagtgaaattgaaaagagaatctcttgatctagtgaatgcgatcgtgggaatttgtgaggcattgcaggaaacgaaggaagctttgaaaaatggacgtttcagattcgccgctgagagaatcagagaacttaaagttgtattgagaattggtgaagaggaagatggagaacctgtggcttacgctttacttaggaaggaatggtctaattgctttgacgagattcaagaggtgcttgcaaagttcatggagaatgcagtgcgttttgagctagactcgagtagaatccggattaagtatcagctaagcgttggtgagactgctggaatcgctcttagtactgttctagaggcaatggaggtgattggaatattagactatgggcttgcgaaagcagctgactcaatctttaagcatgtcatcactccagctgtaactcatgcatctacctttgccgctgtggaagatttatgtaaatccgcaggggaagtcaccgaagcgacactaaggctagagcaatcctcagatcataagtttgaagatgtggatggagatgcaatgtattctggaattcttaaggttgttaagttcatttgcagttccttgtgctttggaaacgttacatggatccattcttttgggaggttgacatggccgaggatatcagagttaattatatctaaatttctttcaaaggttgtcccagaagatgcttcaaaacttgctgactttcagaaaattatcgagcggacctctcaattcgaagccgctctaaaggaactgaattttgtttcatcatctgacgcagagagtaggctcagcaaatatgctgaagatgtggaggttcattttgcatctagaaagaagatagaaatcctagcaaaagcaagaaatttgctgttgcagtgtaactttacgattccccaggatattgctatgaggaatgccaagcacatcgtctgcttacttttctcctctgaaaggtgtgtggtatctgaagctgcatctcaacttatgaatttggtgcataagacgctcgaggatgtctgtgtttcttctgcaagggttgcttcagagttctacaacgctgctagagattctatccttctatatgaagctgttgttcctgtcaagctagagaaacaactcgatggcctcaatgaagctgctgttcttctgcacaacgattgtctatatttgttcgaagagatacttggccttgcttttgagtatcgtgctagcttccctagctccatcaaggagtatgcagtctttgctgacatagccccaagatttaaactgatggccgaagaagttttgcaaaaacaagttcatctagtaatttcaagtctgcgagaggctatagatagtgcagatggatttcagaatactcatcaaattaaacagtttaaatctgcagaatttagcattgatcaggttgtctttagtctaaagaatgtgcatatgatatgggagccagtcttacggcccaaaacttacaagcaaagcatgtgcgcagttttggagtctgtatttcgcagaatagctagagatattcttcttctagacgacatggctgctgacgaaactttcgagctacaaaaactgatttatctcatgttgaagaatctatcttctgtactcgattccgtgagatctgcagatgagacttctcgtcctcttgatgatatcataccatctttgcgcaaaacccgtaaactagcagaactattggatatgcctctcatgtctataacttcagcttgggaaagcggggagttatttagatgcaatttcacaagaacagaggtacaagatttcatcaaagctatatttacagattcgccgctgagaaaagaatgcttatggaggatagacgaggttaaccagtagattggaaatgataaaacttaaaaaaaaaactcaagacttgtgagaagaagcaagtgaaagcctattttggcaaaagagccatgaggtattttaatgtcagcagcttgtaacatcgacgacgcactcttgtgtaagaatatatatgtaaagagagttttagctgatgagtttaaaactttaggtttaaaagcgtgttccagattttgttgtacatttgggctttagattcaacaagtaaaacgctctgggtaacaacnnnnnnnnnnnnnnnnnnnnnnnnnnnnnn

SEQ ID NO: 119035 - DNA, 1413 bp, Arabidopsis thaliana
gaacattgactggccgtctgcggtaccggtccggaattcccgggtcgacccacgcgtcccaaaaatgatgatcggcgaaaataaaaaccggccacatccaacgatccatatccctcaatgggatcaaatcaacgatccaacggccacaatctcttcaccattctcttccgtcaaccttaacagcgttaacgactacccacactctccgtcaccgtatctcgactccttcgcttctctcttccgttacctcccgtcaaacgagttaacaaacgattcagactcatcaagtggcgacgagtcatcaccactcaccgactcattctcctccgacgagtttcgcatctacgagttcaaaatccggcgatgcgctcgaggtcgatctcatgattggacggagtgtccgttcgcacatcccggagaaaaagctcgacgacgtgatccgagaaagtttcattactccggcaccgcttgtcctgagtttcgtaaaggaagttgtagaagaggtgattcgtgtgagttctctcatggagttttcgagtgttggctccatccttctcgttaccgtactcagccgtgtaaagacggaactagctgccggagaagaatctgtttcttcgctcatacgacggagcagttacgtgtattaccttgttcgttagatccagatcttggattcttctcaggattagctacttctccgacttcgattcttgtttctccttcgttttcaccaccgtcggaatctccgccgctttctccgagtaccggtgaacttattgcgtcgatgaggaaaatgcaattgaacggaggtggttgttcgtggagttctccgatgagatctgcagttaggttacctttttcgtcgtctctgcgtccgattcaggcggcaacgtggccgaggataagagagtttgagatcgaagaagctccggcgatggaatttgtggaatctgggaaagagctgagagcggagatgtatgcaagactcagtagagagaactcactcggttgagtcgacttggatcgagtctttgatgacgtggcgactcgatctgattttgtgaatattttagagatttttaaggtgttgtggataaatgacgtggcgggtcgatcttagtgacggtacaatcggacgatgaagaaaaaagcgttaagagtaacaaaaaaaggaagaatttgtaaagagatgataatgagagaatttgagagctattcttctggcttttttctctgcagttttttttattgttttcgttattttcttgtttttattttggttttcggctttattttgtttgttgtttattaatgttatatcattttgtaattagttctcaaatgtatttggataacatcttagtttgagactttagaaaagaacatttcatttaaaaaaaaaaaaaaaaaagg

SEQ ID NO: 119036 - DNA, 856 bp, Arabidopsis thaliana
  unsure (1)..(856): unsure at all n locations
gaagagctttgacgtcacctgcacgcgtacgtaagcttggatcctctagagcggtcgcccttttttttttttttttttttggttttttttttttttttttttggatagggtcaagattttcataactttaccgtagttaatatttgacccaaccatggttaaaataaagcagtttatatcacagacacacacctctctctcttctagactcactaaacaaaaatgatgatcggcgaaaataaaaaccggccacatccaacgatccatatccctcaatgggatcaaatcaacgatccaacggccacaatctcttcaccattctcttccgtcaaccttaacagcgttaacgactacccacactctccgtcaccgtatctcgactccttcgcttctctcttccgttacctcccgtcaaacgagttaacaaacgattcagactcatcaagtggcgacgagtcatcaccactcaccgactcattctcctccgacgagtttcgcatctacgagttcaaaatccggcgatgcgctcgaggtcgatctcatgattggacgggagtgtcccgttcgnacattccccggaggaaaagcttcgacggccgtgatcccgnggaaggtttcattacctccgggaaccggtttgtccctgaggtttcggtaaagggaagttttaaggaagagggtgattccgtggtaaggttccctcaatgggngttttcggggtttttgggtccatcctttttgggtaaccggaattagcccgtttnaaggcgganctttgttccgggggagattttttttttgggtaaaaaggggggatttagggtttacccttttcgaaaagccnaanttgggtggc

SEQ ID NO: 119037 - DNA, 1597 bp, Arabidopsis thaliana
cccacgcaacaacaccaaccaataattaaacaaatggccaacaacaattccaactctcccaccggtccacactttctattcgtaacatttccagcccaaggtcacatcaacccatctctcgagctagccaaacgcctcgccggaacaatctctggtgctcgagtcaccttcgccgcctcaatctctgcctacaaccgccgcatgttctctacagaaaacgtccccgaaaccctaatcttcgctacctactccgatggccacgacgacggtttcaaatcctctgcttactccgacaaatctcgtcaagacgccactggaaacttcatgtctgagatgagacgacgtggcaaagagacactaaccgaactaatcgaagataaccggaaacaaaacaggccttttacttgcgtggtttacacgattctcctcacttgggtcgctgagctagcgcgtgagtttcatcttccttctgctcttctttgggtccaaccagtaacagtcttctccattttttaccattacttcaatggctacgaagatgcaatctcagagatggctaataccccctctagttctattaaattaccttctctgccactgcttactgtccgtgatattccttctttcattgtctcttccaatgtctacgcgtttcttctacccgcgtttcgagaacagattgattcactgaaggaagaaataaaccctaagatcctcatcaacactttccaagagcttgagccagaagccatgagctcggttccagataatttcaagattgtccctgtcggtccgttactaacgttgagaacggatttttcgagtcgcggtgaatacatagagtggttggatactaaagcggattcgtctgtgctttatgtttcgttcgggacgcttgccgtgttgagcaagaaacagcttgtggagctttgtaaagcgttgatacaaagtcggagaccattcttgtgggtgattacggataagtcgtacagaaataaagaagatgagcaagagaaggaagaagattgcataagtagttcagagaagagcttcgatgagataggaatggtggtttcatggtgtgatcagtttagggttttgaatcatagatcgataggttgtttcgtgacgcattgcgggtggaactctacgctggagagcttggtttcaggagttccggtggtggcgtttccgcaatggaatgatcagatgacgaacgcgaagcttttagaagattgttggaaaacaggtgtaagagtgatggagaagaaggaagaagaaggagttgtggtggtggatagtgaggagatacggcggtgcattgaggaagttatggaagacaaggcggaggagtttagaggaaatgccacgaggtggaaggatttagcggcggaggctgtgagagaaggaggctcttcctttaatcatctcaaagcttttgtcgatgagcacatgtgatttgggtatcagaaattataacaacactccgcttttctgttcttccttgctctgtttcaatgtttacacaatacagtagacagtattttggatgttgattggttagttttgaagatgatgaaatgtaatttattcaaga

SEQ ID NO: 119038 - DNA, 1604 bp, Arabidopsis thaliana
  unsure (1)..(1604): unsure at all n locations
atgatttgccggcactatacgactcatttagggaaagctggtacgcctgcaggtaccggtccggaattcccgggtcgacccacgctgtccgcaacacagagctgacgttagcatttgtctctgaaatcccagatccgaaaacccaacaatggcgtcagagaacaacggatccagatccgattccgaatccatcaccgctcccaaagctgattccaccgtcgttgaaccgaggaagatagctctgatcaccggaatcaccggccaggacggatcatacctgacggagttccttctcggaaaaggctacgaagttcatggtctgatccgtcgatcatcgaatttcaacacccagcgaatcaaccatatctacatcgatccacacaatgtcaacaaagctctgatgaaactccactacgccgatctcaccgacgcttcctctctccgtcgttggatcgatgtgatcaaacctgacgaagtttataacctagctgctcaatctcacgtcgctgtctccttcgagatccctgattacacagccgatgtagtcgcaaccggtgctctccgtctccttgaagccgtcagatctcacaccatcgacagtggccgtaccgtcaagtattaccaagccggatcttcggagatgtttggatcaactcctcctccacaatcggagacgacgccgtttcaccccagatctccttacgcagcttccaaatgcgctgctcattggtacacagtgaattacagagaggcgtacggtctcttcgcttgtaacggaatcttgttcaatcacgagtcacctcgccgtggtgagaatttcgtgacgaggaagatcacaagagcattgggaaggatcaaggttggtttgcagacgaagctattccttgggaatttgcaagcgtcaagagattggggatttgcaggagattatgtggaagcaatgtggttgatgttgcagcaagagaagccagatgattacgttgtggcaacagaggaaggacacacagtggaagagtttcttgatgtgtcatttgggtatttgggactcaattggaaagattatgttgagattgaccagaggtactttaggcctgctgaagtagataaccttcaaggagatgcaagcaaggcaaaggaagtgttggggtggaaaccacaagtagggtttgagaagcttgtgaagatgatggttgatgaagatcttgagcttgctaagagggagaaagtgcttgttgatgctggatacatggatgctaagcagcaaccttgatttgatcaattatacaaagatggagtttcttacatttatctgcttttatagagttttaaatttcgtttttttttctttctctttttgttgctttggtggttgtttgttgtctttttatgttttagtttctttgttgctttttaagttatctaaattgtttccctccaatgagttgaggatgaaagcgcagtgaattttgaatgaaggagcaaagaatcatatactacagttcttcaattaaaaaaaaaaaaaaagnnnnnnnnnnnnnnnnnnnnnnnnnnnnnnnnnnnnnnnnnnnnnnnnnnnnnnnnnnnnnnnnnnnnnnnntagtatc

SEQ ID NO: 119039 - DNA, 1547 bp, Arabidopsis thaliana
  unsure (1)..(1547): unsure at all n locations
cggacgcgccacgcgtcgtcttcttcttctctttcgatcaaatcttttcagattcaacccaaaattgaagacaaaaatgtctcgcagatcgctaactctcctcaagaatctagctagaaacgcgaatggatcaggtattcaaacccgatccgtgacttacatgcccagacccggtgacggagcaccacgcgcagtgacgctgatccccggagatggaatcggtcctctggtgacgaacgccgtggaacaggtgatggaagcgatgcacgctccgatcttcttcgagaagtacgatgttcacggagaaatgagccgtgtgccgccggaagtgatggagtcgataaggaagaataaggtttgtttgaaaggtgggcttaagactcctgttggtggtggtgttagttctcttaacgtccagcttaggaaagagcttgacctctttgcttctctggtcaactgttttaatttgcctggtttacctactcgccatgagaatgttgacatcgttgtcatcagagagaacactgaaggtgagtacgcggggcttgagcacgaggttgttcctggtgtcgttgagagtctgaaggtgatcacgaagttctgttcggagcgtattgcaaagtatgcttttgagtatgcctacctgaacaacaggaagaaagttacagcggtgcataaggctaacatcatgaaacttgcggatggtttgttcttggaatcttgtcgcgaggttgcgaaaaagtatcccagcatcacctacaatgaaatcattgttgataactgctgtatgcaacttgtagccaaaccagagcaattcgatgtcatggtaacgccgaatctctatgggaatttagttgcaaacactgctgctggtattgctggaggcacaggagtcatgcctggaggaaatgttggggctgaccatgcggtattcgagcaaggtgcatcagcaggaaatgttgggaaagacaagatagtattggaaaacaaagcaaacccagtggcattgcttctctcatcagcgatgatgcttagacaccttcagtttccttcatttgctgaccggctcgaaacagcagtgaagaaagtcatcgctgaaggaaagtgccggacgaaagatcttggtggaacaagcacgactcaagaggtcgttgatgcggtcattgcaaaactagactgactttgacaaattacgtgttcccgctctgcataaatcatcaaattcctgatacagattttgtgttgccaaaatatggggtatgatccaagcacaacggttatctggttttgtacctcgagttttattatattctttagccgtggaatatttcgataagaaaaaaaaacatgttccaaataattcatgttgctacgtttgttggcgccttttgtcatgtcaaagtttcttaaacacttgttcgtggaatatgcaaacttttatggattcgtaatttcaaaaaaaaaaaaaaagnnnnnnnnnnnnnnnnnnnnnnnnnnnnnnnnnnnnnnnnnnnnnnnnnnnnnnnnnnnnnnnnnnnnnngaaagc

SEQ ID NO: 119040 - DNA, 1451 bp, Arabidopsis thaliana
ccacgcttccgactcttcttcatcttcttcctctgacgatcattttcagaagaatctgattccgatcaaaattgcagaagaagatgtctcgccaatcgttttctctactgaagaatcttcgtagcatcgcttccggttccaaaatccagacccgatccgtgacttacatgcccagacccggtgacggaaaaccaagaccagtgacgttaatccccggagacggagttggtccgttggtaacaaacgcggttcaacaagtgatggaagcgatgcacgctccggtttacttcgaaccgttcgaagttcatggagatatgaagagtttacctgaaggattgttggaatcgattaagaagaacaaagtttgtttgaaaggtggtcttaagactcccgtcggtggtggtgtgagctctctcaatgttaatctgagaaaggagcttgatctctttgcttctctcgtcaactgtttcaatttgcctggtttagcttctcgtcatgagaatgttgatattgttgtgattagagagaacactgaaggtgaatatgcaggtcttgaacatgaagttgttcctggtgttgttgagagccttaaggtgattacaaagttctgttcagagcgtatcgcaaagtatgcgtttgagtatgcctacttgaacaacaggaagaaagttacagcagtgcacaaggctaatatcatgaaattggctgatggtttgttcttggagtcttgtcaagaggttgctaagaagtatccaagcattgcttacaatgaaatcattgttgataattgttgtatgcaacttgtggctagaccagagcaattcgatgtcatggtgacgcctaatctctatggtaatctagtggcaaacactgctgctggtattgctggaggctctggagtcatgcctggaggaaatgttggggcggagtatgcggtctttgagcaaggtgcatcagcgggaaacgtggggaaggatacaacggaagagcaaaagaacgcaaaccctgtggctttgttgctgtcatcagccatgatgcttagacaccttcagttcccttcttttgctgacaggcttgaaaccgctgtgaagcgtgttatcgctgaagggaattgtcggactgaagatcttggtggaaacagtaccactcaagaggtcgttgacgctgtcattgcaaatttggattgactttgacaattccaacttcggcttgtgtaaagccatcagtcacacgtcggtatgattcacgcttactgggaaatacttctagttcccacattctttcgagataactcgaattgggatttcagatttcgagaaaaataacatatggttttttgttttgtttttcttctttttgttcatgtaatatgcaaagtgcaaagtgaaaactgcctcagagcattattttttgaataatgaaaattatgtttaacttcaaaaaaaaaaaaa

SEQ ID NO: 119041 - DNA, 1118 bp, Arabidopsis thaliana
cctgcaggtcccggtccggaattcccgggtcgacccacgcgtccgctctaaccaaaaaaaaaaaaaaaaaacttctgaatctccgaaaaaagccaatcgggggaagaaaaaaattcaacggccgtctggttactgtcttgcttgcttccgacgatctatcttccccgagtagatttgaaatggctgctcctcctgctagagctcgtgctgattacgattacctcattaaacttctgctgatcggagacagcggtgttggtaagagttgccttctcttacgtttctcagatggctcgtttaccaccagtttcattacaactattgggattgattttaagatacggactattgagctcgatgggaagagaattaagctgcaaatctgggatactgccggacaggagcggttccgcacaatcacaactgcgtactaccgtggagccatggggattttgcttgtgtatgatgtgactgatgaatcatctttcaacaacatcaggaattggatccgtaacattgagcagcatgcttctgatagtgtcaacaagattctagttgggaacaaagcagatatggatgaaagcaaaagagctgtgccaaaatctaagggccaagctcttgcagatgaatatggaatgaagtttttcgagactagtgccaagactaacttaaacgttgaggaagttttcttctctattgctaaagacattaagcaaagacttgcagataccgatgcacgagctgagccgcaaacaatcaaaatcaaccaatccgaccaaggtgcgggaacatctcaagctactcagaaatcagcatgttgcggcacataaaaattgggtccacgacgcctgtcaaaggagagaatctggctagtgaaagagaaatggtatttggaaagaaaaaatgaaaaaggaaatcaatcttcttttgcttttcttctatatgagatggtgtttctacgtattcttttaagattctctctttccctaatggtatagtgtgactgtgaaggacacaattcgtattccatatttctggaatggattctctgacatcagattatgacttatgataatatcagtttatctcaaaaaaaaaaaaaaaaaagggcggccgct

SEQ ID NO: 119042 - DNA, 1823 bp, Arabidopsis thaliana
  unsure (1)..(1823): unsure at all n locations
atgatactccagctcatctacgactcanatagggaaagctggtacgcctgcaggtaccggtccggaattcccgggtctgacccacgcgtccgaatttcactcacaatgacgtgtaacgtcgacgttgtcggtggacacaaagctccataaagacactattactgtattattatcttcgaaatatctatctcttcgtcgtcgaacccaaaaagattctccgtcttagattccgatcacgatgaacccaacccaaaaacccgaaccggtttacgatatggtcatactcggagcatccggatttaccggtaagtacgtcgtcagagaagctctcaagttccttcaaacaccgtcttcttctccgttaaagtctctagctttagcgggtcgtaacccgacccgtttaacccaatctctcgaatgggccgcccgcccgaacccaccaccttcctctgtcgctatcctcactgctgatacatctgaccctgattcacttcgtcgtctctgtactcaaaccaaactcatcctcaattgtgttggaccgtttcgtatccatggtgatcctgtcgtctctgcttgtgctgattcagggtgtgattatttggatataagtggtgaacctgagtttatggagagaatggaagctaactaccatgatagagcagaagagactggctctttaatcgtttctgcttgtggttttgattcaattcctgctgaattgggtcttctctttaatgctaaacaatgggtatctccatcggttcctaaccagattgaagcgtaccttagcttggagtctgacaaaaaaattgctgggaactttgggacttatgagtctgcggttttaggtgttgctaatgcagaaaagcttaaagaattaagacgttcaagaccaagaaggccaagaccaacgatttgtggtcctcctgctaaaggaccaacattagaaaaccagaagacgattggtctttgggctttaaagctaccttcagctgatgcagtagttgttcgtagaactctcacaactctaacagagaaaccacatgggcttcctgggattaatgaaagtcctgagcagatacaaaagagagaagcattctggtcatcgatcaagcctgctcattttggtgtaaagataacgtccaaatctctctttgggatattccgatatgttacacttggagtgtcacttggtttactttccaagttctccttcggaagatggcttcttttgaaattcccttcagttttcagccttggttggttccagaagaaaggtccaagtgaagaagaggtagaaagcgctacgtttaagatgtggttcataggtcgtgggtacagcgaagagagtctagcttcacaaggagaaacaaagcctgacttggaaatcattacaagaatttcaggacctgagattggatatataaccaccccgataacacttgttcaatgcggtttgatagtcttgggccagcgcgaaagcctagttaaaggaggagtctacacacccggcattgtgtttggttcaaccgatatccagcagcgacttgaggataatggtatatcttttgagctgatttcaaagatcaagactcaaggataaaaagagatctcttatcctgcttttctattctgtttttagttgttatgttatgcttcacagtgacattgaagacagtttgatggtaagttgtattccaataataataaaactgtttcctttacgtttgctaaaaaaaaaaaaaaaaaaaaaaaaagggcggccgctctagaggatccaagcttacgtacgcgtgcatgcgacgtcatagtcttnctatagt

SEQ ID NO: 119043 - DNA, 2414 bp, Arabidopsis thaliana
  unsure (1)..(2414): unsure at all n locations
nnnnnnnnnnnnnnnnnnnnnnnnnnnnnnnnnnnnnnnnnnnnnnnnnnnnnnnnnnncccacgcgtccgccacgcgtccggcaattcttagtttctcttctatcccctttctgggttttgtttgaaccctagctcgctttggatccagtggttttaagttaaaggtaaatttatcgaaagtaagtagattcctaatggcagcttccaatcattcatctggtaaacctggaggagttttaagtgatgctttatgtagggagctctggcatgcctgtgctggacctcttgtaaccctacctcgtgaaggggaacgagtttattatttccctgaaggccacatggagcagctcgaggcatcaatgcaccaaggtttggagcaacagatgccttccttcaacctcccatctaagatcctctgtaaagttatcaacatccagcgcagggcagagcccgagactgacgaagtatatgcgcaaataaccttattgccagaactggatcaaagcgaacccactagcccagatgcccctgttcaagaacctgaaaagtgcaccgtacattcattttgcaagacactaactgcttcagacacaagcacacatggtggcttctcggtgctacggagacatgcagatgattgtctcccacccttggatatgtcccaacaaccaccgtggcaagaattggttgcaactgatttgcacaatagtgaatggcattttaggcacattttccgaggccaaccaaggcgtcatttgctaacaactggatggagtgtttttgttagctcgaagaaactagtggctggtgatgctttcatattcttaaggggtgagaatgaagagctccgagtaggtgttaggcggcacatgagacaacagactaatatcccgtcatctgtcatttcaagtcatagcatgcatattggggtccttgcaacagcagctcatgccattacaacaggaacaatcttttctgtcttctacaagccaaggacaagtaggtcagagtttattgtgagcgtcaataggtatctcgaagctaagacccagaagctgtctgtaggcatgcgtttcaagatgagattcgagggggaagaagctcccgagaaaaggttcagtggcacaatagttggtgttcaggaaaataagtcttcggtctggcatgattctgaatggagatcgctaaaggttcaatgggacgaaccctcatctgtatttcgtcctgaaagagtttcaccttgggaacttgagcccctagttgcaaatagtactccgtcttcacaacctcagcctccgcaaaggaacaaacgaccaagacctcctggtttaccttcaccagccactggtccatctggtcctgttactccagatggtgtgtggaaatccccggcagacactccttcctcagtgccattattctctcctcctgccaaagctgctacgtttggtcatggtgggaacaaatcatttggagtatctattggatcagccttttggcccaccaatgcagatagtgcagctgaatcctttgcttcagcgtttaacaatgaatctactgaaaagaaacaaactaatggaaatgtctgtaggctttttgggtttgagctagttgaaaatgttaatgtggatgaatgtttctctgctgcctctgtgtctggtgctgtcgctgtagatcaacctgtcccatccaacgagtttgactctggccagcaatctgagccattaaacatcaaccaatctgatattccttcggggagtggtgaccctgagaaatcctctttgaggtctcctcaagaatcacaaagtagacagatacgtagctgcacaaaggtgcacatgcaaggcagtgcagtaggcagagctattgatttgacaaggtcagagtgttatgaagatctgttcaagaagctggaagagatgtttgatatcaagggtgaactcttagaatctaccaaaaaatggcaagtcgtttacaccgatgatgaagatgacatgatgatggttggtgatgatccatggaatgagttctgtggaatggtgaggaagatattcatctacacacctgaggaagtgaagaaactttcaccgaagaacaaactcgcagtcaatgcaaggatgcagctcaaagctgatgcagaggaaaatgggaatacagagggcagatcatcatctatggcgggatcaagatgagtatatcactgtgttatgttttaaatgtacttgccacgtaggaaatatgaaagcagaagcaagagatcgttagacaatatgaaagttgagatgtctgtgtatagcaatgaagttttatgtcttcaagtcttatgaattcacttagatgcaatgtgttttgaggagttgtgtagcttttgtacgggaaatatggaaattaagtttcacgtcttgttctacc

SEQ ID NO: 119044 - DNA, 917 bp, Arabidopsis thaliana
  unsure (1)..(917): unsure at all n locations
cataaacacaaaatccggtttttaataatggcgaaaatctccagtattcacattctcttcttcgtcttcatcacaagtggcattgctgattccgccaccgtattcactttacaaaacagttgtgcgtacaccgtttggccgggaactctctccggcaacagcatcaccctcggcgacggcggatttcccttaactccaggcgcttccgtgcagctcacggctcctaccggttggtcaggccggttctgggctcgtaccggctgcaactttgacgcctccggtcacggtacctgcgtcaccggagactgcggcggcgttttaaaatgtaccggcggcggagttcctccagcgactctagcggaattcaccgtgggatcaagcaatgccggcatggatttctacgacgtgagcctcgtcgacggttacaatgtaaagatggggataaaaccacagggaggattcggaaattgcaaatacgcaggctgcgtctcggacatcaacgagatttgccctagcgagcttaggatcatggatccgaattcgggaagtgtcgcggcgtgtaagagcgcttgcgcgtttagttcgccggaattttgctgtactggtgctcacgcgacgccgcaaacttgttctccgacgtattactcgtccatgtttaagaacgcttgtcctagcgcttatagttacgcttacgacgacgcatcgagcactttcacttgtaccggatctaactacttgatcactttctgccctacccagtcttaaaaccggagctccggtttagatttgggttgggtttctctctctctcgtttcttttgcttgttatgtacggaaagagaaataaagaaagatatgataaggaaaagcgactatgatccatttttaaagattnnnnnnnnnnnnnnnnnnnnnnnn

SEQ ID NO: 119045 - DNA, 3309 bp, Arabidopsis thaliana
ggccgccaccaccaccgcctcatcagcacacttcgggttcgcattctggaccattagactatagccacaacccacaaccatcatctctcgcggctgctcctccagagtatcacagacattcttttgactaccaaccttctccttacccttatcagccccaaggtaactttggtgcttatggtcctctgcctcctcactattcgtatcaagagccagctcaataccctccacctgaaacctaaaccgcaagagcctctgcctcctccgcagcaaactcaaggttttcaagaatatcgtaggcaagattgtctcagtaccgggggaacaggtcatgataatgtaagcaattctggatcttcttatcctcctgtggatgaacttctaggtggtctgcatatttctactaaccaaccatggtccctcagttccacaactatcctcccttccttcgaactcttggcaaagcgccctggggacttgtatggttaccctaacagctcgtttccaagtaactctcatttgccacagttagggagagtagattcctcaagttcttattatgcatctaccgaatcgccacatagtgcggatatgcagatgacactgtttggtaaagggtcgttgaaggtcctgttgtcgcatgggaatttggatatttggatctatcatgctaaaaatctccctaacatggatatgttccataagacactgggtgatatgtttggaagattgccagggaaaattgaagggcagcttactagtaagattaccagtgatccttatgtttctgtatcagttgctggtgctgtggagtcagaccctcgcgttcgcatgagtaactgcgaaaatcctgtttggatgcaacatttttatgttcctgttgctcatcatgctgcagaagttcattttgttgttaaagacagtgatgttgtgggttcacagcttattggattggttacaatcccggtggagcagatatactcaggtgccaagatcgaaggaacttatccgattctaaccagtaatgggaagccttgtaaaccaggggcaaacttatcattatcgattcagtatactcctatggacaaactcagcgtttatcatcatggagttggggcaggtcctgattaccaaggggtacctggaacatattttcctcttagaaaaggcggaactgtgagattgtatcaagatgcacatgtcccagaagggatgctccctggtataagactggacaatggaatgttttatgaacatgggaagtgttggcatgatatgtttgatgccatacgtcaggcgcggcgtttgatttatatcacaggttggtcagtgtggcacaaagttaagttgattcgtgataaattaggtcctgcatccgaatgtactcttggggagcttctaagatcaaagtcccaagaaggagtgagagtcctcctctcgatatgggatgacccaacttcacgtagcattttgggttataaaacagatggggttatggcaacccatgatgaggaaacacgccgtttttttaagcattcctcagttcaagtcctgctttgcccccgaaatgctggaaagcgacatagttgggtcaagcagagggaagttgggacaatctatacacatcatcaaaaaaacgtaatagtagatgctgatgctggtggtaacagaaggaaaatcatagcttttgtcggtgggcttgatctatgtgatggccgatatgacactcctcagcatccgttgttcaggacactacagacaattcatatagatgattttcacaaccccacttttacgggaaatctttcaggatgtccaagagaaccgtggcatgacttacacagtaagattgatggcccggctgcatatgatgttctgaccaacttcgaagagagatggttgaaggctgcaaagcctagcgggatcaagaagtttaagctgccgattgacgatgcgttgttaaggattgataggattccagatatattaggagtttctgatactcctactgttagtgagaacgatcctgaggcttggcatgttcagattttccgttcaatcgattcaaactctgtgaaaggtttcccaaaggatccaaaagatgctacatgcaagaacttggtgtgtgggaagaacgtgctgattgatatgagcatacacacagcgtatgtcaaagccattcgtgcagcccaacatttcatctatattgagaatcagtatttcattgggtcttcatacaactggaatgcgcataaggacataggtgcggataatttgattcctatggaaattgcgttgaagatagctgaaaagatcagggcgaatgaacggtttgctgcttatattgtcattccaatgtggccggaaggtgttccaaccggcgctgctacccagaggattctttattggcagcacaagacaatacagatgatgtatgagacaatctacaaggcgttagtggagacagggcttgaaggagcattctccccacaagattatctcaatttcttctgtcttgggaacagagaaatggtggatggaatagataactcaggaaccgggagtccaaggcaaatgcaaacactcctcaggccgttgagtcggaaaagcagaagatttatggtctatgttcactcgaaagggatggtagttgatgatgaatacgtagtaattggatctgcaaacataaaccaacgatcaatggaaggcacaagagatacagagattgcaatgggagcttaccagcctcaacatacatgggcaaggaaacattctggtcctcgtggtcagatctatggatacagaatgtcgctttgggcagagcatatggcaaacttagatgactgtttcacacagccagagagtatagagtgtgtaaggaaagtgagaacaatgggagagaggaactggaaacagtttgcagctgaagaagtctcagacatgagaggacatttattaaagtatccagtggaagttgatcgaaaaggaaaagtccgaccacttcccgggagtgagacgttcccggacgtcggaggtaacattgtcggaacattcatagccatacaagagaatctaaccatttgataataaggaaggatcccagtggcacacttttgacattttttttgtgtggatattatatcttgagagttgataataagagggtgggagatttgattaatttgataaacttttcacattattaatcgtgtataaagtggtggcttataaaaatgaataaagttgttaatagtttggctgatatattatcactctaaattttcctaccaaaactaaattactcacact

SEQ ID NO: 119046 - DNA, 1388 bp, Arabidopsis thaliana
  unsure (1)..(1388): unsure at all n locations
accacgcgtattctttcgcgtcttttgcttcctccctctttttcgccaatgttttctttagatctagctaatatggcgacgattttgttctttctcgcttctaatcaccgtagagatcctcccgatctgcaaatccgatccgaattctcaacgaatttgtagatctgatctgtgattccatcgttgacgacggatcttcgcttacatcgtttgatctgtcgcagatctgccgttttctatagatctagatctggatcgtccttcgcggcttcttcacatgcaagattctgtgaattgttcaagttgaggcatcatttctggattactaggagacgaatctgttgcagacggatgtgtgtgtgttggattgaattgagattagggtgtagaagatgttttgtggatagctaatagcttcctgattgcatctctgtcatccgacctttgccatgtcaggtgcgcttgcatggcaggtcaaaaaactgatcctcaataaaaaaaagattttgtgggttttggagaggaggtcgcacgggttattattttttcccgggatctcttctcctctgtgtgtgtcgtcttgcctctgctctatctctctccctgctctttcacatttcatatctttcttaaatgctcatatacactcaaaaaccgatcataagcagagtttgtaaccaatatggagcagtgggcgattacaaatcttcttgcccaacaacctcgagagttaaatcaggtactcatatccatattaaatcgaattcttaattagcataataaggtaaacataatctgcaagaggaattctggatttaaataaaccataatccggttgccctaattgttaacttgtatcaacgcttatgcgaatcatgaaattttaattttattggttttgttatttatcttattgatcaattattgttttacaagttgtcatttaatctattgaaaatgatggtattaagaattgctgttaaacaattttgcgggttctttgtatgtatcattggtattgttttattagttctatccgtttagaagctttttagaatatggtaaagaacatttttatttgctcgtagtttgtatatgtctgtaaccaccagttcctgtagtaactatgaagctggtagacgacggaattgaagctatgcaaagctgacgttggttttttctgaagttgatttgttcttgaaaggtatcttgatcaaaagatagtatctggttatgtgctaagtcaaaaattcctgatatttatagttcattacattttattttcttagtttattgtggcctgttgtggaagagaacaatcattataacattttatataatgagaaaagcttattgcaattttcctnnnnnnnnnnnnnnnnnnnnnn

SEQ ID NO: 119047 - DNA, 1418 bp, Arabidopsis thaliana
  unsure (1)..(1418): unsure at all n locations
tccattgttactatttgtgggtatctatcctaattacatctacctatgttgttagatatctatactaagtagtggttgcaagtaagatatgatctgacaaggtatgtgagcaatactatcagtttggaaggccaggccgatgtccacgattattttacgctcctcgatccaatatatatnnnnaagctggtacgcctgcaggtaccggtccggaattcccgggtcgacccacgcgtccgcgcagatctgccgttttctatagatctagatctggatcgtccttcgcggcttcttcacatgcaagattctgtgaattgttcaagttgaggcatcatttctggattactaggagacgaatctgttgcagacggatgtgtgtgtgttggattgaattgagattagggtgtagaagatgttttgtggatagctaatagcttcctgattgcatctctgtcatccgacctttgccatgtcaggtgcgcttgcatggcaggtcaaaaaactgatcctcaataaaaaaaagattttgtgggttttggagaggaggtcgcacgggttattattttttcccgggatctcttctcctctgtgtgtgtcgtcttgcctctgctctatctctctccctgctctttcacatttcatatctttcttaaatgctcatatacactcaaaaaccgatcataagcagagtttgtaaccaatatggagcagtgggcgattacaaatcttcttgcccaacaacctcgaaagttaaatcaggtactcatatccatattaaatcgaattcttaattagcataataaggtaaacataatctgcaagaggaattctggatttaaataaaccataatccggttgccctaattgttaacttgtatcaacgcttatgcgaatcatgaaattttaatttaattggttttgttatttatcttattgatcaattattgttttacaagttgtcatttaatctattgaaaatgatggtattaagaattgctgttaaacaattttgcgggttctttgtatgtatcattggtattgttttattagttctatccgtttagaagctttttagaatatggtaaagaacatttttatttgctcgtagtttgtatatgtctgtaaccaccagttcctgtagtaactatgaagctggtagacgacggaattgaagctatgcaaagctgacgttggttttttctgaagttgatttgttcttgaaaggtatcttgatcaaaagatagtatctggttatgtgctaagtcaaaaattcctgatatttatagttcattacattttattttcttagtttattgtggcctgttggcggccgcgaaatcatgcagaaaaannnnnnnnnnnnnnnnnnnnnnnnnnnnnnnnnnnnnnnnnnnnnnnnnnnnnnnnnnnnnnnnnnn

SEQ ID NO: 119048 - DNA, 952 bp, Arabidopsis thaliana
  unsure (1)..(952): unsure at all n locations
tctttcgcgtctttngcttcctcccgctttttcgccaatgttttctttagatctagctaatatggcgacgattttttnctttctcgcttctaatcaccgtagagatcctcccgatctgcaaatccgatccgaattctcaacgaatttgtagatctgatctgtgattccatcgttgacgacggatcttcgcttacatcgtttganctgtcgcagatctgccgttttctatagatctagatctggatcgtccttcgcggcttcttcacatgcaagattctgtgaattgttcaagttgaggcatcatttctggattacnaggagacgnatctntttgcagacgggatgtgtgtgtgttggatgaattgagataagggtgtagaagatgttttttggnaagcaaaaagttcctgattgnatcttntnanccggcctttgccatgaaaggggcgtttcatgggaggcnaaaaaactggcccccaanaaaaaaagatttttggggttttggagaggaggccncacggggtataatttttcccgggaccccttcccccctgtgtgtgccggcttgcccctgctctatctcncaccctgctcttttcacattncataccttccttaaatgcncatatacactcaaaaaccgatcataagcagagtttgtaaccaatatggagcagtgggcgattacaaatcttcttgcccaacaacctcgagagttaaatcagtaactatgaagctggtagacgacggaattgaagctatgcaaagctgacgttggttttttctgaagttgatttgttcttgaaaggtatcttgatcaaaagatagtatctggttatgtgctaagtcaaaaattcctgatatttatagttcattacattttattttcttagtttattgtggcctgttgtggaagagnacaatcattataacattttatataatgagaaaa

SEQ ID NO: 119049 - DNA, 1233 bp, Arabidopsis thaliana
tctcaattaaaatcagtttgggattttttcgtaaacgcttttcaatcttcgctacgtcagggccacgatccacgccttgaccttcgttttttttttctcagagattagagaaaactccgataaccaatttctcaatctttttgtagatccaatttttccaggaaaaaaagaggtttcgcgaagaagatgagttttcaagatttagaatcaggaagaggaagatcaacgaggaaattcaatggtggtcgacaagattcgacacaagccgttgcttctggaatattccagatcaataccggagtctccacgtttcagcgactcgttaacacacttggtactcccaaagatacaccggagctccgggagaagctgcacaagacaaggttgcatattggacagcttgtgaaggatacttcagctaaacttaaagaagctagtgaaactgatcatcaaagcggtgtcaatccaagtaagaagattgcagatgctaagcttgcaagggactttcaagctgttttaaaagagtttcagaaagctcaacaaactgctgctgaaagagaaaccacttatactcctttcgtgcctcaatctgctcttccctctagctatacggcgggtgaggtggataaggtaccggaacagcgggcacaacttcaggagtcgaaaagacaagaacttgtattgttagacaacgagattgcattcaacgaggctgtgattgaagaaagagagcaaggaatacaagaaatccatcagcaaattggtgaggttaacgagatattcaaagatcttgcggttctggttaacgatcaaggagtcatgatagatgatattggtactcacattgacaactcccgtgctgcaacttcacaaggaaaatctcagcttgtgcaagccgcgaaaacacaaaaatcaaactcctctctgacatgcttgctcttggtgatatttggcattgttctcctgatcgtgattatagtactcgcagcttgatttcgaacagcaagaacatttcgtttgtgtgtgttcattgatcttaaggcatcaatgactggaactacttggtatatattatatgttgaagagaacacttagaagttggttttgtgtttgtttgggttggttcagttcggtttgaggttctattggttaatgtaatagtgtgtgcgtgtgtggcttttttgttgtgcaaacattttgttggagatgacagaaactctgttttgtttgtgg

SEQ ID NO: 119050 - DNA, 1375 bp, Arabidopsis thaliana
  unsure (1)..(1375): unsure at all n locations
nnnnnnnnnnnnnnnnnnnnnnnnnnnnnnnnnnnnnnnnnnnnnnnnnnnnnnnnnnnnnnnnnnnnnnnnnnnnnnnnnnnccacgcgtccgccgcggttcacgtttttcacaatctgtccggagagagagaaactcaccggggaatcttgaaatcaccatcacatcctctcttccctcgatctccgttatcgactgtaaatcgaattttgttgttgctttgttttcttgggcgaataaaagaggataatttagtggcggggttttcgagaaagagagagaaagaatgagttttcaagatttagaggcgggaagaggaagatcattagcttcttcaaggaacatcaatggtggtggtagtagacaagacacgactcaagatgttgcttctggtatatttcagatcaatacaagtgtttccactttccatcgtcttgtcaatactcttggtactcctaaagatacgcctgagctcagagagaagctgcataagacaagattatatattggacagttagtgaaagatacatcagctaaacttaaagaagctagtgaaactgatcatcaaagaggtgtaaatcaaaagaagaagattgtggatgctaagcttgcaaaggactttcaagctgtgttgaaagagtttcaaaaggctcagcgtcttgctgctgaaagagaaaccgtatatgctcctcttgtccacaagccatctcttccctcaagctacacatccagtgagatagatgtgaatggagataagcatccagagcagcgtgcccttcttgtggaatcaaaaagacaagaacttgtactgttggacaatgagattgcgttcaatgaggctgttattgaggaaagagagcaagggatacaagaaattcagcagcaaattggcgaggtgcacgagatcttcaaagacttggcagtgttggtgcacgatcaaggaaacatgatagatgatattggtactcacatcgataactcttacgctgcaactgcccaaggaaaatcccatctcgtaaggcatcaaagacacaaagatcaaattcttctctgacgtgcttgctcttggtgatttttggtatcgtgctcatgattgttattatagtgctcgcagtttgatttccccaagctcataaaagcatggacaagtgcttcatcatcaatcaagaagcatcaatgagtatatgtttgtcacgactctctttgttcctacaatttagtctgttggactattggtctcttgtttcttgttatcgagtatatagagtagttcactttggtttgatttggcttgtgtttgctgagtcttggttctgaaggagagagtgttactgctttgtctctgtaatataacttggttctgaagcggccgcg

SEQ ID NO: 119051 - DNA, 544 bp, Arabidopsis thaliana
  unsure (1)..(544): unsure at all n locations
acctggcctgnattccctgggctgcccactgtgtccgggaaaatgacaagaactatgtattgtnagacaacgagattgcattcaacgaggctgtgattgaagaaagagagcaaggaatacaagaaatccatcagcaaattggtgaggttaacgagatattcaaagatcttgcggttctggttaacgatcaaggagtcatgatagatgatattggtactcacattgacaactcccgtgctgcaacttcacaaggaaaatctcagcttgtgcaagccgcgaaaacacaaaaatcaaacctcctctctgacatgcttgctcttggtgatatttggcattgttctcctgatcgtgattatagtactcgcagcttgatttcgaacagcaagaacatttcgtttgtgtgtgttcattgatcttaaggcatcaatgactggaactacttggtatatattatatgttgaagagaacacttaaaagttgtttttgagtttgtttgtttggatctatttttattttgtttttattttctcaaaaatcttttttt

SEQ ID NO: 119052 - DNA, 1063 bp, Arabidopsis thaliana
agcttgctcagggaagaattcgcggccgcgtcgacgaaaaaccctctcactctcaggctcaagcgccggcgttcactctctaaccaaactcgatttcgtttctgggttgtgagattgagaaatgccgagatcatctttgcggctactagctaagcctctcttggagagcaggcgagggttttgcacgagctctgataagatcgtagcttcggtgcttttcgagagattgcgcgttgtgatacccaaaccggatcctgccgtttacgctttccaggagttcaaattcaattggcaacagcagtttcgtcgtagatatcccgatgagttcttagacattgctaagaacagagccaagggtgaataccaaatggactatgtacctgctcctagaattacagaggctgacaagaataacgataggaagtcattatatagagccctagacaaaaagttgtatcttctcatattcggcaagccatttggagctactagtgacaaacctgtttggcccttcccagagaaagtctatgattctgagccaactcttcgcaagtgcgcggaatctgctttgaagtcagtcgtaggagacctcactcacacatactttgttggaaatgctccaatggctcacatggccatacaacctacagaagaaatgcctgatttgccatcttacaagaggttcttcttcaaatgcagtgtagtagcagcatcgaaatacgacataagcaactgcgaggattttgtgtgggtaaccaaagacgagctcttggaattcttccctgagcaagctgaattcttcaacaagatgatcattagctgagccactcacaccacaaaaactcctattttcatcccttcttctccatcaatgtcatctctctggtattagacagtgtgagaaggtcaatgtaataaccaaacaaaaccatgtctctggttgtgacgtgaaggaaatttttggtcgacgcggccaaaaaaaaaaaaaaaaaaaaaaagcggccgctctagaggatccaagcttacgtacgcgtgcatgcggcgtcatagctcatctatagtg

SEQ ID NO: 119053 - DNA, 623 bp, Arabidopsis thaliana
  unsure (1)..(623): unsure at all n locations
cgcgcaacgtctaattcgattcactatagggaaagctggcacgcctgcaggtaccggtccggaattcccgggtcgacccacgcgtccgtacggctgcgagaagacgacagaagggtacggctgcgagaagacgacagaagggtacggctgcgagaagacgacagaaggggaagtcagtcgtaggagacctcactcacacatactttgttggaaatgctccaatggcgcacatggccatacaacctacagaagaaatgcctgatttgacatcttacaagaggttcttcttcaaatgcagtgtactagcagcatcgaattacgacataagcaactgcgaggattttgtgtgggtaaccaaagacgagctcttggaattcttccctgagcaagctgaattcttcaacaagatgatcattagctgagccactcacaccacagaaactcctattttcatcccttcttctccatcaatgtcatctctctgggattagacagtgtgagaaggtcaatgtaataaccaaacaaaaccatgtctctggttgtgacgtgaaggaaatttttgtggacatttttanaaccctacnaacccaaaagcggcccgtttataggaccaagcttactac

SEQ ID NO: 119054 - DNA, 1190 bp, Arabidopsis thaliana
  unsure (1)..(1190): unsure at all n locations
gcgtaaattacgaaaaacagagagataaatccggtcattgagatttttgttatagagagagagaaaaatcgaaatctattgtctatctcctcaatttggattggattttctgcatatcatcgctctagctttcgcgggttttggattcgattccttacccttctccaatcgaagtttttggctttgaattggatttgggtttcgttccaaaatcagctctttttgttaatcagggtttcatctgtgtgggtcttgttttgaagcaatttgtgtgtgtttggatgaaagtagcagatatgcaggaccagctggtgtgtcatggttgtaggaatttattgatgtatcctagaggagcatctaatgtgcgttgtgcgttatgtaacactatcaacatggttcctcctcctcctccacctcacgacatggcacacattatatgtggtggttgtagaacaatgcttatgtatacgcgtggggctagtagcgtaagatgctcttgctgtcaaactacgaaccttgtgccagcgcactccaatcaggttgcccatgctccttccagtcaggttgcgcagatcaattgtgggcattgtcggacgaccctcatgtatccttacggtgcatcatccgtcaaatgcgctgtttgtcaattcgtaactaacgttaatatgagcaatggaagggtacctctcccaactaaccggccaaatggaacagcttgtcccccctctacatcaacttcaacaccaccctctcagacccaaaccgttgttgtagaaaaccccatgtccgttgatgaaagcggaaagttggtgagcaatgttgttgttggagtgacaactgacaaaaagtaatcaagaatgagtgagatcttaaagatcaaatccaaattcttcctctattcctgcgtttggtttgtgcatattacatacgcggaaaaactgtatgttatatatctcttgactcctttttaacccaagagaaaaagcttatcagaatctcttgttactgcattattggggtttattcaaagttgaagacacaaggtttttgctcgaatnnnnnnnnnnnnnnnnnnnnnnnnnnnnnnnnnnnnnnnnnnnnnnnnnnnnnnnnnnnnnnnnnnnnnnnnnnnnnnnnnnnnnnnnnnnnnnnnnnnnnnnnnnnnnnnnnnnnnnnnnnnnnnnnnnnnn

SEQ ID NO: 119055 - DNA, 781 bp, Arabidopsis thaliana
tcactataggcgaatgctggttcgcctgcaggtaccggtccggaattcccgggtcgacccacgcgtccgagcgtaaattacgaaaaacagagagataaatccgggcattgagattttggagatagagagagagaaaaatcgaaatctattgtctatctcctcaatttggattggattttctgcatatcatcgctctagctttcgcgggttttggattcgattccttacccttctccaatcgaagtttttggctttgaattggatttgggtttcgttccaaaatcagctctttttgttaatcagcagatatgcaggaccagctggtgtgtcatggttgtaggaatttattgatgtatcctagaggagcatctaatgtgcgttgtgcgttatgtaacactatcaacatggttcctcctcctcctccacctcacgacatggcacacattatatgtggtggttgtagaacaatgcttatgtatacgcgtggggctagtagcgtaagatgctcttgctgtcaaactacgaaccttgtgccagcgcactccaatcaggttgcccatgctccttccagtcaggttgcgcagatcaattgtgggcatttgtcggacgacccctcatgtattccttacggtgccatcattcggtcgaaatgcccctggttggtcaatttccgtaaccttacggttagtattgagccaatggaaaggggtaccctcttcccaaacttaacccggcccaaatgggaaccagcttggttcccccctttttccttaaactttaa

SEQ ID NO: 119056 - DNA, 399 bp, Arabidopsis thaliana
cggacgcgtgggcggacgcgtgggcggacgcgtgggcggacgcgtgggcggacgcgtgggctcaatttggattggattttctgcatatcatcgctctagctttcgcgggttttggattcgattccttacccttctccaatcgaagtttttggctttgaattggatttgggtttcgttccaaaatcagctctttttgttaatcagatatgcaggaccagctggtgtgtcatggttgtaggaatttattgatgtatcctagaggagcatctaatgtgcgttgtgcgttatgtaacactatcaacatggttcctcctcctcctccacctcacgacatggcacacattatatgtggtgggttgtagaacaatgcttatgtatacgcgtggggctagtagcgta

SEQ ID NO: 119057 - DNA, 876 bp, Arabidopsis thaliana
accgaaactcaatttgtgaaatttgggggtttaaggatgaagggtttagtgtctactggttggaaaggtcctgtcaagttcaggatgcccactgctgaaaacttggtacctattcgattggacattcaattcgaaggtcagcgttacaaagatgctttcacttggaacccttcagacccggataatgaagtcgttatctttgccaaaagaactgttaaagacttgaaacttccctatgcatttgtcactcagattgcccaatctattcagtctcagctctcagactttcgggcttatgaaggacaagacatgtacactggtgaaaaaatcataccaattaagcttgatctccgagttaaccagactctcatcaaggatcagttcttatgggacctaaacaattttgagagtgatcctgaggaatttgcaagaaccttgtgcaaggatttaggtgttgaagaccctgaagttggacctgctgttgcctttgcaataagggaacaactttacgagattgcaattcaaagtgtggcttcagctagggagagtagattaagcaagaaaggccgcagaggatctgatcatggttcagcgagcaaggcaagtggcctgtcaatggacttaatgaagttattcagttttaagtccagtgtagttcggaaaaggaaagacttggatgtttatgaaccagttgtggatctgctaacaagtgaggaagttgatgcgcttgaagccagggaagagagacatgcaaggtgaagagtttcgtttacatgtataaatatttcttagggcaacactcaaaatatgttgtatcatgcttaacttgagttaatgatattaagacaatcttttatgagaaaaaaaaaaaaaaaa

SEQ ID NO: 119058 - DNA, 3369 bp, Arabidopsis thaliana
  unsure (1)..(3369): unsure at all n locations
atgaagggctttgatactaatcttcgtctacaggcttcttctccagaattctccaatggtttcttgcctaaaaggcaaaactttataaaactcaatcgcagaaattgttaccccagatcttctttctctcccaccatgttaaagctcttcacttcctccgcctctcgagtccaccatttgactccggtaagtagggtcgtcgggtcttctccagtggagtctccattgttcaaagcgttgagtcaaatcactgggtggaatcggcgatctacttcgttgggtcatcgtgctttcttctgctctgagcctaccaatggagaggcggcggctgaagctgaaactaaggcggtggagtccgattctgaagtgtctgactccaaatcttcgtctgcgattgtgcccactaaccctaggcctgaagattgtttaacggttctagcattgccggtgccacataggccgctttttcctggtttttacatgccaatctatgtcaaggatcctaaagtactcgcagccttacaagagagcagaagacgacaagctccatatgcaggagctttccttctgaaggatgacccatcagctgattcatcttcaagcactgacgcagaaaaaaacataaatgagctgaaagggaaagagttgcttaaccggcttcacgaagttggcacacttgctcagatttcaagtatccaaggagaccaagttatccttgttggtcacaggcgacttcgcataaaagagatggtgagcgaagaaccacttaccgtcaaagtcgatcatcttaaggataatccgtttgacatggacgatgatgtcgtcaaggcaacatcttttgaagttatttcaactcttagggatgtactgaagacaagttcactatggagagatcacgttcagacatatacccagcatataggtgatttcacttatccacgactagctgattttggagcggcgatatgtggcgcaaataggcatcaagctcaagaatttcttgaagaactggatgttcacaaacgtctgcggttgacgctggaattgatgaaaaaagaaatggaaattagcaagatacaggaaaccatagcaaaagcaattgaagaaaaaattagcggtgagcaacgtcgttacttgctaaatgagcagctcaaggctataaagaaggagcttggtgtggagacagatgacaaatctgcactttctgcaaagtttaaggaaaggattgagcctaacaaggaaaaaattccagcgcatgtattacaagtcatagaagaagagcttacaaagctgcagctgttagaggcgagttcaagcgagtttaacgtgacgcgtaactaccttgattggttgaccatattgccttggggaaattacagtaatgaaaactttgatgttgcacgggcgcaaacaattcttgacgaggatcactatggcttatctgacgtaaaggaaagaatactggaatttattgcagtgggaagacttagaggcacttcacaagggaaaatcatctgcctctccggccctcctggagtaggcaaaactagtattgggcggtctattgcacgtgctcttaatcgcaaatttttccggttctctgttggagggttagcagatgtcgctgagatccaagggcatcgtcggacatatgttggcgccatgccaggaaagatggtgcaatgtctaaagagtgtggggacagcaaatcctcttgttctaatcgatgagattgataagctggggagaggccatgctggtgacccggccagtgctttgttggagcttctggatccagagcaaaacgcaaattttctggaccactatctcgacgttactatagatctatcaaaggttttatttgtgtgcacagcaaatgtgatagacatgattccaaatcctttgctagacagaatggaggtgatttctattgctgggtatatcactgatgaaaaagttcatatcgcaagagactatttggaaaaaactgcacgtggagattgtggtgtcaagcctgaacaggttgaggtgagtgatgcagcgcttctttccttgatagaaaattactgcagagaagcaggtgttaggaatctccagaaacagatcgagaagatttaccgtaagattgcacttaaattagtgcgtgaaggagcagtccccgaagagccttcagttgcaagtgatcctgaagaagctgaaatcgtggctgatgttggcgaatccatagagaatcatactgtcgaagaaaacactgtttcttctgctgaagaaccaaaggaagaggccccaaaccgagaagatagcttattgaaacaggttatgattgatgagtcaaaccttgcggattatgtaggaaaaccggtattccatgcagagaagctctatgagcagacaccggtaggtgttgtgatgggtctagcttggacatcaatgggtggttcaacattgtacatagagacgactgttgtggaggaaggggaaggtaaaggtggcctgaatataacgggtcagctcggtgatgtgatgaaagaaagtgcacaaattgctcacacagtcgccagaaagatcatgctagagaaagaaccagagaatcagttctttgcaaactccaagcttcatctccatgttcctgcaggagccactcccaaggatggtccaagtgcaggctgcaccatgatcacatctttactatcacttgccacgaagaaacccgttaggaaggaccttgcaatgactggagaagtcacactaaccggaagaattcttcctattggtggggtgaaagagaaaactatagcggcgaggcggagtcagattaaaacaataatatttccagaggcaaaccggagagactttgatgagctggcagagaatgtgaaagaagggcttaatgttcacttcgtggatgactatggaaagatcttcgagcttgcctttggctttgccaaacaagaagactgagaacacacataagccncgttgaccttctgtcatctgttgttgtccccatttaaacaacgctaccattcttgattctctttgatctttttcttccttcaagaagaaagttattctgtaactttttttttatgattagggtaatttattggtggttgaattttattattttggnatatagccaaagccaaatatcataataagacatcaggccaaagtaaaaaaaacaaagttgtttctcattttgtgcttgtaatttcatcaacatattcgcgtattactttcactgttgctatgtgttcggtcacacttcataacagactagtaacttgttggcataattttctgttttatattcctttcnnctggattnnnnnnnnnnnnnnnnnnnnnnnnnnnnnnnnnnnnnnn

SEQ ID NO: 119059 - DNA, 548 bp, Arabidopsis thaliana
  unsure (1)..(548): unsure at all n locations
ctccccganaacccnttggagcccttcaatgctgggaagnccccttaccggaggatctccctatggtggggttgagggggaaccctttgccggcgaggcggagccagattaaaaccaataatattccccgaggcaacccggagagactttggatgagctggccagagaatgtgaaagaagggcttaatggtcacctcgtggatgactatggaaagatcttcgagcttgcctttggctatgacaaacaagaagactgagaacacacataagccacgttgaccttttgtcatctggtggtgtctccatttaaacaacactaccattcctgattctccttgatccttttcttccctcaagaagaaaggtattctgtaaccttttttttatgattaggggaatttattggtgggtggattttattattttgggatataacccaagcccaatatccttattaggcctccggaccaaggtaaaaaaaccaaaggtggttttccaaaaaaaaaaaaaaaaggcggccggtttaaaagaatccaggctaacgaagg

SEQ ID NO: 119060 - DNA, 1139 bp, Arabidopsis thaliana
  unsure (1)..(1139): unsure at all n locations
tcgacccacgcgtccggtctagtcttttatattgtagataatatttctatctggacataacaacaatggcagatgcaaacgaagtagtggaatgggccaacaatttaaagtgggataaatatgctggaaataaagaaattgttgatggattggccgctttgagacaaaaaatcacagctttggacggcgctgaaggaggctctggtggcaatcaaagagttaaattagtagttgtcggtgatggtgccgtcggcaaaacatctctgttgatttcattcgctgaaaacaaattccctgaggattacgtccctacagtcttcgaaaactacacttctaaaatcactcgcgacgatggtacacttgttctgttgcatttgtgggatacagccggtcaagaggactacgaccgattgagacctttgagttatcctggcgctgatgtcatcctgctctgtttctccaccgtcactgcctcgtcattcgcctccattaaagaaaagtggtaccccgaagtcaaccactacgtgcccgatgctccttatattttggtcggcaccaagctcgacttgcgtgaggctggtctgcccgatccctccactggtgagtcagatcccgtcacccccgagaaggctgaggagatgcgaaagcaaatcaaagcgttgaagtatattgaagtctctgccaagacacgaaagaacttgcagactctgttttcagaagccgtggacattgtcttggctgaacgacgcgcacacgagcctcccaagcccaccgctgcttcatcgacgaacggcactaacggcactaagactgagcacactcctcgcgaagagcccatccgaaagaagaaggagcgtcgctgcttgttgatgtaagagccctgtgattggtcactctaacatcgactcgagatctgcactattactattttatttgtcgtttttaactttatttaatcaaaaaaccctttcaaccaataagccacgataagagtcgtgcagtcaaatttattttggtagcccttggatctgctatcaagattttcttgtattatcgacttgtaattaataggactgtagcgatatcgtgcttctttatttatttcaatnnnnnnnnnnnnnnnnnnnnnnnnnnnnnnn

SEQ ID NO: 119061 - DNA, 672 bp, Arabidopsis thaliana
  unsure (1)..(672): unsure at all n locations
ggacggggnggaatnncgggtcggaccacccgccganctaatcgtttcctttcttcttattctagccatggctcagaccgttgtcctcaaagttggtatgtcatgccaaggctgcgttggtgccgtcaatagagttttaggcaaaatggaaggggttgagtcatttgacattgatatcaaggagcaaaaggtgacagtgaaaggtaatgttgagcctgaagcagttttccaaacagtttcaaagaccggaaagaagacttcttactggccagtggaggctgaagctgagccaaaagccgaggctgatcctaaggtcgaaaccgtgactgagactaaaaccgaggctgagactaagactgaggctaaggttgatgcaaaagctgatgttgaaccaaaagccgcagaagccgagactaagccatcacaagtttaagtatactaacgatgaaaaggaaggctaatctacctttacaatgcttctttatcttttgcttttgtgtgttgttgtaagaaatgcttcctctaaatacctaatatctttatgtatgtatacctttttcaactattgataacaagatgttggacccatggttggtccgacttttctttttataaaaaaaaggntannttatntntntnngatnttataggggngggccgnttttngngggt

SEQ ID NO: 119062 - DNA, 641 bp, Arabidopsis thaliana
  unsure (1)..(641): unsure at all n locations
acccacgcgtccgcattctctgattcggtccatcgatctcaaaggctcaaagcttaatcgtttcctttcttcttattctagccatggctcagaccgttgtcctcaaagttggtatgtcatgccaaggctgcgttggtgccgtcaatagagttttaggcaaaatggaaggggttgagtcatttgacattgatatcaaggagcaaaaggtgacagtgaaaggtaatgttgagcctgaagcagttttccaaacagtttcaaagaccggaaagaagacttcttactggccagtggaggctgaagctgagccaaaagccgaggctgatcctaaggtcgaaaccgtgactgagactaaaaccgaggctgagactaaggctgaggctaaggttgatgcaaaagctgatgttgaaccaaaagccgcagaagccgggactaagccatcacaagtttaggtttactaacggtgaaaagggaaggttaatcttccttttcaaatcgttcctttaccttttcctttttgtgngttgttgtaaggaatcttcccctcaatccctaatatctttatggatgntacccttttccaaccttttgttaccagttttggccctgttggccccctttttttnggaaaaaaaaaaaaatac

SEQ ID NO: 119063 - DNA, 923 bp, Arabidopsis thaliana
  unsure (1)..(923): unsure at all n locations
cacgatctagcttaaagttctgtaacctaagcgataatcacttagctactccaagtttcttcttaatttctctcacactagtagttctaagctttagaaatggcaacagcatcgttcaacatgcaatcagtcttcgccggtggattaaccactcgcaagatcaacaccaacaagcttttctccgccggtagcttccctaacctcaagaggaattatccggtgggagtgagatgcatggctgagggaggacccacgaatgaagactcttcaccagcaccatctacctcggccgctcagccgttgccgaagtcaccatctcctcctcctcctatgaaacctaaggtgagcacaaagtttagcgacttgctagcgtttagcggtccagcaccagagaggattaacggacgtttagcgatggttggattcgttgcggcgttggctgtcgagctatccaagggtgaaaacgttttagctcagatctccgacggtggcgtctcatggttcctcggtacaacagcgatcttgacacttgcgtcgcttgtgccgcttttcaagggcataagcgttgagtccaagtccaaaggtatcatgacgtcagacgctgagctttggaacggacgtttcgcgatgctcggtttggtcgcgttggcgttcactgagttcgtcaaaggtgggacactcgtctaaggaaaagagagcacgttatggggaggatgttttaatacgattttgcccatgtaatttctctgtaaagtaatctgtgttaggcctactgtgtgttttatacatgtgtactaagtgacattttgaaacttcgggttaaaaacactttaaaattagtggtgttctatnnnnnnnnnnnnnnnnnnnnnnnnnnnnnnnnnnnnnnnnnnnnnnnnnnnnnnnnnnnnnnnnnnnnnnnn

SEQ ID NO: 119064 - DNA, 1819 bp, Arabidopsis thaliana
  unsure (1)..(1819): unsure at all n locations
tatacgactctcttagggaaagctggtacgcctgcaggtaccggtccggaattcccgggtcgacccacgcgtccgcggacgcgtgggcggacgcgcttcttcgtctcttctcatcctcctctcaagctccaatggcgagagttctagtctcgtctccatcttcattcttcggttcaccgttgattaaaccgtcgtcatctctccgtcacagtggagtaggaggaggaggaaccgctcaatttcttccataccggagtaataataacaaactcttcactacttcaaccaccgtacgattcagcttaaacgagattcctcctttccatggcttggattcatctgtagacatcggagcgattttcaccagagctgaatctcttctctatacaatagctgacgccgccgttgttggtgctgattccgtcgtaactactgattcatccgccgtgcagaagagtggtggttggtttggttttatctccgatgctatggaattggttcttaagattttgaaggatggattatcagcggttcatgtaccttatgcttatggatttgcgattatcttgcttacgattatcgtcaaagcagcgacgtatcctttgactaagcaacaggttgaatcaacactagcgatgcaaaatcttcaaccgaaaatcaaagcgattcaacaacgttacgcaggaaatcaggagaggatacaactagagacatcgcgattgtataaacaagctggtgttaatccgttggcaggttgcttaccaactttagcaaccataccagtttggattggtttataccaagctctctctaacgtggccaacgagggattgtttacagaaggtttcttttggattccatctctgggtggaccaacatctatagctgctcggcagagtggatccggcatttcgtggctttttccgtttgtggacgggcatccaccattgggatggtatgacactgtagcttatcttgttctacctgttctacttattgcctcccagtatgtgtcaatggaaattatgaagcctcctcaaactgatgatcctgcacagaagaatacgcttcttgttttcaagtttcttccactcatgatcggttactttgcattgtctgtcccatcaggactatctatttactggctcacaaataatgtacttagtaccgcccaacaagtatatctgcgtaaactaggtggtgcaaagccaaatatggatgaaaacgcaagcaaaataataagtgcgggacgagcaaagagatctattgctcagcctgacgatgctggcgaaagatttagacaattaaaagagcaagagaagcgcagcaagaagaacaaggcggttgcgaaagatacagttgaattggtagaagaatctcagtctgaatcagaagaagggtctgatgatgaggaagaagaggctcgtgaaggagcgttagcttcgagcacaacaagcaagccgcttcctgaggttggccaacgaagaagcaaaagatcgaagcggaaacgcactgtatagaaccaaagcaaacgaaattgcaagtaaggaagagaaaagagagagatttgaatcttgttccttagtttgatcttttgatatatatttgcatacaccatgtccggtaattatctaatattagggcacaaaaaggtcattctaaagttaaaagcagtagttgatcaaagtaaattgtttatgtgattcatcttattataaatgtattaacgtaaatgtgtgtactattatgacttttcaacatgcccgcttcagttttgttagcatttcgttgttgtnnnnnnnnnnnnnnnnnnnnnnnn

SEQ ID NO: 119065 - DNA, 2124 bp, Arabidopsis thaliana
ttttttttctccacggcttaaagactcactcatcactgtgctactactctctcttcttttggctgagagggtaaaagtcatgaagaaactcctctgagttttttttctttctttcttataataaagctcttatctttatctctgtttctctctctttaatgggtggtttaatcgatctgaacgtgatggagacggaggaagacgaaacgcaaacgcaaacaccgtcttcagcttctgggtctgtctctcctacttcgtcttcttcagcttctgtgtctgtggtgtcttcgaattctgctggtggaggggtttgtttggagctgtggcatgcttgtgctggaccccttatctctctaccaaaaagaggaagccttgtgttgtatttccctcagggacatttggaacaagcccccgatttctccgccgcgatttacgggctccctcctcacgtgttctgtcgtattctcgatgttaagcttcacgcagagacgactacagatgaagtttatgctcaagtctctcttcttcctgagtcagaggacattgagaggaaggtgcgtgaaggaattatagatgttgatggtggagaggaagattatgaagtgcttaagaggtctaatactcctcacatgttttgcaaaacccttactgcttctgatacaagcacccatggtggtttctctgttcctcgccgagctgctgaggattgcttccctcctctggactatagccagccccggccttctcaggagcttcttgctagggatcttcatggcctggagtggcgatttcgccacatttatcgagggcaacctaggaggcatttgctcactaccgggtggagtgcgtttgtgaacaagaagaagcttgtctctggtgatgctgtgcttttccttagaggagatgatggcaaactgcgactgggagttagaagagcttctcaaatcgaaggcaccgctgctctctcggctcaatataatcagaatatgaaccacaacaatttctctgaagtagctcatgccatatcgacccatagcgttttcagcatttcctacaaccccaaggcaagctggtcaaacttcataatccctgcaccaaagttcttgaaggttgttgactatcccttttgcattgggatgagatttaaagcgagggttgaatctgaagatgcatctgagagaagatcccctgggattataagtggtatcagcgacttggatccaatcaggtggcctggttcaaaatggagatgccttttggtaaggtgggacgacattgtggcaaatgggcatcaacagcgtgtctcgccatgggagatcgaaccatctggttccatctccaattcaggcagcttcgtaacaactggtcccaagagaagcaggattggcttttcctcaggaaagcctgatatccctgtctctgaggggattcgcgccacagactttgaggaatcattgagattccagagggtcttgcaaggtcaagaaatttttccgggttttatcaacacttgttcggatggtggagccggtgccaggagaggccgcttcaaaggaacagaatttggtgactcttatggtttccataaggtcttgcaaggtcaagaaacagttcccgcctactcaataaccgatcatcggcagcagcacgggttgagccagaggaacatttggtgtgggccgttccagaactttagtacacgtatcctccccccatctgtatcatcatcaccctcttccgtcttgtttaccaactcgaacagtcctaacggacgtctggaagaccatcacggaggttcaggcagatgcaggctgtttggtttcccattaaccgacgaaaccacagcagttgcatctgcgacggctgtcccctgcgttgaagggaattccatgaaaggtgcgtcagctgttcaaagcaatcatcatcattcgcaaggaagggacatctatgcaatgagagacatgttgctagacattgctctctagaagggttctttggtttctgtgttttatttgcttgtggcttaagtaaagttcttattttagttgatgatgacttgctgctaacttttggaatgtcacaagttgtgacttatgagagacttgtagacttggttcaaaaaaa

SEQ ID NO: 119066 - DNA, 1905 bp, Arabidopsis thaliana
  unsure (1)..(1905): unsure at all n locations
agtagnagccagctcttgctcctcctgctttgagtcctgttccaatgcctaggcctaagaggcccagatcaaatatagcaccttcatctcctgactcttcgatgcttaccagagaaggtacaactaaggcaaacatggaccctttaccagcaagcggactttcaagggtcttgcaaggccaagaatactcgaccttgaggacgaaacatactgagagtgtagagtgtgatgctcctgagaattctgttgtctggcaatcttcagcggatgatgataaggttgacgtggtttcgggttctagaagatatggatctgagaactggatgtcctcagccaggcatgaacctacttacacagatttgctctccggctttgggactaacatagatccatcccatggtcagcggatacctttttatgaccattcatcatcaccttctatgcctgcaaagagaatcttgagtgattcagaaggcaagttcgattatcttgctaaccagtggcagatgatacactctggtctctccctgaagttacatgagtctcctaaggtacctgcagcaactgatgcgtctctccaagggcgatgcaatgttaaatacagcgaatatcctgttcttaatggtctatcgactgagaatgctggtggtaactggccaatacgtccacgtgctttgaattattatgaggaagtggtcaatgctcaagcgcaagctcaggctagggagcaagtaacaaaacaacccttcacgatacaagaggagacagcaaagtcaagagaagggaactgcaggctctttggcattcctctgaccaacaacatgaatgggacagactcaaccatgtctcagaaaaacaacttgaatgatgctgcggggcttacacagatagcatcaccaaaggttcaggacctttcagatcagtcaaaagggtcaaaatcaacaaacgatcatcgtgaacagggaagaccattccagactaataatcctcatccgaaggatgctcaaacgaaaaccaactcaagtaggagttgcacaaaggttcacaagcagggaattgcacttggccgttcagtggatctttcaaagttccaaaactatgaggagttagtcgctgagctggacaggctgtttgagttcaatggagagttgatggctcctaagaaagattggttgatagtttacacagatgaagagaatgatatgatgcttgttggtgacgatccttggcaggagttttgttgcatggttcgcaaaatcttcatatacacgaaagaggaagtgaggaagatgaacccggggactttaagctgtaggagcgaggaagaagcagttgttggggaaggatcagatgcaaaggacgccaagtctgcatcaaatccttcattgtccagcgctgggaactcttaaacaaacaaaataaccaacaacccttttgctgcaagccgagcaggatgggggtcgattggtggagactggagagcaaaatgggatgatgggtttaagataagatattaaaaatgcaatttttgaagtattttgttggccacttagataattagcatcttccatcacccttattatctatctaataataattaatagatattataaagtaaaacataaaaaggttacaggtattatatagtagaatatgaaaagctcttttataagtagaatatgatggtgtggagttgtagtcggaggctggtatcggttctttttatggatgtatttttttccttcttccaaagatctcttgaagtctttttattgtttatattaatcccaatgtacataagttttcaaaaaaaaaaaaaaaaggnnnnnnnnnnnnnnnnnnnnnnnnnnnnnnnnnnnnnnnnnnnnnnnnnnnnnnnnnnnnnnnnnnnnnnnnntagaatcg

SEQ ID NO: 119067 - DNA, 522 bp, Arabidopsis thaliana
gctggtacgcctgcaggtaccggtccggtattcccggggggacccacgcgtccgcccacgcgtccgtacggctgcgagaagacgacagaagggtacggctgcgagaagacgacagaagggtacggctgcgagaagacgacagagggaggagacagcaaagtcaagagaagggaactgctcgctctttggcgggcctctgaccaacaacatgaatgggacagactcaaccatgtctcagagaaacaacttgaatgatgctgcggggcttacacagataacatcaccaaagggtcaggacctttcagatcagtcaaaagggtcaaaatcaacaaacgatcatcgtgaacagggaagaccattccagactaataatcctcatccgaaggatgctcaaacgaaaaccaactcaagtaggagttgcacaaagggtcacaagcagggaattgcacttggccgttcaggggatctttcaaaggcccaaaactatgaggagttagccgctgagctggacaggccgtttga

SEQ ID NO: 119068 - DNA, 3604 bp, Arabidopsis thaliana
atttcaattagccctagcaggttttttgtctatgtcactactcttcctaagaagagccaagccgttatttgtatcttgttgttcagctactcattctcgctccagcttcttatctccgacgcttacgaatcagctagttcgttcgtttcacggttccagaacaatgtcggaatcagagaagaagatcctgacagaggaggagcttgagcggaaaaagaagaaggaagagaaggctaaagaaaaggagttgaagaagcaaaaagctttggagaaagagaggctggctgaactgaaggcaaaacaggccaaagatggaactaatgtccctaaaaagagcgcaaagaagagttccaaacgggatgcgtcagaagagaatcctgaggattttgtggaccctgaaactcctcttggagagaggaaaaggctttcttcacagatggccaaacaatacagccctgctaccgtggagaaatcatggtatgcttggtgggagaaatctgacctttttaaggcggatgctaagagttccaagccaccttttgtaattgttcttcctcctccaaatgtgactggagccttgcatattggccatgcgcttacatctgcaattgaggatacaattattcgttggaagagaatgtctgggtataatgctttgtgggtacccggggttgaccatgctggtatagctacacaggtggtggtcgagaaaaagatcatgcgtgatagaggcatgactaggcatgatgttggccgtgaagaattcgtaaaggaagtgtggaagtggaagaaccagtacggcggtacaattctaacacagctacggcgactaggagcttctctcgactggtctcgtgagtgttttacaatggacgagcaaagatcaaaagctgtcactgaggcctttgtacggttatacaaagaagggcttatatatagggatattcggcttgttaattgggattgtattttgagaacagccatatctgatgttgaggttgagtatatcgacattaaagaaaaaacgctactaaaagttcctggctatgagaagccagtagaatttggtcttcttacctcgtttgcttaccctctggaggagcttgggagagtaattgttgccactaccagggtggaaacgatgcttggggatactgctattgctattcatcctgatgatgcaagatacaagcatcttcatgggaaatttgctgtgcacccatttaatgggcggaagttacctattatctgtgatggaatacttgttgatccaaattttggtactggttgtgttaagattactcctgcccatgatcccaatgactgtgaggttggaaagcgccacaagctggaatttataaatatattcacagatgatggaaaaatcaacacaaatggtgggtctgacttcgcagggatgccacgctttgcagctcgtgaggcagttgttgaagctctgcagaagcaggggctgtacagaggtgccaaaaacaatgaaatgaggcttggactttgctcaagaactaatgatgttattgagcctatgataaagcctcaatggtacgttaactgcagcatgattggaaaggaggctcttgatgttgctatcactgatgaaaacaagaaactcgagtttgtaccaaagcagtacacagcagaatggagaagatggctagagaacatacgtgactggtgtatttcaagacagctttggtggggacacagaataccagcatggtatgccactctagaggaggatcagctcaaggaggttggtgcatacagtgaccattgggttgttgctagaactgaggacgatgctcgagaagaggctgctcagaaatttttggggaagaagtttgaactcactcgagatcctgatgtacttgatacatggttttcttctgggctctttccattatctgttctgggatggccagatgtaaccgatgacttcaaagccttctatccaacttctgttcttgaaactggacatgatatcctctttttttgggttgctcgtatggttatgatgggaatgaaactaggtggtgaggttccattcagtaaggtttatttccatcctatgatacgtgatgcacatgggcgtaaaatgtcaaaatctcttggaaatgtcattgatccacttgaagtaataaacggagtaactcttggaggtcttcataagagattagaagagggtaacttggatccaaaagaggtgattgttgccaaagaaggacaagtgaaggactttccaaatggtatccctgaatgtggcactgacgctcttcggtttgcgctcgtctcttacactgctcagtctgataaaattaacttggacattcttcgagttgttggttaccgtcaatggtgtaataaactgtggaacgccgtcagatttgcaatgatgaagcttggcagtggttatactcctccgcagactctaagtcctgaaaccatgcctttcagctgccaatggattctctctgttctaaataaggcaatatcaaaagcagtggtgtcactagatgcatttgagttctcggatgcagccaacacaatatatgcatggtggcaataccaattctgtgatgtgtacattgaagcaattaagccttattttgctggtgacaacccaacgtttgcttcagagagggctcatgcacaacatgctctctggataagtctggagactggtttgagactgcttcacccatttatgccttttgttactgaagagctatggcaacgacttcccgcacccaaagacacagaaagaaaggcttctatcatgatatgtgactacccatctgccatagagaactggtcaaatgagaaagtggagagcgaaatggacaccgttctggcaactgtgaaatgcatgagagcactcagggcagggttgctggagaaacagaaaaacgaaaggttacctgcttttgctctgtgtgaaaacaacgtaacatctgaaattgttaagtctcacgagttggagatcagaacccttgcaaatctatcatccttagaggttgtgtcaaaaggacaacatgcagcaccacctggatcttcagttgagacggtgaacgagaacctcaaagtatatcttgaagtggacggagccattaacacagaagctgaacaagaaaaaatcagaaacaagattggtgaactacaaaaacaaaaagagaagttgcagaagatgatgagtgtgtttacttacgaagagaaggtccctgcgaatataaaagaagacaacgcaaacaagcttgctaagatactccaagaattcgatttctttgagaaggaaagtgctcgtcttgctgcagaaacaagcaattcaggaaatcaataaatggaactgaagaactgagacacagagagtcacagtttctatctgcgaaggccaacaaatgaaatatttcaggttaagaaactatgtctgatgatgttattgtgaactagttttgagttataacactatttttactacatctctgaaaagaagactgttgatattagttttgaagagattattattcccaaacaccatttgttttggtcaacatgaacaacttaattgttctttgtttattgttgcact

SEQ ID NO: 119069 - DNA, 3654 bp, Arabidopsis thaliana
ctaaaaaactcactaattccaaagaaaaaaaaaagcttgtattttttcttgacaaaccagctcacaggcattgcatgatcaaactcatcagatgaattcaaatggccatgaggaggagaagaagttggggaatggagttgtggggattctagctgaaacagttaacaaatgggagagacgaacaccattgacgccatcgcattgcgctcgccttttacacggtgggaaagacagaaccggcatttcccgcattgtggttcagccatctgctaagcgtatccatcatgatgccttgtatgaagatgttgggtgtgaaatttctgatgatttgtctgattgtgggcttatacttggaatcaaacaacctgagctagaaatgattcttccagagagagcatacgctttcttttcacatactcataaggcacagaaagagaacatgcctttgttggataaaattctttctgagagagtgactttgtgtgattatgagctcattgttggggatcatgggaaacgattattggcgtttggtaaatatgcaggcagagctggtcttgttgacttcttacacggacttggacagcgatatctaagtctaggatactcaacacctttcctctcgctcggtgcatcgtatatgtattcctcattggctgctgcaaaagccgctgtaatttctgttggtgaagaaattgcaagccagggactgccattaggaatctgccctcttgtatttgtcttcaccggaacaggaaatgtttctctgggggcgcaagaaattttcaagcttcttcctcacacttttgttgaaccaagcaaacttcctgaactatttgtaaaagacaaaggaattagtcaaaatgggatttcaacaaagcgagtctatcaagtatatggttgtattattaccagccaagacatggttgaacacaaagatccatcaaagtcattcgacaaagccgactattatgcacacccggaacattacaatccagttttccacgaaaagatatcgccatatacgtctgttcttgtaaactgtatgtactgggagaagaggtttccctgtcttctgagcacaaaacagcttcaagatttaacaaaaaaaggactcccactagtaggcatatgtgatataacttgtgacatcggtggctccattgaatttgttaaccgagctactttaatcgattcccctttcttcaggtttaatccctcgaacaattcatactacgatgacatggatggggatggcgtactatgcatggctgttgacattttacccacagaatttgcaaaagaggcatcccagcattttggagatattctttccggatttgtcggtagtttggcttcaatgactgaaatttcagatctaccagcacatctgaagagggcttgcataagctataggggagaattgacatctttgtatgagtatattccacgtatgaggaagtcaaatccagaagaggcacaagataatattatcgccaacggggtttccagccagagaacattcaacatattggtatctctgagcggacacctatttgataagtttctgataaacgaagctcttgatatgatcgaagcggctggtggctcatttcatttggctaaatgtgaactggggcagagcgctgatgctgaatcgtactcagaacttgaagttggtgcggatgataagagagtattggatcaaatcattgattcattaactcggttagctaatccaaatgaagattatatatccccacatagagaagcaaataagatctcactgaagattggtaaagtccagcaagaaaatgagataaaagagaagcctgaaatgacgaaaaaatcaggtgttttgattcttggtgctggacgtgtgtgtcgcccagctgctgatttcctagcttcagttagaaccatttcgtcacagcaatggtacaaaacatatttcggagcagactctgaagagaaaacagatgttcatgtgattgtcgcgtctctgtatcttaaggatgccaaagagacggttgaaggtatttcagatgtagaagcagttcggctagatgtatctgatagtgaaagtctccttaagtatgtttctcaggttgatgttgtcctaagtttattacctgcaagttgtcatgctgttgtagcaaagacatgcattgagctgaagaagcatctcgtcactgctagctatgttgatgatgaaacgtccatgttacatgagaaggctaagagtgctgggataacgattctaggcgaaatgggactggaccctggaatcgatcacatgatggcgatgaaaatgatcaacgatgctcatatcaaaaaagggaaagtgaagtcttttacctcttattgtggagggcttccctctcctgctgcagcaaataatccattagcatataaatttagctggaaccctgctggagcaattcgagctggtcaaaaccccgccaaatacaaaagcaacggcgacataatacatgttgatgggaagaatctctatgattccgcggcaagattccgagtacctaatcttccagcttttgcattggagtgttttccaaatcgtgactccttggtttacggggaacattatggcatcgagagcgaagcaacaacgatatttcgtggaacactcagatatgaagggtttagtatgataatggcaacactttcgaaacttggattctttgacagtgaagcaaatcaagtactctccactggaaagaggattacgtttggtgctcttttaagtaacattctaaataaggatgcagacaatgaatcagagcccctagcgggagaagaagagataagcaagagaattatcaagcttggacattccaaggagactgcagccaaagctgccaaaacaattgtattcttggggttcaacgaagagagggaggttccatcactgtgtaaaagcgtatttgatgcaacttgttacctaatggaagagaaactagcttattccggaaatgaacaggacatggtgcttttgcatcacgaagtagaagtggaattccttgaaagcaaacgtatagagaagcacactgcgactcttttggaattcggggacatcaagaatggacaaacaacaaccgctatggccaagactgttgggatccctgcagccattggagctctgctgttaattgaagacaagatcaagacaagaggagtcttaaggcctctcgaagcagaggtgtatttgccagctttggatatattgcaagcatatggtataaagctgatggagaaggcagaatgatcaaagaactctgtatattgtttctctctataacttggagttggagacaaagctgaagaagacagagacattagaccagcaaaaaaagaagaagaaggaagaagataagcctcgatccttgggtgacgagtatctatatgtttatatgtactatatgttatgttgtacagaagaagtcgtgtccacaaatatcaattgatgtcagatgtctagtaagtgatcatgtgtagcatacaaactggcgtactttaaaaagtggttaaccaaatataattcctaaaaaaaaaaaaaaaaaaaaacaaagggcggccgctctagaggatccaagcttacgtacgcgtgcagttacgctcataaagcttctatag

SEQ ID NO: 119070 - DNA, 3374 bp, Arabidopsis thaliana
atacgactcacttagggaaagacggtacgcctgcaggtaccggtccggaattcccgggtcgacccacgcgtccgaaagaaaaaaaaaaacttgtattttttcttgacaaaccagctcacaggcattgcatgatcaaactcatcagagattatatgtttttacatgaaagatgaattcaaatggccatgaggaggagaagaagttggggaatggagttgtggggattctagctgaaacagttaacaaatgggagagacgaacaccattgacgccatcgcattgcgctcgccttttacacggtgggaaagacagaaccggcatttcccgcattgtggttcagccatctgctaagcgtatccatcatgatgccttgtatgaagatgttgggtgtgaaatttctgatgatttgtctgattgtgggcttatacttggaatcaaacaacctgagctagaaatgattcttccagagagagcatacgctttcttttcacatactcataaggcacagaaagagaacatgcctttgttggataaaattctttctgagagagtgactttgtgtgattatgagctcattgttggggatcatgggaaacgattattggcgtttggtaaatatgcaggcagagctggtcttgttgacttcttacacggacttggacagcgatatctaagtctaggatactcaacacctttcctctcgctcggtgcatcgtatatgtattcctcattggctgctgcaaaagccgctgtaatttctgttggtgaagaaattgcaagccagggactgccattaggaatctgccctcttgtatttgtcttcaccggaacaggaaatgtttctctgggggcgcaagaaattttcaagcttcttcctcacacttttgttgaaccaagcaaacttcctgaactatttgtaaaagacaaaggaattagtcaaaatgggatttcaacaaagcgagtctatcaagtatatggttgtattattaccagccaagacatggttgaacacaaagatccatcaaagtcattcgacaaagccgactattatgcacacccggaacattacaatccagttttccacgaaaagatatcgccatatacgtctgttcttgtaaactgtatgtactgggagaagagttttccctgtcttctgagcacaaaacagcttcaagatttaacaaaaaaaggactcccactagtaggcatatgtgatataacttgtgacatcggtggctccattgaatttgttaaccgagctactttaatcgattcccctttcttcaggtttaatccctcgaacaattcatactacgatgacatggatggggatggcgtactatgcatggctgttgacattttacccacagaatttgcaaaagaggcatcccagcattttggagatattctttccggatttgtcggtagtctggcttcaatgactgaaatttcagatctaccagcacatctgaagagggcttgcataagctataggggagaattgacatctttgtatgagtatattccacgtatgaggaagtcaaatccagaagaggcacaagataatattatcgccaacggggtttccagccagagaacattcaacatattggtatctctgagcggacacctatttgataagtttctgataaacgaagctcttgatatgatcgaagcggctggtggctcatttcatttggctaaatgtgaactggggcagagcgctgatgctgaatcgtactcagaacttgaagttggtgcggatgataagagagtattggatcaaatcattgattcattaactcggttagctaatccaaatgaagattatatatccccacatagagaagcaaataagatctcactgaagattggtaaagtccagcaagaaaatgagataaaagagaagcctgaaatgacgaaaaaatcaggtgttttgattcttggtgctggacgtgtgtgtcgcccagctgctgatttcctagcttcagttagaaccatttcgtcacagcaatggtacaaaacatatttcggagcagactctgaagagaaaacagatgttcatgtgattgtcgcgtctctgtatcttaaggatgccaaagagacggttgaaggtatttcagatgtagaagcagttcggctagatgtatctgatagtgaaagtctccttaagtatgtttctcaggttgatgttgtcctaagtttattacctgcaagttgtcatgctgttgtagcaaagacatgcattgagctgaagaagcatctcgtcactgctagctatgttgatgatgaaacgtccatgttacatgagaacgctaagagtgctgggataacgattctaggcgaaatgggactggaccctggaatcgatcccatgatggcgaagaaaatgatcaacgatgctcctatcacaaaagggaaagtgaagtcttttacctcttattgtggagggcttccctctcgtgctgcagcaaataatccattagcatataaatttagctggaaccctgctggagcaattcgagctggtcaaaaccccgccaaatacaaaagcaacggcgacataatacatgttgatgggaagaatctctatgattccgcggcaagattccgagtacctaatcttccagcttttgcattggagtgttttccaaatcgtgactccttggtttacggggaacattatggcatcgagagcgaagcaacaacgatatttcgtggaacactcagatatgaagggtttagtatgataatggcaacactttcgaaacttggattctttgacagtgaagcaaatcaagtactctccactggaaagaggattacgtttggtgctcttttaagtaacattctaaataaggatgcagacaatgaatcagagcccctagcgggagaagaagagataagcaagagaattatcaagcttggacattccaaggagactgcagccaaagctgccaaaacaattgtattcttggggttcaacgaagagagggaggttccatcactgtgtaaaagcgtatttgatgcaacttgttacctaatggaagagaaactagcttattccggaaatgaacaggacatggtgcttttgcatcacgaagtagaagtggaattccttgaaagcaaacgtatagagaagcacactgcgactcttttggaattcggggacatcaagaatggacaaacaacaaccgctatggccaagactgttgggatccctgcagccattggagctctgctgttaattgaagacaagatcaagacaagaggagtcttaaggcctctcgaagcagaggtgtatttgccagctttggatatattgcaagcatatggtataaagctgatggagaaggcagaatgatcaaagaact

SEQ ID NO: 119071 - DNA, 2138 bp, Arabidopsis thaliana
  unsure (1)..(2138): unsure at all n locations
nnnnnnnnnnnnnnnnnnnnnnnnnnnnnnnnnnnnnnnnnnnnnnnnnnnnnnnnnnnnnnnnnnnnnnnnnnnnnnnnnncagagtttcactctcaacatttcattctctctctctctctcaacaattagatctgtttcgataatcacgaggtttccctcacttcctttccattgctaaaccaggatttgcctcctgcatttggaaatggacgcttctatgattaccaattccaaatccattacttctccaccctctttagccttagggaagtcaggaggaggaggagttatcagaagttcactatgtaacttaatgatgccaagcaaagttaacttccctagacaaagaactcaaactctaaaggttagccagaagaaactcaagagagctactagtggtggtcttggtgttacatgcagtggtggtgataagattctcgtagcgaatcgaggtgaaattgcagttcgtgttatcagaactgctcatgaaatggggattccttgtgttgctgtgtattctactatagataaagatgctcttcatgttaaattagctgatgaagctgtttgtattggtgaagctcctagtaaccagtcgtatttggtgattccgaatgttctgtctgcggctattagccgtggatgtacaatgcttcatcctggatatggtttcctttcggagaatgctctctttgttgaaatgtgtagagaccatgggatcaattttattggacctaatcctgatagcatccgtgttatgggagacaaagcgactgcaagagagacaatgaaaaatgcaggggttcccactgtaccagggagtgatgggctattgcagagtacagaagaagctgtcagggtcgccaatgagattggtttccctgtaatgatcaaggcaacagctggtggtggtggacgtggaatgcgtcttgctaaggaaccgggagagtttgtaaaactgttgcagcaagctaagagcgaggctgctgctgcttttgggaatgatggatgttatctggagaagttcgtacaaaaccctagacatattgagttccaggtgctggcagataaatttggaaatgttgttcactttggtgagcgtgactgcagcatccagaggcgtaaccaaaagcttctggaagaagcaccttctccagcattgaccgctgaattgcgaaaagccatgggtgatgcagcagtcgcagcagcagcatccattgggtacattggtgttggtactgtggagtttcttttagatgagagaggttccttctacttcatggaaatgaacactaggatccaggtggagcatcctgtgacagagatgatttactctgttgatttgatagaggagcagattcgtgttgcaatgggagagaaacttcgctacaaacaggaagatattgtgctcagagggcactcaattgaatgtcgtatcaatgcagaagatccatttaaaggattcagacctggacctggcagaataacatcatacctgccatctggaggtcctttcgttagaatggacagccatgtctattccgactatgttgtgcctccaagctatgattctcttcttgggaagcttattgtgtgggctccaacgagggaaaaagcaattgaacggatgaagcgggcgcttaatgacactatcattacaggggttccaacgactatcaattaccacaaacttatccttgatgttgaggatttcaaaaatggaaaagttgatacagctttcatcgtcaagcatgaagaggagctagctgagcctcaagaaattgtggcagtgaaagatctgacaaacgcaacggtttagaatgatacatcagctctgaaagaccacccaattattgcaatcttcgtctccttttgtgtgttcattggtacaaacttcggtaacgataagactgttttactagagtctgtggttttatcaatgttcttcttgtatcataaacaagaggaaacacttttgtttgtagtctctatgtcaagatttttcaataattttcatatatagtagagattatatggaaaacaaaaacccgaggccgctctagaggatccaagcttacgtacgcgtgcatgcgacgtcaaagtcttctataggtcaccnnnnnnnnntagaatcg

SEQ ID NO: 119072 - DNA, 1404 bp, Arabidopsis thaliana
aaaagctgtctctttagctctgacgttgtttcctgtcgaagtcgcagactcgtcatcacagctcaggcgagtaattctgagtttcttctatctacgcgcaatatctctcaaaggaggcctcttcaaaggtaccacaatcatatcctctcgtttctatctgaagaatcagagagaagagatatatagaggatgcctgtgatctccaaagcttcatctaccaccaccaattcatcgattccttcgtgttctaggattggaggtcagctttgtgtgtggcctggtttgagacaactttgcctcaggaaaagcttattatacggagtaatgtggttattatccatgccactgaaaacattgcgtggagctagaaaaactcttaagattacacacttttgtagcatttccaacatgccctcctcattaaaaatcgaactggtgccctgcagtaaggacaactatgcttatctgttgcacgatgaagacaccggaacagttggagtcgttgatccttctgaggctgcacctgttatagaagcattgagcaggaagaattggaatttaacttacattttgaatactcatcatcatgatgatcacattggggggaatgctgaattgaaagaaaggtatggcgcaaaggtgattggatcagctgtagataaacatcggattcctggaattgacatacttctgaaggatagtgataagtggatgtttgctggccatgaggttcggatacttgacactcctggccatacacaaggccatattagcttctactttcccgggtcagcgacaatattcacaggagacctgatatatagcttatcctgtggtaccctttcagaaggtacccctgagcagatgctttcatcactccaaaagatcgtgtctctaccagacgatacaaatatatactgcggccgtgaaaacacagcaggcaatctcaagtttgctctatccgtagaaccaaagaatgaaactcttcagtcctatgcaactcgagtcgcccatcttcgcagccaggggctcccatcgattccaacgactgtcaaggttgagaaagcgtgtaacccattcctcagaatatcgagcaaagatatccgaaaatctttaagcattccagactcagcaaccgaagctgaagcattgcgtcgtatacagagagccagagatcgtttctgaaaacttgggtatattttcttatttgtatagaaaaatttgcaagtcaatcatcagctgcaaagatcaatattttatatgttttgggctttcttcagttatcatttgaagttgtgtattcaacacaaaaaaatctaaatatttagtttaaactcaattattaaattatgagattttcaagtgtaatgaatgcttcaacatacaaaaaaaaaaaaaaaaaaa

SEQ ID NO: 119073 - DNA, 3555 bp, Arabidopsis thaliana
  unsure (1)..(3555): unsure at all n locations
cggacgcgtgggcggagttagagagagagagaaagatatagagagaacacagagaggcgagagcgacgtagggttggtgtttcgtacggattttctcggtcaatcttagtttctccggcgagagattgcttttcaggaatcatcatggtgagaaagagaagaacggatgctccatctgaaggaggtgaaggctctgggtctcgtgaagctggtccagtctcaggtggtggacgtggttcacagcgaggtggtttccagcagggaggaggacaacaccaaggtggaaggggttatactcctcaacctcaacagggaggtcgtggtggtcgtggatatgggcaaccaccacaacagcaacaacagtatggaggaccacaagagtaccaaggaagaggaagaggaggacctcctcatcaaggaggtcgaggagggtatggcggtggccgtggaggtggaccttcttctggaccaccgcagagacaatcagttcccgagctgcatcaagctacctcacctacttatcaagcggtgtcttctcagcctacactgtctgaggtgagtcctacccaggtaccagaacctactgttctggctcagcaatttgaacaactctctgttgaacaaggagctcccagtcaggcaatccagcctataccgtcttctagcaaggctttcaagtttccaatgaggcctggtaaaggacagagtggaaagcgttgcattgtgaaggctaaccatttctttgctgaactgcctgataaggatttgcaccattatgatgttaccattactccggaagttacatcaaggggtgtcaatcgtgctgtgatgaaacaacttgttgataattatcgtgattctcaccttggaagtcgtcttccagcgtatgatggtcgaaaaagtctttacactgctggtccacttccctttaactccaaggagttcagaatcaatcttcttgacgaagaagtaggggctggaggtcaaagacgagaaagggaatttaaagttgtgatcaagctagttgcacgtgctgatctgcatcacctaggaatgtttttggaggggaaacaatcagatgccccacaggaagctctgcaggttcttgacattgttcttcgtgagctgccgacctctaggtatattccggtgggccggtccttttattcccctgatataggaaaaaaacaatcattgggggatggcttggagagctggcgtggattctaccaaagcattcgtcctacacagatgggcttatcactcaatattgatatgtcatcgacagccttcatagaggcaaaccctgtgattcagtttgtctgtgatttgcttaaccgggatatttcttctcgacctttatctgatgctgatcgtgttaagataaaaaaggctcttagaggtgtcaaagttgaagtgactcatcgaggaaacatgcgccggaagtaccgcatttccggtttgactgctgtggccactcgggaattgacattcccagtagatgaaagaaatactcagaaatctgttgtagaatacttccacgaaacatatggttttcgcattcagcacactcaactaccatgcttgcaagttgggaattctaataggcctaattacttaccaatggaggtatgcaagattgttgaaggccagcggtattccaaaagattgaatgagagacagatcactgctttgctgaaggttacctgtcagcgcccgatagatcgagaaaaagatatcttacagacggtgcaactcaatgattatgctaaagataattatgctcaagagtttggcatcaaaataagtacttctctggcttctgttgaggctcgtatactgcctcctccatggcttaagtaccacgagtctggaagggaagggacttgtctgccacaagttggtcaatggaacatgatgaataagaaaatgatcaatggtggaacggtgaataattggatctgcatcaacttttctaggcaagtgcaggacaatctagcgcgtacattttgtcaggaacttgctcaaatgtgttacgtatctggcatggcatttaatccggaaccagtcctcccaccagtcagtgctcgccctgagcaagtagagaaggtcttgaagactagatatcatgatgccacatcaaaactctcccaaggaaaagaaattgatctgcttattgtcattctgcccgataataatggatcattatacggtgatttgaaacgcatatgtgagactgaactcggcatagtctctcaatgttgcctgacaaagcatgtctttaagatgagcaaacaatacatggctaatgttgcgctgaagattaatgtgaaggttggaggaagaaacacagtgcttgttgatgctctatctaggcggattcctctagtcagtgatcgacccaccattatatttggtgctgatgttacccaccctcaccctggagaggattcaagcccatctattgctgctgttgtggcatctcaggattggcctgaaatcactaaatatgctggattagtttgcgctcaagcgcataggcaggagctcattcaggatctgttcaaagagtggaaggatcctcagaaaggtgtggtgactggtggcatgataaaggagttgctcatagccttccgtagatcaactgggcataaaccactaaggatcatcttctacagggatggagtcagtgagggacaattttaccaagttttgctctatgaacttgatgccatccgcaaggcctgtgcttcgctggaagcaggttatcaaccaccagtgacatttgtggtggtgcagaagcgtcatcacacgaggctgtttgctcagaaccacaatgatcgccattcggtggacagaagtgggaatattttacctggcactgttgtggactctaaaatctgccaccctacagagtttgacttttacctctgtagtcatgctggtattcagggcacttctcgacctgctcattaccacgttctttgggatgagaacaactttactgcagatggacttcaatctctgaccaataacttatgttacacgtatgcaagatgcacacgctcagtttcaattgttccccctgcatattatgcacatctagcagcttttagggctcgattctacatggagccagagacatcagacagtggctcaatggctagtgggagcatggcacgtggaggtggaatggctggtagaagcacacgcgggcctaatgtcaatgctgcagtgaggccactcccagctctgaaagagaatgtgaagcgtgtcatgttctactgctgagttgattcaccctctatctatctttatgacctaaattaatgaagaatatcatgtatgctttctaagacttatcgtgtgtttggatatttcatcactctttctctatgagtatgagatgctttatgactcttgtttgacaactactaaaatttattattcaaaacagactttgatcctttcaaaaaaaaaaagggcggcagctctagaggatccaagcttacgtacgcgtgcatgcgacgtcatnnnnnnnnnnnnnnnnnnnnn

SEQ ID NO: 119074 - DNA, 762 bp, Arabidopsis thaliana
  unsure (1)..(762): unsure at all n locations
gaattcggcacgaggcttctggagatctcttctgggaatcgagcttcactgttaaagattttccttcaatcggctaaaaatgatacatttcgtgttactagtcagtcgacaagggaaagtaaggctcaccaagtggtattcgccgtatacgcagaaggaaagatctaaggtcatacgtgaactcagtggagtgattctgaaccgaggtcccaagctctgcaattttattgaatggagaggatacaaggttgtctacaaaagatatgcaagcttgtacttctgcatgtgcattgatgaggcggataacgagttagaggtactggagataattcatcactacgtcgagattcttgaccgctactttggcagtgtgtgtgaactcgatttgatttttaacttccacaaggcgtattatatactcgacgagctgttgatcgccggagaacttcaagagtcaagcaagaaaacagttgcaaggataatatcagcccaggatcaattggtggaagttgcgaaagaggaggcgagttccataagtaatataattgctcaggctaccaagtagtccttctctgaacttctcttatgcagctgaaacaatcgtaaatgagttaatattttccttcaactctgagatattctcttctgaatcacactttgtttgtcatgccatgtcatgtgattgtttgattgattagaagaaagaagcattcatcgttttgggtttnnnnnnnnnnnnnnnnnnnnnnnnnnnnnnnnnnn

SEQ ID NO: 119075 - DNA, 4878 bp, Arabidopsis thaliana
  unsure (1)..(4878): unsure at all n locations
gagagagctcaaagccatggactttctcggttccacgacgggtagcggtacgttagcaatgttgttctcgttttcggaatctattttgcctctggattctaggtctttccttctgaaacctcttttcctgagatggctttctggtttcttacactcggttttgttgctggtcctgtttttctcatgggttcgtaagaaaattaggggggatagtggtgttacggagagtttgaaagataggagggattttgggtttaagtcagctctgttttgtagtttagctctgtctctgcttaatctcgtgttgatgtcgttgagtggtttctattggtacgagagtggctggttagataatgaacagctagtttcctcccttgggtttcttttgggaatggtttcttggggggttttgtcgatttgtttgcatcgctgcagagattgtgagcataaaaaggctccctttttacttaggctatggttggttttctatctagtggtctcttgctactctcttgtggtagattttgtgatgtacgagagacgtgaaaccgtacctgttcaccttctagtgttcgatatagtcgcttttattgctgctgtgtttctcggttacgtggctgtcctcaagaaagatagaagcaacagcaatggagttttggaagagcctctgttgaacggtggtgattctcgtgttggtggtgatgacagcgttgagttaaataaaaccaatgggagtggtgaggctactccttactcgagagctggcattctcagtcttttgactttctcatggatgagtccattaatagacattggaaacaagaaaacccttgatctagaagatgttccgcagcttcatgatactgacagcgtagtcgggttagctcctaagtttcggagtatgcttgaatcaccagatgggggcgagagaagtggcgttaccacgttcaagcttataaaagccttgtattttacggctcagtgggagattctagtgacagccttctttgctttcatctacacggttgcatcatatgttgggccagcactcattgatactttcgtgcaataccttaatggacgtaggcagtataaccatgaaggatatgtgctagtcattactttctttgctgctaagattgtggagtgcctttcacagagacattggttctttaggctacagaaggttggtattaggatgagatcagccttggttgcgatgatatatgaaaagggtctgaccctttcatgtcagtcaaagcaaggacgcacaagtggggagattataaatttcatgactgtggatgcggagaggattggtaatttcagttggtacatgcatgacccctggatggtcttgttacaagtcggtctagctctgtggatcttgtatagaaatcttggactagcatcaatagcggctttagttgctaccattatagtaatgcttataaattttccattcgggagaatgcaagagaggtttcaggagaagttaatggaagctaaggatagccggatgaaatcaacatctgagatcttaagaaacatgaggattctcaagcttcagggatgggaaatgaagtttctctccaagatttttgatcttcggaaatctgaggaaggatggctgaaaaagtatgtgtataactcggctgttattagttttgttttctggggggctcctactctggtgtcagtctccacttttggtgcttgtatacttcttggaatcccccttgaatcaggaaagatactctctgcacttgcaaccttcaggattctacaagagccgatctacaatcttcccgacactatctccatgattgtgcagactaaagtctctcttgatagacttgcatcctacctttgcctggacaatttgcagcctgacattgtagagaggcttcctaagggaagttcagacgtggcagtagaagtgatcaacagcactttatcttgggatgtctcatcctctaacccgactctcaaagacataaatttcaaggtctttcctgggatgaaggttgcagtttgtggtaccgttggctctgggaaatcgagcttactttcatctttactaggagaagtacccaaggtatctggaagtcttaaggtttgtgggacaaaagcgtatgttgcgcaatctccttggattcagagtggtaaaattgaggataacatcttgtttggcaaacctatggaaagagaacgatatgataaggtgcttgaagcatgttcgttgagtaaggatctggagatactttcattcggtgatcagaccgttattggagaacgcggcattaatttgagtggtgggcaaaagcaaaggatacagattgcacgtgctctctaccaagatgctgatatctatctgttcgatgatccttttagcgctgtggatgcacacacagggtcacatctctttaaggaagttctactggggcttttgtgttccaaatcggttatatatgttactcatcaagttgagttcttacctgctgctgatcttatactggtcatgaaagatgggagaatcagccaagctggaaaatacaatgatatcctcaactctggaactgatttcatggagcttataggtgcgcatcaggaggctcttgcagtagttgattctgttgatgccaattctgtttctgagaaatcagctttaggccaagaaaatgtaattgtgaaagatgctatcgctgttgatgagaaactagaaagtcaggatctgaagaatgataaattagaatctgtggagccccaaagacaaattattcaagaggaagagagggagaaaggtagtgtcgctttggatgtgtactggaaatatatcacactggcatatggaggagctcttgtgcctttcatattgttggggcaagttctctttcagcttctacagattggaagcaactactggatggcttgggctactcctgtttctgaggatgtgcaagctcctgtgaaactttccacgttaatgattgtgtatgtggctttggcctttggaagttccctctgcattcttcttagagccacgcttcttgtcactgctggttacaagactgctactgaactgtttcataaaatgcatcactgcatattccgttctcctatgtctttctttgattccaccccaagtggaagaatcatgagtagagcttctaccgaccaatccgcagtagatttggaactaccgtatcaatttggatcagttgctatcacagtgattcagcttattggaatcattggagtaatgtctcaagtttcttggctggtttttctcgtcttcatccctgtggttgctgcctccatatggtatcagcggtattacatagctgcagcacgagaactttcgcggttagttggagtatgcaaagctcctctaattcagcatttttctgaaacgatttcaggggcgacaaccattaggagtttcagccaagaatttagattccgttctgacaacatgaggctaagtgatgttactctaggcccaaattctatacagctgggagcaatggaatggctttgctttcgccttgatatgttgtcatcacttacattttgtcttttcaattggttttcttggtctccaatacctactggagtgattgatccaagtctcgcgggattagccgtgacttatggactcagtttgaatactctgcaagcttggctgatttggactctctgtaatcttgagaacaaaatcatatcggtagagaggattcttcaatatgcaagtgttcccagtgaaccacctcttgtgatagaatcaaaccgacctgagcaatcatggccttcacgtggtgaagttgaaatccgtgatcttcaggtccgatatgctccacatatgcctcttgtgttgcgaggaataacatgcacattcaaaggaggtttaagaacaggaattgttggaaggacaggaagcgggaaatcgactttgatacaaactcttttccgcattgtagaaccttcagctggagaaatcaggattgatggagtgaatattttgaccattgggttgcatgacttgcgtttaagactaagcatcataccccaagatccaaccatgtttgaaggaacaatgagaagtaacttggaccctcttgaagagtacacagatgatcaaatctgggaggctcttgacaagtgccaactaggagacgaggtgaggaaaaaagagcaaaagctcgattccagtgtgagcgagaatggagacaattggagtatgggtcagagacaactagtgtgtctcgggagagttcttctcaagagaagcaaaatcttggtgcttgatgaagccactgcttctgttgacactgcaactgacaatctgattcagaaaacgctaagagaacacttctcagactgtacagtgataaccattgcacacaggatatcttcagttattgacagcgacatggttctgcttctaagcaatgggatcattgaggagtatgatacgccagtgagattactggaggataagtcttcctctttttctaagcttgtggctgagtacacctcaagatctagttccagtttcgattgaagcaaagactctgctattttcctgctgatgatgacgatgaagaaaaacttaggatgtctgaatctggtttagccacaacactagctggattatgattcacacaagaagaaacactatcttttgttaaaagcttttgttcttagtttatagcttctactactgttgaacccctaaaaacgattattctacatcgctagtttcaaatcaatgcaataaaagattgttcacttctgaaaaaaaaaaannnnnnnnnnnnnnnnnnnnnnnnnnnnnnnnnnnnnnnnnnnnnnnnnnnnnnnnnnnnnnnnnaacga

SEQ ID NO: 119076 - DNA, 3528 bp, Arabidopsis thaliana
  unsure (1)..(3528): unsure at all n locations
ctttgtcgaaaaccgtaagctttggcgagtttccgggagaatttgacgaatctgttttgcaacgagtgagaattcatggggaaaggatcagaagaccttgtgaagaaggaaagcttaaattctacacctgtaaattcggatacgtttcctgcttgggctaaagatgtcgcggaatgtgaagaacatttcgttgttagtcgtgagaaaggtttgagtagtgatgaggtgttgaagcggcatcagatctatggtttgaatgagttagagaagcctgagggtacttctatttttaagctgattttggagcagtttaatgatacattggttcgtattcttttggcggctgctgttatttcctttgtcttggccttctttgatggcgacgaaggtggtgagatgggtatcactgcatttgttgagccgcttgttatttttctcatcttaattgttaatgccattgttggcatctggcaagaaactaatgctgagaaggcgttggaagctttgaaagagattcagtctcagcaagcaactgtcatgcgtgatgggactaaggtttccagtttgcctgcaaaggagcttgttcctggtgatattgtggaactgagggttggtgataaggtacctgctgatatgcgtgtggttgctttgatcagttcaactttgagagtcgagcaggggtccttaacaggagagagtgaggcagtgagcaaaaccaccaagcacgtggatgagaatgctgatattcaaggaaagaaatgcatggtgtttgcaggaaccactgtcgtgaatgggaactgcatatgtttagttacagatactgggatgaatactgagattggaagggttcactcacagatccaggaagctgcacaacacgaggaagatacccctctgaagaaaaaacttaacgagtttggggaagttctgactatgatcattgggttaatttgtgcgttagtgtggctcatcaatgtcaaatacttcttgtcatgggagtatgttgatggctggcccagaaactttaagttctccttcgagaagtgcacatattactttgagattgctgttgcactggcggttgctgcaattcctgaaggtctgccagcagttattaccacatgtttggctcttggcacacggaagatggctcagaagaatgctctggttaggaagctacccagtgtggagactcttggatgcaccaccgtgatatgctctgacaaaactggaactctcacaaccaatcagatggctgtttctaagctcgttgctatgggttcgaggatcggtactcttcgatctttcaatgttgaggggacctcgtttgatcctcgagatggaaagattgaagattggccaatgggtcggatggatgcaaatcttcagatgattgcaaaaattgctgccatttgcaacgatgctaatgtcgagcaatctgatcagcaatttgtgtctaggggcatgcctactgaggcagctttgaaggttttggttgagaaaatgggatttcccgaaggattgaatgaagcttcgtccgatggcgatgtcttacgttgttgtcggctatggagtgaactagaacaacggattgccacccttgagtttgaccgtgaccggaaatcaatgggagttatggtggattccagctcaggaaacaaactgctactggtcaagggtgcggtagaaaatgtattggaaaggagtacacatattcagctacttgatggttcaaaacgagagcttgaccaatactcaagggatctgattttacaaagcctacgtgatatgtccttgagtgcattaagatgtctcggatttgcttactcagatgttccatcagattttgccacttatgatggcagtgaagaccatcctgctcaccagcaacttctcaacccatccaattattcatcaattgagtccaatctaatattcgttggatttgttggtttaagggatcctccaaggaaagaggtgcgtcaagccattgcagattgcagaacagcaggtattcgggtcatggtcattactggagacaacaagagcacagcggaagcgatctgccgtgaaattggcgtatttgaagcagatgaagatatctcctcaagaagcttgacgggaatagaatttatggatgttcaagatcagaagaatcatctacgacagactggagggctcctgttctcaagggctgaaccaaaacacaaacaagagattgtcaggttactgaaagaagatggagaagtggttgccatgactggagacggagtcaatgatgctcctgctctgaagttggctgatattggtgtggctatgggcatttccggcacagaggtagcaaaggaggcatctgacatggttttggcagatgataatttcagcaccattgttgcagctgtaggtgaaggcaggtccatctataacaacatgaaggccttcatcaggtacatgatctcttccaacatcggcgaggttgcatcgatatttttgacagctgctcttggaatcccagaaggcatgatcccggttcagcttctgtgggtaaatctcgtaacagacggtcctccagctactgctttggggttcaacccccctgacaaagatattatgaaaaagcctcctcgtaggagcgatgactcgcttatcactgcctggatcctcttccgctatatggtgattggtctgtacgtgggagtagcaacggtgggagtattcatcatatggtacacacacagtagcttcatgggcatagacttgagccaagacggtcacagccttgtgagctattcacagctcgcacattggggccaatgctcttcatgggaaggcttcaaagtgtctcctttcacagcaggctctcagactttctcgttcgactcaaacccttgcgactatttccagcaggggaaaatcaaggcgtccacactctccctctcggtgttggtggccattgaaatgttcaactccctgaacgcactctcagaagacggcagcctggtaacgatgccgccgtgggtgaacccgtggttactcctggctatggctgtctcattcgggctccactttgtgatactgtacgtgccattcctggctcaggtatttgggatagtgccactgagcttgaacgagtggctgctggtactggctgtttcgcttccagtgattcttatagacgaagtgctcaagtttgtaggaaggtgtacgagtggctaccgctactcacctcgcactctttccacgaagcaaaaggaggagtaagaaataaatcaaaagcattatattattagactcttagttttagctgaaattagcgttgttacttacctcggcgttggttatttaattttctaaaacgataatttttggtttgataaaaatgttctaacttgcttctcatttggttcacggacaaagagcctgaaatagatgaatgtttcaccaaaaaaaaaaaaaaaaaaagnnnnnnnnnnnnnnnnnnnnnnnnnnnnnnnnnnnnnnnnnnnnnnnnnnnnnnnnnnnnnnnnn

SEQ ID NO: 119077 - DNA, 589 bp, Arabidopsis thaliana
tctactacgactcactattgggaaagctggcacgcctgcaggtaccggtccggaattcccgggtcgacccacgcgtgcggaaatgttcaactctctgaatgcactctcagaagatggcagcctggtgacgatgccaccctgggttaacccgtggctgctcctggcaatggctgtctcatttggactccactttgtgatattgtacgtcccattcttggctcaggtgtttggtattgtgccactgagcttgaacgagtggctgctagtgctggctgtgtcgctgccggtaattttgatagacgaagtgctcaagtttgtaggaaggtgcacgagtggctaccgctactcacctcgcactccctcagctaagcaaaaggaggagtaagaaaataattcaaaaggcattattattagactcttagttttagctgaaattaactttgttgctttactcatccttgctatatttaattctccaaacgataatttttggtttgaaaaagaaaagtttctaactaaaaaaaaaaaaaaaaagggcggccgctctagaggatccaagcttacgtacgcgtgcatgcgacgtcatagt

SEQ ID NO: 119078 - DNA, 1279 bp, Arabidopsis thaliana
  unsure (1)..(1279): unsure at all n locations
gtcgacccacgcgtccgagaagcggaggcgatttttctagggtttttgctcggaatcgatttcacgatgggaacgagcagcgatccgattcaagatggttccgatgagcagcagaagcgatcagaaatctatacatacgaagcgccatggcacatctacgcaatgaattggagcgttcgtcgcgataagaagtatcgtctcgccatcactagcctcctcgagcaatacccgaaccgtgtcgagattgtgcagctcgatgaatccaatggtgagatccgttccgatcctaacctctcctttgagcatccttatccaccaacgaagaccattttcatacctgacaaggaatgccaaagacctgatcttctcgctacttcaagtgatttccttcgtttatggagaatcgctgatgatcattcccgtgttgagctcaaatcttgtctcaatagcaataagaacagtgagttttgtggtcctcttacttcttttgattggaatgaagctgagccacgtcgaattggaacatctagtactgatacgacttgtactatctgggacattgagcgtgaagctgttgatactcagcttattgctcatgataaggaagtttttgatattgcttggggtggtgttggtgtttttgcatctgtttcagctgatggctccgttagggtgtttgatcttcgtgataaggaacattcgacgattatctatgagagctccgagcctgatactcctttagtgcgtcttggttgggacaaacaggatcctaggtacatggctactattatcatggacagtgctaaagttgtggtgcttgacattcgttttccggctcttcctgtggttgagcttcaacgacatcaagctagtgtcaatgccattgcttgggctcctcatagctcttgtcacatttgtactgctggagatgattctcaagctttgatttgggatatttcatccatgggacagcatgttgaaggtggtcttgaccctattctagcttacactgctggtgctgagattgagcagcttcagtggtcctcttctcagcctgattgggtcgcaattgctttctctactaagctgcaaattctcagggtttgatcttttcaaagaatttctcatctcttgtcagattagattttactcattttctatcgtattaggggtctcgttacccttgttactatcctcaagatgtaaagactgttctcaatcgaattaatgaatctgtttgatcttgttgctnnnnnnnnnnnnnnnnnnnnnnnnnnnn

SEQ ID NO: 119079 - DNA, 801 bp, Arabidopsis thaliana
aggcgcctgccgtaccggtccggaattccccgggccgacccacgcgtccggtgattgttcttgcttacgatcctgacacacttcaagatctctgcgttgcggatcgcacttcagggataaaagtgaatggtttcacatgtaaacccgaatcaaacatcaccgcttcagattttttcttcgccggaatcggaaaacccgccgtcgttaacaacacagtcgggtcagccgtcacgggagcaaacgtagagaagatcgcagggcttaacacgctcggagtctcactcgcgcgtatcgactacgctcccggaggtttaaacccgccgcacacgcatccacgcgccaccgaagtgatcttcgttttggaaggcgagcttgacgttggattcataacgacggcgaacaagctcttcgctaagacggtgaagaaaggagaagtgttcgtcttccctagaggattgattcattaccagaaaaacaacgacaaagcgaaaccggcgtcggtgatctctgcgttcaacagtcaattaccgggaacacaatcgatcgccgccacgctattcacagccactccggcgattccggatcacgttttaacgacgacgtttcaaatcggaacgaaagaaatcgaaaaaatcaaatctaagtttgctcccaagaaagtctaaaaatcgcgtcgttatatatatatattttaaattttattaattggtttttaaattttaataaaggaaaaaataaaccttgttcattaaaaaaaaaaaaaaagggcggcccggtcttaaagatccaagcttacgtacg

SEQ ID NO: 119080 - DNA, 643 bp, Arabidopsis thaliana
  unsure (1)..(643): unsure at all n locations
gagcttcaaatctagttacttgttcttctacagtacatcatcaaaagtcaaaaccatggactcgagatgttttggcttcttctttactttgttatctctaaatgtgattgttcttgcttacgatcctgacacacttcaagatctctgcgttgcggatcgcacttcagggataaaagtgaatggtttcacatgtaaacccgaatcaaacatcaccgcttcagattttttcttcgccggaatcggaaaacccgccgtcgttaacaacacagtcgggtcagccgtcacgggagcaaacgtagagaagatcgcagggcttaacacgctcggagtctcactcgcgcgtatcgactacgctcccggaggtttaaacccgccggacacgcatccacgcgccaccggagtgatcttcgttttngaaggcgagcttgacgttggattcataacgacggggacaagctctttcgctaagacggtgaagaaaggagaagttttcggcttcccaagaggnttnttcatttccnggaaaanaaggnaaagggaccggggtgggnatccttgggttaaaagtaatttcggggnaaaattnnttgnggccggtttttanncccccgggggttcgggnnnnttttannngggttttaat

SEQ ID NO: 119081 - DNA, 2795 bp, Arabidopsis thaliana
aaattatttgtcatcattaattttaacgacgagacgcattactctttgcctgactctctttctctctctcccggcgacgacggtttagagtcgccatagatggatcataactcgccgaaatctcgtcggagccggaaaccggagcccaaacctgacatatactccactttcgtagtccactccgactctgattctgatcaaggtcgagatcgagacaaacgtaaagccaaacctgaggaagacgaaaatgtcgatttatacgctacaatggtctacaaaggcgatagtgacggagaaggagaggaagatgatgatgacgattctatgcttcctcctcttctcaagcgtcttcccaaggatttcggaggcggcgcgtcgctcgattacgacgacgacgacggtgatgaatctggagatttcggtacgatgattgtgaaaacagatcggagtagtcatagtaagaagaacagtccgtactcgtccaaaccgcgaatgggagttagtcctaggaggagagcgagaggcggagatgaggaatcttctgatgaagaagacgaagaagaagatgatgatgacgacgacggagactacggtacgtttgttgtgaaatctaaggataaaaagggaaagaagaaagacaaggagattgatatgacaactatgggaagagctgttgcgagtatgcagaaatcaaattttggtggtaagactcggaaattggatccttcctcttcttcttcgaaacttcacggtgaagataatcggaaaatgcagcagcaaaacagtaagatgtcgactacgtctcttccggatagcattactagagaagatccaaccaccaaatacgaattcctcaatgaacttgggaaaggatcatatggatctgtatacaaggcaagagatttgaaaacatcagagattgttgctgtgaaagtcatatcacttactgaaggggaggaggggtatgaagagatccggggagaaattgagatgctgcagcaatgtaatcatcctaatgttgtccgctacctagggagttaccaaggagaagattatctttggatagtgatggagtattgtggaggtggaagtgttgctgatcttatgaatgttactgaggaggcgttagaggagtatcagatagcatatatatgtcgggaggcgttgaagggccttgcatacttgcactcaatatataaagtccatagagacattaaaggtggaaatatcttgttaactgaacaaggagaggtcaagttgggtgactttggggttgcagctcaacttactcgcactatgtcgaagcgaaacacgttcattgggactccacattggatggccccagaggttattcaggaaaatcgttatgatgggaaggttgatgtatgggctcttggtgtttcagctattgagatggcagaggggctccctccaagatcatcagttcatccgatgagggttttgttcatgatatccatcgagccagctccaatgctcgaggataaagaaaaatggtccctggtctttcatgattttgttgcaaagtgcctcacaaaggaaccacgtcttcgcccaactgcagctgagatgcttaagcacaaatttgttgagagatgtaaaactggggcttctgcaatgtcgccaaagattgagaagtccagacaaatcagagctacaatggctctgcaagcgcaaagtgttgtcgcaccttctttggaggacacttcaacactgggtccaaaatcaagcgaggagcttggaattactgttccatctaaacctcctcaaaattcgaccgaagcacctctaaccagcaccctgaatcggcagcatattactggcaacactgtgttggctggagaaggtggtgacttcggaactatgatcgttcatggtgaggatgagacagaggagagtgactccaggtctcagcttgtcagagaaaaagaatcttcatcttctcagtttgaaggtgttcctcgcgaattcccaggagaagaattacctgactcatggatacatgacaaaaagaagcctccggctattgatcttccagttgaagcttcgatttcacagagcatgcaggcaagttcatctcatgagcatagaaccaagctacataacatagctggaacacagatggaaggtggcagtgatgcaagtggtagtaccttgaaaaatgaaactgttggcaggaaagcttttgctttgcaagataagttatggtcaatctacgcagctggaaacacagtaccgataccgttcttgagagcaacagatatatccccaatcgcactcttgtcagagaacatgatcggaggcatgcaacaagatgggaatggaactgtagccgtcgaagcacttcaggagctcttcacttcttctgatccccaatccaaaaagggccgacgtggacaaaacgagatgcctcttcctccaagcgtataccaaagactgacaacaagctcttctctgatgaaccttgcacaagttttagcctaccacagagcgtgttacgaggaaatgccgctgcaggaattgcaagcaacgcaggagcagcaaaccattcagaatctgtgcgatactcttcgcactattctccgcctctaaatagtcttgtgttcatatctgttgctactcttgtattagtataggtcgtctcagcaagtacatgtttattttcctagaagtttttattaaaaaccaatcaattttgtctcctcttagcacaattgctagaagattgaatggaacaaacggattttgtaacactcgtataaatagtatccccttag

SEQ ID NO: 119082 - DNA, 387 bp, Arabidopsis thaliana
tctgcaggtccctggtctttcatgattttgttgcaaagtgcctcacaaaggaaccacgtcttcgcccaactgcagctgagatgcttaaggtaactataatagtcttctgcatgtacgccagagatcgttagtatgtgtatctcaatactctcttttttccttcttacttttttcttttcagcttaactgtaactctatcttgtcaatactaggatatcttcagctttagttgtcagaattaccatcactttcatagctggcatgcaatttagtgtttatattctctgtgttcttctaatgccatttactctttcgtactaaattcagcacaaatttgttgagagatgtaaaactggggcttctgcaatgtcgccaaagattgagaag

SEQ ID NO: 119083 - DNA, 659 bp, Arabidopsis thaliana
  unsure (1)..(659): unsure at all n locations
cgagaatacgacagaacggggattcgaagctgcagagaacgcgaaacagtgagagagacagagagaagatatagagatgggtgtggagaagcaagtcatcagacccggcaacggtcccaaacccgctccgggccaaaccgtcaccgtccattgcaccggattcgggaaagatggtgatctatcccagaagttctggagtacaaaggacgagggacaaaaacctttctcgttccaaatcggtaaaggtgctgtgatcaaaggatgggatgaaggcgttatcggaatgcaaattggagaggttgctcgcttgcggtgctcatcggattacgcatatggcgctggtggatttccggcatgggggatccagccaaactctgttctcgactttgaaatcgaagtactgagcgtgcagtaatgatctccccagctcctaaactgtgggtagattattaaacaaccctttatgtttattgcttctgggatctttatgcaacaaaaactttgtgatgtcattgctcttctaaaactcttggacaacgtttttatctaaataaaacaaaagacccgtctcgtgtttccagttggnaatgtttgtacctatattatgatattgttcccgttttttattttnnnnnnnnnnnnnnnnnnnnnnnnnnnnn

SEQ ID NO: 119084 - DNA, 2796 bp, Arabidopsis thaliana
  unsure (1)..(2796): unsure at all n locations
ctaatacgactcactatagggaaagccggtacgcctgcaggtaccggtccggaattcccttgtcgccttctcttagcctaccctttttccttcctcctctccgattcttcctccgtcagtaaaagaaaatcaaaatggcttcacacattgttggatacccacgtatgggccctaagagagagctcaagtttgcattggaatctttctgggatggtaagagcactgctgaggatcttcagaaggtgtctgctgatctcaggtcatccatctggaaacagatgtctgccgctgggactaagttcatccctagcaacacctttgctcactacgaccaggttcttgacaccaccgccatgctcggtgctgttccacctaggtatggatacactggtggtgagatcggccttgatgtttacttctccatggctagaggaaatgcctctgtgcctgccatggaaatgaccaagtggttcgacaccaactaccattacatcgtccctgagttgggccctgaggttaacttctcttacgcatcccacaaggcggtgaatgagtacaaggaggccaaggctcttggtgttgacaccgtccctgtacttgttggcccagtctcttacttgctgctttccaaggctgccaagggtgttgacaagtcattcgaacttctttctcttctccctaagattctcccgatctacaaggaagtgattaccgagcttaaggctgctggtgccacctggattcagcttgacgagcctgtccttgttatggatcttgagggtcagaaactccaggcctttactggtgcctatgctgaacttgaatcaactctttctggtttgaatgttcttgtcgagacctacttcgctgatatccctgctgaggcatacaagaccctaacctcattgaagggtgtgactgcctttggatttgatttggttcgtggcaccaagacccttgatttggtcaaggcaggtttccctgagggaaagtacctctttgctggtgttgttgatggaaggaacatctgggccaacgactttgctgcgtccctaagcaccttgcaggcacttgaaggcattgttggtaaagacaagcttgtggtctcaacctcctgctctcttctccacaccgctgttgatcttatcaatgagactaagcttgatgatgaaatcaagtcatggttggcgtttgctgcccagaaggtcgttgaagtgaacgctttggccaaggctttggctggtcagaaggacgaggctcttttctctgccaatgctgcggctttggcttcaaggagatcttccccaagagtcaccaacgagggtgtccagaaggctgctgctgctttgaagggatctgaccaccgtcgtgcaaccaatgttagtgctaggctagatgctcagcagaagaagctcaatctcccaatcctaccaaccacaaccattggatccttcccacagactgtagagctcaggagagttcgtcgtgagtacaaggccaaaaaggtctcagaggaggactacgttaaagccatcaaggaagagatcaagaaagttgttgacctccaagaggaacttgacatcgatgttcttgtccacggagagccagagagaaacgacatggttgagtactttggtgagcagttgtctggttttgccttcactgcaaacggatgggtccaatcttatggatctcgctgtgtgaagccaccagttatctatggtgatgtgagccgtcccaaggcaatgaccgtcttctggtccgcaatggctcagagcatgacctctcgcccaatgaagggtatgcttactggtcccgtcaccattctcaactggtcctttgtcaggaacgaccagcccaggcacgaaacctgttaccagatcgctttggccatcaaggacgaagtcgaggatcttgagaaaggtggaatcggtgtcattcagattgatgaggctgcacttagagaaggactaccactcaggaaatccgagcatgctttctacttggactgggccgtccactccttcagaatcaccaactgtggagtccaagacagcacccagatccacactcacatgtgctactcccacttcaatgacatcatacactccatcatcgacatggatgctgatgtcatcaccattgagaactccaggtctgatgagaagcttctttccgtgttccgtgaaggagtgaagtacggtgctggaatcggtccaggagtctacgacatccactctccaagaataccatcttctgaggaaatcgcagacagggtcaacaagatgcttgctgtcctagagcagaacatcctttgggttaaccctgactgtggtctcaagacccgtaagtacaccgaggtcaagcctgcactcaagaacatggttgatgcggctaagctcatccgctcccagctcgccagtgccaagtgaagaaaagcttgatttgaacaaggaaacgtttttttttctctaaaatggttgtgttttatttggtttaataactttcttaaaaatatttttagtcgaaggtagatttgatgcatatggtttctttcttgttgagagagagaaaggctatagcatcctttggatttgatgcaatgtttgtgattttctttttgtctccaatatatttctctgatggaatgtcttttttctaaagtatcttgaaaaggaataagaggattgattcttatacaaaaaaaaaaaaaaaagggcgcccgctctagaggatccaggcttacggacgcgtgcgtgcgacgtcatagtcttctatagtgcacctnnnncattc

SEQ ID NO: 119085 - DNA, 856 bp, Arabidopsis thaliana
  unsure (1)..(856): unsure at all n locations
aaantnaaaacccccccngtnnntgtncnttnccccttgggggnaggccaaaccgcccngnttaaggaanttctttnccgcacaggaaagtaaaccccgggttggaaaaaaaagggaaccagagattacccttccatggaaaaaaaggttaatgacccatccggtggaggcaataccatcccgatctcggtttttcatccgtagacgagaaaccgcgtcccgttttcagaacgagacgggaatgatccgtgtggtaatgcatgagattctctctagtggatgctctcacaggttacaccgcacaggtcactactcttgacggaagaaccttaacagttccggtaaacaatgtgatcagtccgtcgtacgaagaggtggtgaaaggagaaggcatgccgatccctaaagatccgtcaagaaaaggaaacttgagaatcagattcatcatcaagttcccttcgaagctaaccactgagcagaaatcagggatcaagcggatgttatcaccttgaatgtccaaagattgaagcatctcgtttcagttttttcaatctgctagcttttttggaatcttttagaagcagaatatgtgcttatggtttttttaatttattttggttgcattttggtaaggtttttaagggncatcttcctaccagcagaaccggtttagttagtaatgactgccgactagtgaagtaaagtctctccttatatctctatgctaaaagcttcaatatttgtttaatagtaaacattgtccacagatttggaaagactaaatcaacgtttatcacaaaaaaaggattatcccccccnaaggaaggccgctctagaggatccaagcttacgtacg

SEQ ID NO: 119086 - DNA, 642 bp, Arabidopsis thaliana
  unsure (1)..(642): unsure at all n locations
nnnnnnnnnnnnnnnnnnnnnnnnnnnnnnnnnnnnnnnnnnnnnnnnnnnnnnnnnnnnnnnnnnnnnnnnnnnnnnnnnnnccacgcgtccgcccacgcgtcccctaccctttttcccttcctcctctccgattcttcctccgtcagtaaaagaaaatcaaaatggcttcacacaattgttggatacccacgtatgggccctaagagagagctcaagtttgcattggaatctttctgggatggtaagagcactgctgaggatcttcagaaggtgtctgctgatctcaggtcatccatctggaaacagatgtctgccgctgggactaagttcatccctagcaacacctttgctcactacgaccaggttcttgacaccaccgccatgctcggtgctgttccacctaggtatggatacactggtggtgagatcggccttgatggttacttctccatggctaagaggaaatgcctctgtgcctgcccatggaaatgaccaagtgggtcgacaccaaataccattaaacgtcccngaagtnggccctgaggtnaattcnctangganccanaaggggngatggtcangggncaaggcttgggtaaacggcccgaatgttgccacctnatggggtcaaggggnagt

SEQ ID NO: 119087 - DNA, 665 bp, Arabidopsis thaliana
  unsure (1)..(665): unsure at all n locations
aaaaccgggccgacccaagcgtccgttactttaaagccattaatgtaagagattttgtattagacgccgacctccaagaggaacgggacggctatgttcttgtccacggagagccaaanagaaacgacatggttgagtactttggtgagcagttgtctggtttcgccttcactgcaaacggatgggtccaatcctatggatctcgctgtgtgaagccaccagttatctatggtgacgtgagccgccccaagccaatgaccgtcttctggtccgcaacggctcagagcatgacctctcgcccaatgaagggtatgcttactggtcccgtcaccattctcaactggtcctttgtcaggaacgaccagcccaggcacgaaacctgttaccagatcgctttggccatcaaaggtcgaagtcgaggacctcgagataaggcggtatcggtgtcattcagatcggtgaggccgcacttaggagaaggattgcctcttaggaaagccggacaatntttttanttttggactngggctnnttcactttttcaggatttaccaacttttgggncccaangnaagccttncagtttcacaacncaaaaggtntttncttaaattttaanggtttttccccctnaanttttttnaaagggcgggttttntannccc

SEQ ID NO: 119088 - DNA, 898 bp, Arabidopsis thaliana
  unsure (1)..(898): unsure at all n locations
ctcgactcacttagggaaagctcgtacgcctgcaggtaccggtccggaattcccgggtcgacccacaggtccgcccacgcgtccgggaacatctgggccaacgactttgctgcgtccctaagcaccttgcaggcacttgaaggcattgttggtaaagacaagcttagtggtctcaacctcctgctctcttctccacaccgctgttgatcttatcaatgagactaagcttgatgatgaaatcaagtcatggttggcgtttgctgcccagaaggtcgttgaagtgaacgctttggccaaggctttggctggtcagaaggacgaggctcttttctctgccaatgctgcaggtctggcttcaaggaaatcttccccaagagtaaccaacgaagggtgtccagaaggctgttgctgctttgaagggatctgaccaccgtcgtgcaaccaatgttagtgctaggctagatgctcagcagaagaagctcaatccttccaatcctcccaaccacaaccattggatccttcccacagaccgtggaactcaggagagttcgccgtgaatacaaggccaagaaaatctntgaagaggattacgtcaaggccatcaaggaagagatcaagaaagttgttgacatccaagaggaccttgacattnatgttcttgttcacggagagcctgagagaaacgacatggttgagtactttggagagcaattntnaggtttcgcattcacagcaaacgggatgggtgcaatcctatggttctngctgtgtgaagccaccagttatctatgggtgacggtgagcccgccccaaagccaattncaagnctttctggtccttaaacaggtnannggattgcccaanggtccaatnnaggggttttntttaaagggcccgt

SEQ ID NO: 119089 - DNA, 514 bp, Arabidopsis thaliana
accacgcgtccgagaaatgacacagagcccaacgatgatgtatctcgtttattttcgctataaataaactcacacagcccactcttcttcctcgctctctctttcgccttctcttagcctaccctttttccttcctcctctccgattcttcctccgtcagtaaaagaacattcaaaatggcttcacacattgttggataccctacgtatgggccctaagagagagctcatagtttgcattggaatctttctgggatggtaagagcactgctgaggatcttcagaaggtgtctgctgatctcaggtcatccatctggaaacagatgtctgccgctgggactaagttcatccctagcaacacctttgctcactacgaccaggtgcttgacaccaccgccatgctcggtgctgttccacctaggtatggatttacactggtggtgagatcggcctcgatgtttacttctccatggctagaggaaatgcctctgtgcctgccatggagatgaccaagt

SEQ ID NO: 119090 - DNA, 865 bp, Arabidopsis thaliana
  unsure (1)..(865): unsure at all n locations
actacgactcactactgggaaggctgaccngcctgcaggtaccggtccggaattcccgggttacccacgcgtccgagaacattgagtgagtgagagagagagagagagagaagatgggggttgatttctataaggttcttgaagttgatcgaagtgctaatgacgacgagcttaagaaagcttatcgcaaactcgccatgaaatggcatcctgataagaaccctaacaacaaaaaagaagccgaagctaaattcaagcagatctctgaagcttacgatgttttgagtgatcctcagaaacgagcaatctacgagcaatacggagaagaaggtttaaaccaagccccacctcccggcgccggtggtggctatcctggaggatcagacgccggagcttctttccggttcaatcccagaagcgctgatgatatcttctccgagttctttggtttcacgaggccttcttttggtacgggaagcgactcacgcgcaggaccttctggctttaggtatggcgatgatatcttcgcttccttcagggctgctactaccggaggagaagcctccattccttctaggaaatctgctcctattgagagacaattgccttgtagcttggaggatttgtataaaggtgtctccaagaagatgaagatctctcgtgatgttcttgactcttccgggaggccaacaccggttgaggagatcttgacgatagaaattaaacccggttggaaaaaaggaacaaagataaccttcctggaaaaaggtaatgagcatcgtggagtcataccatccgatctcgttttcatcgtagacgagaaaccgcatcccgttttcaaacgagacgggaatgatcttgtggt

SEQ ID NO: 119091 - DNA, 574 bp, Arabidopsis thaliana
gtgaaattcgaagagcgaatcaaagaggaagaagaagaaggaggaggtatagcaatgggggtcgattattacaaggttcttcaggtggatcggaatgcgaaagacgacgacttgaagaaagcttatcgcaaactcgccatgaagtggcatccagacaagaaccctaacaacaaaaaagacgccgaagccaaattcaagcagatctccgaagcttacgatgttttgagtgatcctcaaaagagagccatctatgatcaatatggagaagaaggtctaacaagccaggctccgcctcccggagcaggcggcgggttttcggatggaggggcttcgttccggttcaacggtagaagcgcagatgatatcttctcggagttctttggcttcacaagaccatttggtgactcacgtggtgcaggtccctctaatgggttccggttcgcggaagacgttttctcgtcaaatgttgttccaccgaggaaagctgcccctattgagagacaacttccttgtagtttggaagatctctacaaaggagtcagtaagaagatgaagatctctcgggacgtcctcg

SEQ ID NO: 119092 - DNA, 422 bp, Arabidopsis thaliana
gtttctttgaaggtcaagtgaagatgcactcaagattggaggaagaagaagaagctaaagcagctctaatgagtagaatccaaaagcttacaaagctcatacttgtctctaccaagaattctattcctggatatttaggtgacacaccagctcattctcgcagcatttctgctggtcaagatgataagctagactctctgctcttggatagtgataatctggcatctccatcttcgactctctctctagcatcagatgcgcgacggtcttccagcaagtttaaggatgaaaactctccagttggtctcaacctcctgctctcttctccacaccgctgttgatcttatcaatgagactaagcttgatgatgaaatcaagtcatggttggcgtttgctgcccagaaggtcgttgaagtgaacgc

SEQ ID NO: 119093 - DNA, 317 bp, Arabidopsis thaliana
gggccccccctcgaggtcgacggtatcgataagcttgatatcgaattcgcggccgcctcgcccaatgaagggtatgcttactggtcccgtcaccattctcaactggtcctttgtcaggaacgaccagcccaggcacgaaacctgttaccagatcgctttggccatcaaggacgaagtcgaggatcttgagaaaggtggaatcggtgtcattcagattgatgaggctgcacttagagaaggactaccactcaggaaatccgagcatgctttctacttggactgggccgtccactccttcagaatcaccaactgtggac

SEQ ID NO: 119094 - DNA, 1537 bp, Arabidopsis thaliana
tacacttccccacgcgtccgacacagcgagacgaagaaaatcgagatctcgaataatgcgaatctgaaggatctttacgaattccataatcttcagatcgaaaggtttctatcgattcgttggtcaagaggagattgtgcgtgtgattcgtgagcatgggctgttcgttttcaggattgaacgcactttacgacgccgtcaacggtggaggtgacgtatggatcaatgagaatcgattcaggatcgtgaggcagctcggcgaaggaggtttcgcattcgtctttttggtcaaggaaattgtcgccgacgcttcctccgccgcatccggtggtggtctagctaagaaagtcaaggatccggctcatctctccgctgacggaacttatgctatgaagaaagttttgattcagaacaaggagcaattggaattggtgcgtgaggagatccgtgtttcttcattgttcaatcaccctaatttgcttccactccttgatcatgccattatttctgttaaggacggccaagagggagcttggaaacacgaggccttcttgctgtttcctgttcacttggatgggaccttgctggataatttcactttgatgaaggctaaaaaagaaactttctcaacaactgatgttttgcacatattccgtcagctttgtgatggacttaaacacatgcactctctggagccaccatatgctcacaacgatgtcaaacctggcaacgtccttttaacacgtagaaaaggacagcctcctcttgcgatattgatggactttggaagtgctcgcccatcacggaagcaaatccgttcccgtcaagaggccttacagttacaggaatggacatctgagcattgctcagcaccgtttcgagctcccgagctctgggattgcccaagccatgctgatattgatgagagaacagatatctggtcactaggctgcacattatatgcaataatgtatggtgtgtctccattcgagtatgcgcttggagaatctggtggaagtcttcagcttgcaatcgtgaacgctcagatcaaatggccaaacactggaccaaaagcttcttaccctgaagctcttcaccagttcgtaacttggatgctgcaaccacaagctgctgttcgaccgcgcatagacgatatcatcatccatgtcgacaaattgatcgctaaattcaccaaatgattcccgaattatgttggttttcaaaaaaaggtgaaaggaaagaaaagaagactctttatacattgctttgtctctttttttttctaatatccttagctgttttcaaaaatcccatattagatacatatatttaatagtattacattgctcttcgtaatgtattttgaactttttaggattcggggttttctttttgactatggaagttgtgaacccataaatttacttaaggcagtatatctcgtaggtgtcctaaatctggtccaaaaaaaaaaaaaaaaaaaaaagggcggccgctctagaggatcccagcttacggacgcgtgcaagcgacgtca

SEQ ID NO: 119095 - DNA, 1180 bp, Arabidopsis thaliana
gagagtctcaaaaattaaaccaacaaatttaaagatgaattgcttgatagctatagctctttcagtctctttctttcttgtgggaattgttggaccgatccaagctcaattgcagatgaatttctatgccaattcttgtcctaatgctgaaaagattgttcaagattttgtttcaaaccacgtttctaatgctccttctcttgctgctgctctcattagaatgcatttccatgactgttttgtccgaggttgtgatggatcagtgcttataaactcaacgtcaggaaacgcagagagagacgcgactcctaacctaacggttcgagggtttggcttcatcgacgcaattaaatctgtgcttgaagctcaatgccctggaattgtctcttgcgctgatattatcgctctagcttctcgcgacgctgtcgttttcaccggaggaccgaattggagtgtaccgaccggaagaagagacgggaggatatcaaacgcagcggaggcattagccaacattcctcctccaaccagtaatatcaccaatcttcagacactctttgcaaaccaaggacttgatcttaaggacctcgttttactatccggggctcacactattggtgtatctcactgctcgtctttcacaaaccgtctctacaattttacgggtcgtggaggccaagatccggctttggacagcgagtacgcagccaatctcaagtctagaaaatgtcctagcctcaacgataacaagaccatcgtagagatggatccagggagccgcaaaacatttgatctaagttattaccagctcgtactcaagcgtagaggtctgtttcaatcagactctgctctcaccactaaccccacaacactttcaaacataaaccggatcttgacgggttcggtggggagtttcttctctgagtttgccaagtcaatggagaaaatgggtcggatcaatgtcaagactggttcagctggagtggttaggaggcaatgttccgttgcaaatagttaaggggtggaaatgtaaaagatttgggagcttgtgggggtagttgtgataataattaataaggatgattgtgaatttatgatgtggccttttgggatttgtgtgtatggattttgttacagacttcgtcaataaagaaataaaaagattttactgcttaaaaaaaaa

SEQ ID NO: 119096 - DNA, 2629 bp, Arabidopsis thaliana
gccaaatttccgattttctcctcactgaatctcggcgcgcccgcgttgattcaaactcattttccgatcaaacggcatatttttccctctcgagagagcgataatgtggaaactgaagatcgcggaaggaggtagtccatggcttagaaccaccaataatcacgtcggaagacagttttgggagttcgatccgaatctcggtactcctgaggatctcgccgccgtcgaagaagctaggaagtctttttcggataatcgattcgtgcagaaacatagcgccgatctgcttatgcgccttcagttttcaagagaaaatttgattagcccagttttacctcaagtcaaaatcgaagacactgatgatgttacagaggagatggtggaaaccacgttaaagaggggtctagatttctattcaactatacaggcacacgacgggcactggccaggtgattatggtggtcctatgtttcttctcccaggactgataattacactctccataactggagcactgaatacagtattgtcggaacaacataaacaagaaatgcgccgttatctctataatcaccagaatgaggacggaggttggggtttacatattgagggccctagcaccatgtttgggtctgtgttgaactatgttactctaaggttgcttggagaaggacctaacgatggagatggagatatggagaaaggacgagactggatactaaatcatggtggtgctaccaatattacatcttgggggaaaatgtggctatcggtacttggagcttttgaatggtccggaaataacccactgccacctgagatatggcttctcccatatttcctgccaatacatccaggaaggatgtggtgccattgtcgaatggtgtacttgccgatgtcgtatttgtatggaaaaaggtttgtgggtcccataacgtccactgttttatcactgagaaaggagcttttcacagtaccatatcatgaagtcaactggaatgaagcacgcaacctttgcgcaaaggaggatttatactacccacatccacttgtgcaagatattctttgggcatcacttcataagattgttgagcctgttctgatgcgatggcctggtgcaaatttgagagaaaaggctataagaaccgcaatagaacatattcattatgaagatgagaatactaggtacatctgcataggtcccgtgaacaaggtattaaatatgctttgctgttgggtagaagacccaaactcagaggctttcaagttgcacctaccaagaatccatgactttctctggttagctgaagatggaatgaagatgcagggttataacggaagccagctatgggatacaggttttgctattcaagcgattttggcaactaacctcgtcgaagaatatgggcccgttttggaaaaagcacattcatttgtcaagaattcccaggtgttagaagactgccctggagatctgaattactggtatcgccacatttctaaaggggcttggcctttctcaactgcagatcacggttggcccatctctgactgcaccgcagaaggactgaaagctgctcttttgctatccaaagttcccaaggagattgttggtgaaccaatagatgcaaaacggttatatgaagctgttaatgttatcatttctttacagaatgcagatggaggcctcgcaacatatgagctcaccaggtcatacccttggttagagctaatcaacccagcagaaacctttggcgatattgttattgattatccttacgtggaatgtacatcagctgctatccaagctttgatatcatttcgaaagctgtatcctggtcatcgaaagaaggaagtagatgagtgcattgagaaggcggttaagttcattgaatccattcaagcagcagatggctcatggtatggatcatgggctgtttgcttcacgtatggtacgtggtttggagtgaaagggctggtagctgttggaaaaacattgaaaaactctccacatgttgctaaagcttgtgaatttctattgtcgaaacaacaaccttcgggcggctggggagaaagctatctttcatgtcaagacaaggtctattcaaaccttgatggcaacagatctcacgtcgtgaatacagcatgggctatgctcgcactcattggtgctgggcaagctgaggtagaccggaaaccactacaccgggctgcaagatacttgattaatgctcaaatggagaatggtgattttccacaacaggaaataatgggagtcttcaataggaactgcatgataacatatgccgcgtatcgaaacatttttccgatatgggctttgggggagtaccgttgtcaggtattattgcaacaaggagaatgaattaagtgttcaaattagttatttctctagggaaggaactgtgtagcttccatgctttactctttccaaagttgtgttatccgtaatggatctgctctgatggttacgtgaaccaatctttgtgtaattgtttcaaactcaaatcttggttgcagattttgttgggttctcttgaataccccattttaggataatgtcttgttttgtgaaaacagacatttttcttgtatttgtttttttaattcc

SEQ ID NO: 119097 - DNA, 1345 bp, Arabidopsis thaliana
  unsure (1)..(1345): unsure at all n locations
acccacgcgtccgaacaaaacaaaaaatgggtttcattggtaagagtgtattagtgagtctcgtagcactttggtgcttcacttcctctgtcttcactgaagaagtgaaccataagactcaaaccccttctctagctcctgctcctgctccttaccaccacggccaccaccacccacaccctcctcatcaccaccaccctcaccctcaccctcacccccacccaccggccaaatctcctgttaaacccccggttaaggcaccagtgtctccaccagccaaacctccggttaagcccccggtttacccacccaccaaagccccggtgaaacccccaactaaacccccggtcaagccacctgtttccccaccagccaaacctccggttaagccaccagtttaccctccaaccaaagctccagttaagcccccaactaaacccccagtcaagccaccagtttaccctccaaccaaagccccggttaagcccccaactaaacccccggtcaagccaccagtttccccaccagccaaacctccagttaagcccccggtttaccctcctaccaaagctccggttaagcctccggtttctcctccgaagaagccacctgttacaccgcgtgtttatccgcctaagttcaaccgtagtctagtcgccgttcggggcacggtttcctgctaaaggctgcaagtacgctgctttcaacacactcttagacactaaacccatcgaagctgctacggtccaattagtgtgtaagagcaagaaccacatgtcagcgtagctactccacacaagatcgtatatcttctcttgttggctcataaccaggtccagcacttcggtttcagaggatgtcgcgttatctgtgtcaaatcaaagagcccccatctcacccaagtctcaaatctcttcggtagagatgtcggcatctatcttaagcctaacaccaatcttgtaaaatccccggtggtcgtcaacaagatggtatacggtctagttaaggatggtcccttggcctttaaaccgtctaaccccaaattaagatgatttgatgctctgcatacaatcttaagtggttcatgtttaaaacgattgagagagagtgttgttattcgtctgctgtacggttcaattttaatacaatgttagctagtctcttaagataaatgcatcggtattatgttgtatctctttaagtggcgtcgtcttattttcgtccgaataaaaataacagctttccattccatttcaaaaaaaaaaaaaaaaaaagnnnnnnnnnnnnnnnnnnnnnnnnnnnnnnnnnnnnnnnnnnnnnnnnnnnnnnnnnnnnnnnnnnnnnn

SEQ ID NO: 119098 - DNA, 417 bp, Arabidopsis thaliana
attctttctttctgatattataaacctccgatttggtttagttcaaaactagaagcagcaaaattctgaacacgtaaagctttgtttcactcagtgtttcccgatcagatccaatggagagaggtggttatcgaggaggtcgtggtgatggccgtggtatgaggtggccgtggttatggcggaggcggaggaggaggagaacaaggtcgtgatcgtggctacggcggcggagaacaaggtcgtggtcgtggtcgtggctcagagcgaggcggcggaaatcgtggtcaaggtcgtggtgaacaacaggattttcgaagccagagtcagcggggacctcccccaggtcacggtggccgtgggacgacgcatgttcaacagcctcgaccacaggtggcttcgcagcctacgcaggctccg

SEQ ID NO: 119099 - DNA, 1740 bp, Arabidopsis thaliana
ctcgatcaatttatccccaaaaaccctaaacactttcccgaataaatccctttataaatagcttcacataaatcaagtgagaaaccccacgcctcaagaaatataagaaataacaaaatggctcgagtctcttctcttctttctttcttcttaacacttttgatccttttccatggctacgcggctcaacagggtcagcagggtcagcagtttccgaacgagtgccagctcgaccagctcaatgcgctcgagccgtcacacgtactgaagagcgaggctggtcgcatcgaggtgtgggaccaccacgctcctcagctccgttgctcaggtgtctcctttgcacgttacatcatcgagtctaagggtctctacttgccctctttctttaacaccgcgaagctctctttcgtggctaagggacgaggtcttatgggaaaagtgatccctggatgcgccgaaacattccaagactcatcagagttccaaccacgcttcgaaggtcaaggtcaaagccagaggttccgtgacatgcaccagaaagtggagcacattaggagcggtgataccattgccacaacacccggtgtagcacagtggttctacaacgacggacaggaaccacttgtcatcgtcagcgtcttcgatctagccagtcaccagaaccagcttgaccgcaacccaaggccattttacttagccggaaacaacccacaaggtcaagtatggctacaaggccgagagcaacagccacagaagaacattttcaatggatttggacccgaggttattgctcaagctttgaagattcgatcttcagacagcgcagcaacttcagaaccaagatgacaaccgtggaaacattgtccgagtccaaggcccgttcggtgtcattaggccgcctttgaggggccagagacctcaggaggaggaagaagaagaagaaggacgacatggacgacacggtaatggcttagaggagaccatctgcagcgccaggtgcaccgataacctcgatgacccgtctcgtgctgacgtgtacaagccacagctcggttacatcagcactctcaacagttacgatctccccatccttcgcttcatccgtctctcagccctccgtggatctatccgtcaaaacgcaatggtgcttccacagtggaacgcaaacgcgaacgccattctttacgtgacagacggggaagcccaaatccagatcgtaaacgacaatggtaacagagtgtttgacggacaagtctctcaaggacagctcatagccgtaccacaaggtttctcggtggtgaaacgcgcaacaagcaaccgattccagtgggttgagttcaaaacaaacgctaacgcgcaaatcaacactctggcgggacgaacctcagtcttgagaggtttaccacttgaagtcataaccaatgggttccaaatctcacccgaagaagcaaggagggtcaagttcaacacgctcgagaccactttgactcacagcagtggcccagctagctacggaaggccaagggtggctgcagcttaagagcttaaaaccgcggcttaacaatgaacctctagtactgtaaaaggaagttaaatagtacgtagtaataataataatgtacgaaaatgtgacaagttttgttgaggtttacctgtaaaatgccactccttttctgaataaaatctttttttccgttcataaaaaaaaaaaaataatatataatattatatatttatttt

SEQ ID NO: 119100 - DNA, 1785 bp, Arabidopsis thaliana
  unsure (1)..(1785): unsure at all n locations
tatttttatttttaaaagaactctttacaacaagtctcctataaatacataaactccataacccacacggcgcgcccccccgccaataaagaggaagaaaaatgggtcgagtctcatctattatctctttctctttgacactcttgatcctcttcaatggctacactgcccaacagtggcccaacgagtgccagctcgatcaactcaatgcgctcgaaccatcccaaatcatcaagagcgagggtggtcgcatcgaggtctgggaccaccatgcaccccagctccgttgctccggctttgcctttgagcgtttcgtcattgagcctcagggtcttttcttgcccactttcttgaacgccggcaaactcacgtttgttgttcacggaaggggtctaatgggaagagttattccgggatgcgccgagacgttcatggagtcaccggtatttggagaaggtcaaggtcagggtcagagtcaagggttccgtgacatgcaccagaaagtagagcacctacggtgcggtgacaccattgcaacaccatctggtgtagctcaatggttctacaacaatggaaatgagcctctcattcttgttgcagccgcggatctcgccagcaaccagaaccagcttgaccgcaaccttagaccatttttgatagccggaaacaacccacaagggcaggaatggctacaaggccgaaagcaacagaagcaaaacaacatcttcaatggcttcgcacctgagatcttggctcaagccttcaagatcaatgtcgagacggctcagcagctccagaaccagcaagataaccgtggcaacatcgtcaaggtcaacggacctttcggcgtcattaggccacccttgagacgcggcgaaggcggccaacaaccacatgaaatagctaatggtttagaggagactttgtgcaccatgcgatgcactgaaaacctcgatgacccgtcggatgctgacgtgtacaagccatcactcggatacattagcacacttaacagctacaatcttcctatcctcagacttctccgccttagcgctcttcgtggctccatccgtaaaaacgctatggtgctaccgcaatggaacgtaaacgcaaacgcggcactctacgtgacaaacggaaaggctcatatacaaatggtgaacgacaacggagaaagagtgttcgaccaagagatctccagcggacagttactagtcgtgccacaaggcttttcggtcatgaaacatgccataggcgaacagttcgagtggatcgaattcaagacaaacgaaaacgcacaggtcaacacactcgcgggccgtacctcagtcatgagaggtttgccgcttgaggttataaccaatgggtaccagatctctcccgaagaagctaaacgagtaaagtttagcacgattgagaccacactgacccatagcagtccaatgagctacggaaggcctagggcttgaggcttgatgagcgcgtggtggaatagcgtttgaatctaaagttcggtttggtacgacttgtaatatgaaataataatgtacaaagaagttctacgcttaagggaactgttttgttttgagctttgtattaggacgtctagtgtacaacaacgaacgtcgtgtataagcgatcgttgactctgcacatgtaactctttcctgaataaaaaatctttaagtctttaaaatctaaaaaaatgtaaaaaatttataattatttaaatttataaataataataatnnnnnnnnnnnnnnnnnnnnnnnnnnnnnnnnnnna

SEQ ID NO: 119101 - DNA, 618 bp, Arabidopsis thaliana
taccgaaccggagggccgggctagacccacgcgttcggatactctcatccttcgcttcatccgtctctcagtcctccgtggatctatccgtcaaaacgcaatggtgcttccacagtggaacgcaaacgcgaacgcggttctctacgtgacagacggggaagcccatgtgcaggtggttaacgacaacggtgacagagtgttcgacggacaagtctctcaaggacagctactttccataccacaaggtttctccgtggtgaaacgcgcaacaagcgaacagttccggtggatcgagttcaagacaaacgcaaacgcacagatcaacacacttgctggacgaacctcggtcttgagaggtttaccattagaggtcatatccaatgggtaccaaatctcactcgaagaagcaagaagggttaagttcaacacgatcgagaccactttgacgcacagcagtggcccagctagctacggaaggccaatgagaaggctgatgcttaagagcttacccagctcagtgaacctctactgtaaaaggaagttaaatagtaataaaaaaaaagagtgataataatgtacgcaaatgtgactggttttgtagaggttttagaatgttta

SEQ ID NO: 119102 - DNA, 597 bp, Arabidopsis thaliana
gtaaacataaatattatgttactataacctagtaaaatatgcatgcctgatgcatgttaatatgtccatttctatatttaaacatgactcttgaaacgtgtgtgtagaacgcaatggtgcttccacagtggaacgcaaacgcgaacgctattctttacgtgacagacggggaagcccaaatccagatcgtaaacgacaatggttacagagtgtttgacggacaagtctctcaaggacaagctcatagccgtaccacaaggtttctcggtggtgaaacgcgcaacaagcaaccgattccagtgggttgagttcaaaacaaacgcttacgcgcaaatcaacactctggcgggacgaacctcagtcttgagaggtttaccacttgtagtcataaccaatggggttccaaatctcacccgaagaagcaaggagggtcaagttcaacacgctcgagaccacactgacccatagcagtccaatgagctacggaaggcctagggcttgaggcttgatgagcgcgtggtggaatagcgtttgaatctaaagtttcgtttggtacgacttgtaatatgaaataataatgtacaaagaagtctacgc

SEQ ID NO: 119103 - DNA, 429 bp, Arabidopsis thaliana
  unsure (1)..(429): unsure at all n locations
tgatccagatgcaaccagctcacatgtccgactcggagccgtcacacgtacttaaggctgaggctggtcgcatcgaggtgtgggaccaccacgctcctcagctacgttgctctggcgtctccttcgtacgttacatcactcgagtctaagggtctctacttgccctctttctttagcaccgcgaagctctccttcgtggctaacggacaaggtcttatggggagagttgttccctggatgcgccgagacattccacgactcattcagtgttccaaccaggcggtggtagccccttcggagagaaggccagggccagggacaacaaggtcagggccaaagccagcagggtcaaagccagggacaacagggccagggccaacagggtcaaagccagggcttncgtgatatgcaccaaaaagtggagcacat

SEQ ID NO: 119104 - DNA, 546 bp, Arabidopsis thaliana
  unsure (1)..(546): unsure at all n locations
aacggancggaaataccgggggggacccacgcgtccgggcgaacagttcaagtggatcgaattcaaaacaaacgaaaacgcacaggtcagcacactcgcgggtcgtgcgtcantcatgaaaggtttgccgcttgaggttataaccaatgggtaccagatctctcccgaagaagctaaacgagtaaaggtttagcaccatggagaccaccctgacccataccagtcccaatgagctacggaaggcctagggcttgaggcttgatgaccgcgtggtggaatagcgtttgaatctaaagttcggtttggtccgccttgtaatatgaaccccctccatgtccaaagaagttctccccttaagggcactgttttgttttgagctttgtattaggacgtctagtgtaccccaccgacacgtcgtgtataagcgatcgttgactctgcacatgaaactctttcctgaataaaaaatctttaagtccttaaaacaaaaaccaaagggcgcccgctctagaggatccaagcctacgtacgcgtgcgtgcgacgtc

SEQ ID NO: 119105 - DNA, 304 bp, Arabidopsis thaliana
ccagctcgaccagctcaatgcgctcgagccgtcacacgtactgaagagcgaggctggtcgcatcgaggtgtgggaccaccacgctcctcagctccgttgctcaggtgtctcctttgcacgttacatcatcgagtctaagggtctctacttgccctctttctttaacaccgcgaagctctctttcgtggctaagggacgaggtcttatgggaaaagtgatccctggatgcgccgaaacattccaagactcatcagagttccaaccacgcttcgaaggtcaaggtcaaagccagaggttccgtgac

SEQ ID NO: 119106 - DNA, 521 bp, Arabidopsis thaliana
  unsure (1)..(521): unsure at all n locations
gaaaacgcaatgatcagcactttggcgggtagaacctatctcttgtgggcattggcctctctggagcctctcgaagggctacactgcccaacagtggccctacgagagccaggtcgaccaactcactgcgctcgaaccatcccaaatcatccagagcgagggtggtcgcaccgtcgtcgcctgggaccaccacgcaccccagctccgttgctccggctttgcctttgagcggctcgtcattgagcctcacgggtcttttcttgcccactttcttgaacgccggcaaactcacgtttgttggttcacggaaggggcctaatgggaaggagttgtttccggcctgcgccgagactgttttggatttacctggttttttagaatgtttaggttattggtcatttgtttagggtttttgtgtttttccacttttaagttatatcttcttattttgtgtgannnnnnnnnnnnnnnnnnnnnnnnnnnnnnnnnnnnnnnnnnnnnnnnnnnnnnnnnnnnnnnnn

SEQ ID NO: 119107 - DNA, 689 bp, Arabidopsis thaliana
  unsure (1)..(689): unsure at all n locations
cgtttccggaatatcccgcgtgccgacccacgacagtccgctttggactcgcaacccaagggctcattttactttaagctcggaaacatacccacatgtgtcaagggtatggctacaaggcgcgagtagcgaacagccacatgaagaacaattttcatnatggatttggactccgagggttatttgcttcaaggcttttgaagattcgatcttcaagacagcgcagcatacttcagaaccaagatgacaaccgtggaaacattgtccgagtccaaggcccgttcggtgtcattaggccgcctttgaggggccagagacctcaggaggaggaagaagaagaagaaggacgacatggacgactctggtaatggcttagaggagaccatctgcagcgccaggtgcaccgataacctcgatgacccgtctcgtgctgacgtgtacaagccacaggtcggttacataagcactattaacagttacgagctgtcgatgcttcgttacaaccgattattaggccttcaagcatccattctttaaaaaacgttggtgcttttacatgttgtatctatatggcaacgttattgtttaatggcttaagtgattaacctaagttattatatcttgaaagctgtttttttctagtgttatgtttcaatactgtttctgtataattcatttgaatgtttttt

SEQ ID NO: 119108 - DNA, 1230 bp, Arabidopsis thaliana
  unsure (1)..(1230): unsure at all n locations
nnnnnnnnnnngccggacctatacgacttacttagggaaagctggtacgcctgcaggtaccggtccggaattcccgggtcgacccacgcgtccgacaaaaccctagttttggtttctctggatctgaagaatctccatgactattctcatagatcgccactctgatcagaacgatgcaggagatgagattgtagagaagaatcaggggaatggtaaagaggaagaaacagagttggtgttagatgcaggtttcgaggctcctcacaccaactcttttggtcgcaccttcagggattatgatgctgagagtgaaaggagaagaggtgttgaggaattttacagagtcaatcacattggccaaaccgttgatttcgtgaggaagatgagagaagaatacgagaagctaaatcgtacggagatgagcatttgggaatgttgcgagcttctgaatgagtttatcgacgagagtgatcctgatttggacgaacctcagatcgagcatctgcttcagacagctgaagccatcagaaaagattaccctgatgaagactggctccatctgaccggtcttatccacgatcttggaaaagttcttcttcactcttcatttggtgagctccctcagtgggctgtcgtcggtgatacatttccagtgggatgtgcttttgatgaaatctattgtcaccacaagtacttcaaggagaatccagactatgataacccgagttacaactctaagtatgggatatacactgaaggctgtggggctcgacatgtgttaatgtcttggggacatgatgattacatgtaccttgttgcgaaggagatcaaactactttacatcagccggtcttttatcatcagatacattcgttctacgctctcacaatcagaagctacaagcatttgtgaccatgagacagaagacatgagagaacatgaagtggcttaaagtgttcaacaagtatgatctctacagcaaaagcaaagtccgcgtaaacgttgaggaagtgaaaccatattatctctcccttaccaacaagtattttccgtccaagctaaaatggtgaaaccctacaagcagaaagctttctaataaaatggattagagaatgcgaccaaaataaaacctttcaacaaaaaaacaaaaaaagggcggccgctctagaggatccaagcttacgtacgcgtgcaggcgacgtcatagatcttnctatagtggtacctaaa

SEQ ID NO: 119109 - DNA, 738 bp, Arabidopsis thaliana
ttgaccacgcgtccgtttgttttgaactttttgaccaaaaacacactcgtgagcttataaaaaaaaatcaacaatgaagattcctctcttggggttacttttactaataagtcttgtcggctctccgacaagggctgaagaaggacctgtttgcccgaagaccgaaactcttagccgtgcaagttttccggagggctttatgtttggtactgcaaccgcagcctttcaggtggaaggtgcagtaaatgaaggttgcagaggtccaagcctgtgggacatctacaccaagaaatttccacatagagttaagaatcacaatgctgacgaggccgtcgatttctaccatcgctacaaggaggatatccagttgatgaaaaagctgaacactgatggttttagactttctatttcgtggccaagaatatttcctcatgggaggatggagaaaggaataagcaaagaaggagttcaattttaccacgatcttattgatgagctccttaaaaatgacataacaccattagtaacggtttttcattgggatactcccgccgatttggaagatgaatacggtggctttttaagcgaacgtattgtgcctgattttgtggagtatgcaaacttcacgctccacgagtatggggacaaagtgaaaaactggattacgttcaacgagccatggctctttagccgctcggtctacgacgttgggaagaaagcaccaggacgttgctctcc

SEQ ID NO: 119110 - DNA, 345 bp, Arabidopsis thaliana
ctttacaatcagtcttgaaattcgaattgaatgaatttacaacctccagctaccttggcatttatcttcaggagaacattggtgagatactgatcgttcagtctggtgggagcaatgcactgagtcacaattccaagatcaacaagattcgtttttttccaagggcctaaaaaatttcagacacatgaaaagttaaacatttacattcaagggggaaaacaggccatattcaagaatgtaaagtgtgatgtgatgtaccataaacatcagagtttttcctttcagcgagtatgcaaagaaggaacagaggcggctttgggagtttggattttatctgctcaaaca

SEQ ID NO: 119111 - DNA, 518 bp, Arabidopsis thaliana
  unsure (1)..(518): unsure at all n locations
atgatacttccnnnnnnnnnnnnnnnnnnnnnnnnnnnnnnnnnnnnnnnnnnnnnnnnnnnnnnnnnnnnnnnnnnnnnncccacgcgtccgcaggtggattcttcttgatgaaagccttaacagaattcaggatcttctcattcttggcttgatcagaccaggaaggtaagagaccgggagtgtcaatcacccgtaccttaattccctgaaccaaaccctcaacatcttgaaccctctttgtccccatctggaatgcatcagtacaaaatttcacttcatcaaatatagaattgatcgttgcacttttaccaaccccactttttccgagaaccataatcgtacaagaaaaatcaagtggatcctgtccagcagcctcaagctgttctgccatggcactggcgcgatcaaaaaaaaaagnnnnnnnnnnnnnnnnnnnnnnnnnnnnnnnnnnnnnnnnnnnnnnnnnnnnnnnnnnnnnnnnnnnnnnnnnnnnnnnnnnnnnnnnnnnnnnnnnn

SEQ ID NO: 119112 - DNA, 451 bp, Arabidopsis thaliana
tgcaatcatatacggaaagagggcaactacagtttgctgataattctgaactagcactcattgaagcaaaattgtcatggattgttcacattgttgccgctattgttaaaataaagcagtgcagtggttgtagtgtggagacgcaagaggtgcttgatgctggactctccgctcgtgttttgcggcttagtaaaatgttatggacaagtggacctgcataggcagagatatgggtgcaaataaggtaaccaaagggctttgatcgtggccattcttacccctttcttccaaaattttcccggaagtcttacgttggtgatcaggccatgcattcatcaaaacagttgtatgccagattgaaagaactccttggactgcatgatcatcttgttctgttgaacgttattgttggcaagattgctacaaacttaaaatgttatacagagagtga

SEQ ID NO: 119113 - DNA, 513 bp, Arabidopsis thaliana
ctttgaggcaatggcgctcgatagttctgttgctctgtcacctcgccggcggcatggcttgttgcgagatcaggttcagcttataaaaagaaaggactctggaagatatgagatagttccaatagaggatccattgtcttttgaaaaaggtttctacgctgttattcgtgcttgtcaattattggctcagaagaacgatgggctcattttggttgggttagctggtccttctggagctggcaaaaccattttcactgagaagattctcaattttatgcctagtattgctatcattaacatggacaactataatgatggtactcgtgttatcgatggaaactttgatgatccaaggttgactgactatgatacacttcttgacaatatacatggtctaagggatggaaaacctgttcaggttccaatatatgacttcaagtcgagttctcgaataggttacagaacgcttgaggtgcctagctctcgcattgttattctagaatgcatatatgc

SEQ ID NO: 119114 - DNA, 829 bp, Arabidopsis thaliana
  unsure (1)..(829): unsure at all n locations
atgattctccnnnnnnnnnnnnnnnnnnnnnnnnnnnnnnnnnnnnnnnnnnnnnnnnnnnnnnnnnnnnnnnnnnnnnnccatcgcgttcgcccacgcgtccgcggacgcgtgggtttaactctttgagttatttatttccagaagcttcatagtttctggaaaatgctaatccactagcggaataaaagacagatctttaatccactttagaaaccgcgttttctgaaaatgcggttgcgttttccgatgaaatctgccgttttagcgtttgctatctttctggtgtttattccactgttttccgtcggtatacggatgattccgggaagactcaccgccgtatccgccaccgtcggaaatggctttgatctggggtcgttcgtggaagctccggagtacagaaacggcaaggagtgcgtgtctcaatcgttgaacagagaaaacttcgtgtcgtcttgcgacgcttcgttagttcatgtagctatgacgcttgactcagagtacttacgtggctcaatcgcagccgttcattccatgctccgccacgcgtcgtgtccagaaaacgtcttcttccatctcatcgctgcagagtttgacccggcgagtccacgcgttctgagtcaactcgtccgatctactttcccgtcgctaaacttcaaagtatacattttccgggaagatacggtgatcaaccttatctcttcttcaatcagacaagctttagagaatccattgaactatgctcggaactacctcggagatattcttgatccaggcgtagacagagtcatttacctagactcggacatcatcgtcgtcgacgaca

SEQ ID NO: 119115 - DNA, 503 bp, Arabidopsis thaliana
agcgtctttttgatgtgtgtatcatgttggcgcctggacctcgcccgccacatatggaataaatgccctacagagattttcgttgctctgcaattgttatcatcagctgtatagcctgtattgcaatggatggttaccaaaatgccacttctctccttgttgctatgttgaacaacataatgtgatgtgttctaaaagcatgtgccttgatttcagatttaacatcagggaagcaagttcactccctctgccacaaatttgtatctttcttccacttatgttagtgatggggctagattttggaagcgagtgcatgtgaattccataaagctcgggtttgaatcaaatggtttgatacaaagtgggctgattgatatgtacaggaagtataggttggtgataaatgcagagaaggtgttcagagctatggagggtcagacagttttaactgttggaggctatggtttcgagtattatgcagaatggttttcgcattgaggaca

SEQ ID NO: 119116 - DNA, 621 bp, Arabidopsis thaliana
cggacgcgcgagcgctcgattaagcttgaacttggaggatcaatggccgacgttcgcacacactcgcaccagcttcaagtgcaccctcaacgccagcatgaaggaggcatcaaagtcctttatcctcagagtggcccttcttccactcaggtgctagccgtgtttgtcggtgtaccgataggaggaacgctgctgactatagccggtttgacattagccggttcggttataggactaatgctagcattcccgttgtttctcatctttagtccggttattgtaccagcagcctttgtcatcggtctagctatgactggattcctggcttcaggggccataggtctcaccggactatcatccatgtcgtgggtactcaactacatccgccgggccgggcagcatatcccggaggagcttgaggaagcgaagcatcgtttggctgacatggccgagtatgtgggacagaggactaaagatgctggacaaaccatagaagacaaagctcatgatgtccgagaggccaagacttttgatgtccgagaccgagacaccaccaagggtactcataatgtccgagacaccaagactacataaagcgtgtgttttgagtgaaccatgttg

SEQ ID NO: 119117 - DNA, 728 bp, Arabidopsis thaliana
  unsure (1)..(728): unsure at all n locations
ggtaaagctggtccgcctgcaggtaccggtccggaatttcccgggtcgaccccccaccgcgtcccgtctcaaccatgtgacttacctcatcgagcagaacaaggcacagcttgtggtcattgcacacgatgttgaccctatcgagttggtggtctggttacctgcactctgcaggaaaatggaagtcccttactgcattgttaagggaaaatctcgtcttggagcggtcgttcaccagaagactgctgctgccttgtgcttgaccactgtcaagaacgaggacaagcttgagttcagcaaaatcctcgaggccatcaaggctaacttcaacgacaagtacgaggagtacaggaagaagtggggaggtggcataatgggatccaagtctcaagccaagaccaaagctaaggagagggttattgctaaggaggctgcccagagaatgaactaggcatcataccttatgttctctgctatgaaacatatgataatggttttgttgtttagcgatattttgaaaccttgttttattttaatttctatgctctttcggatgttaccaccctcttcagaattttatgcagttttgttatcaatttcacatataaacttttatttgcaaaataaatccttactttaaaaaaaaaaaaaaagggcggccgctttaaaggattccagcttacggaaggtggcaagggaagtcaaannnnnnnnnnnnnnnnnnnnnn

SEQ ID NO: 119118 - DNA, 1517 bp, Arabidopsis thaliana
  unsure (1)..(1517): unsure at all n locations
atgatactgccnnnnnnnnnnnnnnnnnnnnnnnnnnnnnnnnnnnnnnnnnnncaccgccgtaccgaacgggagggccgggccccgcgcacaagaaaacatacacaaatagcaaaacatggctaacaagctcttcctcgtctgcgcaactctcgccctctgcttcctcctcaccaacgcttccatctaccgcaccgtcgttgagttcgaagaagatgacgccactaaccccataggcccaaaaatgaggaaatgccgcaaggagtttcagaaagaacaacacctaagagcttgccagcaattgatgctccagcaagcaaggcaaggccgtagcgatgagtttgatttcgaagacgacatggagaacccacagggacaacagcaggaacaacagctattccagcagtgctgcaacgagcttcgccaggaagagccagattgtgtttgccccaccttgaaacaagctgccaaggccgttagactccagggacagcaccaaccaatgcaagtcaggaaaatttaccagacagccaagcacttgcccaacgtggcttcaaagaagaagccggagaaagttaccaacccattgtttgagagacgcccaaagcaattcggtattggtggcgctttgcctcctaagaaggatctttctcgttacatcaaatggcctaagtcaatccgtcttcaaaggcagaagcgtatccttaagcagaggttgaaggttcctccagctcttaaccagttcaccaagacccttgataagaatctcgccaccagcctcttcaagattcttctgaagtataggccagaggacaaagccgcaaagaaggaacgccttttgaacaaggctcaagctgaggcagaaggaaagcctgctgaatccaagaagcccattgttgttaagtatggtctcaaccatgtgacttacctcatcgagcagaacaaggcacagcttgtggtcattgcacacgatgttgaccctatcgagttggtggtctggttacctgcactctgcaggaaaatggaagtcccttactgcattgttaagggaaaatctcgtcttggagcggtcgttcaccagaagactgctgctgccttgtgcttgaccactgtcaagaacgaggacaagcttgagttcagcaaaatcctcgaggccatcaaggctaacttcaacgacaagtacgaggagtacaggaagaagtggggaggtggcataatgggatccaagtctcaagccaagaccaaagctaaggagagggttattgctaaggaggctgcccagagaatgaactaggcatcataccttatgttctctgctatgaaacatatgataatggttttgttgtttagcgatattttgaaaccttgttttattttaatttctatgctctttcggatgttaccaccctcttcagaattttatgcagttttggcggccgcgaattaaagcagaccgggggatccactagttttagaacggccgcccccccggtggaggttcaggttttggtaacttt

SEQ ID NO: 119119 - DNA, 813 bp, Arabidopsis thaliana
  unsure (1)..(813): unsure at all n locations
ggaacgcgtgggcgccgacccacgcgtcatcacaaacgagtaagaatacaaatacaaatagcaaaaaaaatggcaaacaagctcttcctcgtctgcgcaactttcgccctctgcttcctcctcaccaacgcttccatctaccgcactgttgtcgagttcgacgaagatgacgccagcaaccccatgggcccaagacagaaatgtcagaaggagtttcagcaatcacagcacctaagagcttgccagaaattgatgcgcatgcaaatgaggcaaggccgtggtggtggtccctccctcgacgatgagttcgatttggaagacgacatcgagaacccacaaggcccccagcagggacaccagatcctccagcagtgctgcagcgagcttcgccaggaagagccagtttgtgtttgccccaccttgagacaagctgccagggccgttagcctccagggacaacacggaccattccaatccaggaaaatttacaagacagctaagtacttgcctaacatttgcaagatccagcaagttggtgaatgccccttccagaccaccatccctttcttccctccttactaatagattccaaacaaaaaccctcgagcgtatgagagtgtggttgttgatacatgttaacaccacacctcatcgtgtcttttatgaaaatgtaagttttggatgtttgaggctaaatgtatttagcacaagtccttaataaataagagttttgtttatgtttcaaaaaaaaaaaaagnnnaagggcggccgctctagaggatccaagcttacgtacgcgtgcattcaaagtcg

SEQ ID NO: 119120 - DNA, 792 bp, Arabidopsis thaliana
  unsure (1)..(792): unsure at all n locations
ggaatccggtcgaccacgcccgccagaaaacatacacaaatagcaaaacatggctaacaagctcttcctcgtctgcgcaactctcgccctctgcttcctcctcaccaacgcttccatctaccgcaccgttgtcgaattcgaagaagatgacgccagcaaccccgtaggtccaagacagagatgccagaaggagtttcagcaatcacaacacctaagagcttgccagagatggatgagcaagcaaatgaggcaaggacgtggtggtggtttccctgacgatgagttcgacagggcccccagcaggaaccagctactccagcagtgctgcaacgagcttcgccaggaagagccagtttgcgtttgccccaccttgaaacaagctgccagggccgttagcctccagggacagcacggaccattccaatcaggaaaatttaccagtcagctaagtacttgcctaacatttgcaagatccagcaagttggtgaatgtcccttcaacatcccttcttccctccttactactagatccaagcccggcctagcacgatgatcatgagtgttgctattgatgtatgttaatactatacacagtcatcgtgtgtgttttataaaactgtaagcttaggatgtttgaggctaatgtaattagcactacaccgtaataaatgagaggtttactttaaaaaaaaaaaaaaataannnnnnnnnnnnnnnnnnnnnnnnnnnnnnnnnnnnnnnnnnnnnnnnnnnnnnnnnnnnnnnnnnnnnnnnnnnnnnnnnnnnnnnnnnn

SEQ ID NO: 119121 - DNA, 1514 bp, Arabidopsis thaliana
  unsure (1)..(1514): unsure at all n locations
ccggacggaaggccggcccgccgacaaaacatacacaaatagcaaaacatggctaacaagctcttcctcgtctgcgcaactctcgccctctgcttcctcctcaccaacgcttccatctaccgcaccgttgtcgaattcgaagaagatgacgccagcaaccccgtaggtccaagacagagatgccagaaggagtttcagcaatcacaacacctaagagcttgccagagatggatgagcaagcaaatgaggcaaggacgtggtggtggtccttccctcgacgatgagttcgatttcgagggcccccagcagggataccagctactccagcagtgctgcaacgagcttcgccaggaagagccagtttgcgtttgccccacgcgtccgtacggctgcgagaagacgacagaaggggatactcttgggctcagccgtcctttcgcagaaaccatttggagttggagctttggacgacgacaatggccccgaagaaaggagtgaaggtagctgctaagaagaagaccgcggagaaagtttcaaaccctctattcgagaggaggcctaagcaattcggtattggtggagctttacctcctaagaaggatctctctcgctacatcaaatggcccaaatccatccgtcttcaaaggcaaaagaggatcctgaagcagaggttgaaggtccctccagctcttaaccaattcaccaagactcttgacaagaatcttgctaccagcctcttcaaggtccttctgaagtacaggccagaagacaaagctgccaagaaggagcgtcttgtaaagaaggcccaagctgaagctgagggaaagccttctgagtctaagaagcccattgtagtcaaatacggcctcaaccatgtgacctacctcattgagcagaacaaggcccaacttgttgttattgctcatgatgtcgacccaattgagttggttgtctggttgcctgctctgtgcaggaagatggaagtcccgtactgcattgtcaagggcaaatctcgtcttggagcggttgttcaccagaagactgcttcttgcttgtgtttgaccactgtcaagaacgaggacaagctagagttcagcaaaatcctggaagctatcaaggccaacttcaatgacaagtacgaggagtacaggaagaaatggggaggaggcataatgggatctaagtctcaggcaaagaccaaggcaaaggaaagagttattgcaaaggaggctgcccaaaggatgaattaagaggctagcttcttttgtttgtggtttgctcggattcgtaaaacttaatagagctttttgtttagctggttcttgaagtacctcttttttagttgaaccctttattatggatgttttgcaatttcttgggacagtttcaatgttattcaagctgctggatcaaaaaaaaaaaaaaaaaaaagggcggccgctctagaggatccaagcttacgtacgcgtgcatgcgacgtcaagatcttctataggtnnnnnnnnnnnnnnnnn

SEQ ID NO: 119122 - DNA, 713 bp, Arabidopsis thaliana
gacgaaatgggctccttcagctgctcccgttgtgctaaaagcccagcacgatccacatgcactttgattcttaacctcagtaaccccccccttctccctccagtcaaaatcttcaggcaatccatcaacctcaaccataggtgcctccgctccaaccgtaccgccacggctgccgccaacatcggctactccagtgtacatccgcttgaactcctcttccgtgaggtcagagaactgtgtgactccgtggacggcggaggggtccatcatctggtgctctgcggccttaaggacgtttttggcaaatattccgaggcggtggatgtactcctccctcgtggagtagttcttgccgtaatcggacatgaaaagccggaatttactctctgtgtgagtcccgagaagattcgggcgaattcgccgattgtcggccgtgacttggcgtatggtgaggtcttctacggaagctacaacgtggcagaataagatgatgcatgttatcagctgtgctaaggctttagccaccatgatcgctgttatcgatgggtcttgtttttgacgcacgcgccctcgagcgtatgagagtgtggttgttgatacatgttaacaccacacctcatcgtgtcttttatgaaaatgtaagttttggatgtttgaggctcaatgtatttagcacaagtccttaataaataagagttttttttttgaaacat

SEQ ID NO: 119123 - DNA, 870 bp, Arabidopsis thaliana
accggggttgaaaaaccgggccgaccacgcggccggaaacagacacacatagcaaaaaagggcaaacaaggtggtgctcgtctgcgcagcactcgctcggcttcctcctcaccaacgctcccatctaccgcaccgccgttgagttcgaagaagatgacgccactaaccccataggcccaaaaatgaggaaatgccgcaaggagtttcagaaagaacaacacctaagagcttgccagcaattgatgctccagcaagcaaggcaaggccgtagcgatgagtttgatttcgaagacgacatggagaacccacagggacaacagcaggaacaacagctattccagcagtgctgcaacgagcttcgccaggaagagccagattgtgtttgccccaccttgaaacaagctgccaaggccgttagactccagggacagcaccaaccaatgcaagtcaggaaaatttaccagacagccaagcacttgcccaacgtttgcgacatcccgcaagttgatgtttgtcccttcaacatcccttcattcccttctttctactaaatctcaaacaaaccctcaaagcgtatgagagtgtggttgttgatatatacatgttgacacttgacacataccacacctcatcgtgtgttttatgataaatgtaagcttttggatgtttgagggtaatgtaagcactacttaataaataagagtttttttttttttttaaaataaacaaatatatactcaaatctacacaaaatagccaaaacaaaatttgtgacaaaatatatgcaataatagatgaaatatccgaaaataggtatacagtaattaatactttttgggtatatatgtaagttgattgtagttcaaactt

SEQ ID NO: 119124 - DNA, 533 bp, Arabidopsis thaliana
  unsure (1)..(533): unsure at all n locations
ccgtccgtactcccggtcgaccacgcgtccggacgcccaaagcaattcggtattggtggcgctttgcctcctaagaaggatctttctcgttacatcaaatggcctaagtcaatccgtcttcaaaggcagaagcgtatccttaagcagaggttgaaggttcctccagctcttaaccagttcaccaagacccttgataagaatctcgccaccagcctcttcaagattcttctgaagtataggccagaggacaaagccgcaaatgaaggaacgcctttttgaacaaggctcaagcctgtggcagaaggaaagcctgctgaatccaagaagcccattgttgttaagtatggtctcaaccatgtnacttacctcatcgagcaggacaagggacagctttgtggtcattgacacggtgttgaccctatcgngnttggnggctgggtacctgactntncagggaaattggaggccctactgnatttttaangggnaatttggntttggggggttgttancnaaggctttttnttcctttg

SEQ ID NO: 119125 - DNA, 414 bp, Arabidopsis thaliana
agaaaacatacacaaatagcaaaacatggctttcttgctcttcctcgtctgcgcaacgctccgccctctgcttcctcctcaccaacgcttccatctaccgcaccggtgtcgaattcgaagaagatgacgccagcaaccccgtaggtccaagacagagatgccagaaggagtttcagcaatcacaacacctaagagcttgccagagatggatgagcaagcaaatgaggcaaggacgcggtggtgggccttccctcgacgatgacgctcgatttcgggggcccccagcagggataccagctactccagcctgtgctgcgacgagcttcgccaggaagagccagcttgccttgtgccccaccttgaaacaagctgccagggcctgttgcccccccgggccagtacggaccatttcaa

SEQ ID NO: 119126 - DNA, 670 bp, Arabidopsis thaliana
  unsure (1)..(670): unsure at all n locations
caagacagctaaatactggcctaacatttgcaagttctttcaagtgggtgaatgccccttgcggagcaccatccctttattccctccttactaatcgattccaaacaaaaaccctcgagcgtatgagagtgtggctgatgatacatgttaacaccacaccttatcgtgtatgaaagtgcactgtcactacatgatgtggcccagatccattgcgtcttcacaggcaacagaatgattctgagcataggttgttggtccctccagctcttaaccagttcaccaagacccttgacaagaatcttgccaccagcctcttcaaggtccttctgaagtacacgccagaggacaaagccgccaatgaacgagcgccttttaaacaaggctcaagctgaggcagaaggaaagcctgctgaatccaagaagcccattgttgttaagtatggtctcaaccatgtaacttacctcatcgagcagaacaaggcacagcttgtggtcattgcacacggtgttgaccctatcgagttggtggtctggttacctgcaattttgcaggnaaatgggagtnccctacttgcaattttttaaaggggaaatttggtntttgngnnggttntttacccaaangcnttttttttccccttnggntttaccccttttaanaanccggggg

SEQ ID NO: 119127 - DNA, 461 bp, Arabidopsis thaliana
ttgcaactttcgtttgtttaggatctgtattagctctttgtttcctcgaatttgagcttctttcgtcaaatctatattggaatctggcttatacttatgtccctgaggattctggctttgtttgatttcgtagtttgtatagtgaatgcatcgatgctatggtgatatgtgactcttgtttctgatgcttatcgccgtttgttgtcgcacgacatcaatggcaccgaagttgggagttttagtggcttcaaagaagaagccggagaaagttaccaacccattgtttgagagacgcccaaagcaattcggtattggtggcgctttgcctcctaagaaggatctttctcgttacatcaaatggcctaagtcaatccgtcttcaaaggcagaagcgtatccttaagcagaggttgaaggttcctccagctcttaaccagttcaccaagacccttgataagaacc

SEQ ID NO: 119128 - DNA, 2054 bp, Arabidopsis thaliana
  unsure (1)..(2054): unsure at all n locations
nnnnnnnnnnnnnnnnnnnnnnnnnnnnnnnnnnnnnnnnnnnnnnnnnnnnnnnnnnnnnnnnnnnnnnnnnnnnnnnnnnnnnnnnnnncggccgccaattatgcatatgcaatgaaaatgaaatttattaatttttcattccattaacttgggaccatatgaaaattttgttcatgaatcatccgcccacgccaccaaaatcctcaaaagcctatttgggggatcatcaaccttctatcatcaccatggatccttacaagtatcgtccttcaagcgcgtacaacgccccattctacaccacaaacggtggtgctccagtctccaacaacatctcttccctcaccatcggagaaagaggtccggttcttcttgaggattatcatttgatcgagaaggttgctaatttcaccagagagaggatccctgagagagtggttcatgctagaggaatcagtgctaagggtttctttgaagtcacccatgacatttcaaacctcacttgtgctgattttctcagagcccctggtgttcaaactccggttattgtccgtttctccaccgttgtccacgaacgtgccagtcctgaaaccatgagggatattcgtggttttgctgtcaagttttacaccagagagggaaactttgatcttgttgggaacaacactccggtgttcttcatccgtgatgggattcagttcccggatgttgtccacgcgttgaaacctaacccgaaaacaaacatccaagagtactggaggattctggactacatgtcccacttgcctgagagtttgctcacatggtgctggatgtttgatgatgttggtattccacaagattacaggcacatggagggtttcggtgtccacacctacactcttattgccaaatctggaaaagttctctttgtgaagttccactggaaaccaacttgtgggatcaagaatctgactgatgaagaggccaaggttgttggaggagccaatcacagccacgccactaaggatctccacgatgccattgcatctggcaactaccccgagtggaaacttttcatccagaccatggatcctgcagatgaggataagtttgactttgacccacttgatgtgaccaagatctggcctgaggatattttgcctctgcaaccggttggtcgcttggttctgaacaggaccattgacaatttcttcaatgaaactgagcagcttgcgttcaacccgggtcttgtggttcctggaatctactactcagacgacaagctgctccagtgtaggatctttgcttatggtgacactcagagacatcgccttggaccgaattatttgcagcttccagtcaatgctcccaaatgtgctcaccacaacaatcaccatgaaggttttatgaacttcatgcacagagatgaggagatcaattactacccctcaaagtttgatcctgtccgctgcgctgagaaagttcccacccctacaaactcctacactggaattcgaacaaagtgcgtcatcaagaaagagaacaacttcaaacaggctggagacaggtacagatcatgggcaccagacaggcaagacaggtttgttaagagatgggtggagattctatcggagccacgtctcacccacgagatccgcggcatctggatctcttactggtctcaggctgatcgatccttgggacagaaacttgcaagccgtctgaacgtgaggccaagcatctagaggccaatctccatataagctcagtctatgtgaggtacaatcaatctcatcgatctatcatcgcttggtcgttaaatccgtcaaaaagataatcacatgtgttgttgtttcttgtctatataataataatgcttgtaatcccaaaaactcatgtttccttcctttctactctcactgtctttgtaatctctttttacaataaatcaatgtttcttgaagcagtaaacaatttctaagaaaaaaaaaaaaaaacggccgctctagaggatccaagcttacgtacgcgtgcatgcgacgtcatgctgttctatagtgtaactgtcctaa

SEQ ID NO: 119129 - DNA, 768 bp, Arabidopsis thaliana
  unsure (1)..(768): unsure at all n locations
agcatctaaaggccaatctccatataagctcagtctatgtgaggtacaatcaatctcatcgatctatcatcgcttggtcgttaaatccgtcaaaaagataatcacatgtgttgttgtttcttgtctatataataataatgcttgtaatcccaaaaactctcgttgccctcaatttccaagcagagatgacggtgaagataaggctcgcgcgtcttggttgtaaacaccgacccttctatcgtgtagttgtcgccgatgaaaaatcgcgcagggacggtaaacaaatcgaggtgttaggcttttatgatccactccaaggcaaagaagatgcggatagagtgagcctcaaattcgacagaatcaagtactggttatctgttggagctcaaccaacagacacagtggaaagcatgcttttcagggccggtttgataccaccaaagcctatggtagtggtcggttcgaaaaatgggcagaagtctacgagccaacatgtttcacccattacaggtgaaatcttgaactaagagtgttgatgcgttgagcaagaaagagccttttgtgtctgtgtgaaaggagtttatgtaatgttgtttaagacttttctgtttatgtgaaaggagttaatgtaatgttgtttaagacttttgctttctatgtgaaagcagtttaatgttatgttggttaagacttttctgcaacggagtttcgtgaatttttattctttaatatgagcatgcctttttacnnnnnnnnnagagtgatttt

SEQ ID NO: 119130 - DNA, 946 bp, Arabidopsis thaliana
gacaataaccggagtttgaacaccaggggctctgagaaaatcagcacaagtgaggtttgaaatgtcatgggtgacttcaaagaaacccttagcactgattcctctagcatgaaccactctctcagggatcctctctctggtgaaattagcaaccttctcgatcaaatgataatcctcaatcgaagatcgcggcccgcaccttctatcatcaccatgcgatccttacaagtattcgtccttcaagcgcgtacaacgccccattctacaccacaaacggtggtgctccagtctccaacaacatctcttccctcaccatcggagaaagaggtccggtccttctcgagcgattgtcatttgatcgagaaggttgctaatttcaccagagagaggatccctgagagagtggttcatgctagaggaatcagtgctaagggtttctttgaagtcacccatgacatttcaaacctcacttgtgctgattttctcagagcccctggtgttcaaactccggttattgtccgtttctccaccgttgtccacgaacgtgccagtcctgaaaccatgagggatattcgtggttttgctgtcaagttttacaccagagagggaaactttgatcttgttgggaacaacactccggtgttcttcatccgtgatgggattcagtttccggatgttgtccacgcgttgaaacctaaccccaaaacaaacattcaagagtactggaggattctggactacatgtcccacttgcctgagagttggtcacatggtgctggatgtttgatgatgttggtattccccaagattacaggcacatgggagggtgttcggtgtcccacaccctacacttcttattggcccaaatctggaaaaaggttcttcttttgggaaagtttccactgggaaacccaacttggggggaatcaagaaatctggactggag

SEQ ID NO: 119131 - DNA, 599 bp, Arabidopsis thaliana
  unsure (1)..(599): unsure at all n locations
ccttncntgttccagctgattcccncctagggncaaanntggncncccggntggccctntaactgngnccccnggttcaggattccgccccaatnctcccttaaagttnnccctgtcccgcgctgagaagttccaccccctncaaactcctncactggaattcgaacaaagtgcgncatcaagaaggggacaacttcaaaccaggctggagacagntacagatcatggccaccagacaggcaagacaggtttgttaagagatgggtggagattctatcggagccacgtctccacccacgagatccgccggcatctggatctcttactggtctcaggctgatcgatccttgggccacaaacttgcaagccgtctgaacgtgaggccaagcatctacaggccaatctccatataagctcagtctatgtgaggcacaatcaatctcatcgatctatcatcgcttggtcgttaaatccgtcaaaaagataatcccatgtgttgttgtttcttgtctatataataacaccgcttgtaatcccaaatactcatgtttccttcctttctcctctcactgaaaaaaaaaaaaaaaaaaaagggcggc

SEQ ID NO: 119132 - DNA, 888 bp, Arabidopsis thaliana
  unsure (1)..(888): unsure at all n locations
tcaaactccggttattgtccgtttctccaccgttgtccacgaacgtgccagtcctgaaaccatgagggatattcgtggttttgctgtcaagttttacaccagagagggaaactttgatcttgttgggaacaacactccggtgttcttcatccgtgatgggattcagttcccggatgttgtccacgcgttgaaacctaacccgaaaacaaacatccaagagtactggaggattctggactacatgtcccacttgcctgagagtttgctcacatggtgctggatgtttgatgatgttggtattccacaagattacaggcacatggagggtttcggtgtccacaactacactcttattgccaaatctggaaaagtcctctgtgtgagggtccactggaaaccaacttgtggggatcaagaatctgacctgatgaaggggccaaggttgtttgggggggccaatcacagccacgccactagggatctccacggtgccattgcatctggcaactcaccccgagtggaaacttttcatccagaccatggatcctgcagatggggataagtccttgcctttgacccacttgatgtgaccaagatctggcctgaggatattttgcctctgcaaccggttggtcgcttggttctgaacangaacattgacaatttcttcaatgaaaactgaancagctttgcgttccaaccccgggttctttgttggttccctggaaatctactaactccaaaagaacaagctgctcccagtgttaggatcttttggctttatgggtgaaccctccnaaaaacatcncccttnggaccgaaattatttngcagcttccccaattccaatggctccccaaatttttctccccccccaaccaatccncc

SEQ ID NO: 119133 - DNA, 553 bp, Arabidopsis thaliana
  unsure (1)..(553): unsure at all n locations
cacacgcgtccgcggacgcgtgggcggacgcgtggggcctatcctatttgggggatcatcaaccttctatcatcaccatggatccttacaagtatcgtccttcaagcgcgtacaacgccccattctacaccacaaacggtggtgctccagtctccaacaacatctcttccctcaccatcggagaaagaggtccggttcttcttgaggattatcatttgatcgagaaggttgctaatttcaccagagagaggatccctgagagagtggttcatgctagaggaatcagtgctaagggtttctttgaagtcacccatgacatttcaaacctcacttgtgctgattttctcagagcccctggtgttcaaactccggttattgtccgttttttccaaccgttgttccacggaacgtggccagtccctgaaaccatggaggggntattcgtgggtcttccctggcaaggttttacccccagggagggggaaacttttgattttttttggggacaaaaacacccgggggttaaccggggggggttaaattcccggntttt

SEQ ID NO: 119134 - DNA, 412 bp, Arabidopsis thaliana
gggtcttgtggttcctggaatctactactcagacgacaagctgctccagtgtaggatctttgcttatggtgacactcagacacatcgccttggaccgaattatttgcagcttccagtcaatgctcccaaatgtgctcaccacaacaatcaccatgaaggttttatgaacttcatgcacagagatgaggaggtacgtcttagtacaccacttgagctaccattgttagtctttttacttgggaatcaaaattctcatttggtttgtactttttacagatcaattactacccctcaaagtttgatcctgcccgctgcgctgagaaagtccccccccctacaaactcctacactggaattcgaacaaaggtccgattcctgccatgccttctctaaatcttcacccacgcgtccg

SEQ ID NO: 119135 - DNA, 653 bp, Arabidopsis thaliana
acgcgtcaatgaatgtgttgtgtcgagtgttcacttcgtcaagagtcttatcatcaaacgttacgttctcgttttctcaaattccaaacaataccaagaaacctctacttgaaaagagaagattatcgccgcgtgtgtgcctaagagcgatggcgtctgagaaacaaaaacaacatgcacaacctggcaaagaacatgtcatggaatcaagcccacaattctctagctcagattaccaaccttccaacaagcttcgtggtaaggtggcgttgataactggtggagactctgggattggtcgagccgtgggatactgttttgcatccgaaggagctactgtggctttcacttacgtgaagggtcaagaagaaaaagatgcacaagagaccctacaaatgttgaaggaggtcaaaacctcggactccaaggaacctatcgccattccaacggatttaggatttgacgaaaactgcaaaagggtcgttgatgaggtcgttaatgcttttggccgcatcgatgttttgatcaataacgcagcagagcagtacgagagcagcacaatcgaagagattgatgagcctaggcttgagcgagtcttccgtacaaacatcttttcttacttctttctcacaaggcatgcgttgaagcatatg

SEQ ID NO: 119136 - DNA, 370 bp, Arabidopsis thaliana
acgaaatctcgctcgctttcgccgccgtgaaatttgattctccgatcactacaacgattccgatctgtcctccgttgatttcgatcctgattttgatattgtttcgacatgaaattggtgtgatctcgtttcgagtttcgtggcgtatttgcttattttaagtgtgtggaatcgatttttaatgggggataattctggtagaagtagaaactctatgatggcaactgtttcttctgggaaagagttgtgacctaagagaagcttagtagctgctattccaagagctgttcagcagacaatctctaagcatgtttcgtttgggagtaatggtagatttggaagtggaaccgcgcgtaatgcagctgtgttt

SEQ ID NO: 119137 - DNA, 855 bp, Arabidopsis thaliana
  unsure (1)..(855): unsure at all n locations
anncncccccgntggcccttaaaacttggggcccccccggntcagaatccnggcccgcaaaaccccagcccaaaccccccccttccctttgaaaacctggcccntggcaactggacaaaccgtgaaacgccttccccctcaaggtttcgtcaaggcttatgcttcccatctcaagcgatttggcaagatcgagcttcccacatggacagacattgtgaagaccggaaagttgaaggagcttgcaccatatgatcctgattggtactacatcagagctgcatctatggcaaggaaggtttacctgaggggaggacttggtgttggtgctttccgtagaatctatggtggaagcaagaggaacggtagtcgcccacctcacttttgcaaaagcagtggtggtattgcccgtcacatcctccaacagctggagacaatgaacattgttgagctcgacaccaaaggaggaagaaggatcacttccagtggccaaagggatttggaccaggttgctggccgtattgcagttgaaccttgaagatcttaatgttcttttttgttcttcttctacttttgaggccattgtgcttttagtgtttatctttacttttaagaattgttaccatttcattctcaagacttgcgctcataatgttcaaaaatttatctttttggcgatggctttggacattgaaacttatgtcttcaaccgtatttttgtgttcgtccgatttaaggataataggatatggtttcttcatccctaaaaaaaaaaagataaacaaaaaaagagcgaccgctctagaggatccaagcttacgtacgcnnnnnnnnnnnnnnnnnnnnnnnntacattcg

SEQ ID NO: 119138 - DNA, 523 bp, Arabidopsis thaliana
  unsure (1)..(523): unsure at all n locations
cgcctgcaggtaccggtccggaattcccggtgtcgacccacgcgtccgtacggctgcgagaagacgacagaagggggcggcgagagattcagctgcgttgggcaaaatcccagacgaagatcagtgattagtcttttgataacttgagccatggcaactggtaaaactgtgaaagacgtctcgcctcatgacttcgtcaaggcttatgcttctcatctcaagcgatctggcaagatcgagcttcccacatggacagacattgtgaagaccggaaagttgaaggagcttgcaccatatgatcctgattggtactacatcagagctgcatctatggcaaggaaggtttacctgaggggaggacttggtgttggtgctttccgtagaatctatggtggaagcaagaggaacggtagtcgcccacctcacttttgcaaaagcagtggtggtattgcccgtcacatcctccaacagctggagacaatgaacatttgtttgggttggcaccaaagggggnangaaggnt

SEQ ID NO: 119139 - DNA, 1283 bp, Arabidopsis thaliana
agaaatatctcataaagatcaaataaacactaaacctgaaagcaaaaaaatggcagcacgagcaacattcatattctatgctctcttcctaaccacactccaattccttctaacacaccatgtgtcatccgccgcccgaggattatggaaatacatcgcccccaacgtcggaatctccgcgatgcatatgcaacttctccataacgaccgtgtcgtaatgtacgaccgaaccaacttcggaccatcaaacatctctctacctaacggtaactgccgtgacaacccccaagacgccgtctccaaaatcgactgcacagctcactcgatcgaatacgacgtcgcaacgaacaccatccgacctttaacggtacaatccaacacatggtgctcatccggttcggttcgaccggacggtgttcttgtccaaaccggtggagaccgagacggagaacttaagacaagaaccttttctccttgtaataacaatcaatgtgattgggtcgaaatgaacaacggtttaaaaaagagaagatggtacgcttccaaccatattctgcccgacggtaaacaaatcgtcatgggaggtcaaggacaattcaactacgagttctttcccaaaacgacaaaccctaacgtagtcgcgttaccgtttttggccgagactcatgatcaaggacaagagaataatctttatccttttgtgtttatgaataccgatgggaatctatttatgttcgctaataacagagcgatattactcgactatgttaagaacacggtggtgaaaacttttccggcgattcccggtggtgatccgagaaactatccgagcactggctcagccgtgttattaccgttaaagaatcttgaagcggataatgtcgagacggaggttctagtgtgtggaggtgcaccaaaaggatcatacaacctcgctagaaagaaaactttcgtgaaagcgcttgacacgtgtgcaaggatcaagattaacgatgccaaacctgaatgggcggttgagaagatgccacatgctagagttatgggagatatgattcctttgccaaacggagatgttttgctaatcaacggtggatcttttggtactgctgcatgggagcttggtcgtacaccggttttagcaccggacctataccatcccgagaatccggttggctctaggtttgaatcgctaaggccgactacaatcccgagaatgtatcactccgcggctattcttctacgtgacggtagggttttagtcggaggaagcaatcctcatgcgt

SEQ ID NO: 119140 - DNA, 518 bp, Arabidopsis thaliana
tacgactcactatagggaaggctgctccgcctgcaggtaccggtccggaattcccgggtcgacccacgcgtccgttcatccacattactcaaagatctctattggtacttctcaaattaaatggatcacaaaatcctactaacacctcccaaatctttatacaccaaatgtatcataaccatcatttacgtagtatcaatctctcatctaaatgcccatttcataacttcatgcaaacaaaccccataccctagcgtctgcgaccaccacatgtctaattcacctctcaaacctttagacgaccaaacggatgggttcactttccacgaccttgtggtcagctccaccatggaccaggccgtacaactacaccgccttgtgtcttccgtgaaacagcatcattctctccacaaacacgcaacatcagctttgtttgactgcttggagctctacgaagacactatagaccaactcaaccactctcggagatcgtacggtcaatattcttcgccacatga

SEQ ID NO: 119141 - DNA, 833 bp, Arabidopsis thaliana
  unsure (1)..(833): unsure at all n locations
gggccacgcnncccgtccgctcttcttcttctatttttgctgtgtgacgaacgagaagactcttttttgaattttgattcttcttcttctccgtttctttcgctacttcctcagcttcgtcaccgtcgaaaattcttcacgttttcctcggaattttccaattgtcttctccaattctcttgcgatcgttgaagatctgaaaaattcgaagcgtttgatcatggcttcgtacactcccaagaacattctcatcaccggagctgctggtttcattgcgtctcatgtcgccaacagactcatacgaagctatcctgattacaaaatcgttgtgcttgacaagcttgattactgttcaaatctcaagaatctcaatccttctaagcactctccgaacttcaagtttgtcaaaggtgatatcgctagtgctgacttggtgaatcatcttctcatcactgaaggtattgacaccatcatgcatttcgctgctcagactcacgtcgacaattccttcggtaacagtttcgagtttactaagaataatatctatggaactcatgtccttcttgaggcttgtaaagttactggtcagattaggaggtttattcatgttagtactgatgaagtttatggtgaaactgatgaggatgctcttgttggtaaccatgaggcttctcagctgcttccgacgaatccttactctgccacgaaagctggtgctgagatgcttgttatggcttatggtagatcttatggtttgcctgttattaccactcgtgggaataacgtctatggaccgaatcagtttcctgagaagttgattcctaagttcattt

SEQ ID NO: 119142 - DNA, 805 bp, Arabidopsis thaliana
gggggtattatggtgttcgacatgacgagtttcagggtgtttcctttagagaagccgtatggatgatttttcaaaagggttgtaaggctcaaggtccattggtgtaaaaatgggtggcattacattccctttcaccgaaaaaatgggaattgtcttttgagatggtactctttaatagggcggaggaagttgcgttggctaataataagggcggcgtacaagttggggggccttttagcccggtttaactttcctaaacctacgtcataacggatctcacatcggaggcgatttcggtgaatataaacctcttcactcctcagtcgacgctaagcttgaagctatttgtaaaagcatggcggagactcagaaacaggacaaatcgacgaaatcatcgaagaaacgtgagaagaaggtttcgtcgccagatctatcggagaaagtgaaggcggaggagaattcggtttcgatcggtggatctccaccggtgacggagtttgaagagtccaccgctggatcttcgccgttgtcggacttgacgttcgctgacccggaggagccgccgcagtggaacgagacgttctcgttggagaagtatccgtcgtacgagatcgattgggattcgattctagcttaggggcaaaataggaaattcagccgcttgcaatggagtttttgtgaaattgcatgactggcccaagagtaattaatttaatatggattagtgttaaaaaaaaaaaaaaaaaagggcggccggtttaaaggatccaagcttacggacgcgtgcaatcgaagttagtggttg

SEQ ID NO: 119143 - DNA, 773 bp, Arabidopsis thaliana
tccccaaaaccttctttaattaccgggattttccacatccgtagggggatttcggggtgaataataaaaccttttccactccatcatgcaaacgttaagacttttaaactattttgtaaaaggcatgaggggaaactcattaaacaggacataatcgccgaactcttctatgaaacgtaagaagaaggtttggtcgccagatctatcggataaagtcaagtcgaagaagaattcggtctcgatcggtggatctccaccggtgacggagtttgaagagtccaccgctggatcttcgccgttgtcggacttgacgttcgctgacccggaggaggccgccgcagtggaacgagacgttctcgttggagaagtatccgtcgtacgagatcgattgggattcgattctagcttaggggcaaaataggaaattcagccgcttgcaatggagtttttgtgaaattgcatgactggcccaagagtaattaattaaatatggattagtgttaaatttcgtatgttaatatttgtattatggtttgtattagtctctctgtgtcggtccagcttgcggttttttgtcaggctcgaccatgccacagttttcattttatgtaatctttttttcttttgtcttatgtaatttgtagcttcagtttcttcatctataatgcaattttattatgattatgtaaataaaacgaacgcatgggtcggccgctctataggatcccagcttacgcacgcgtgcatgcgacgtcaagctgtgtttatagtgt

SEQ ID NO: 119144 - DNA, 530 bp, Arabidopsis thaliana
  unsure (1)..(530): unsure at all n locations
cttatttcaaaccttttagatccatttttttttaattttctcggaaaaatccctgtttctttacttttttataagtctcaggttcaattttttcggattcaaatttttattttaaatggcagctgctatgaatttgtacacttgtagcagatcgtttcaagactctggtggtgaactcatggacgcgcttgtaccttttatcaaaagcgtttccgattctccttcttcttcttctgcagcgtctgcgtctgcggttcttcacccctctgcggtttctctccctcctcttccccgggtattaccccggttcaacggtccttgacccaacccggttttcaaaaggggtcgggatnttnaacaaaaaccggggtcaattaaatcggggctnaaaaaaccntttttttttnttaaggncccccagnttccngntttaaggtcccataatccntttncccccggggggttaaaanaanaaaaaanttttttntgggattttttttnggccaaaaggggtnttttttnnaggaaat

SEQ ID NO: 119145 - DNA, 923 bp, Arabidopsis thaliana
  unsure (1)..(923): unsure at all n locations
cnnnnnnnnnnnnnnnnnnnnnnnnnnnnnnnnnnnnnnnnnnnnnnnnnnnnnnnnnnnnnnnnnnnnnnnccacgcgttcggccacgcgttcggccacgcgtccgctcatggacgcgcttggaccttttatcaaaagcgtttcccgattctccttcttcttcttctgcagcgtctgcgtctgcgtttcttcacccctctgcggtttctctccctcctctccccggttattacccggattcaacgttcttgacccaaccgttttcatacgggtcggatcttcaacaaaccgggtcattaatcggactcaacaacctctcttcttctcagatccaccagatccagtctcagatccatcatcctcttcctccgacgcatcacaacaacaacaactctttctcgaatcttctcagccccaaagccgttactgatgaagcaatctggagtcgctggatcttgtttcgcttacggttcaggtgttccttcgaagccgacgaagctttacagaggtgtgaggcaacgtcactggggaaaatgggtggctgagatccgtttgccgagaaatcggactcgtctctggcttgggacttttgacacggcggaggaagctgcgttggcctatgataaggcggcgtacaagctgcgcggcgatttcgcccggcttaacttccctaacctacgtcataacggatctcacatcggaggcgatttcggtgaatataaacctcttcactcctcagtcgacgctaagcttgaagctatttgtaaaagcatggcggagactcagaaacaggacaaatcgacgaaatcatcgaagaaacgtgagaagaaggtttcgtcgccagatctatcggagaaagtgaaggcggaggagaattcggtttcgatcggtggatcntcaccggtgacggagtttgaagagt

SEQ ID NO: 119146 - DNA, 710 bp, Arabidopsis thaliana
  unsure (1)..(710): unsure at all n locations
aattttntcggaaaaatccctgtttctttacttttttataagtctcaggttcaattttttcggattcaaatttttattttaaatggcagctgctatgaatttgtacacttgtagcagatcgtttcaagactctggtggtgaactcatggacgcgcttgtaccttttatcaaaagcgtttccgattctccttcttcttcttctgcagcgtctgcgtctgcgtttcttcacccctctgcgttttctctccctcctctccccggttattacccggattcaacgttcttgacccaaccgttttcatacgggtcggatcttcaacaaaccgggtcattaatcggacgcaacaacctctcttcttctcagatccaccagattcagtctcagatccatcatcctcttcctccgacgcatcacaacaacaacaactctttctcgaatctnctcagcccgaaaccgttactgatgaagcaatctggagtcgctggatctngtttcgcttacggttctggtgttccttcgaagccgacgaagctttacagaggtgtgaggcaacgtcactggggaaaatgggtggctganatccgtttgccgagaaatcggactcgtctctgggcttggnacttttnacaagggcggaggaangttgcgttnggctttgaataaggggggggnacaaagtttngggggggntttncncccggttnaaatt

SEQ ID NO: 119147 - DNA, 1517 bp, Arabidopsis thaliana
ctttaaataccattttccctacgagtctacgacgctctctaaacttcttatacaaaacaaaacacacccaaatatgcataagcttttgttttctcttctctccgtcgtctcactctcatttctcctcttcttccatggcgccgaggcacgccagcgagaggcgccgtttccaaacgcctgccatttcagccaaatcaacagcctcgcgcccgctcaggcgacgaagttcgaagccggtcagatggaagtatgggaccacatgagccctgagctccgatgcgccggtgtaacggtggctcgcatcacccttcagcccaattccattttcttgcccgctttctttagcccacctgcccttgcttacgttgtccaaggagaaggagttatggggacgattgcttctggttgtcctgagacttttgcagaagttgaaggatcatcaggaagaggaggaggaggagacccgggtcgacgttttgaggacatgcaccagaagttggagaatttccggcgaggggatgtgtttgcttcgcttgccggagtttcacagtggtggtacaaccgcggtgattccgatgccgtcattgtcattgttcttgatgtcaccaacagagaaaaccagcttgaccaagtccctaggatgttccaactagccgggagcagaacgcaagaagaagaacaaccattaacgtggccatcaggcaacaacgctttcagcggtttcgacccaaacataatcgcggaagcattcaaaatcaacatcgagacagctaagcaactacaaaaccagaaggacaacagaggaaacataatccgagcaaatggtcctctccatttcgtcatcccaccgcctcgtgaatggcagcaagatggcattgctaatggcatcgaagagacttattgcacggctaagattcatgagaatatcgatgatccagaacggtctgaccattttagcacacgagccggaagaatcagcactcttaacagccttaatctccctgttctacgtctagtcagacttaacgcccttagaggttatctctacagcggaggaatggtgttgccacaatggacggcaaacgcgcacacggtgctatacgtcacaggaggtcaagccaagatacaagtggtggacgacaatggtcagtcggtgttcaatgagcaagtgggacaaggccaaatcattgtgattccacaaggctttgcagtttcaaaaacggctggtgaaacgggtttcgagtggatatcattcaagacaaacgataacgcttacattaacacactgagcggccaaacatcgtacttgagagcagttccagtggatgtgatcaaagcgtcatatggagtgaacgaggaagaagccaagaggatcaagtttagtcagcaagagaccatgttgtctatgacaccaagctcttcttcttaagctctttaattgcttcctttaatgtttttttagattttccagcccctcaaataaataaagctgagactaataaccaacttttcacaaa

SEQ ID NO: 119148 - DNA, 707 bp, Arabidopsis thaliana
  unsure (1)..(707): unsure at all n locations
aagttactgccgccacggctgctgctacaaaggttaacacccatacaagagtcacgggtttcatttaagcttcaactatatatttgcatgttatttgccaaaaggatttgacaataatgcaacaagagtttcattgaaaatttcaagaaccctagttaataacgataatgggttcgagagttttggcttccttctttgttttcttaatcttcacggtcatcacattgcctcccacgatccaagcttgcactccttgtactcgtcctcatcctccggttccgaaacctccacaacacggcggtggtggaggtggtggtagcaagccgcctccacatcacggtggaaaaggtggtggtaaacccccaccccacggtggaaaaggtggaggaccgccgcatcatggtggaggaggaggaggaggagggaaatcaccgccggttgttagacctcctcccgtagtggtgaggccaccgccaatcataagacctcctccggtcgtctatccaccaccaattgtgaggccaccgccaatcacaagacctcccatcataatccctccaattcaacaccgccggttaaaattcttcnggnctctcctccggtaaaaattcttcggggtctcctcagtanaaatntcngggttttctcagtaaattttagggtttctcatataacncttggaaagcncacatgtcggttncaatttc

SEQ ID NO: 119149 - DNA, 555 bp, Arabidopsis thaliana
aacaacacacccagatatgcatgcgctaacgaacactcttattatatctactctcactcttaatcctcatggttgttgcatactgtttatgcactccagcgagaggcgacgagttcaaacgcactgccatttgagacaacagaacagtctccggcgccgtcatgctactgaatctcgaagccggacagatggaagtgtgggaccacattagctctgagctccgatgcgccggtgtaacggtgggttgcatcacccttcagcccaattccattgtcttgcccgctttctttagcccacctgcccttgcttacgttgtccaaggagaaggagttatggggacgattgcttctggttgtcctgagacttttgcagtagctgatggatcatcacggtagaggaggaggaggagacccgggtcgacgtttcgaggacatgcaccaaaagttggacaatttccgacgaggggatgtcgttgcttcggttgtcgcatttacacagaggtggatctaccagacggcatccagaacccgcattgacgacagcttctgaagaagt

SEQ ID NO: 119150 - DNA, 428 bp, Arabidopsis thaliana
gaccgccgcatcatggtggaggaggaggaggaggtgggaaatcaccgccggttgttagacctccttccgtagtggtgaggccaccgccaatcataagacctcctccggtcgtctatccaccaccaattgtgaggccaccgccaatcacaagacctcccatcataatccctccaattcaaccaccgccggttacaactcctccgggactcctccctccgatcacaactcctccgggactcctccctccagtcacaactcctccgggacttctccctccagtcacaactcctccaggacttctccctccaatcattaacccacctccggtcacagtcccaccaccatcgtccggctatccaccatatggtccacctttcggtggaggaggaggaggctgtttcaaacaatcaacgtgtccgatcaatgca

SEQ ID NO: 119151 - DNA, 761 bp, Arabidopsis thaliana
  unsure (1)..(761): unsure at all n locations
nnnnnnnnatgatcttnnnnnnnnnnnnnnnnnnnnnnnnnnnnnnntaccgtcccgattcccggtcgaccccgcgtccgcagtaactctcaggtgcgtgtgctctccgctggttccttagaacaatcggcacacgctttttcatttcaatcttcttcttctactcttaagtatctcaggtctgttgagagatggcagatcgattgacacgtattgctattgtgagttcagaccgttgcaagccaaagaaatgtcgccaagagtgcaagaagagttgtcctgtggtcaagacaggaaaactttgtattgaggtgactgttggttccaagcttgcttttatctcagaggagttgtgtatcggttgcggtatttgtgtgaagaaatgcccgtttgaagctattcagattatcaatcttccaagagacttggagaaagatacgacccatcgttatggggcaaacacttttaagttacacaggctcccagttccaagaccagggcaggtgctagggttggttggaaccaatggtattggaaaatcaactgctctgaaaattttggctggaaagctcaaaccaaatttgggccgtttcactagtcctccagactggcaagaaatcttgactcacttccgtggttcagaacttcaaaactacttcacacgtattctagaagataatcttaaggccattataaagcctcaatatgtcgaccacatcccaagagcagttaaaggcaatgttggagaggtccttgaccag

SEQ ID NO: 119152 - DNA, 1372 bp, Arabidopsis thaliana
  unsure (1)..(1372): unsure at all n locations
gcgagctctatacgacttacattagggaacgctggcacgcctgcaggtaccggtccggaattcccgggtcgacccacgcgtccttgattattttttctgatctgagaaaaaaaatggcgaatggagctaatagagtggatctcgacgggaaaccgatacaaccgttgacaatatgcatgatcggcgccggaggtttcatcggttcacatctctgtgaaaagctcttgaccgagacgccacataaggtgcttgcgctcgatgtttacaacgataagatcaaacacttgcttgagcctgataccgttgaatggagtggtcggatccagtttcatcgtatcaatattaagcatgattcgagacttgaaggtcttgttaagatggcggatctgattataaatcttgctgcgatctgtactccagctgattacaatacacgtcctcttgatactatctacagcaatttcattgatgcgcttccagttgtgaaatactgttctgagaacaacaagcgtctcattcacttttccacttgtgaagtgtatggaaaaactataggaagctttcttccaaaggatcatcctctgcgtgatgatcctgctttttatgtactcaaagaagatatatccccttgcatctttggttcaattgagaagcagaggtggtcatatgcttgtgcaaagcaacttattgagagacttgtttacgctgagggtgctgagaatggactcgagttcaccatcgtacgaccttttaactggattggacctaggatggatttcatccccggcattgatggtcctagcgaaggtgtcccacgtgtccttgcctgctttagtaacaatcttctgcgacgggagcctctcaagcttgtggatggtggagaatcacagagaaccttcgtctacatcaatgatgctatcgaagctgtccttttgatgatcgaaaatccagagagagccaatgggcatatcttcaatgtaggcaacccaaacaatgaagtgacagtgagacaacttgctgaaatgatgactgaggtctacgccaaagtgagtggagagacagctatcgagagtccaacgatcgacgtgagctccaaagagttttatggagaaggttatgatgacagcgacaagagaatcccagacatgaccatcatcaaccgtcaacttggatggaacccgaagacgtcgctttgggacttgcttgaatcgaccttaacataccagcacacgacttatgcggaagccattaagaaggccacttcaaaaccagtcgcatcttagaggtcgtctctcttttacaaacacctcaaatcatggtggtggctacgattccattctttctttttaaaaaaaaaattatcccaccccna

SEQ ID NO: 119153 - DNA, 712 bp, Arabidopsis thaliana
  unsure (1)..(712): unsure at all n locations
acccgngccctctctcctcaantgcttcgagttccttnttgtcgaaatcccggngcccatggcttctcatntggccccatcatgagtgccntggncactgctgatgtgctgagtctcnccaagtgagtggaggaccgctatcgagagtccaacgatcgacgtgagctccaaagagttttatggagaaggttatgatgacagcgacaagagaatcccagacatgaccatcatcaaccgtcaacttggatggaacccgaagacgtcgctttgggacttgcttgaatcgaccttaacataccagcacacgacttatgcggaagccattaagaaggccacttcaaaaccagtcgcatcttagaggtcgtctctctttacaaacacctcaaatcatgtggtggctacgattccattctttctttttaaaaaaaaaattctcccaacagaaaccttctcttcccttattttaggccattctaaacaaatgatatatcatggtggttgattctagtttacgttttccttgttatatagtattactgttaatgtttttgaattcctttgttttgaagctttatatcttgtatttgtccgaaactaaaaagggaatggtttgtgcaaactataaaaaaaaaaaaaaaaaggtcgannnnnnnnnnnnnnnnnnnnnnnnnnnnnnnnnnnnnnnnnnnnnnnnnnnnnnnnnnnnnnnnnn

SEQ ID NO: 119154 - DNA, 542 bp, Arabidopsis thaliana
  unsure (1)..(542): unsure at all n locations
cnnnnnnnnnnnnnnnnnnnnnnnnnnnnnnnagggggaggccatgngnccaacggtgtgttccncaagggtccacgcgtacggttatgatgacagtgacaagagaatcccagacatgaccatcattaaccgccaactcggatggaacccgaaaacatcgctatgggacttgctcgagtcgaccttaacctaccagcacaggacatacgctgaagctgtgaagaaggcaacatccaaaccagtggcttcctaaactctccaagaccccaacgaaactcgttaaacacgcgtcattttggcattttactctattcgattctatttttttcatcccagagaaaactttttttcttttttctttttaagaaaacgatataatcacggtggttcgttccaagtataccttttcgtttgtaagttttctctttttgtttggtttgtttggccatgtatgtcggagctgtcagaaagcaagaggttaatcgtttgtagcgaatgataaatgttcgagtgtaaattttaaaatgcttcgttttacatgt

SEQ ID NO: 119155 - DNA, 568 bp, Arabidopsis thaliana
  unsure (1)..(568): unsure at all n locations
atgatcttnnnnnnnnctctatacgactcatttagggaaagctggtccgcctgcaggtaccggtccggaattcccgggtcgacccacgcgtccgcacaaatctctcttccacccattgttatctctgtagaagcgtgagagagatcacgcgtgttcaccgacacaatcaaaatatggcgaacggagccgatagattggatctggacggtaaaccgattaagccgatgacgatatgcatgatcggtgccggaggtttcattggctctcatctctgtgagaagcttatgacggagactcctcacaaggttcttgcgcttgatgtttacaatgataagatcaagcacttgcttgagcctgataccgttcaatgggctggtcggatccagtttcatcgtatcaacattaagcatgattctagacttgaaggactgatcaagatggcagatctgacgataaatctagctgcgatctgtactccagcagattacaatacgcgtcctcttgacactatctacagcaatttcattgatgctctcccagtggttaagtactgctcagagaacaacaa

SEQ ID NO: 119156 - DNA, 527 bp, Arabidopsis thaliana
  unsure (1)..(527): unsure at all n locations
tctctacagagaacttgattattttttctgtatccgagtaaaaaaaatggcgaatggagctaatagagtggatctcgacgggaaaccgatacaaccgttgacaatatgcatgatcggcgccggaggtttcatcggttcacatctctgtgaaaagctcttgaccgagacgccacataaggtgcttgcgctcgatgtttacaacgataagatcaaacacttgcttgagcctgataccgttgaatggagtggtcggatccagtttcatcgtatcaatattaagcatgattcgagacttgaaggtcttgttaagatggcggatctgattataaatcttgcttgcggtcttgtactccagctgattacaatacacggcctcttgatactatcttacagcaatttcatttgatgcgcttcccctttgtgaaatactttttttgggacaaaaaggggtttnttnntttttcnccccggggngtttttnggaaaccccttgggggtttttncccnanntncnccccggggggngc

SEQ ID NO: 119157 - DNA, 900 bp, Arabidopsis thaliana
ctaccaggttacttagctggagctccaccgcggtggcggccgctctagaactagtggatcccccgggctgcattaattttcggccgcctcatcttttccttcacttgctccctcataggatctgaaatttcttcctctgcatgtgctctcgtggtttcttccttgataattccttgctcattccctgcatgtgactcccgatcatcgtcttcctcttccaagttacgaatcaaaatcatagccgagattcagatttcatagacaatggcgactaaggcggcttcgtcttccagcctccccaaatctggagccatttccaaaggctacaattttgcttcgacttgggaacagagcgctcctttgacagagcagcaacaagcagctattgtttctttatcccacgcagtcgctgagcggtcatttcctgccaatcttgtacatgagcatgttcacaggcctgagaatggcttgtctgtctccgtggaggacacacatttgggagattctggagcaattgaagctgttttggttaatacaaatcagttctacaaatggtttactgatcttgaatcagcgatgaagtctgagacagaggaaaagtatcggcactatgttagtactttaactgagcgcatccagacgtgtgataatatacttcaccaggttgatgaaacacttgacctatttaacgaactgcaactacaacatcaaggagtaacaacaaagactaaaactcttcatgacgcatgtgaccgactgttaatggagaagcagaaattgatggaatttgcagaagctctaaggagtaagctcaactattttgatgaactggagaatgtatcctctaatttttattcaccaaatatgaatgtatcaaactcaaactttctcccactactg

SEQ ID NO: 119158 - DNA, 965 bp, Arabidopsis thaliana
  unsure (1)..(965): unsure at all n locations
accggngcggagacccaggcgcgacccagaccatcaatataatctagaaaaaaaaagagaagagagaagagagaaatgtcgagagctttgtcagtcgtttgtgtcttgctcgccatatccttcgtctgtgcacgtgctcgtcaggtgccgggagagtctgatgagggaaagacgacgggacatgacgatacaacaacaatgcccatgcatgcaaaagcagctgatcagttaccaccaaagagcgtcggcgacaaaaaatgcatcggaggagttgctggagtcggtggattcgccggagttggtggtgttgccggcgtgggaggtctagggatgccactcatcggtggtcttggcgggatcggtaagtatggtggcataggcggtgcagctggaatcggtggatttcatagtataggcggtgttggcggtctaggcggtgtcggaggaggtgttggcggtctaggcggtgttggagggggtgttggtggtctaggtggcgttggcggtctaggtggagctggtttaggcggtgtaggtggtgtcgccggtggtattggtaaaccccgtggtattggcggtttaaggtggtctaggcggacccggaggtggtttaggtggagttggtggtctccggtaaggctggtggtattggtgttggtggtggtatcggtggtggacacggcgtggtcggtggtgtgatcgatccacatccttaatagagagtatttgttggttagggttttaattaaggaataattaattagtttcgatgttattgttggtcttttaattctgtgatcattagggtgacttttgatctattttctagtttgggcttttgtaacgtttgctttgatttcggccgtggtgttatgaaatgtgcgactctatatgaaaaaaaaaaaaaaagggcggccgctctagaggatccaagcttacgtacgcgtgcatgcgacgtcatagct

SEQ ID NO: 119159 - DNA, 813 bp, Arabidopsis thaliana
  unsure (1)..(813): unsure at all n locations
atgacctnnnnnnnnnnnnnnnnnnnnnnnnnnnnnnnnnnnnnnnnnnnnnnnnnnnnnnnnnnnnnnnnnnnnnnnnnnnnnccacgcgtccgcggacgcgtgggctgttttatccgcttcaagtggtaacggcggctctgataacaacggaggaggtcttagtggtggtggtggtggtggcgatggaggtaagaatgatggagatggacacggtgacgaggacagggataggaacaggaacgaggcgatgcttttgttgaaggagtctgggattgaattggagagtcttcccaaagatctagcggctgctattgaggcgggtcggattcctggatcggttatcactcggttcctggagcttcagaaatcggctgtgatgcggtggctgatgcaatttggtgggtttagggaaagattgttggctgatgatctcttcatggctaaactcgccatggaatgtggtgttggaatcttcaccaagactgctgctgaggatgaacggcgctgagaaaacttcttcaatgaacttgaagttggctattcccgttgcggcgatggctattatctgctgatttcatggtgggctaatcttccctgctcccaaccgtttctcttcgaccacctttggnacttnacttgctggaggtataatccaaanttttcccacaaactgccccagncaatgccttccagggttgcnntttcccggaacctcatatactcttttncaaagntngggnncntaaacgggaattgggctaaagctnttttcccgttgaccaaancangctggttggctgnntttnaaat

SEQ ID NO: 119160 - DNA, 474 bp, Arabidopsis thaliana
atttttcgctgactctccacttctctcaatcgtccgcctctacctacagagagagagactgaaccagacgactttcagtttcagttccagtttcaaagatctctttttcgtttctcgctgtctgtagcatcaatggcaatcgcttcctgcttcttctgtgttccaacaccgaacacagctatctctgaatccaatctgacatggcctcacatcgcttcgtttcctagactctcttcatcttcctcttttaacggtgtaatctctgcaaagtcaatctcttttaaccgccgtgtacctattacccctgttttatccgcttcaagtggtaacggcggctctgataacaacggaggaggtcttagtggtggtggtggtggtggcgatggaggtaagaatgatggagatggacacggtgtcgaggacagggttagggtcaggaacgaggcgatgcttttgttgaaggagtctgggatt

SEQ ID NO: 119161 - DNA, 519 bp, Arabidopsis thaliana
  unsure (1)..(519): unsure at all n locations
nnnnnnnnnnnnnnnnnnnnnnnnnnnnnnnnnnnnnnnnnnnnnnnnnnnnnnnnnnnnnnnnnnnnnnnnnnnnnnnnnnnccacgcgtccgtatcccttcccttttgggatattttcgccgcgtggattgatatgacgactctctttcgccggaagtcaatcggaatccgcgacaacttcttccttcaatccctttgatttttttttggctctacttatcccaaacccttcaaatcttcaggtccaatctcttcttctatttgttttttaattaaaaaaatccggcgaaaggtgaagctcttggattcgagtggtggctagtaatcgatttcggtagtttagaagtagtttataggttttatcagctttcgatttgatggagccgcgagtcggaaacaagtttcggctcggaaggaagatcggcggtggatcattcggagagatctatcttggtaccaatatccagacgaatgaagaagtggctattaaacttgaaaatgtgaaaactaagcatcc

SEQ ID NO: 119162 - DNA, 1168 bp, Arabidopsis thaliana
  unsure (1)..(1168): unsure at all n locations
tcgttgnnnnnnnnnnnnnnnnnnnnnnnnnnnnnnnnnnnnnnnnccgggtcggccgcgcgtccggttttcacactctctcctagggttttatctgcgaagcccaatctagagcttccatggcgacgcataccatttctcgatccattctttgccgaccggcgaaatctctttcgtttctgttcacgcgatcctttgcttcatctgctcctctcgccaaatctccggcgtcttctctgctcagccggtcccgtcctctggtcgccgctttttcctccgttttccgtggcggccttgtgtctgtcaaaggtctctcgacgcaggctacatcgtcttctctgaacgacccgaatcccaactggtcgaacaggccacctaaggagacgatcctgctcgatggttgcgatttcgagcactggcttgtcgtcgtggagccacctcagggtgagcctactagagatgaaatcattgatagctacatcaaaaccctagctcagattgttggcagtgaagacgaagctaggatgaagatctactcggtttcaactaggtgctactatgcttttggagcacttgtgtcagaagatctttctcacaagttaaaagagttgtcaaatgtgcgctgggttcttcctgactcttacctggatgtgaggaacaaagactatggaggggaacctttcatcgatgggaaggctgttccttatgatcctaagtaccacgaggagtggataaggaacaatgctagagcaaatgaaaggaacagacgcaatgaccgtcctcgcaacaatgatagaagcagaaactttgagaggagaagagagaacatggcaggaggccctcctcctcaacgtcctcccatggnaggccctcctcctcctccgcacatcggtggctctgcacctcctccgcctcatatgggtggctctgcacctcctccacctcacatggggcagaactatggtccaccaccaccaaacaacatgggaggaccaaggcatccaccaccttatggagcaccaccgcaaaanaacatgggaggaccgaggccacctnagaactttgggggaacancaccttcnactatggaggngcaccancagnaaanatcatngnggngngacaccacaaactttngtgggggccctccacttntttttggngggtt

SEQ ID NO: 119163 - DNA, 974 bp, Arabidopsis thaliana
acgacagaaggggggaaagagcagaagaaatttgcagaagagagaaaaacaaaaatggcggttctttgctcgtcttcgacggtgatactctcttcttcttccgtgaaatcctccggaagtgagagaaagtctccgtttttagggttctctttaacggctatctcgaagccgtcggtacgagtcggcatttatgcgaattcgaaaagaggattgcaagtgaagtgtgaagctgagccgacgacgacgacttctcttgttccggcgaatcaacgatggatgttcgacgaagaagaagctaatggccctgacatctggaacacgacatggtatccaaaagcttcagaccatgtgaacacggacaagccctggtttgtggttgatgcaactgacaaaattcttggtagattggcatcgacaattgctaatcacatccgtgggaagaatcttgcctcttacactcctagtgtcgacatgggagcttttgtgattgtggtgaatgctgagaaagttgctgtatctggaaagaagcgtaaccaaaagctgtacaggaggcattcaggacgacctggtggtatgacagtagagacatttgatcaattgcagcagagaattcctgaaagaatcgttgagcatgctgttcgtggaatgcttccaaagggacggcttgggagagctctgttcaatcacctgaaggtgtacaaaggccctgaccatcctcacgaggcccagaaaccgcttgatctgcctatcagggacaagagaatacagctgcaaaaatagaagctccaccactgttccattatcgccaagcgcagagagttttttcttctcaggtttctgtagtttcttcatcccaaaaccagaggaggctttacagattcttgttttcgcttctatcaactctgttatgctacaaaactttctaatttgaaatatttctcgttaaaaaaaaaaaaaaaaaaaaagggcggccg

SEQ ID NO: 119164 - DNA, 754 bp, Arabidopsis thaliana
ttcccttctgcggtaccggtccggaattcccgggtcgacccacgcgtccgaaggagaagaagaaacaaagagagaagatgaagaatgttatgctgattattgacgagagcaacgcaagttatgatttactcatttgggcacttgaaaaccaaaaagataccattgagagctccaaagtttatatctttgcaaaacagccacaaaattcctttactcctcctaccgtactttcttcatcagtcggctttgctcaaattttctatccattttcacctaattcagaactcataagattggctcaagaaaagaatatgaaaattgctttgggtatattagagaaagccaagaagatatgtttaaatcatggggtcaaggcagagacatttactgatgttggagaccctaaagatctaatccgcaagataattcaagaacggaatatcaatttaatagttacgagcgatcaacaaagtctcaaaaagtgtacacaaaatacagattgttctcttcttgtcgtgaagaaaagacttcgcaaagattaaagattaaggaagttacaaaattcaccaatatatataattttctatgtggttaattgagattgtgtaatgatttggggttgtagtttcaggtgttgatttggggttgtagtttgaacttataatggtgttatgtgtataaatatttgtgtttatatatatcaagttagtaaaaaaactataatttcttaaaaaaaaaaaaaaagggcggccgc

SEQ ID NO: 119165 - DNA, 706 bp, Arabidopsis thaliana
  unsure (1)..(706): unsure at all n locations
attacttgtgtgtataattttattttattttgcaaacgagaagaagccagaatcaagtcgttaacccatgcctttcaattacccaatcacctaagatattttttttatattacttcctttgacaagttaatccacttccaaatatactataaagttgcacattgacaagaggttttagcagaagctagaagaagaaaggagaagaagaaacatagagagaagatgaagaatgttatgctgattattgacgagagcaacgcaagttatgatttactcatttgggcacttgaaaaccaaaaagataccattgagagctccaaagtttatatctttgcaaaacagccacaaaattcctttactcctcctaccgtactttcttcatcagtcggctttgctcaaatttnctatccattttcacctaattcagaactcataagattggctcaagaaaagaatatgaaaatngctttgggtatattagaggaagccaaggagntatgtttaaatcatgggntcaaggcaggngccatttnctgntgttgggggccctnaagntcctaatccgnaaggttattcaaggnccggaatntccaatttaattggttcgggggtcaccaaggctcaaaaggngtcccaanttcnggttgncctttcttgccgggagnnngctttggaagggtnagggttaggggttcaaattcccctt

SEQ ID NO: 119166 - DNA, 412 bp, Arabidopsis thaliana
tccggacatgcttttttttctgaaggtaggagaaaagataaaacttattatattaattaatatattaattaaatcaaaatgaaagtttgaaactcatgtaattactctcttttgtttaatccaagaaaaacaaaaaatctataagaaatctcattcaattagacattcaattagatataaagttcaaagtaggttaaagttaaaaaactggtacaccaaaacaaaagagttggttgtcgagccgtatgaggtaggaaactctcaagtacggttctcagggagggaattgatccgcctattccgaccgtggagaacaggccattcaacaaggagattctgaaatggcggaggcttggttcgctccagccgctgagtattggaaacaggctataacgcttactcctggtaatta

SEQ ID NO: 119167 - DNA, 529 bp, Arabidopsis thaliana
agccaaaattacactgtaaatttggcatttcgagaagaagaagagggagtgatggaattgcaaggagaggaaagcaaaacggcgacgtattgcgtgacgggtgcaagtggatacatcggttcttggttggttaagtctcttctccaaagaggttacacagtccatgccactctcagagatcttgcaaaatctgaatactttcaatctaaatggaaggaaaatgaacggctcagattattccgagcggatcttcgagatgacggcagctttgacgacgccgttaagggttgtgacggcgtcttccatgtcgccgcttccatggagtttgatatctcatcagatcacgttaatctcgagagttatgtccagagcaaagtcatagaaccggcgctaaaaggcgtacggaatgtacttagttcttgtctaaagtcaaagtcagtcaaaaagagttgtcttcacatcatccatcagcactctcactgctaaagatgagaatgaacggatgagatctttcgtggatgaaacatgc

SEQ ID NO: 119168 - DNA, 665 bp, Arabidopsis thaliana
ctctatcttgaaaaggagaaataaataattaatcactaagcgaaagagatttgatctaaagtaatacaaataaaccttgattgagattgtaaaggagaagagtttaaaagcatggatacagagagaggatcaataagttcatcagaaatatccagaactgctcatctacaagatagaacagttgcttgtcttcctccttcgtacggacaacttgtgaccattcttagcatccatggtggtggaatccgtgggatcattcccggcacaatcttagcttaccttgaatcacaacttcaggaattggatggtgcggaggcaaggcttgtggattatttcgatgtcatctcaggaacaagcaccggaggtttgatagtggcgatgttgaccgcacaagaccaaagcggtggccatagccgcaacagcaaccgccctttgtttgaggccaaagaaatcgtccctttttatctcaaacactcacccaaaatctttccacagccacgagggatattctgtggttggggtgaaaccatagtgagacttgtaggaggacccaagttcaacggtaaataccttcatgacttagctgaaggtttcttgggcgacacaaaattaactcagtctttgacaaacgttgtcataccttgcttcgacatcaagaaactcca

SEQ ID NO: 119169 - DNA, 1178 bp, Arabidopsis thaliana
  unsure (1)..(1178): unsure at all n locations
gccaaattgganaaagtgttcancccgggttcaccgccattggggcaattgctttgatttccaaaaaggggccgaatttgtnttgttgccgagganagaccagagactgaggttgtgagtaataaggctaaaccagattggagccacccatgtgatcatcatcgctgctgatgtcatcaaagaagatgactgccgccgttttatcacccaagccgtcaactattacggccgcgtggatcatctagtgaatacagcgagtcttggacacactttttactttgaggaagtgagtgacacgactgtgtttccacatttgctggacataaacttctgggggaatgtttatccgacatacgtagcgttgccataccttcaccagacgaatggccgaatagtcgtgaatgcatcggttgaaaactggttgcctctaccacggatgagtctttattctgctgcaaaagcagcattagtcaacttctatgagacgctgcgtttcgagctaaatggagacgttggtataactatcgcgactcacgggtggattggcagtgagatgagtggaggaaagttcatgctagaagaaggtgctgagatgcaatggaaggaagagagagaagtacctgcaaatggtggaccgctagaggaatttgcaaagatgattgtggcaggagcttgtaggggagatgcatatgtgaagtttccaaactggtacgatgtctttctcctctatcgagtcttcacaccgaatgtactgagatggacattcaagtcgttcactgtctactgagggtacacgtagaagctccctcgttggcgtcgggtcaggtatgcctgtggatgaatcctcttcacaaatgaaacttatgcttgaaggaggaccacctcgagttcctgcaagcccacctaggtataccgcaagcccacctcattataccgcaagcccacggcggtatcctacaagcccacctcggtatcctgcgagcccacctcggttttcacagtttaatatccaagagttgtaataaaaactggatggaggaacaagaggtgaggtcggtttggtgtgtagagtgtagagtgaacttgagctttagaactttctctgaccaagtgaaccacaaaaaaagaaaagcaatgtaaaggacatcgagtcaagaataataccggatgatacaccc

SEQ ID NO: 119170 - DNA, 495 bp, Arabidopsis thaliana
  unsure (1)..(495): unsure at all n locations
ttctataccctcactaaacatctcttataatattcgacagtgaagagaaaaatggtggatctattgaactcggtgatgaacctggtggcgcctccagcgaccatggtggtgatggcctttgcatggccattactgtctttcattagcttctccgaacgggcttacaactcttatttcgccaccgaaaatatggaagataaagtagttgtcatcaccggagcttcatcggccattggagagcaaatagcatatgaatatgcaaaaagaggagcgaatttggtgttggtggcgaggagagagcagagactgagagttgtgagtaataaggctaaacagattggagccaaccatgtgatcatcatcgctgctgatgtcatcaaagaagatgactgccgccgttttatcacccaagccgtcaactattacggccgcgtggatcatctagtgaatacagcgagtcttggacacactntttactttgaggaagtgagtgac

SEQ ID NO: 119171 - DNA, 764 bp, Arabidopsis thaliana
  unsure (1)..(764): unsure at all n locations
nnnnnnnnnnnnnnnnnnnnnnnnnnnnnnnnnnnnnnnnnnnnnnnnnnnnnnnnnnnnnnnnnnnnnccacgcgtccgcgaagaacatcatcgtcctcctccaaagaggagctttcatttccaaatctataattctctcacagatcaggatcaaacatgggtttccttataacaaccctaatcttcgtcgtcgttgggataattgcttctctatgcgttagaatctgctgcaacagaggcccctccacgaatctgctacatcttaccttggtcattactgcgacggtctgctgttggatgatgtgggcaattgtatatattgcacagatgaatcctctgattgtccccattctaagcgaaacagagtagattcctctactcagacaagaacaacctcaaactagaaaaagcatgcgcaaagtcagtcgagtaaaatccaatccttgtgtatcttcaatctttaaacagttttcttgtttgtaactcttatcttgagtgtgtcaacaaatctaaaaaccttttggcctctttactattttcaaattttcttgaaatcaccttctcattcattcttcaaaaaacaaagctggatctctcccttttgagattactccaaacactccaacaatgtattgttaatttaataaaagcttttcaaagtcaaaaaaaaaaaaaaaaaaaaagnnnnnnnnnnnnnnnnnnnnnnnnnnnnnnnnnnnnnnnnnnnnnnnnnnnnnnnnnnnnnnnnnnncagttaaatca

SEQ ID NO: 119172 - DNA, 431 bp, Arabidopsis thaliana
aacggtcacttcactaattccacatactcagagagaaatggcaaccgaaaccgtattagccacggcggtgagcaatggcaaaagcaaaggatgttgcaagtccggtccaggttacgcgacgcctctcgccgccatggccggtccacgggaaaagctcatctatgtcactgccctttactccggaacggggcgagacaaaccggactacttggcaacggtggatgtggatccaagctcacccacattttcaagcgtcattcacagactaaaaatgccatatataggagatgagcttcaccacactggttggaactcttgcagctcttgccatggtgatgcttctgctgatagacgttaccttgtcttaccaggcttaatttctggtcgcatctatgcaatcgacacagagaccgacccaaaggctccgtctt

SEQ ID NO: 119173 - DNA, 663 bp, Arabidopsis thaliana
gaagatgatgcttaccgaaaacatattttgtaaaatacaaaattcttatatccgaatgtgagctaatttgagaaagacggtctctatacgtatataaaatatatgtatatatgcctctctattctttgatgaacttcagtcagggtaattaatttactaaaactcttccaaaatgtcacattccttcttcaatttattcctaatctctcttttcctctacaacaattgcattgcgcatcactatacattcacggttagggaagttccatatacgaaactgtgtagcacgaaggcgattttaaccgttaatagtcagtttcctggaccgattataaaggttcacaaaggagacactatttatgttaacgttcaaaaccgagctagtgaaaacatcacaatgcattggcatggtgtagagcagccgagaaatccgtggtcagatggtcctgaatacatcacacaatgcccgattcgacccgggtcagattttttgtacaaagtcatattttccatcgaagacacgactgtttggtggcacgcgcatagctcttggacacgtgcaactgtacacggtcttattttcgtatattcctcgccccccgcaaatcctcccttttccaaaggcagaccatgaagtccccataattttgggtgagtggtgga

SEQ ID NO: 119174 - DNA, 449 bp, Arabidopsis thaliana
gattctccaaggctctatcgactcactataggagaaagctggtacgcctgcaggtaccggtccggaattcccgggtcgacccacgcgtccgattttttggtaaatttggtcgctatatttgactacttgtactctgctttgagaagaacaataaaaccatttttgggtgataggtgactgaataaacatctcttgtctcttgatggatctactatggtctggagattagttcgtttattgaactagtgttttagacaatgcaagagttccatagtagcacagattcattgccttgtcctgcaacttcttgggataactctgtcttcaccaactcaaatgtccaaggatcatcatccttgaccgatcacaacactttaagcttgacaatggagatgaaacaaactggttttcaaatgcagcactatgatttctcctctactcaaatcact

SEQ ID NO: 119175 - DNA, 1200 bp, Arabidopsis thaliana
  unsure (1)..(1200): unsure at all n locations
nnnnnnnnnnnnnnnnnnnnnnnnnnnnnnnnnnnnnnnnnnnnnnnnnnnnnnnnnnnnnnnnnnnngaccgaaccggaattccacgcgtccgcaacacgacaccacaaaccctaaatttcgtcaactccacagcgactcgattcgatcaaggaaatggcgtacgcttctcgttttctctccagatctaagcagctacaggggggtctggtcattttgcagcagcaacatgctattccagtccgagcttttgctaaggaagctgctcgtccaacctttaaaggagatgagatgttgaagggtgtcttttttgatatcaagaacaaattccaggctgctgttgatattctccgtaaggaaaagatcacccttgatccagaggacccagctgccgtaaaacagtatgcaaatgtaatgaagaccatcaggcaaaaggcagacatgttctcagaatctcagcgcattaaacatgacattgatactgagactcaagacattccagatgctcgtgcatacttgttgaagttgcaggaaattcgcaccaggagggggcttactgatgagcttggtgctgaggccatgatgttcgaggctttggagaaagtcgagaaggacataaagaagcctctcctgagaagtgacaagaaaggaatggatcttttggttgcagagtttgagaaaggcaacaaaaagcttgggattaggaaagaagatcttcctaagtacgaagaaaatttggagctcagcatggccaaagcacagttggatgagctgaagagtgatgctgttgaagctatggaatctcagaaaaagaaggaggaattccaggatgaggaaatgccggacgtgaagtctctagacatccgtaacttcatctaaggtttgatccttagaaacatttgatttgttgtaagaaaaggcaaagatctctcacttgattgtctttgaaagagaagatcgttcccttgctgctgttttggtttggcgttcaataaggtctctcacctggatttgagtctaactctctctgtggttattacgcttgagattcttagacacaaacgttgtttcatgtttttttgataatggtgatcactggaatttgagataattaataaaagttgggatgttaattcgaaaaaaaaaannnnnnnnnnnnnnnnnnnnnnnnnnnnnnnnnnnnnnnnnnnnnnnnnnnnn

SEQ ID NO: 119176 - DNA, 701 bp, Arabidopsis thaliana
  unsure (1)..(701): unsure at all n locations
gaaccggcgcggagacccaggctcgacccagcgacagacacatttcgtaacccccacagccacgccattcgatcaaggaaatggcgtacgcttctcgttttctctccagatctaagcagctacaggggggtctggtcattttgcagcagcaacatgctattccagtccgagcttttgctaaggaagctgctcgtccaacctttaaaggagatgagatgttgaagggtgtcttttttgatatcaagaacaaattccaggctgctgttgatattctccgtaaggaaaagatcacccttgatccagaggacccagctgccgtaaaacagtatgcaaatgtaatgaagaccatcaggcaaaaggcagacatgttctcagaatctcagcgcattaaacatgacattgatactgagactcaagacattccagatgctccgtgcatacttggttgaaagttgccggggaattcgcaccaggagggggggttacctggtgagcttggggcctgaggcccatgatggtccgggcctttgggacaaagccgggaagggccttaaaaagcccctcctgggaaggtgccaaaaaaggatgggccttttggttcaaggtttnanaagngccaaaaacttggggtttgngaaaaaccncccaagnccganaaattgggcccnatgccaacccantgggtnncnnaaaggtccggc

SEQ ID NO: 119177 - DNA, 389 bp, Arabidopsis thaliana
gggttcgagacgaactctttttctttctcgtgacgaatgtttctgtctagaagcttttaaggattaagactctccaaaattttgacgccgtgttattctcttcccgtctctcatggatccttcaagacgaccaccgaaggactctccttacgcgaatctattcgatctcgagccgttgatgaagtttagaattccgaaacctgaagatgaagttgattattatgggagtagtagccaggatgaaagtagaagcactcaaggtggggtagtggcaaactacagcaatgggtctaaatcgagaatgaatgcgagctccaagaagagaaagcggtggacagaagctgaggatgcagaggacgatgatgatctctacaatcaacatgttactg

SEQ ID NO: 119178 - DNA, 680 bp, Arabidopsis thaliana
agcaagctccttcaatacatttcatcgtggggcatggtgcacaccaccacgtttgtttcttgaggatcagtttgacgtagtccctccagagaatgcttctgtaagttcatatgggaagaagtctgttgtagaggaacgtgtcaagaagaagccccaacctgtgaagattagtccttggactctagctcgtctcaatgcagaagaagtttcaaaagcagcagcagaagcaagaaagaaatccaaaataatccagcctgtggcgagacgggaaaatccatttgttggcttagaagcaagcagcagcttcggaagcagtggccgtagaatgttcccaacaaaatatgaaggtgttaataataacgggaagcagcgaaggcaatcaaagcgcatacggttaccagcagaactacctctagaaccgctgatgaatgttcagacaaaagcagcaaaggagacatcaactagttcagggctagctccacttcagctagaagcaagaagcgcgtttcagacaagccgggcaatgtcagggtctggtaatgttatggtgacatcttcaccagagagcagcttagactcgcatgacattcacccgtttagagtttcgtctgaagcagaggatgcagcgcagcttaatgggttctcttctgctgttggtctgatgggtcaacagagaggac

SEQ ID NO: 119179 - DNA, 687 bp, Arabidopsis thaliana
ttttaacttgctgtttttcacaccaggaaaaatgaagtcttgtctagctacttttgctctcgcagtgttagtaacacaaggaagcatttttagtttgtgtttggcctcctctgcttctacaaactctgttcctaattggtttcatcattggccgccgtttaaatggggaccaaaatttccatattctccacctaaaccgccgccaatcgagaaatatcctccaccggtgcagtatccaccaccgatcaagaagtatccaccgccaccatacgagcatccaccggtgaagtatccaccaccgatcaagacttaccctcatccgccggtgaagtatcctccaccagaacagtatccaccgccgattaagaagtatcctccaccagaacagtatccaccgccgattaagaagtatcctccaccagaacagtattcaccgcctttcaagaagtatcctccgccagaacagtatccaccaccgatcaagaagtatcctccgccagaacattatccaccgccgataaaaaagtatcctccgcaagaacagtatccaccaccgattaaaaagtatcctccgccagaaaagtatccacccccgatcaagaagtattcttcgccagaacagtattcaccgccgatcaagaagtattctccgccaaataagaagtattcttcgccagaagagttttc

SEQ ID NO: 119180 - DNA, 398 bp, Arabidopsis thaliana
acccacgggcccaaaaatactcaaatggctagcttctccacagcacaacctctctctctgccacgtcatccaaacttcttcaatccgaatcaaccaactaccaataacgaacgctcccgccacatttctctgatcgaccgatgtgtgtctctccgacaactaaagcaaacccatggtcacatgatccgtaccggtacgttttccgatccttactcagctagcaagctattcgcaatggcagcgctctcttccttcgctagtctcgagtatgcacgcaaggtgtttgatgaaattcctaaaccaaattctttcgcttggaatactcttatccgtgcttacgcttctggaccagaccctgttcttagcatctgggctttcttggatatggtttcggagag

SEQ ID NO: 119181 - DNA, 911 bp, Arabidopsis thaliana
ctccaccaatctctctttctctctctcaaaacaagagaaactaataattctcaaaagctcacacacagaaacagaggaatctataaggaagttttggtttttggttatcaacaatggtggaagcaaaagatcaagatatgggtgatggtatgcaatgtataaaccatccatttactaaaaacccaggtgggatctgtgctttttgtcttcaagaaaagcttggaaagcttgtaacttcatctttcccacttcctaaacacctcacttcctcttcaacttcttcttctccttccttcagatctgactctgttggtagcacaaccactgcctctgccgcaaatctctcagcgtctctttctctctctgtctccggagcaacaaacaacaacaacagcaagcttccgtttttgttagctaagaagaagaagaagatgcttactgcttcttcttcttcttcgaccacggctaatattgtctacaagagaagtcaatctacaaggactacgaagacaacgtacggagattcagatttgagcccgagaaagagaaatgggttttggtccttttttcatctctactcttcgaaacaacatggtagcagtaagaaagttggaaactttcatcaacccataagccagactgagacaaaaacagagttggcagagactacaacagtgggatcttcgtcttcttcgtcagcttcttcttcaatgtcaaagagagttgttggtggtggtgggagtagtagtaacagaaaccgggtattgatgttgattgttgaagaagattggaaagtccttaacatttgaaagtcacaccatggtgatgaggcaaagtgtccgggatctagatcttgttggggtgtggaagtagaagcttctctggtgatttctttgagaggatcacaaatg

SEQ ID NO: 119182 - DNA, 823 bp, Arabidopsis thaliana
agtaccgctccggaattcccgggtcgacccacgcgcctgaagctttaaacaaatatggcgctaactgtggccctgaagctgtctggtttaagactggtgctttgcttcttgatggaaacacattgaactactttggcaagaacatccctatcaaccttgttctcgccgtagttgctgaggttgttctcctcggtggagccgagtactacagaatcaccaacggattggatttcgaggacaagctacacccaggaggtccatttgatcctctaggccttgctaaggaccctgagcaaggagctcttctcaaagtcaaagagatcaagaacgggagattagccatgtttgcgatgctcggtttctttatccaagcgtatgttaccggagaaggtcctgttgagaaccttgcaaagcatctcagtgatccttttggaaacaacttgcttaccgtcatcgctggaactgccgagagagctcccactctctaagccatttctactttttttaagagcttccaaaatgtacactttgttcgattggaactccttttgacaatgttaaaaaaacttccatctgaatcttcttgatatatttcaaattttcaaaggggcacccttgatgggctgctccccatgtttttaacgcaccccaaatttttgaccccccgggggcggcccgttttaaaaggatcccaactcttacctccgccgtgcaatgcccaacgtaataagcttttttctattagggggcacccttaaaatttcaaatttcccctgggcccggcgggttttaaccaacgggtgtggaactggggaaaaacccc

SEQ ID NO: 119183 - DNA, 858 bp, Arabidopsis thaliana
  unsure (1)..(858): unsure at all n locations
atgatacttcagctctacacgactcactattgggaaagctggcacgcctgcaggtaccggtccggaattcccgggtcgacccacgcgtccagtgttaaaccagagtaaagcttgaaactttggactaaaagaatggcgtctttgggtgtgtcggaaatgcttggtactccccttaacttcagggcagtttcaagatcgtctgctccgttggcatcaagcccatccacgttcaagactgttgctctcttctctaagaaaaagccagctcctgctaagtccaaggctgtctctgagactagcgatgagctcgccaagtggtatggtcctgacaggagaattttcttgcctgatggtcttttggatagatcagagatcccagagtacttaaacggtgaagttgctggagattatggttatgacccatttggtcttggaaagaagcctgagaactttgctaaataccaagcttttgaattgatccatgcgagatgggctatgttaggagcagctggtttcatcattcctgaagctttaaacaaatatggcgctaactgtggccctgaagctgtctggtttaagactggtgctttgcttcttgatggaaacacattgaactactttggcaagaacatccctatcaaccttgttctcgccgtagttgctgaggttgttctcctcggtggagccgagtactacagaatcaccaacgggttggatttcgaggacaagctacacccagggggcccatttaatcctctaggcttttaagggcccgagaaaggctttttaaagcaaggggnaagccggggttcccttttannccggtttttccnggtttccgggggccttnaccnaaat

SEQ ID NO: 119184 - DNA, 552 bp, Arabidopsis thaliana
  unsure (1)..(552): unsure at all n locations
gcgagatgggctatgttaggagcagctggtttcatcattctctgaagctttaaacaaatatggcgctaactgtggccctgaagctgtctggtttaagactggtgctttgcttcttgatggaaacacattgaacctactttggcaagaacatccctatcaaccttgttctcgccgtagttgctgaggttgttctcctcggtggagccgagtactacagaatcaccaacggattggatttcgaggacaagctacacccaggaggtccatttgatcctctaggccttgctaaggaccctgagcaaggagctcttctcaaagtcaaagagatcaagaacgggagattagccatgtttgcgatgctcggtttctttattccaagcgtatgtgaccggagaagggcctggtgagaaccttgcaaagcatctcagtgatccttttggaaacaacttgctaccggcatcgctggaaangccgnagagctccagncctaagcatttcactttttaaggnnccaatgaanttgtcgttgaancttnnaattnaaaacncctg

SEQ ID NO: 119185 - DNA, 708 bp, Arabidopsis thaliana
  unsure (1)..(708): unsure at all n locations
gaatncaaggggccnatccnagntnttaaaagggacttgttcngctttgggnccccccaaaccctttgttccaattgccttattgaaaacaatggattgccnaaacccttattaagactggtctttnctnctgatggaaaccacattgaactactttggcaagaacatccctatcaaccttgttctcgccgtagttgctgaggttgttctcctcggtggagccgagtactacagaatcaccaacggattggatttcgaggacaagctacacccaggaggtccatttgatcctctaggccttgctaaggaccctgagcaaggagctcttctcaaagtcaaagagatcaagaacgggagattagccatgtttgcgatgctcggtttctttatccaagcgtatgttaccggagaaggtcctgttgagaaccttgcaaagcatctcagtgatccttttggaaacaacttgcttaccgtcatcgctggaactgccgagagagctcccactctctaagccatttctactttttttaagagcttccaaaatgtacactttgttcgcttggaactccgtttgacaatgttaaaaaaacttccagctgaatcttccttgatatatttcaaaaaaaaaaaaaaaaggggagccgctctagaggatccaagcttacgtacgcgtgcatgcgacgtcatagtcttctatagtgctaccta

SEQ ID NO: 119186 - DNA, 819 bp, Arabidopsis thaliana
ggaaggttgctcccccggaaggtcccggcccgaatttccgggttggaccaaggcgtccgcccacgcttccgcccacgcttccgcggacgcttgggctgggaaggaagcctgagaactttgctaaataccaagcttttgaattgatccatgcgagatgggctatgttaggagcagctggtttcatcattcctgaagctttaaacaaatatggcgctaactgtggccctgaagctgtctggtttaagactggtgctttgcttcttgatggaaacacattgaactactttggcaagaacatccctatcaaccttgttctcgccgtagttgctgaggttgttctcctcggtggagccgagtactacagaatcaccaacggattggatttcgaggacaagctacacccaggaggtccatttgatcctctaggccttgctaaggaccctgagcaaggagctcttctcaaagtcaaagagatcaagaacgggagattagcccatgtttgcgatgctcggtttctttatccaagcgtatgttaccggagaaggtcctgttgagaaccttgcaaagcatctcagtgatccttttggaaacaacttgcttaccgtcatcgctggaactgccgagagagctcccactctctaagcccatttctactttttttaagagcttcccaaaatgtacactttgttcgattgggactccctttgacaatggtaaaaaaacttccaatcttcaaaaaaacccaaaaacaaaagggcggccgctctagaggatccaagcttacgtacgcgtgcgatgcgacgtcatagtcttgtatag

SEQ ID NO: 119187 - DNA, 269 bp, Arabidopsis thaliana
cttttgacaatgttaaaaggagtcccaatcgaacaaagtgtacattttggaagctcttaaaaaaagtagaaatggcttagagagtgggagctctctcggcagttccagcgatgacggtaagcaagttgtttccaaaatgtacactttgttcgattggaactccttttgacaatgttaaaaaaacttccatctgaatcttcttgatatatttcaaattttcaatggtgctttatcatgcttctaaggatatacatagtcacccattggtt

SEQ ID NO: 119188 - DNA, 590 bp, Arabidopsis thaliana
  unsure (1)..(590): unsure at all n locations
aggtgccactatagaagagtctatgacgtcgcatgcacgcgtacgtaagctcggaattcggctcgaggaggtaaggttggaactttggactaaaagaatggcgtctttgggtgtgtcggaaatgcttggtacctccccttaacttcagggcagtttcaagatcgtctgctccggtggcatcaagcccatccacgttcaagactggtgctctcttctctaagaaaaagccagctcctgcttaggccaaggctggctctgagactagcgatgagctcgccaaggggtatgggcctgacaggagaattttcttgcctggtgggcttttggattgatcagagatcccagagtacctaaacgggtgaaggtgctggagattatgggtatgacccatttttggtcctggaaaggaagcccgggaacctttgctaaattaccaagcctttgaattgcgtccatgccgacgatgggcctattgttggggccggaactggttccataatccctgnancttaaacaaanatggngnaactgtggccttgacntgctgggtaaaantggcgttntcctnangnaaacattnccacntttgg

SEQ ID NO: 119189 - DNA, 416 bp, Arabidopsis thaliana
cccacgcgtccgggaccctgagcaaggagctcttctctttgtcaaagagatcaagaacgggagattagcccatgtttgcgatgctcggttgctttatccaagcgtatgttaccggagaaggtcctgttgagaaccttgcaaagcatctcagtgatccttttggaaacaacttgcttaccgtcatcgctggaactgccgagagagctcccactctctaagccatttctactttttttaagagcttccaaaatgtacactttgttcgattggaactcctttttgacaatgttaaaaaaacttccatctgaatcttcttgatatatttcaaattttcaaaaaaaaaaataaaataatttataaaaatataaataaaaaatatattaattataataataattaaaataattttttttttt

SEQ ID NO: 119190 - DNA, 492 bp, Arabidopsis thaliana
acacgactcacacttagggagaagctacgcacgcctgcaggtaccggtccggaatacacgggtcgacccacgcgtccgatcatgtcccatggctctctgaatttgatcctcaaagaatccggcctagatgctctaatctcgtcccaaaagtaaaccggcttgtgaaccggattatctctgaccaccgtgaacaaactcgtgactcaccgagtgacttcgttgacgtattgctctctctcgatggtcctgataaatcatccgaccctgatatcatcgccgttctatgggaaatgatattcagaggaactgacacggtggctgttttgatcgagtggattcttgctacgatggtccttcatccagatattcaatcgacggttcacactgagcttgatcaaatcgtgggacgatcaagggctgttcgaagagactgacgtggtgtctctagtatatctaacggctgtggtgaaagaagtcttgaggcttcacccg

SEQ ID NO: 119191 - DNA, 1051 bp, Arabidopsis thaliana
  unsure (1)..(1051): unsure at all n locations
ctcactattgggaaagctggtacgcctgcaggtaccggtccctggcccctcctccaggccaccggtttcattaacctggattgaattattcattcaggcatcttctcaaatttttgtttgtgaaaaaaacccacatcaaaagatctctcatttattcgtttcgtttctgctgttttgagtgtcgggttcgttttagctgtaatctttttttccggcgttcgatttgaaaaaatccggggaacaggtgatcggaatcacggctatacacgggatatcacggggtgttagctcacatgtccatattgtccgacagaagggttgtttaatcgaaactaatcctttgccgcacggaggacgtggagctctgccgtctgaaggcggcagcccttccgatctcctctttctcgccggtggcggttccagctttaacttcttttcctttaggttttaggagttagggtttgttagtgttttttccttcttctttttttggtgctcttgaatcgcttttttcttgggggaagttttttcttttgctcttcgaaatttgtcttttttgagaatgttgaaaatcaaaagagttccgaccgttgtttcgaactaccagaaggacgatggagcggaggatcccgtcggctgtggacggaattgcctcggcgcttgttgccttaacggggctaggcttccattgtatgcatgtaagaatctggtaaaatccggagagaagcttgtaatcagtcatgaggctatagagcctcctgtagcttttctcgagtcccttgttctcggagagtgggaggataggttccaaagaggactttttcgctatgatgtcactgcctgcgaaaccaaagttatcccggggaagtatggtttcgttgctcagcttaacgagggtcgtcacttgaagaagaggccaactgagttccgtgtagataaagtgttgcagtctcttttgatggcagcaaatttaacttncactaaaagttgggcaagaaagnggttgcnttccnagttttnaagcttgtgnanggttgcccaagntcaantt

SEQ ID NO: 119192 - DNA, 531 bp, Arabidopsis thaliana
cagctactattcgactcacttatggctaagctggtacgcctgcaggtaccggtccggaattcccgggtcgacccacgcgtccgatttgctctctttctggttcactcacctaccattactataagtctgaaagagtgattgaaacccacctcgaaaaatctatccttttttttgttttccttctccggcgaatccccggggagattggtaatcggtaatcacggctatttacgggataaagccacggcctttgagctttcatgtccaacgaaagggttgtttaatcataactaatcctttgcctcacggaggacgtggagctctgccgtctgaaggcggcagtccctccgatctcctcttcctcgccggaggcggttccacaaatagccactaaccctaaccctttttctaattaggtttttagttcttagagtcctgtattaatctgttatttcgagattataatatttgtgagcaatgttgttgaagatcaaaagagttccaacagttgtatcgaattatcaaaaagat

SEQ ID NO: 119193 - DNA, 365 bp, Arabidopsis thaliana
cccacgcgtccgcccacgcgtccgcacacatcaaacacgtgaattgctctctttctggttcactcacctaccattactataagtctgaaagagtgattgaaacccacctcgaaaaatctatccttttttttgttttccttctccggcgaatccccggggagattggtaatcggtaatcacggctatttacgggataaagccacggcctttgagcttcatgtccaacgaaagggttgtttaatcataactaatcctttgcctcacggaggacgtggagctctgccgtctgaaggcggcagtccctccgatctcctcttcctcgccggaggcggttccacaaatagccactaaccctaacccttttt

SEQ ID NO: 119194 - DNA, 968 bp, Arabidopsis thaliana
gtttcagtcattcaagttcatgagaatagaaacgagtccaagtttgttgttcatgcaaaattctcatgactctgttacactcctgaatttcttctacttatattccattcaataacttttcttcttctatcagttcaacgttcacacactttttccatttcctcgacaaactcctttttttctctcacttttctcgaattctttttttttttttttctctcaacgaaacataaatcctctgttttggtttaagagatggagatagaagcaagcagacaacaaaccaccgtaccggtttcagtcggcggtgggaattttccggttggtgggttaagtccgttgagtgaagctatatggagagagaaagctccaacggagtttgtcggagacgtgtcagcgaggcttacgtggcaagatctgacggtgatggtgactatgggagatggtgagactcaaaatgttcttgaaggtcttaccggttacgctgaaccgggatctctcacggctctcatgggcccttccggctccgggaaatctactatgctcgacgcattagctagccgcctcgctgctaacgcttttctctccggcaccgttcttcttaacggccgcaaaaccaaactctcctttggaacagctgcatatgtgacccaagacgataacttgattggtacgttaactgtgagagagacgatttggtattcagcgagagttcgtcttccggacaagatgttacggtcggagaagcgtgctctagtggaaaggacaataatagagatgggtcttcaggattgtgcagatactgtcataggaaattggcatttgcgtggaattagtggtggagagaagagaagagtcaagtattgctcttgagattttaatgagacctcgtttgctgtttctcgatgagccaacaagtggtcttgatagtgcttctgctttctttgtgactcagactttgcgtgctt

SEQ ID NO: 119195 - DNA, 459 bp, Arabidopsis thaliana
atagggaaagctggtacgcctgcaggtaccggtccggaattcccgggtcgacccacgcgtccggttactaagcaagcagccttggaaaatgactcttctgcgtattgcctcagatacgtaaagcagttactgtgcgtgtccggagactgaaaagcctgaagtagggaaacaaagtagttttatcagacaaaaaaaagatttttgataagattcaagttggatgcccttaataccttatcgatgttgacagctggtgcgtacttgtctgtttgtgttttctctttgtcaagaaggaaatagactctagtatcgactttagatgtctcgtgccacgacttcacagctgtttccatagtctcaacaataaaaaaaaaaaaaaaagggcggccgctctagaggatccaagcttacgtacgcgtgcatgcgacgtcatagtcattctatagtgcgacctaattc

SEQ ID NO: 119196 - DNA, 741 bp, Arabidopsis thaliana
  unsure (1)..(741): unsure at all n locations
acgactcactatagggaaagctggtacgcctgcaggtaccggtccggaattccgggtcgcccacgcgtccgagacgacagaagggtacgaggctgagtatgtttcgttgcatgtgaggagaagtaaccgagcagcattcaatctatacactgagacattaggctacaagattaatgatgtagaagcaaagtactacgccgatggggaggatgcttatgacatgcggaagaatctcaaggggaagcagaaccatcaccacgcccacggtcatcatcatcaccatggaggaggatgttgttctggtgatgcaaaagttgtagaaacagctcaagccgtagatggtaaagcagtttccaaatgagattcgaaagcagataattatgagtatattgaggtgggttcactggctcgctctagtacttctcactatttccattcatatgattccgagtgacaaatacatttggtgaccactctgtgttactcctttgtctttctttggttgtattgaaaatttagccgttcctttttttgatgtatcattttggaaattccaagctttcattaaggctttacaacttaagctggaaatcttctatttgcaagatagcagatctctattggcaatatagtacatttaattacaagaaaaaaaaaaaaaaaaaagggcggccgctctagaggatccaagcttacgtacgcgtgcatggtacgtcatannnnnnnnnnnnnnnnnnnnnn

SEQ ID NO: 119197 - DNA, 697 bp, Arabidopsis thaliana
  unsure (1)..(697): unsure at all n locations
cccanccccnggcnggttcgggctgggttttcgtccatggggggaantaccggccccattcatctttccctggggcattaggctccaggattaatgatgtggaagcaaaggtcttccccgatggggaggatgcttatggccatgcggaaggatcccaaggggaagcagaaccatcaccacgcccacggtcatcatcatcaccatggaggaggatgttgttctggtgatgcaaaagttgtagaaacagctcaagccgtagatggtaaagcagtttccaaatgagattcgaaagcagataattatgagtatattgaggtgggttcactggctcgctctagtacttctcactatttccattcatatgattccgagtgacaaatacatttggtgaccactctgtgttactcctttgtctttctttggttgtattgaaaatttagccgttcctttttttgatgtatcattttggaaattccaagctttcattaaggctttacaacttaagctggaaatcttctatttgcaagatagcagatctctattggcaatatagtacatttaattacaagaaaaataatcttggcttgtaaaaaaaaaaaaaaaaaaaaaaaagcggccgctctagaggatccaagcttacgtacgcgtgcatgcgacgtcatagatacttnctatagtgtcgtcctcaattagattc

SEQ ID NO: 119198 - DNA, 746 bp, Arabidopsis thaliana
  unsure (1)..(746): unsure at all n locations
nnnnnnnnnnnnnggtaaatacgactcactttaggaaagctgacacgcctgcaggtaccggtcccgaatttccgggtctgtaccacgcgtccggagcaattgagcagccatggtttgcatcaggcgagcgacggtggatgatctgctggcgatgcaagcctgcaatctcatgtgtcttcctgagaactaccagatgaagtactacctctaccatatcctctcatggcctcagcttctctacgtcgccgaggactacaatggtcgcatcgttggctatgtcttggctaagatggaggaagagagcaacgagtgccacggccacatcacttctctcgccgttcttcgtacccatcgcaagctcggtctcgccactaagctcatgaccgccgctcaagctgccatggaacaggtttacgaggctgagtatgtttcgttgcatgtgaggagaagtaaccgagcagcattcaatctatacactgagacattaggctacaagattaatgatgtagaagcaaagtactacgccgatggggaggatgcttatgacatgcggaagaatctccaggggaagcaggaccattaccacggccacggtcattcatnaatcaccatggnggaggntttttttcttggtgnttncaaaaatttttggnancagnttaagccctagattgttaagcagtttccaaatnnggnttntnaagncggtanttttgggtttttggggggggtccangggnccccct

SEQ ID NO: 119199 - DNA, 473 bp, Arabidopsis thaliana
gaaaaatggcgaacaatgttacatacacatcactttatttcttataatgctcaatcgcaactatgccgtaaaacaataaacgagggtagtatccatttgcgggtgagctcattcgccgtccttcctccatttggttcctcatacagctccacaaccgatagatcttcttcttcttcgttttactcatctctcgaaacttctccgcatatctcaataccggttccagtcaaattcccgttgtccaaatgtgttcgtctcgtgctcactgaatcagccttctgatgatgcttccgacgccgccctttttctcgaatccaattcaattgctgattacatgcggttcaaacgccgtcccgaccccggaaatggtaccagcgagttgcagactgcaatcgtgagttacaagaaacgtttcccttggattcttctcaacccttttcttcaggtggatttggtctcaactattcatattg

SEQ ID NO: 119200 - DNA, 509 bp, Arabidopsis thaliana
aaatcatttacgttttgatcgacaaaaatggagttgataaacgactttctcaacctaactgctcctttcttcaccttctttggtctctgcttcttcttgcctcctttttacttcttcaagttcttgcagtctattttctcgacaattttctctgaaaatctttacgggaaagttgttctcatcactggtgcttcctccggtataggcgagcaattggcatatgagtacgcatgtagaggtgcatgtttagccctgaccgcccgaaggaagaaccgtctagaggaagtggcagagattgctcgtgaactcggatctcccaatgttgttaccgttcatgctgatgtctccaaacctgatgactgtagacgaatcgttgatgacaccatcacccattttggcagattggatcatcttgtaaataatgctgggatgacgcagatttcaatgtttgagaacattgaagatataacgaggacaaaagcagttttggatactaacttctgggatcg

SEQ ID NO: 119201 - DNA, 924 bp, Arabidopsis thaliana
gaaaatcacattattttgttttgttttctggtccactcgttttaaactacggcgatcgattttcacggcgagaaatgttgtcggcgcttggctttgctttactcagcatcttcgcgatcctcttgtcgttatcaaccttgtctaatggattacttcaacctcgtaggatttctcatggcttgacggaaagtagcaagtacttgacgagggatgagctctggttcaatcaaaccctagatcattactctccttctgatcatcgcgaattcaaacagcgatactatgaatatctagaccatttacgagttcctgatggacctatctttatgatgatctgtggcgaaggaccttgcaatggaatccccaatgactatataactgtgttagcaaagaagtttgatgcaggcattgtttcacttgagcatcgttattacggaaagagctcaccgtttaagtcattagccactgagaatctcaagtatctttcttctaaacaggctcttttcgatttagctgctttccgccaatattaccaggactctttgaatgttaagtttaatagaagtggcgatgttgagaatccgtggtttttcttcggagcttcttattctggagctttaagtgcttggttccggcttaagttccctcatttgacctgtggaagccttgctagttctgcagttgttcgtgctgtctacgaattccccgaatttgatcaacagatagctgagtcggctggaccggaatgtgaaactgcgctacaagagactaataaactcttggaactagggcttaaagtgaataacagggctgttaaagctctcttcaatgccacggaggtctagctttactgtttctgttttcttttgtttgaatcttaaggaagtaagaagtctatctccaatctgattaagtttctgaaat

SEQ ID NO: 119202 - DNA, 434 bp, Arabidopsis thaliana
ctttccctcaaacccaaaacacattttgttttttgtttcccatctaaaatgcgtatgagttgtaacggatgtcgagttctacgaaaaggctgcagtgaaaactgtagcataagaccttgtcttcaatggatcaaatccgctgaatctcaagccaacgccaccgtcttcctcgccaagttttatggccgtgcggggctcatgaacctcctcaacaccggtcctgaccacctccgtcctgcgatatttagatcattgttgtacgaagcatgcgggaggattgtgaatccgatatacggatccgtggggttattgtggtcaggaaactggcatctttgtcaagcggccgttgaggcagtaatgagaggctcacccgtgactccgatcgcatgcgacgcagcggttactggtcaagcacctccttttaacaacaagct

SEQ ID NO: 119203 - DNA, 397 bp, Arabidopsis thaliana
ctggaaaaaaagagtaaatgggaagcgacgactgactcttcttcctcctgctcctccacctcttgtttaggttcttagcactgaaatttgatcagaaggtgttgacggtgtagagcttcacgaaacataaactttcatttcttctagcttcttgatttgctcttaaaggtgcatgttgaagtgattgaaagcgatttacatgtgacttgcagctcggtcagacattatacattacactcaacacgagattggaaaggatgcttgagaatccaaagttcgatttgcacgctgttggcaatcacaacaacgacaacaattactatgccttcacccaagacttttatcaaaagctcggggaagaaggtacaaacatgtctgttgacagtatgcagacaag

SEQ ID NO: 119204 - DNA, 456 bp, Arabidopsis thaliana
ggccaacacgcgtgggggcattttcgtttcgtctccacacgcctctctctctctctcgcttcttcaatcattcatcactccgacgtcagattcaaaatcctccatgatcgatcccaattgatcaatcaataaccttatcttcttcatcttctctgtcagtatctgaatctgcatctggaagcgtgatttcatcatcatgtatttaaccgcttcatcttccgcttcttcctccatcatccgagctgcttcttctcgctcttcttctcttttctctttccgatcggttttatctccctccgtttcatctacttctccgtcgtctcttctcgctcgtagatcttttggtaccatttcccctgctttccgtcgctggagccattcctttcactcgaaaccatctccgtttcgcttcacctctcagatcagagctgtttctccagtcttagatcgtctcca

SEQ ID NO: 119205 - DNA, 831 bp, Arabidopsis thaliana
tgaaagtttagaaaccaggaccccgcgattttactgtaaaccccccaatttccaagcgcatgtcggggtattttggaggtttctggggtccaaatgccaaagatgggttttctttgttttgaccaaccttctttgataggcgaaaagacggagaagggttgcttgagccttaccagacaggccccttgggaagccccaaattcgatgttgagaaagagaacccaaaggcagaagaggaagctgctggctctgcagatggtctcaagagctaccagaagggttgtattcgacctcttgaacaaggttgcagatttatctttcctaagtgcctacaagtctaagatcacggaactgattgagaaagccgagcaacaaccaaacttaaccattggtgtcctcgtcgccattgtggttgtattcttctcgctcttcctcaagcttatctttggtggcaaaaaggcggcggcacctgtggaaaagaagaaaccagaagtagcggagagttcaaagagtggggatgaggcggagaagaaggaagaaaccgcggcaccacgcaaaaggcaaccgagacgtgataattagaacaagattttaaagtagttttcgaagatgtgaaagaaaagttcagatttatttttctgtttttggttttgggttgaatgttgttttctgctgtagcctataatggtgtaacaccaagtttgagaaatttttgtctttgggcaaagaaaaaaaaggaggaatatgcggccgcgaattcatgcagcacagggtccgctagttctagagcggccgccaccgcggtggagctccagcgggtgttccttttag

SEQ ID NO: 119206 - DNA, 1516 bp, Arabidopsis thaliana
  unsure (1)..(1516): unsure at all n locations
agctctctacgactcactattgggaaagctggcacgcctgcaggtaccggtccggaattcccgggtcgacccacgcgtccggacaagtgtggaggtacgaacaaagtgcatttcatcttgaagcacaagaatcccaagagtggcgagtacgttgaacaccatctgaagttccctccctctgttccttatgacaagctttcccatgtctacaccgccatcttgaaacccgacaacgaggttagaattttggttgatggagaggagaagaaaaaggccaatttactctctggtgaagactttgagcctgcattgatccctgccaagaccatccctgaccctgaagacaagaaaccagaggattgggacgaaagagccaagattcctgatccaaatgccgtgaagcctgaggactgggatgaggatgcacctatggagattgaagatgaggaagctgagaaacccgaaggatggttagatgatgagcctgaggaggtcgacgaccccgaagcgaccaagcctgaagattgggatgatgaggaagatggtatgtgggaggctcctaaaattgacaaccccaagtgtgaagcagcacctggttgtggtgaatggaagagaccaatgaagaggaatcctgcttacaagggcaaatggagctcacctcttattgataacccggcttacaagggaatctggaaacccagagatatccctaaccctgactactttgagctagacagacccgattacgaacccattgcagccatcggtattgagatctggacaatgcaagatggtatcttgtttgacacatcttgatagcgaaagacgagaaggtcgctgagacttacagacagaccacttggaagcccaaattcgatgttgagaaagagaaacaaaaggcagaagaggaagctgctggctctgcagatggtctcaagagctaccagaaggttgtattcgacctcttgaacaaggttgcagatttatctttcctaagtgcctacaagtctaagatcacggaactgattgagaaagccgagcaacaaccaaacttaaccattggtgtcctcgtcgccattgtggttgtattcttctcgctcttcctcaagcttatctttggtggcaaaaaggcggcggcacctgtggaaaagaagaaaccagaagtagcggagagttcaaagagtggggatgaggcggagaagaaggaagaaaccgcggcaccacgcaaaaggcaaccgagacgtgataattagaacaagattttaaagtagttttcgaagatgtgaaagaaaagttcagatttatttttctgtttttggttttgggttgaatgttgttttctgctgtagcctataatggtgtaacaccaagtttgagaaatttttgtctttgggcgaagaaaagaaaggaggaatatgtatgtgaagacggtttgttggcggccgcgaattcgatatcaagcttatcgataccgtcgacctcgaggggnnnnnnnnnnncctatgagggggatttt

SEQ ID NO: 119207 - DNA, 782 bp, Arabidopsis thaliana
gggccccccctcgaggtcgacggtgccgctgcacgagggatttttgttccgatctacttctccggcttatcaccgatttagatctaagcctgaggtttccttttgcattttagagattccgagaatgagacaacggcaactattttccgtgtttttgcttctcttagctttcgtttcgttccagaagctttgctactgtgacgatcaaacggttctgtatgaatcgttcgatgagccttttgatggccgctggatcgtttcgaagaatagtgattacgaaggtgtatggaagcatgcaaagagtgaaggacatgaggattatggacttctcgtgagtgagaaggctaggaagtatggaattgtgaaagagcttgacgagcctctaaacctcaaggaaggaactgttgttcttcagtacgaggttcgtttccaggaaggacttgagtgtggtggtgcttacttgaagtacctccgtcctcaggaagctggatggacacctcagggattcgatagtgaatccccttactctatcatgtttgggcctgacaagtgtggaggtacgaacaaagtgcatttcatcttgaagcacaagaatcccaagagtggcgagtacgttgaacaccatctgaagttccctccctctgttccttatgacaagctttcccatgtctacaccgccatcttgaaacccgacaacgaggttagaaatttggttgatggagaggagaagaaaaaggccaatttactctctggtgaagactttgagcctgcattgatccctg

SEQ ID NO: 119208 - DNA, 461 bp, Arabidopsis thaliana
gagacccccccaaaatcgctgaagaacgcctctcgagctcagatagggtttataggtttctagagagaatttcatggcgacatctgaagcggaatatgagagtgatcccgaggagctgaaccgctccttggcgacgaggaggagagaagcgagtgatgacgatagtgatgatgatgatgctgttagagatgtgaaaaatcagagggctgtggttgattctgacctatctgatgaagaagttggtactgtgaagtatgataatgacgaagatggggaggatagttatgaggatgatgaggaggaaagtggtggaggaatcgataatgataagagtggtgtggtgaaggacgctggtgatatgaatggagaagaaggaagaaaccgcggcaccacgcaaaatgcaaccgagacgtgataattagaacaagattttaaagtagttttcgaagatgtgaaagaaa

SEQ ID NO: 119209 - DNA, 695 bp, Arabidopsis thaliana
acaacatctttttcctcgttatcttcaacctaccctttgtcttaccttgagccggtctctctctttggctcgccaacacaagatagttaaatgaatggcttcaaagactgggttttcgcgctatccaactcaatggcatcatctagaccacttttgggaagtgaccctttttttccgtgaccctcatcaagaacaagataaccactctcaagcacctgccgcaccacaaccagtgacactctcggaaccaccatgttcaaccagtagtgatttagaaattctgcctcctctctctcagcaacaagttccacttgaaagcttgtaccagtcaagtattgatcttaacggaaagaaacataatccactagcaaagattggtggccttcaagtgcagttcttacgccttgttcaaaggtttgggcagtcacagaataatattctagtctccaaggttttgtatcgggtacatcttgcgatgctgatacgagctgaggaatcagaacttaagaatgtaaaacttaggcaagatagggccaaagctttagcaagggagcaagaatcatctggcataccggagcttgatttctcacttagaatccttgtcctggggaaaacaggtgtccgcaagagtgcaaccataaactctatttttggtcagcccaaaagtgagactgatgctttccgaccgggcacag

SEQ ID NO: 119210 - DNA, 725 bp, Arabidopsis thaliana
  unsure (1)..(725): unsure at all n locations
acccacgcgcgctcgccaaaaaccttgaaacctttaaaaaatcgaaactatggctaagctcattctcgttttcgcaactcttgccctcttcatcctcctagccaacgcatccatctaccgcacagtggtggagttcgaggaagatgatgacgtgagcaacccacaacaaggtaagtgccagagggagtttatgaagcatcagcaactaagaggttgcaagcaatggatccgcaagagagctcaacaaggaagaatcggatacgaagctgatgactttgagctcactcttgatgtcgatcttgaggacgatgagaacccaatggggcctcaacaacagtcatctcttaaaatgtgttgtaatgaattaaggcaagtggacaagatgtgtgtgtgtcctacactgaaaaaggcggctcaacaagtcagattccagggaatgcatggacagcaacaggtgcaacatgtgtttcagactgctaagaacttgcctaacgtttgcaaaatccctaccgttggatcctgctagttcaaggcatctccttactaggaccatgagggggcccaaactataaaagcacacacgtncacatggtggtnttnttaatgataataaaaagtctcactcttgtggcgtgtnngatgattnnatagtaggtaaatnttttgtacttgtatgagtttagnngcctttaggtgggcaattttttaccaaccttcttaggtgg

SEQ ID NO: 119211 - DNA, 304 bp, Arabidopsis thaliana
cttgcctaacgtttgcaaaatccctaccgttggatcctgccagttcaaggcatctccttactaggaccatgaagaggaccaaactataaaagcacacacgtacacatggtggttttgttaatgataataaaaagtctctctcttgtggcgtgttcgtgtttgtatagtagataaatgtttgtactgtatgagttagagtcttagtggcaatattacaccttctagtgtaatgtaacttgccctacccccttaaataaaagatgttcttgggtattcaaaaaaaaataaaaaaaaaaaattatat

SEQ ID NO: 119212 - DNA, 610 bp, Arabidopsis thaliana
  unsure (1)..(610): unsure at all n locations
cacgcgtccgagtaaaatatacgaagtaaaataaatggtcccaagtatatgaatgaatacatgtatttacagatatctctctcccctatctccttatgatttgtcattttcctcacccataatcctataaaataatcaagaacctccgagggagagagacatacacacagacagagtaagacatatataacatatatagagagagaagacctaaacaaagagacatatggtgtctttaggttactgcttgaaggagaagaagacatgcgtgagatgggtagagatatacttcgatgactgtctctgtaacttaaacgacgacgtttcattcgcacttggaatcgctagcctcctctgttggggagtcgcagagattcctcaggtcatcactaacttccgtacaaagtcaagtaacggtgtctctctctccttcctcctcgcttnggtcgccggtgatatcttcaatctcgtcggttgtcttcttgaaccagctactttgccgactcaagttctacaacagccttgctttacanagtgggcactntagtnttggggtnccaggctatttcnngnggttnaattacaancttttnngncanggcgtcccaag

SEQ ID NO: 119213 - DNA, 1249 bp, Arabidopsis thaliana
  unsure (1)..(1249): unsure at all n locations
atgannnnnnnnnnncgcgtccgaacaacactgttcaaaacatctacacttcacttgacattcatttaggacagtcttactctgttcttgtgacggctaaccaagctcctcaagactattacatcgtcatctcctcgaggttcacgcggaaagtccttacaacgacttcgattctccattacagtaactcgagaaaaggcgtatctggccctgttccaaatggtcctactttggacatcgcatcttcactctaccaagctcgaactatccggagaaatcttacagcgagtggtccgagaccgaatccgcaaggctcgtatcattacggtttgatcaaaccaggccgtacgatcatactcgccaactcagctccttggatcaacggcaagcaaaggtacgccgtgaacggtgcctcgtttgttgcgcctgacacaccattgaagctcgccgattacttcaagattcccggagtttttaacctcggaagcatcccaacgagtccctctggtggaaacggagggtatcttcaaagctctgttatggccgctaactttagagaattcatcgaggttgttttccaaaactgggaaaattcagtccagtctttggcacgtctccggttaactctttcttcgtcgtcggtatggatggaggacaatggactcccggaagccgagcaaagtacaacctgcgggacggggtttcacggtccaccggtcaagtatatccgtggccatggacagcgtcttacctagcgttggataatgttgggatgtggaacataaggtcggagaattgggcaagacagtatttggggcaacaattctatcttcgagtttacacttcctctacttcgtaccgagatgaatatccaccaccaaagaacgctcttatgtgcggacgagctaaaggccgccacactaggccattctaaaagggatattggacgcaacggctcaactgttttttttttctttgtttttttagattgaatgatttgaaatgtttagtattgtcacgagagggtggcaaagagatgtgagcttcgtggatttattcactacggcacaaaaattaggaacaagaaaaatttggagcttgacttgagctttcaacttagtttttatgacgaaatcaaatgttgtgttcttattttaaaaaaaaaaaaaaaagnnnnnnnnnnnnnnnnnnnnnnnnnnnnnnnnnnnnnnnnnnnnnnnnnnnnnnnnnnnnnnnnnnnnnnnnnnnn

SEQ ID NO: 119214 - DNA, 1169 bp, Arabidopsis thaliana
aacgactcacgttagggaaagcacgtcacgcctgcaggtaccggtccggaatacccggttcgacccacgcgtccgactatggtatctgaaaatgaaattgatgcaccttatgcagattggaattgttcgtgtctttgagcaccaaggtattgaagctcctagtgacgatgatgattttattgaggtaagatcaacaacgcaaatgcttaatgatcgccgtgaacagagagaaaaggaaattaaagagaagtctcaggcagccaaggcattccgaaaacctcgttcaactttccagaacaatactactgcagccaggtccaacagaagcccaccagctagccgagctgcgaacaataagcagtttaatccagtctccaacagacagacgttagccccaattggcacaccttcacctaaaatagattcccatgttgatgaaaaatctgggagcaacaagtccactcaggcaagtagtgctcttccagttatacccaaaaatgatcagaatccagcgtcaggttttgtattcagcaacaaaaataaggttctcgataacagtcatacacctgtggggacttggggtaaccaactcacctatcagccggttatggccctaacccagagtcagcttgatgaagccatgaaacccgtatctcatctttcatgtgtttctgttgagaatggtgccaaccgaattagcgagtcaaattcgacatcaacgtctgttgtgccaaagaacaatactttttcaagcagcacaagtccaataaattcattgcttgctgagggcaaaattcaatttggtgcagttacatcttccactgttatccctccctgtggtgggcgtacagagaaggatagctctttatattttgaaaaagataacaaacatcgaaatccatcatccactggcatagagatttgtgaagcagaagcagaagctgctgcttcagctattgctgtggcagccataactaatgatgaaaccagtgggaatgccttgagtactggctctgtattacctgttgaaaccaaaatttatggaggaacagagttagatgatggggcagcaagtggtactgttggtgggcagactagtcgatcaaaagctgaggaatctctcattgtttctctaccagcagatctttcagtggacaccccaatctctc

SEQ ID NO: 119215 - DNA, 564 bp, Arabidopsis thaliana
  unsure (1)..(564): unsure at all n locations
gccggcactaatacgactcacttagggaaagccggtacgcctgcaggtaccggtccggaattccttcttctagatcgagaggcgcatgggtcttaccagccgccgttgacgactacgacgaccattctcttcctcttcatcttctctccttctgcttttctctatttcctattctctccaaattcaccatttccttccaccactcagagatctccctttcttattagctatgtcttcttctaacacgccatcttctagcgccgccgctgccggatcgatagattcttccgccgcccggagaaattccaagagacccaagtattcgaaatttactcagcaggagcttcctgcttgcaaaccaattcttacgcctggttgggtgatttcaacgtttttgatcattagtgttatcttcattccccttggtgttatttctctctttgcttctcaggatgttgttgagatcgttgatcggtatgatagtgcatgcataccctatctgatagggcaacaaggtgaancatnaaggactggaaaaaanttgacccgncggaaattgtnttc

SEQ ID NO: 119216 - DNA, 705 bp, Arabidopsis thaliana
atttattttcattgttcaaacaaatatttgcagaaaagagatttatttttacctgcttagcatataataggaagggcgtaagaaaactttttttttatatattcattgctagattattaaaataaacatgaatgcacagatatatatgtctatttttattcttttattgtggtacagctctatctgggacagcacatgctgtgctctataaaaaaggaaatgttctcttcaagggaaaaattgaaacataaaaatttattgagaattactcctcaaacgcatctctagagagataaaataccccattatagagctataggtctataacacaacgtaacgtatgttctgattctggggtttacatatactcatcattactgttataatttaaattgaagaagatttctttttaattgaaaaaaactcaatatagattagttagaaatgcatttctaatgattttcttaatattattagaaataaaaaactggagattttaattttcattcaaaaaaggtcatgaatttacagtcaatagttaatggttctggtttgtactagattcgatattttgtgattgataatctatatatagatttttttcggaatcgttttggcggcatggccgagtggtaaggcgggggactgcaaatcctttttccccagttcaaatccgggtgccgcctcagcaacaaactttaaata

SEQ ID NO: 119217 - DNA, 447 bp, Arabidopsis thaliana
tctctctaaaacactctacaacaaaacttagttgtgtgatctttggtttccttgaaatcatacagttcaaagagtttgctcaatgaaggttcacgagacaagatctcacgctcacatgtctggagacgaacaaaagaagggaaatttgcggaagcacaaagcagaagggaaacttccagaatctgaacagtctcagaagaaggcaaagcctgaaaacgatgacggacgttctgtcaacggcgccggagatgctgcttcagagtacaatgagttctgcaaagcggttgaggagaatctgtccattgatcagattaaagaagttctcgaaatcaacggccaagattgttctgctccagaagagaccttgctagctcaatgtcaagatttgctgttctatggggcattagctaaatgtcctttatgcggaggaactttaatttgcgacaa

SEQ ID NO: 119218 - DNA, 493 bp, Arabidopsis thaliana
acgcctgcaggtaccggtccggaattcccggttcgacccacgcgtccggtctcaaaagagattaaaagagtacgagctcaaatggaagaagatgaacagttatctgtgttgatgagagggcttcgtggccagaatttgaaggattcggtttttgctgatgataatattcagctaaggcttgttgagactggccctagcagtgagttcttacctttggtatatgatccggagaccatttctgcctattgggggaaacggcctcgtgctgttgcttctcgagttatccagttgctttcggttgctggagggtttctatcgcgtattgcaggggatgtaataaacaagaaagttaaagagaatgaggttgctacggcaattgaattgagggaaattgtaacttccttgggtccagcatacattaaacttgggcaagctttgagtattcgaccagatatattgtcacccgctgcaatgacagagctacaaaagttgt

SEQ ID NO: 119219 - DNA, 1057 bp, Arabidopsis thaliana
gtaccggggcgaagtcccggatcgcccgacgcgtcccacgcttactgcaaattcgatagagattaaattgaaacagtagattttttttatttcatatttttgtattaggaaatccgtcgatatctcttattgaatcttcttgtttctatatatttcataggaaatatattgcgttcctgcctagagaaagagagtctttttgcaaagtaataactaaaagggcgtttcaatattttttttgattcgagaacataacaagatcctacattctctttgtattaagaatcaatttgtattaaaaataaacaaaaatcgaatcataatcatggcttcagatatcaattaaatatttccatattgatgcatccgagatgacaatgtaatgtgatcgaaggtgtatgtgagaaagaaactctcatttacagtttcctataattttatttaaatattgaattaaatataaataagaaattttccccttttttgacagatacataagggcatgtacatatagatatcaaagaaaatagaaaaaaatattaaaagttccctttttgcttcaacccgtcaactaaaaaaagggtataaaaggaaaataacaatagttgatactatagtatttaatagacaagtatttaatacacgcaaaaaagaaaaaaaaaagttctttattctttatctgaataatgagtcatccgacaattcatgatttagattcaactacttatacttattaataaactaatagcaaggaagaaacaaattgagttgatccgtttacctaagtaaggaccaataaaatcaaaaattttgatcttcgaaaccaattaaatgaaattctaagggttccattttatggggcagtgcgcgagaaattaaatcataaacaaatgatagaatttgagcgccctgaaaatgccataatatataacatcaaaatctataacattaaggtgttcggaaatggttgaagtagatgaataggaggatcgctatgactatagcccttggtaaatttaccaaagacgaaaaagatttatttggtattatggatgac

SEQ ID NO: 119220 - DNA, 548 bp, Arabidopsis thaliana
  unsure (1)..(548): unsure at all n locations
aatcccgggcgccacgcgtcgatgaacagagttttccatttcatatttttgtattaggaaatccgtcgatatctctgattgaatcttcttggttctgtctatttcataggaaatatattgcgttcctgcctagagaaagagagtctttttgcaaagtaataactaaaagggcgtttcaatattttttttgattcgagaacataacaagatcctacattctctttgtattaagaatcaatttgtattaaaaataaacaaaaatcgaatcataatcatggcttcagatatcaattaaatatttccatattgatgcatccgagatgacaatgtaatgtgatcgaaggtgtatgtgagaaagaaactctcatttacagtttcctataattttatttaaatattgaattaattattaataagaaattttccccttttttggcccagccccaaggggacgggccccttggtatccaaggaattggnaaaattttaaagnccccttttgctcaaccggcaccaaaaaggggtnaagggataccatagtgggccnc

SEQ ID NO: 119221 - DNA, 963 bp, Arabidopsis thaliana
  unsure (1)..(963): unsure at all n locations
caggaattaaaccaagacggcccttttaactcagtggtagagtaacgccggggtaaggcgtatgtcatcggttcaaatccgataaggggcttttacgttctttactttctaatagtcaaaatttcatttgaaagtctataatttaatttcaaattttgttaatttcattctaataaatttcattctaataatataataactaataataaagttagcgagtaatttaaaaaataaaaatgaacatttgtatattataatacaattacaatgaataatgataagtcgtctcttgaatcgccaaatatatattctttttttttcgatttttcgatagattagaaatcgacaaatccaaaagaaaaagtaagtggacctaacccatcgaatcatgactatatccactattctgatattcaaattcgatagagattaaattgaaacagtagattttttttatttcatatttttgtattaggaaatccgtcgatatctcttattgaatcttcttgtttctatatatttcataggaaatatattgcgttcctgcctagagaaagagagtctttttgcaaagtaataactaaaagggcgtttcaatattttttttgattcgagaacataacaagatcctacattctctttgtattaagaatcaatttgtattaaaaataaacaaaaatcgaatcataatcatggcttcagatatcaattaaatatttccatattgatgcatccgagatgacaatgtaatgtgatcgagggtgtatgtgagaaaggaactctcatttacagtttcctataattnngtttaaatattgnattaaatataaatangganatttccccccttttttgncaggttccataggggncatgtnccttttgggtttccaagggnattggggnanantttttnaaggnccccctttttgngttaaccccggcaccttaaaaaggggggtt

SEQ ID NO: 119222 - DNA, 968 bp, Arabidopsis thaliana
cagtaccggtctggaattcccggctcgacccacgcgtccgcactcatcgaccagatcgagtttccatcgatctaatcaatcaatcatcagatttgatcttctcaagaagatgagcttgaagggtacgatcgtattactagggctcttatggagcttccaggctacgttagggattagattcgtgatagaccgtgaagaatgtttctcccacaaggctgaatatgaaggtgatacgcttcatgtctctttcgtcgtcatcaagtctgactctcaatggcattttaacgaggatggtgtagatcttgtgatacatggcccaacaggcgaacaaattcatgacttcagggagcagataagcgcaaagcatgattttgttgtccaaaaaaaaggggtttacagattctgtttcacaaacaagtctccttatcatgaaaccattgacttcgatgtacagcttggtcactttgcatactacgatcaacacgcaaaggacgagcatttcactcccttgatggagcaaatatcaaagttagaggaggctctttacaacatccaatttgaacaacattggttagaagctcagaccgatcgtcaagctatcgtgaacgagaacatgagccaaagagcagtacacaaagctttgttccgagtcgtttgcactgattggggccaagttttctccaaggttatcttctgcgtcgcttgtttgaacgcaaactcggcatggctcccggtgtctaaaagtatcgagtttattatgactttgaacttattttgccttaaaatgtaccagggaatctttacttaaaacctttttacagacagatcgtagttcattggaagatttgctttctcccatgttcaagaactaatcctctcgtgatgataattcttttttttctctttattaacagacaacttttccacaagctaggttttcatttcaatagagaaaatagtgattcctt

SEQ ID NO: 119223 - DNA, 480 bp, Arabidopsis thaliana
gaaactgccccttgagtcaaaacaggctttttcgttttcgattctgaacgagctcgctctttctcatccaattctctccaccgtcttctactccgatcaatcttcaaattttcttaacactcatcgaccagatcgagtttccatcgatctaatcaatcaatcatcagatttgatcttctcaagaagatgagcttgaagggtacgatcgtattactagggctcttatggagcttccaggctacgttagggattagattcgtgatagaccgtgaagaatgtttctcccacaaggctgaatatgaaggtgatacgcttcatgtctctttcgtcgtcatcaagtctgactctcaatggcattttaacgaggatggtgtagatcttgtgatacatggcccaacaggcgaacaaattcatgacttcagggagcagataagcgcaaagcatgattttgttgtccaaaaaaaaggggtttacagattc

SEQ ID NO: 119224 - DNA, 452 bp, Arabidopsis thaliana
ccatgatcatgagggggattcacaagtagagtctagagaaaagagagaatgggtgagaacaataccaaattccttatgcaatttgcaacttttgcaatggttttaacctttgcgatgatggtcaaagaagctacaagcatgtccatttgtgacatggacataaatgatatgcagaaatgtcgcccagccatcactggaaacaatcccccacctcccgtcaatgattgctgcgtagtggttcggaaagctaatttcgaatgcttatgcagatttaagttttatctcccaattttacgaattgatccatctaaagtcgtggctcttgtagctaaatgtggtgttacaacagtccctcgttcttgccaagtttgaagaactaagctgaggacaaatctctctatggggctgcaaacatcgctggatcttgacaagatcttgtcttgcatctgaag

SEQ ID NO: 119225 - DNA, 571 bp, Arabidopsis thaliana
  unsure (1)..(571): unsure at all n locations
nnnnnnnnnnnnnnnnnnnnnnnnnnnnnnnnnnnnnnnnnnnnnnnnnnnnnnnnnnnnnnnnnnnnnnnccacgcgtccgaaaaaagccagcgagagagacaaaggtcagaagatttgatttttcttattcctcttcaaaggcaaacaatttacacagctatatatatatttttagggtttttgagtatctcgcgaggttttacatagatttctccattatggattcgatgatgaatcagaagactgttttggctgtgacggatgatgtggtgttacctgttagctctgttttagctataatgaaagagcttggaaaggaagtgattgagagttttgatcctctgattattactcaagcatccacaataaatcagtttcctttggatgcttcctctgtggaggcggtattagccatttccaaaacatctgatttcccaagtgataaaatatgtggtgagttctcaagaatcttgaagcctggtggtacggtttttgtgtgcaaagttttggagggtgaaacgggagaaattcaacagaccattcaaaggagagtgacattggctggttt

SEQ ID NO: 119226 - DNA, 471 bp, Arabidopsis thaliana
gcgtcccttcttcttcttctttgagttttttttttttatcattcttgacgtcatgataaagatactcaacccccactcacaccattctcaaaccacaactcttaaaacagctgagatcttgtctaaatacagacccattgcaccaaagcccgggacgcctcgagtgaacgacgatgatccttcttcctctatgtctcacaaaatcagccaatctccttaccttcgtaacctctggcctcagcttcaagcgcgacctacaagaacccgcaagcgaggccgaggcgggatgggtccctcttctcttgctatgaagagaccaaagtcgtcatgcggttcttctagtacttctactatttctacacaacgtgttcttggacctattaaaacactgtcgtttcaggctttcactcatcataggttacctaacctacctcaagttggctacggttttgagaatggtgtcctttctac

SEQ ID NO: 119227 - DNA, 666 bp, Arabidopsis thaliana
atccaattgaatcatagcaaattaagtttcgcattcgaagtttttcttgatttgataaaaatggcggccatgcaactaacaagaaccgctctagttggtctctcaaaggctttccctggaatcaaagctccggctactctcgctgcttcttcccggaaagtctctcgcatctgcttcgccacctccgttagccaaaacgagggaagagatcctctagataacgctagagactcgagagctgattcagcttacggatcgaagaaatggagggaggacatcggagaaaactatgcccaagcggctaaagacaaggctaacgaaggagcaagcaaagctgcagataaagcctacgagacaaaagagcaagcaaaggataaagcctacgaaactaaagagaaagcaaaggatacagcctacaatgcaaaagagaaggctaaggattatgctgaacggactaaagataaggtgaacgaaggggcgtataaggcagcggataaagcggaagatacaaaagaaaaagcaaaggattacgcagaggatacaatggacaatgcaaaagagaaagctcgacatgcaaaagagaaggtgaaagagtatggagaagatactaaggagaaggcagaagggtttaaggagactgtgaaaggtaaagctgaggaacttgga

SEQ ID NO: 119228 - DNA, 424 bp, Arabidopsis thaliana
ctttgattgcttttcttttcactgcttaggttctttgtctgttaggtttagagagatcctttccaaagatccaaagctggaaactttctagtcaatgctgcttaagatctgactttttcccttcaatgtcgctctgaaatcccctaaatttttgggcccatcaggtgaataaagcggaggtcagaagatgggttctggtttaaatgacacattatctcggaactacaatggtttggagctatgggagataatagtgattgttctctccgcgatattcgttgtagttttagctatatcgctatggcttactttcagaagaaaaacctctagatcttcttctaatctaatccctgttagtcgccagattcctcctagtgttcctgaagagattaaagagattagagtcgacgaggtttcttcaagc

SEQ ID NO: 119229 - DNA, 513 bp, Arabidopsis thaliana
caggacccggtccggatattccgggtcgacccacgcgtccgatcttcaattcagtcttcttcttcttcaccaacccaatttcttttcttcaactctctcttctccccaaacccgacttctgatccgcatcgatttccatggcagccaacaccatttctctttccaacgtcgccgcctccaagaatctcaactcctttcaaagccgtgcctttattgctccaccaactatttttttccctgtggcttctgcaaagtctaaacctggggaactttctttatcttccacgactctttccaggtctcgtgtgcgcgccggtgctagccagctcatgaacgaaccgcttaacgatcaacgctccatctcttctcccactgtcgtcgaggttgatcttggtgaccggagttatccgatctatatcggcgccggcttgcttgatcactcagaacttcttcaaaggcatgttcacggaaagagagtgcttgtggtcaccaatgatcgagttgctcctctct

SEQ ID NO: 119230 - DNA, 483 bp, Arabidopsis thaliana
  unsure (1)..(483): unsure at all n locations
gacattacttatctccggtaacggacaaccactcgtttcccgaaacagcaactcacagactcacaccactccagtctccggcttaactaccaccagagacgattctctcttccgtcggttctatgacttcgattctcaacactgtctccaccatccactcttccagagttacctccgtcgatcgagtcggagtcctctctcttcggaattcggattccgttgagttcactcgccggcgttctggtttctcgacgttgatctacgaatcacccgggcggagatttgttgtgcgtgcggcggagactgatactgataaagttaaatctcagacacctgacaaggcaccagccggtggttcaagcattaaccagcttctcggtatcaaaggagcatctcaagaaactaataaatggaagattcgtcttcagcttacaaaaccagtcacttggcctncactggtttggngagtcgtctgtggtgctg

SEQ ID NO: 119231 - DNA, 1201 bp, Arabidopsis thaliana
  unsure (1)..(1201): unsure at all n locations
actcactatagggaaagctggtacgcctgcaggtaccggtccgctattcccgggtcgacccacgcgtccgcccacgcgtccgtacgggcgagaagacgacagaagggggatgcgatcataccagcactaatgcaccggatcccatcagaactccgcagttaagcgtgcttgggacctcagactgagaatcgcccaagatgcagctcgcggattaacatacctgcatgaagaaatggagtttcagatgatattccgcgatttcaagtcctcgaacattcttttggatgaggactggaaagcaaagctctcagatttcggtttggctcgtttaggtccatctgaaggattaacccatgtttctactgatgttgtaggtacaatgggttatgcagcacctgaatacattcaaaccggccgtctcacatcgaaaagcgatgtgtggggttatggagtcttcctctatgagcttatcactgggaggcgaccggtggacagaaacagacccaagggagagcagaatcttctagaatgggtgagaccttatttatctggcacaaggaagttcaagctcatattagatccaaggctggaagggaagtacccgatcaaatcggttcaaaagctagcagttgtggccaacagatgtttggttaggaactcaaaggcacgtcccaagatgagtgaggttttagagatggtgaacaaaattgtggaagcttcttcaggaaatggcagcccacagctagttccgctgaacagtgtaaaagcttcgagagacgcgagaggaaagaacaatggtggtggcggtgaaggaggttggtttggcaagttatggaatccaaagacaataagagcttgttgactgcttatagaattcaacctcttcttacagcaaaaaaaagagtcaagaaaggtttcatggagattccgaaggttgaagattctagcgagatcaagatgaagctcatatacatacataaagataattatatatgaagatttgtgaaagattctaaaatgatgaaatatgatttttgtatgaacttatgaatagtaaccacagctaaattagtaagatatgtatattaagccggccccgcattcgatatcaagcttatcgataccgtcgacctcggggggggtgcccannnnnnnnnnnnnnnnnnnnnnnnnnnnnnnnnnnnnnnnnnnnnnnnnnnnn

SEQ ID NO: 119232 - DNA, 711 bp, Arabidopsis thaliana
aaaaaagaatagatacgattgcattgcatatacttacggatgcgatcataccagcactaatgcaccggatcccatcagaactccgcagttaagcgtgcttgggcgagagtagtactaggatgggtgacctcccgggaagtcctcgtgttgcatccctctttttttgctttttttttttggttaaaactttatgactctataacttctataccgtgaggccaaacttggcatgtgataccttttcggaaagcccaaagagagccctccgacgaaagaagcaagacaatggaacttttccattgactttttgtcgactccaaattttgacctttaagtactttttcgggcattttcgtgatttgtgctatattacggacccaaaattactctttcaagcattgttttcgaatatttttcatgcatcaaagctcgttaagactagatggggtatccctacatggcgggtgggacccacggcgaacggttcatcaagacttaaaaaaagaatatatacgattgcattgcatatactaacggatgcgatcataccagcactaatgcaccaggatcccatcagaactccgcagttaagcgtgcttgggcgagagtagtactaggatgggtgacctcccgggaagtcctcgtgttgcatccctcttttatgtttaacctttttttttttggttaaaactttatgactccataactttt

SEQ ID NO: 119233 - DNA, 526 bp, Arabidopsis thaliana
cggcactatacgactcacttagggaaagctggtacgcctgcaggtaccggtccggaattcccgggtcgacccacgcgtccggaagtttccagtccagaagaaatttctcaggcaattaatatcccaagcccagttggcactgctctgtgtatggctgcttctataaggaaagatcatgaaaaggaaggtagagagctggttcagatattgcttgcagctggggcagatccgactgcgcaagatgctcagcacgggcgaacagcgttgcatactgctgctatggctaacaatgtggaacttgtgagagtcattctagatgctggtgtgaatgcgaacatccgcaatgttcacaatacaattcctcttcatatggctttggccagaggcgcaaactcctgtgttagcctacttctggagtctggttcagactgcaatatacaggatgatgaaggagataacgcatttcatatagcagcagatgcagcgaagatgatacgtgaaaaccttgattggttaattgtcatgc

SEQ ID NO: 119234 - DNA, 302 bp, Arabidopsis thaliana
gccaaccagattgtatgcgtgaattgctggtagctggagccgatccaaatgcagtggatgatgaaggtgaaactgtgcttcatcgagctgttgccaagaaatacacagattgtgccattgttatattgggaaatgggggatctagatcaatgactgtttcaaatgcgaagtgcctgacaccgttacatatgtgtgtagcaacatggaatgttgctgttatcaagagatgggtggaagtttccagtccagaagaaatttcccaagcaattaatatcccaagcccagttggcactgctctgtgt

SEQ ID NO: 119235 - DNA, 574 bp, Arabidopsis thaliana
  unsure (1)..(574): unsure at all n locations
gaaagaaatacaaggttgatcgtacaaagaaatcgaaaaantggcgaggacgacgcgagaaagantgaaatctttcataaacaatagatggctagtttttttngcggccatgtggattcattnttgccctggcatcggttacttntncggcagcatctttcctgtnatcaagagctccctcaactacaaccagaaacagctctccaggctcggtgtcgccaaagatctcggcgatagtgtcggcttcctcgctggtaccctctccgagatcttgcctctctgggccgctcttctcgtcggctctgtccagaaccttgtcggctatggctgggtttggcttatcgtcaccggtcgtgctcccattcttcctttatgggctatgtgtatcctcatttttgttgggaacaacggggagacctacttcaacaccgctgcattagtttctggtgttcagaactttcccaagagccgtggtcctgtcgtcggtatcctcaaggggtttgctggcctcggcggtgccatcctctcccaggtgtacacaatgatccactcctctgaccgtgcatccctcatc

SEQ ID NO: 119236 - DNA, 1151 bp, Arabidopsis thaliana
  unsure (1)..(1151): unsure at all n locations
nnnnnnnnnnnnnnnnnnnnnnnnnnnnngggaaagctggtacgcctgcaggtaccggtccggaattcccgggtcgacccacgcgtccgattcatcttcttcttcttcaaacaaaaaatgggtttcttaaagttatctccaatgatccttctcctagcaatgatcggcgtttcatatgccatggacatgtcaatcatctcctacgacgaaaaccaccacatcaccaccgagaccagccgtagcgactcggaggttgagagaatctacgaagcgtggatggtggaacacgggaagaagaagatgaatcaaaacggtcttggtgcagagaaagatcaaagattcgagatctttaaagataatcttcgtttcatcgatgaacataacaccaaaaacctcagttataaacttggtttaacccggtttgctgatttaaccaatgaggagtaccgatctatgtaccttggtgctaaaccgaccaagagggttttgaaaaccagtgatcggtatcaggcgcgtgttggtgacgcgcttcctgattcggttgactggagaaaagaaggtgccgtcgctgatgttaaagatcaaggaagctgtgggagttgttgggcattctcaactattggagcagtggaaggaataaacaagattgtgacaggagatttaatatctttgtctgaacaagaattggttgattgtgacacatcttataaccaaggatgtaatggtggtttaatggactatgcgtttgagtttattatcaaaaatggtggtattgataccgaagcggattatccttacaaggctgctgatggtcgttgtgaccagaacaggaaaaatgctaaggttgttaccattgattcatatgaagatgtccctgagaacagcgaggcgtctctaaagaaagctttggctcaccagcctattagtgtcgccattgaagcgggtggtcgcgctttccagctctattcttcgggtgtatttgatggactttgtgggacggagttagaccacggtgttgtggctgtgggttatggaaccgagaacggaaaggactactggattgtaagaaactcatggggaaacaaatggggagaaaggggcttcataaaggtcggaccctgagcgcacaggagttgctcnntggggtcngc

SEQ ID NO: 119237 - DNA, 676 bp, Arabidopsis thaliana
  unsure (1)..(676): unsure at all n locations
aaaatggtggtattgataccgaagcggattatccttacaaggctgctgatggtcgttgtgaccagaacaggaaaaatgctaaggttgttaccattgattcatatgaagatgtccctgagaacagcgaggcgtctctaaagaaagctttggctcaccagcctattagtgtcgccattgaagcgggtggtcgcgctttccagctctattcttcgggtgtatttgatggactttgtgggacggagttagaccacggtgttgtggctgtgggttatggaaccgagaacggaaaggactactggattgtaagaaactcatggggaaacagatggggagagagcggatacataaagatggcacgtaacattgaagcgccaacaggaaagtttggaatcgctatggaggcttcgtatccgatcaagaaaggtcagaacccaccaaaccctggcccgtcaccaccatctcccattaagccaccaaccacatgtgacaagtactttttttgccctgagagcaacacttgttgttgtctctacaagtatggtaagtactgcttcggatggggatgtttgcccgctcgaagctgctactttgctgcgatggtaactcaagtggctgtcctcatgaggancccgtttttnacgtnacccnggnanctnttttttggcaananaanncc

SEQ ID NO: 119238 - DNA, 399 bp, Arabidopsis thaliana
agctacctcgcctagcgtaagggaaaacgcggtgactgtgatctgctctctagcggaatcaggcggatgcgaaaactggcttatctctgagaacgcattgccttcattgataaggctactagaatcaggaagtattgttgctaaggagaaagcggttatttcgttgcagagaatgtctatttcatcagagacatcgcgttcaattgttggtcacggcggggttggtccgttgatcgagatttgcaaaacaggggactctgtttctcaatccgcttctgcttgtactttgaagaacatttccgctgtgcctgaagtaagacagaatctagcggaagaaggaatcgtgaaagtgatgattaacatacttaactgcggaatcctattgggatctaaagaata

SEQ ID NO: 119239 - DNA, 522 bp, Arabidopsis thaliana
acgcctgcatgtaccggtccggaattcctggttcgacccacgcggtacagatcacaatcacaagtaaatacaaaaatcaccatagaaaaatatgaagcgatttattgttcttgcgctttgcatgcttatggttcttgaaaccacaaagggtttagatttccataacaaagatgtggaatcagagaatagcttgtgggagctatacgaacggtggaggagtcaccacactgttgctaggagccttgaagagaaagctaagaggttcaacgtgttcaagcacaacgtgaagcacatccatgagaccaacaagaaggataaatcttacaagctcaagctaaacaagtttggtgacatgactagtgaagaatttaggagaacatacgctggttcaaacatcaaacatcataggatgtttcaaggcgaaaaaaaggccacaaagagcttcatgtatgcaaatgtaaatactctcccaacctccgttgattggagaaagaatggagccgtcactcctgttaaaaacca

SEQ ID NO: 119240 - DNA, 1052 bp, Arabidopsis thaliana
attctctatcttattgacacataaacatggaccggtccactttcatcttatctctactcttcacactcaccgtctcgactacgaccctcttctctccggttttcgcaggaacgttcgacacagaattcgatatcacttggggtgatggtcgtggcaaggttcttaacaacggagagcttctcactctctccctcgacagagcctccggctctggttttcaaaccaagaaagagtatttgttcgggaaaatcgacatgcagctcaaactcgtccctggaaactccgccggaaccgtcactgcctactacttgaagtcaaaaggtgatacgtgggacgaaatcgatttcgagtttcttggtaatctaactggtgatccgtataccatgcatacgaatgtgtatactcaaggcaaaggtgatagagaacaacaatttcatctctggttcgatccaaccgctgacttccacacttactctgttttatggaaccctcatcacatcgttttcatggttgatgatattccggtaagagaattcaagaatctacaacatatgggtatccagtatccaaaattgcagccgatgaggttatacttcgagtctatggaacggcggaccacgtgggctacaacggggaggtcttcgttaagactgactggtccaaggcaccattcaccgcttcttacagaaactttagagcggatgcatgtgtttcctcgggcggaagatcatcttgtcctgccgggtccacctagatggttctctccccaggcttgatctaacagcggaagataagatgagagtggtgcagaggaagtacatgatctataactattgtgcggacaccccaaggtttcctcaaggatttccccaggagtgtagacactagctacgagaattaatgtgtgatccgaaacccccaagctagtattgtataggttcgtctaaaataaaaatgtaatgtttatgtttatttaggttctgtaataaacaatttcccctgtttgctatgtagatattctcataataaaatgggcgtgagttatgttggtt

SEQ ID NO: 119241 - DNA, 543 bp, Arabidopsis thaliana
ccacgcgtcagagaaactaaaacagagcttttttcacatgggaaaggataagactttgccgttgcttgaccctcgtgagccaccggaactcaccggaaccaagtcggcgtcaaaagtatgggccaaagagttcggcgaagagtcgaagcggctttgggagttagcaggaccagcgattttcactgccataagtcaatactctcttggtgctctcactcagactttctccggccgtctcggtgaacttgagctcgccgccgtctcagttgaaaactctgttatctccggtcttgccttcggtgtcatgttagggatggggagtgcattggagacgttgtgtggacaagcatatggcgcgggacagattaggatgatgggaatatatatgcaacgttcatgggtcattctctttactactgctttgtttttgcttcccgtctacatttgggctcctcctattctttccttcttcggcgaggctcctcacatctctaaagccgcggggaagttcgcattgtggatgatcccgcaactatttgccta

SEQ ID NO: 119242 - DNA, 832 bp, Arabidopsis thaliana
  unsure (1)..(832): unsure at all n locations
acccacgcgtccgaaacaaacatcactaatctctgcaatttttactctcctccttcacgtcttttcctcttaattttttctaggaaaattctcaaatccatctccgcgatacgaacagagagaagaagacttagaaaaatggctgttcaacctacaagaataggtctagctggacttgctgtgatgggtcagaacctagctctcaacattgcagagaaaggcttcccaatctctgtttacaacagaactacttccaaagttgatgagaccgtcgaacgagccaaaaaggaaggcaatcttcctctttacggcttccatgaccccgagtcttttgtcaagtccattcagaagccacgcgttattatcatgcttgttaaggctggttctcccgttgaccagaccatcaagaccctctctgcttatttggagaaaggtgactgtattgtcgatggtggtaatgaatggtatgagaacactgagaggagagaaaaagccgtggcggagaacggtttcctctaccttggaatgggagtttctggtggtgaagaaggtgctcgtaatggcccatctatgatgcctggaggctcttatgaagcctacaagaatatcgaagacattgttctcaaggttgctgctcaggttagggatagtggtccctgtgtgactttatatcggtaaagggcgggtcttgaaactttgtcaaaatgggccccaatgggatccggtacggtgatattcagctgatttcaagaacgcttttttcggcccccaaggccttttgggaaaatattccnattngggggntttcaaaagngncttcntttacntngaa

SEQ ID NO: 119243 - DNA, 1032 bp, Arabidopsis thaliana
agaagatccaaacacggcgctaagctaagctccgttctcctcctcaaaactatccgacaaaagacagaagcagaaacctaaccctaatttccttttctcaaaatccccgaaaggtccgtctctctctctatctatctctctaacttagctctcctccaaattcggatgattacccattacgaatttgcagagaagaacaaatcctctctttcttcttcctccgtctctctacccctttcatgtcttctcaagtctacgactctcatccagggttgttggtgcatcaaaccctagtttttgatttcgcttttgagatttctcatgcttctttccgttcggatctctcttctgaatcagattacgtcttttgggctcttgttgttgttgtgctgctcttcaatctcttctccgttgcgttctatgtgccaaatatgagtgaaaagaaggtatttgtgtttggatcctttacagaacatgaaactaggtcattttttgagcagaaacccactaaggatcctcagaattctaaagacaagtgtgtgggaagtattcaatttggctccttgaatcttgctgcggaaaattcttcagtaaatactaatggcgagttgaagaaaggtgaggctgatgggacagtgaaagctgctgggtctcaagagagacttgatgcttctagacctgccagctcggataagaacaatgatagtgatgcaaaactcccaagaaagaactctttgagagttccagagcatgtggtacaaaatggaatcataaaagagatctctgaaagcaacaaatctctcaacaatggtgtggcggtgaaaacagatcctattggtttggataacttgtctatgtctgatggtgaaagtgatcctgtgtataaagcttcgagctctaaatttcaagcgctggacaatgaagatttctcaagtgactcttcgtctggaagcattcaaagaaagaaaaacctgaaggttcctactgaatctgttccacctgttaaagactttacaccaagaggattaataa

SEQ ID NO: 119244 - DNA, 1298 bp, Arabidopsis thaliana
  unsure (1)..(1298): unsure at all n locations
tacgactcactatanggaaagctggcacgcctgcaggtaccggtccggaattcccgggtcgacccacgcctccgccggcgcgtgggcaacatgctcaagcaaggccttatcaaggagccggttttttcattttggcttaaccgtaatgcagatgaagaagaaggtggtgaacttgtatttggaggtgttgatccaaatcatttcaagggcaaacatacatatgttcctgtgacacaaaagggctactggcagtttgacatgggtgatgttcttattggcggtgcacccactgggttctgtgaaagtggctgttctgcgatagcatattctggtacatctttgcttgccggtccaacgactataatcaccatgataaaccatgctattggagcagctggagttgttagccagcagtgcaagactgttgtggatcaatacgggcagaccattttggatttacttttgtctgagacccaaccgaagaaaatctgctcgcagattggtctgtgtacttttgatggtacccgtggtgtcagtatgggcattgagtcggtggtggacaaggaaaacgccaaattgtctaatggtgttggagatgctgcgtgttctgcatgtgagatggctgttgtgtggatccagagccagttgaggcaaaacatgactcaagagcgcatattgaactacgtcaacgagctatgtgaacgcctccccagcccaatgggagagtctgcagttgactgtgcacaactgtcaacaatgcccactgtttcacttaccattggaggcaaagtatttgatcttgctccagaagagtatgttctgaaagttggtgagggacctgtggcacagtgcatcagtggttttattgctcttgacgttgctccacctcgtggacctctctggatcttgggagatgtgttcatgggcaaataccacaccgtatttgactttggtaacgaacaggtcgggtttgcagaggcagcctaaacacgatcgggttggtgtcgcgtatggttttagtatgaacaatctgcgtctcaagtgttgtttgtatgttttctggagttgaggactttgagtcgtagtagaaatggtggcgcagttccttttaagttgtttcctaacgaaaaaaggcctttgtagttttgaaggcattggctttgtaaataccttctaagtaagttcgatggtgaaaaaactgaaaactttaataaagcctgcctcttttgtttatgcttagtaagttgtatcaaatagttcggtnnnnnnnnnnnnnnnnnnnnnnnnnnnnnnaagtt

SEQ ID NO: 119245 - DNA, 916 bp, Arabidopsis thaliana
  unsure (1)..(916): unsure at all n locations
cctacganggtacgcacggtnatcgcatcaagtcttgttcccgtgttcttcaacaaaaatcctcatttctctgagaatctggtgctttagctttggtaaaatgaagatatactctagaacggttgctgtttcactcattgtgtcattcctcctgtgtttctctgcctttgctgagcgcaatgacgggaccttcagagttggactgaaaaaactcaagttggattcgaaaaatcggcttgcagcacgcgtcgaatccaagcaagaaaagcccctgagagcttacagacttggagattctggagatgctgatgttgttgtgcttaagaattatctagatgctcagtactatggtgagatcgccattggtactccacctcagaagttcactgtggtttttgacactgggagctctaacctctgggtgccatcatcaaaatgctatttctcacttgcatgtctcttgcatcccaaatacaagtcgtctcgttcaagcacatatgagaagaatggaaaagctgccgcaattcattacggcactggagcaattgctggtttttttagtaatgatgctgtcacagttggcgatttagttgtcaaggatcaggagtttatcgaggcaaccaaggagcctggtataacatttgttgtagctaaatttgatggtatccttggtcttggattccaagagatctctgttggaaaagctgctcctgtttggtacaacatgctcaagcaaggccttatcaaggagccggttttttcattttggcttaaccgtaatgcagatgaagaagaaggtggtgaacttgtatttggaggtgttgatccaaatcatttcaagggcaaacatacatatgttccgttcccatttgacgaaaaaaagggntncntggcaagtttttccaattgggggntg

SEQ ID NO: 119246 - DNA, 581 bp, Arabidopsis thaliana
  unsure (1)..(581): unsure at all n locations
gtcgtctcgttcaagcacatatgagatgaatggaaaagctgccgcaattcattacggcactggagcaattgctggtttttttagtaatgatgctgtcacagttggcgatttagttgtcaaggatcaggagtttatcgaggcaaccaaggagcctggtataacatttgttgtagctaaatttgatggtatccttggtcttggattccaagagatctctgttggaaaagctgctcctgtttggtacaacatgctcaagcaaggccttatcaaggagccggtttttccattttggcttaaccgtaatgcagatgaagaagaaggtggtgaacttgtatttggaggtgttgatcccaatcatttcaaggggcaaacatacatatgtccctgtgacacaaaagggctactggcagtttgacatgggtgattgttcttattggcggtgcacccacttgggttctgtgaaagtgggcttttcttncgttaaaaatttcctgggtaacatcttttgcttnccgggtccaacgnctttaatcaccnatggtaaanccatncntttgggnnnaccttggagttnttnagcc

SEQ ID NO: 119247 - DNA, 247 bp, Arabidopsis thaliana
ccgcccttttttttttttttttttttaagcataaacaaaagaggcaggctttattaaagttttcagttttttcaccatcgaacttacttggaaggtatttacaaagccaatgccttcaaaactacaaaggactttgagtcgtagtagaaatggtggcgcagttccttttaagttgtttcctaacgaaaaaaggcctttgtagttttgaaggcattggctttgtaaataccatcgaacttacttagaa

SEQ ID NO: 119248 - DNA, 533 bp, Arabidopsis thaliana
gtagttttcctgtaatccatacggcgcactgtttttaaattcacagcatatagaatcattagaggtcaaatgacgagccaagatttgtatcttcgtcgtctgcgatgctaagctccatcatcgacgacaaacctgcctcctccacttggctcaaccgcctccgattaaacagaggcctcacaaccgacgatgacgatgcttctggcaatccacttactctcgacgactttctccgccgcaaccaccacacggaaatcgccgccactagttccgcttccgattcacctccatctgctccaattccttcagatccagaattagctgaatgtccatcggaggagccagttcctggacaatggtacggcgtgatgagcgatgttctcttcgagctattcaatttcagcggctcctctaaatcttccacaattcccgggaagaagaagttaccaaggaaacaatcaaaccctaggcattgctctttagagactcctgaagacgttgttgttcccgtgggtaatcagaaaagcgacgac

SEQ ID NO: 119249 - DNA, 724 bp, Arabidopsis thaliana
  unsure (1)..(724): unsure at all n locations
cttggtccttattctctctttcttgctactggaatctgcaatgagttctttgctttcgaagttgccgcaacctaaacagaattgaagacagtacgtagtaccatgagtcaaacaatggaggaatatcagtctaatgagagtgaagataaaagaagttggatttggagtaaggcggtaagtgttgggaagaaagttctgacagctggtgttgtagtgtcttcagctccacttcttgttccttcactttttgtcgcctcgacactcgcctttctctcctcggttccgttttgtctcttcttggctaattatgcttgtacacaaaaggtcatgagtactctgcttcctgatactgaagaaactggtggagttggcaaggaggatgatgacgaatctagatttgatgagtacagcaagattggtcacggtgaaggcgcggctggagttggtgaggctgcacttttcaggggtaaagaagaacccattcccattcaggttaaggaagatgaggagatggcgaaagagtcaacgagcttgctagagaaaattagggatgagggtagaactgacaaagaaacctctgagagaactttacaagatgataaaaagtccggaaatgctaagtcagaggaggttcaagaacagcctgaaaagcgggaagcgcctgagactagacgtgaaggggaaactggggctacaaaaactgaaacttntacgggcaaggacg

SEQ ID NO: 119250 - DNA, 495 bp, Arabidopsis thaliana
  unsure (1)..(495): unsure at all n locations
ggacgcatgacccatcggccgacacagcgatggagatgcgcaaccctaattttcaattgtggtcgaaaattggaagaatgaggaggaggaggtgcgatcttcaaccgaagagaacgagaatgtgcgatcttcaaccgaagagaacgagtatgtgcgatcttccaccgaagctggtaggggagaagatcctcacgaggattccgataacatctctgagagcggtgcgatccacttgcaaattatggaacgctttaaccaaagatcgggttctgggtaaagcagcggcgcagtttttggggtttatgacgatggattcaaaggtctgttcagttagattccatctccgtcgcagcaaggaggaagaagaagacacgatggatctatctataaagcaggtagatttgcttaatcaagtcgagatatctagggtgtatcactgcgacggcttttttgttatccgtggctnaagggccactcgnggggncnnggntttga

SEQ ID NO: 119251 - DNA, 749 bp, Arabidopsis thaliana
tatatatccggttattaagttgttgttctgttacaaatgtcggcgaagactctcaacgaactgcaacctcgtcttctccgtccacttcactctctctaaactctctctcagatctctctctctctgtgattcaacaatggcggtttcttcttcttcgtttctatcgacagcttcactaaccaattccaaatccaacatttcattcgcttcctcagtatccccatccctccgcagcgtcgttttccgctccacgactccggcgacttctcaccgtcgttcaatgacggtccgatctaagattcgtgaaattttcatgccggcgttatcatcaaccatgacggaaggcaaaatcgtgtcatggatcaaaacagaaggcgagaaactcgccaagggagagagtgttgtggttgttgaatctgataaagccgatatggatgtagaaacgttttacgatggttatcttgctgcgattgtcgtcggagaaggtgaaacagctccggttggtgctgcgattggattgttagctgagactgaagctgagatcgaagaagctaagagtaaagccgcttcgaaatcttcttcttctgtggctgaggctgtcgttccatctcctcctccggttacttcttctcctgctccggcgattgctcaaccggctccggtgacggctgtatcagatggtccgaggaagactgttgcgaaccccgtttgctaataagcttgcttaacatcacaaggttgtgattgaa

SEQ ID NO: 119252 - DNA, 484 bp, Arabidopsis thaliana
ttttccgacacaaacagagcattgacgtccgttaacgttaagctcctttaccgttacgtcttaaccaactttttcaacctctgtttgttcccgttaacggcgttcctcgccggaaaagcctctcggcttaccataaacgatctccacaacttcctttcctatctccaacacaaccttataacagtaactttactctttgctttcactgttttcggtttggttctctacatcgtaacccgacccaatccggtttatctcgttgactactcgtgttaccttccaccaccgcatctcaaagttagtgtctctaaagtcatggatattttctaccaaataagaaaagctgatacttcttcacggaacgtggcatgtgatgatccgtcctcgctcgatttcctgaggaagattcaagagcgttcaggtctaggtgatgagacgtacagtcctgagggactcattcacgtaccaccgcggaagacttttg

SEQ ID NO: 119253 - DNA, 583 bp, Arabidopsis thaliana
cccacgcgtccgcttctatcgtgcgcacctctctctcttaatcctttatcctgcgcaccaccaccaccatcttcttctccggcgaaaacaaacccaccgccatggggaaaggtcgtgcactttccgacggagtgatcaaaaagatcatcctttcatacacctatgtcgcaatctggatcttcctcagcttcacagtcatcgtctacaacaaatacatcctcgacaacaagatgtataattggccattcccaataactctcaccatgatccacatgggtttttgctcttccttagctgtgattctcatcaaagtcttcaaagtcgtcgagcctgtttcaatgtcacgcgagacttatctcagatccgtcgtaccaatcggcgcgttgtactcactttctctctggttatcaaactctgcttacatctacctctctgtttccttcattcaaatgctcaaagccctaatgcctgtagcagtttactcaatcggggttttgttgaagaaagagactttcaaatctcagactatgactaacatgctttcgatctcgtttggagttgctattgctgcttatggtgaagc

SEQ ID NO: 119254 - DNA, 404 bp, Arabidopsis thaliana
aaaagactaaaagtgttttctctaaatatacactttgttatcaaattacaagtaatcaatcaaaagatggaaggcaaaactgtgatattcagtgtactcgtaatgggtctggtcatctcgcaaattcaagtagaagcacaaaaaacttgctgcccgagccagtcaactaggaaggagtttgaagattgcatttcagaaggaaatttgcagatactttgttcagctgaaagtggatgccgagacacttacgtgggttattgtccttcggggtttccttacgggagtctcacaaactctggtgatgttgtcaatgtatattgtaagttggggtgtgtatcctctctgtgtggtgccttaacgagtctccaaaaacttgacacacgtggaaaagtgtatgtcgcggt

SEQ ID NO: 119255 - DNA, 557 bp, Arabidopsis thaliana
  unsure (1)..(557): unsure at all n locations
nnnnnnnnnnncnnnnnnnntacgactcactatttggaaagctggtacgcctgcaggtaccggtccggaatttccgggtcgacccacgcgtccgcccacgcgtccgcggacgcgtgggcaaatttcgaccgagttttgttgaattccgattagatctttcttccacgaaacccccccaagtacccattccatcttctccggtgagtctcccatgttggcattacgctagggttcttcttctctgtggtttcgcataacccaataatccaattttctacttgggcatcaatgggtcgctctcgagggaacttccaaaatttcgaagaccctactcagagaacgaggaaaaagaaaaatgcggctaatgtggagaactttgagtctacttctttggtaccaggtgctgagggaggagggaagtataactgcgattattgccagaaagacattactggaaaaattaggataaagtgtgctgtctgtccagattttgatctctggatagaatgaatgtctgttggagcagagatcacttctcacaaatgtgatcacccata

SEQ ID NO: 119256 - DNA, 433 bp, Arabidopsis thaliana
  unsure (1)..(433): unsure at all n locations
tggatacgttacgnggttggcacgttgaggatttcctcgattcctctcttcctacttatggtttctctaagagtggtgatgatgatggggtgttaccatatatggaaccagaagatgacaacaacactaagagaaacaacaacaacaacaacaacaacaacaacaatacagtgtcacttccatctaagaatttagggatttgggtccctcagattccacaaactcttccttcttcatacccaaatcaatacttttctcaagacaacaacatacagtttgggatgtacaacaaagaaacatcaccagaagtagtgtcttttgctccaatacaacacatgaaacaacaaggacaggacaacaagagatggtatgatgatggtggcttcactgtcccacagatcagtgcgtctcctctttcntctaatnaaaagtt

SEQ ID NO: 119257 - DNA, 1037 bp, Arabidopsis thaliana
  unsure (1)..(1037): unsure at all n locations
nnnnnnnnnnnnnnnnnnnnnnnnnnnnnnnnnnnnnnnnnnnnnnnnnnnnnnnnnnnnnnnnnnnnnnnnnnnnnnnnnnnccacgcgtccgatttgaagatggatccatcactatgacaattatttttctgccaccttgacttgtacggcttatattccaaaaatttcttttattgttcacctctttttcttcaatccttcaatttctctcaccaaccctaatttccccaaatttggtaatacgatttcgtcaatttacttcgcaatcgattcaattcaattatgtctctattactggaagagatcattagatcagtagaggctttgctgaagctcagaaatcggaatcaggaaccctatgttgacccgaatctaaacccggttcttctagttccaggaatcgctggatcaattctaaacgccgttgatcatgagaacgggaacgaagaacgtgtttgggttaggatctttggtgctgatcatgagtttcgaacaaagatgtggtctcgatttgatccttcaactggtaaaacgatatctcttgatccaaaaacgagtattgttgttcctcaagacagagctgggctacatgcaattgatgtcttagaccctgatatgattgttggccgtgagtctgtgtactatttccatgagatgattgttgagatgatcggatggggatttgaagatgggaaaaccctttttggttttggttatgatttccgccaacgcaacagactgcaggaaacgttggaccagtttgctaaaaagttggaaactgtttataaagcctcaggagagaagaagattaatgttattagtcattctatgggaggactattggtgaaatgtttcatgggtctgcatagtgatatattcgagaagtatgtacagaattggattgctattnctgctccatttcgaggtgctcctggatatatcacatcgactttattgantggatgtccnttgtcaattggttnggacagaactttttcgntnctaagngngcatgcatcantncttattgagtg

SEQ ID NO: 119258 - DNA, 1010 bp, Arabidopsis thaliana
  unsure (1)..(1010): unsure at all n locations
nnnnnnnnnnnnnnnnnnnnnnnnnnnngtccgtccgcagcaccggtcctgtattccccattcaggatcagatcttagctaaattgagacaagctcaaaatgagtaagcttcagagtgaggccgttcgtgaagccatcactactatcacagggaaatccgaggcaaagaaacgtaactttgtcgagactattgagctccagatcggtctgaagaactatgaccctcaaaaggacaagcgtttcagtggatctgtcaagttaccacatatcccccgtcctaaaatgaagatctgcatgctcggagatgcccagcatgttgaagaggctgagaagatggggttggaaaacatggatgttgagtctctaaaaaagcttaacaagaacaagaaactcgtcaagaagcttgcaaagaaataccatgctttcttggcctctgagtctgtcattaagcagattcctcgtcttcttggtcctggtcttaacaaggcaggaaaattcccaactcttgtgagccaccaggaatccttggagtcaaaggtgaatgaaacaaaggcaacagtgaagttccagctgaagaaggttctgtgcatgggagttgcagttggtaacctttcaatggaagagaagcagatctttcagaatgtgcagatgagcgtcaacttcctcgtctcgctattgaagaagaactggcaaaatgtcaggtgtttgtacctcaagagcacaatgggaccaccacaaagaatcttctgagctttcacctacttaaaattggtggctataagacacttcttcttaccctttcgtttttgtttcagacatatctgttaaacagtgtaagagttgtgctgctactctcctctttagcttttggtttggataatttgaaataactgcagtgattttggttaatggataaaaaaaaaaaaagggcggccgctctagaggatccaagcttacgtacgcgtgcatgcgacgtcatagtacttctatagttcgtcctaaataaattc

SEQ ID NO: 119259 - DNA, 863 bp, Arabidopsis thaliana
  unsure (1)..(863): unsure at all n locations
gctcctgcacgtgccggtccggaattcccgggtccgacccacgcgtccgggagcttcagattggtctgaagaactatgacccacaaaaggataagcgtttcagtggatctgtgaagctcccacatattcctcgcccaaaaatgaagatctgtatgcttggagatgctcagcatgttgaggaggcagagaaaatgggacttagtaacatggatgttgaggctttgaaaaagcttaacaagaacaagaagcttgttaagaagcttgctaagtcttaccatgctttcttggcttctgagtctgtcattaagcagattcctcgtcttcttggtcctggtcttaacaaggcaggaaagttcccaacacttgtgagtcaccaagagtcattggaagcaaaggtgaatgagaccaaagcaacagtgaagttccagttgaagaaagttctgtgtatgggtgttgctgttggtaacctttccatggaagagaagcagctcttccagaatgtgcagatgagtgttaacttcctcgtctcgctcttgaagaagaattggcaaaacgtaaggtgtttgtacttgaagagcaccatgggaccaccacaaagaatcttttgagctctctcttcttatccttcttccatctcagaattttgcattctgtttttgtttcagagatctgtgcttgttgggatatggtttggatttatattagcagttgttttttgttgacaatatattatgcaatattcgttttaattatcaaaaaaaaacaaagaaaggannnnnnnnnnnnnnnnnnnnnnnnnnnnnnnnnnnnnnnnnnnnnnnnnnnnnnnnnnnnnnnnnnnnnnnnnnnnnnnnnnnnnnnnn

SEQ ID NO: 119260 - DNA, 840 bp, Arabidopsis thaliana
  unsure (1)..(840): unsure at all n locations
ctatggtgtggtcatgccgtctnagtggtgacgattgctgttaatccgttaacgaacgagacctcagcctgctaactagctacgtggaggcatcccttcacggccggcttcttagagggactatggccgtttaggccaaggaagtttgaggcaataacaggtctgtgatgcccttagatgttctgggccgcacgcgcgctacactgatgtattcaacgagttcacaccttggccgacaggcccgggtaatctttgaaatttcatcgtgatggggatagatcattgcaattgttggtcttcaacgaggaattcctagtaagcgcgagtcatcagctcgcgttgctacgtccctgccctttgtacacaccgcccgtcgctcctaccgattgaatgatccggtgaagtgttcggatcgcggcgacgtgggtggttcgccgcccgcgacgtcgcgagaagtccactaaaccttatcatttagaggcaggagaagagtgagatggttggtccttggaaagctaaggtctatgagatgaacaatgttgttgttagtgttaagtcaagaaaggttcctggttcattggctgtagaaggaggcgatgatgatatctgcgatgttttaacagatgaagagcaaaagcaactagaggatgctcttaagctggatttaccagacttcccaaatgtcaatggtgagaatggtttcattgttcatcatcaggaagatcatgttgaggccaacaagaaagcagagaagaaagggtggttaggaggttggagaaagaaagagactaaacaagagaagcagattcaatacgcgccaccgagaaactctctttgtgt

SEQ ID NO: 119261 - DNA, 901 bp, Arabidopsis thaliana
  unsure (1)..(901): unsure at all n locations
nnnnctagttctagatcgcgagcggccgcccttttttttttttttttttttttttttttttttgccataacctcgcgaacacttgaaaagacaagattcgcgagttcttcgttctgcctttttttttttttttgtgtgttcgagagatgtctgcctttgaagacgattccttcgtcatactcaacgatgatgcgtctgagtctgttccagtctcaggctcttttgacgccactgattctttctcagctttcgacggctcactccaagtcgaggactccgtcgacgatgtttttgcagcgccgtcttctgactacggtgcttactccaacggtgacggcatcttcggatccaacggggatcacgacggtcctatcttgccaccaccgtcggagatggaatcagatgagggatttgctcttagagaatggagaagacaaaatgcaattcaacttgaggagaaggagaagagagaaaaggaattgttgaagcaaattattgaggaagctgatcaatacaaagaagagtttcataagaagattgaagtaacttgtgaaaacaacaaagcagctaacagagagaaggaaaagctgtatctggagaaccaagagaagttctacgcgggatccagcaagatttacctggaagggcaatagcagagcttagttccctaaaggggttcccaccaattggggaaaagggggggggaaaaaaggggcaccaagntccctnangagnccaaaggcccntgggnttccaggggcccaaaccccgggtancccncccggtttttccannntggggccaaattttgggnggnncccaaaaaaacccccctttttccccgnggcccntttttaacccccccngggggggggggggnnccccccaaaatttcccngaa

SEQ ID NO: 119262 - DNA, 840 bp, Arabidopsis thaliana
  unsure (1)..(840): unsure at all n locations
ggccgtgcctgccccccttccgtaacctggaattccggttcaaggttcgaatcgcggcaactggggtggttcgccgcccgcgacgtcgcgagaagtccactaaaccttatcatttagagaatggagaagacaaaatgcatttcaccttgaggagaaggagaagagagaaaaggaattgttgaagcaaattattgaggaagctgatcattacaaagaagagtttcataagaagattgaagtaacttgtgaaaacaacaaagcagctaacagagagaaggaaaagctgtatctggagaaccaagagaagttctccgcggaatccagcaagaattactggaaggcaatagcagagctagttcctaaagaagttccaacaatagagaaaaggagaggaaaaaaagagcaacaagatcctaagaagccaacagtctctgtgattcaaggtccaaagcccggtaagccaaccgatctaacaagaatgagacaaatattggtgaagctcaaacacaacccaccttctcacctgaagctcacttctcaacctccatcggaggaggcggctgctcctccaaagaatgttcccgaaaccaagcccactgaggcagttactgctgcttaaaaacctcctttgttttcttgttcgttgcttacatctgtgtgaattcagtctttgcatttcattatgtgttataaacagctgagagattttatggttcatgtgtgttattaacatagttatgtcaaaaaaaaaaaaaaagnnnnnnnnnnnnnnnnnnnnnnnnnnnnnnnnnnnnnnnnnnnnnnnnnnnnnnnnnnnnnnnnnnnnnnnnnnttgaatcg

SEQ ID NO: 119263 - DNA, 901 bp, Arabidopsis thaliana
ttcctcgcgtccgccttcccacaggaagcaaatttgtttcagggagtaccaaaatgagtaagcttcagagtgaagccgtgagagaggcaataagctccattatcactcactgtaaggagacaaagccacgcaacttcactgagactattgaactccagattggtctcaagaactatgaccctcaaaaggacaagagatttagcggttctgtgaaattgcctcacgttcctaggccaaagatgaagatttgcatgcttggtgatgcccagcacgtcgaagaggctgagaagattggattggaatctatggatgttgaagctcttaagaagttgaacaagaacaagaaacttgttaagaagcttgctaagaaattccatgctttccttgcttctgaatctgtcattaagcagattcctcgtcttcttggtcctggtctcaacaaggcaggaaaattcccaactcttgttagccaccaagagtctttggaatccaaagtgaatgagacaaaggcaacagtgaagttccagctcaagaaggttctatgtatgggagttgctgtcggtaatctttccatggaggagaagcagatctttcaaaatgttcagatgagtgttaacttcctcgtttctctcttgaagaaaaactggcaaaatgtgaggtgcttgtacttgaagagcacaatgggtccaccaaaccgagttttctaaggttattattattacaaagtttctctaaggtatcatcactctttaggaaatttgattttcttttgctgtcatgagccttcttcttgttgggttaaacttcaaattccagtatcccgacttttgtaggatcaagattttttttaaagacaattttgtttcttttgttgctattattattagtggattttttctcc

SEQ ID NO: 119264 - DNA, 594 bp, Arabidopsis thaliana
  unsure (1)..(594): unsure at all n locations
cagctccctacgactcactatttggaaagctggtccgcctgcaggtaccggtccggaattcccgggtcgacccacgcgtgcgcgtcacttctcatttcgtcttcttcgtttcaggatcagagattcgtgacctgagaagacactcaatatgagtaagcttcagagtgaggctgttagagaagccataacgactatcaagggaaaatctgaggagaagaagcgtaactttgttgagacagtggagcttcagattggtctgaagaactatgacccacaaaaggataagcgtttcagtggatctgtgaagctcccacatattcctcgcccaaaaatgaagatctgtatgcttggagatgctcagcatgttgaggaggcagagaaaatgggacttagtaacatggatgttgaggctttgaaaaagcttaacaagaacaagaagcttgttaagaagcttgctaagtcttaccatgctttcttggcttctgagtctgtcattaagcagattcctcggcttcttggtcctgggcttaacaagggcaggaagttcccacccttttnggncccagggtcnttgagcaaggtggntgngcccag

SEQ ID NO: 119265 - DNA, 746 bp, Arabidopsis thaliana
  unsure (1)..(746): unsure at all n locations
tcccaaagggaacntttcggggnttnaattccaatcccccnccaaatggannccnatnccgnaancccnccntttgaanggcttanaagttgggttggaaaccatgggttgttgggnccttaaaannnttacnaggaccaggaactcggtcaagaagcttgcaaggaattcccatgctttcttggcctctgagtctgncattaagcagatccctcgtcttcttggtcctggtcttaacaaggccaggaaaattcccaactcttgtgagccaccaggaatccttggagtcaaaggtgaatgaaacaaaggcaacagtgaagttccagctgaagaaggttctgtgcatgggagttgcagttggtaacctttcaatggaagagaagcagatctttcagaatgtgcagatgagcgtcaacttcctcgtctcgctattgaagaagaactggcaaaatgtcaggtgtttgtacctcaagagcacgatgggaccaccaccaaaggatcttctgagctttcacctacttaaaattggtggctataagacacttcttcttaccctttcgtttttgtttcagacatatctgttaaacagtgtaagagttgtgctgctactctcctctttaccttttggtttggataaattgaaataactgcagtgattttggttaatggattttgtagcttatattatctttgaattagatgtgcttatttcaaagacgaatcaatccaaaaaaaaaaaaaaaaaa

SEQ ID NO: 119266 - DNA, 588 bp, Arabidopsis thaliana
  unsure (1)..(588): unsure at all n locations
caacgactgcttcacttctagcttgattcttcttcttcgtttatatgtatactgtacattagattattgttgtttctcgagcttctgctatagattttgattcttttttttgttgtctttgtttcgtctccaggatcagatcttagctaaattgagacaagctcaaaatgagtaagcttcagagtgaggccgttcgtgaagccatcactactatcacagggaaatccgaggcaaagaaacgtaactttgtcgagactattgagctccagatcggtctgaagaactatgaccctcaaaaggacaagcgtttcagtggatctgtcaagttaccacatatcccccgtcctaaaatgaagatctgcatgctcggagatgcccagcatgttgaagaggctgaggaagatggggttggnaaacaatggatgttgagtctctaaaaaaagcttntcaaggacaaggaactcgtcaaggagnttttcaaagnaaattaccatgctttttttggccccttangcttgnnattaaagcagnttccncggnttntttgggncccggggtttanaaaggngggaanttccccnccctttt

SEQ ID NO: 119267 - DNA, 448 bp, Arabidopsis thaliana
  unsure (1)..(448): unsure at all n locations
cggaaaggaagggccgggccgagcgacccgtcaggatctgattttaactgaatggacactagcttagagtgagtaagcttcagagtgaggccgggcgtgaagccatcactactagcgacagggaaatccgaggcaaagaaacgtaactttgtcgagactattgagctccagatcggtctgaagaactatgaccctcaaaaggacaagcgtttcagtggatctgtcaagttaccacatatcccccgtcctaaaatgaagatctgcatgctcggagatgcccagcatgttgaagaggctgagaagatggggttggaaaacatgggatgttgagtctctaaaaaaagcttaacaaggaccaaggaactcgtgaagaggcttccaaggaaatttcccatgcttttttggggcccttttaagtctttccattaaaggcnnnttnccncggttt

SEQ ID NO: 119268 - DNA, 461 bp, Arabidopsis thaliana
tttgtgttgtgtctaaattcacaaagtcattttttgccttttgcgcaccgaacagaacaggcagtttaatgggttcgccggataagcaacatcgccgccacgtcgccgccgaatttctccatagcgcggtaacctcaatctcttcctcaatcattcctctcttccctcccaaaacggcgccgtctcgtgtatgcctcccacttagattctcggtatcagacgatgtctcgtcccctttcgaatcgacggtcaagagcacatcatccgcgtcctcctccggccttaattcaacggttaggatatcatctctcagctccgatgggaaacgcggtggacctgctttcgtcggtcaggtgtttagtatgtgtgaccttactgggactggtctaatggctgtttctactcacttcgatattcctttcatctccaagagaacacctgagtggctaaagaaaatgttt

SEQ ID NO: 119269 - DNA, 670 bp, Arabidopsis thaliana
ttatcggattagatggaacacaacctggagctccaccgcggtggcggccgctctagaactagtggatcccccgtttctgcttgaattcgcggccgcgaggcaacaagcatggacgcatcggctttgtctccgccgcgttcagcgattagacctctttactatgtacagagtccatcaaaccatgacgtggagaagatgtcatttgggtctggttgcagcctaatgggttcacctacacatccacattactaccattgctcaccaatccatcactcccgtgagtcatccacctctcgcttctctgaccgtgctctcctctcttacaagtccatccgtgaacgtcgccgatacatcaacgacggagacgacaaaactgaccgcggagatgacgacgacccgtttccgaatgtgcgactctacgtttgggtgctcctctccgtaatcttcttgttcacagtcttctctcttatactctggggtgctagcaaatcctaccctcccaaagttactgtaaaggggatgcttggtgagggacttggaccttgcagggctggggaacgatctttatcgggagtggccttccggccatggttgactttttaaaatacgcacggggcagggattattattttcccggtaacccccaatacaacctatttctttttgtccg

SEQ ID NO: 119270 - DNA, 754 bp, Arabidopsis thaliana
  unsure (1)..(754): unsure at all n locations
aagcataagaaagtgtgccatgtagcagcagaagctttaaactccgatgtctgggcatggcgaaagtacggacagaaacccatcaaaggttcaccatatccaagaggatactacagatgtagtacatcaaaaggttgtttagcccgtaaacaagtggagcgaaatagatccgacccgaagatgtttatcgtcacttacacggcggagcataatcatccagctcctacacaccgtaattctctcgccggaagcactccgtcagaaacccatccggtccaccagacgagtaaatctccggcgacccacctattgctacttacttcatcgtctccggtgacttccacgccgacgaagttgtttttgcctgttgaggatcatctagcggtgggagatcttgtcggagaagaagatctgttatctttgtcggatacggtggttagcgatgatttcttcgatgggttagaggaattcncagccggagatagcttttccgggaactcggctccgccgagttttgatctctcttgggttgtgaacagtgcccccactaccaccggaggaatatgattagattacgncggcttagaatactcttattaggacagatttataggattaaggaattattctcggagcatatgtaagaataggataanagaagatgttctttgttactttttttcgggtttncttcctaatgtntctanacatcttagaaaaaatttaattgtatattccttaagctcgatacatt

SEQ ID NO: 119271 - DNA, 724 bp, Arabidopsis thaliana
actatagggcttagctggtgctcctgcaagcaccctgctccttccttgtccggtcttcccgggtcgtcccacgcgtgcgcaaggtgaaagattcgtttgctatgctcaagaacacaatcaagtggagaaaggagttcaagatcgatgaattggtcgaggaagatcttgtggatgatcttgacaaggttgtgtttatgcatggacatgaccgagaaggtcaccctgtttgttacaatgtctatggtgagtttcagaacaaggagctttataataagacgttttctgatgaggaaaagaggaaacatttcttgaggactaggattcagttcttggagaggagtataaggaagctagattttagctctggtggggtttctactatttttcaggttaatgatatgaagaattctccggggttagggaagaaagagcttagatcagctactaagcaagctgttgagttgcttcaggacaattacccctgagtttgtcttcaaacaggcttttatcaatgttccttggtggtcccttgtgttttatactgtgattggtccgttcatgacaccaagatcaaagagcaagcttgtgtctgctggtccttcgcgttcagctgaaacccttttccaatacatatcacccgagcatgttccagtacaatatggtggattgagtggtgatccttgcgactgccatccagactttttgtttggaagattcaagcctt

SEQ ID NO: 119272 - DNA, 1882 bp, Arabidopsis thaliana
  unsure (1)..(1882): unsure at all n locations
taatacgacttacttagggaaagctggtacgcctgcaggtaccggtccggaattcccgggtcgaccccggcgcacgcttcgccggaaataatggctttcccgcgatttctttctctcctcgccgtcgtcactctctctcttttcctcaccaccactgatgcttcctctcgctctctatccactccacctaaaacgaacgtactcgacgtcgtttcatctctccagcaaacacaaactatcctctcactcgacccgactcgttcctcactcaccaccaccaaacccgaatccctatccgacccggttttcttcaattcatcttcaccactatctctagagcttcactctcgagacactttcgtcgcgtcacagcacaaagactacaaaagcttaacactcagtcgactcgagcgcgactcatcccgagtcgccggaatcgtcgcgaagatccgtttcgccgtcgaaggagtcgatagatccgatctcaaacccgtttacaacgaagatacacgataccaaaccgaggatctaacgacacctgtcgtcttcggagcctttcaaggaagcggcgagtatttctcaagaatcggtgtcggaactccggcgaaagagatgtacttggttctcgacaccggaagcgacgtaaattggatccagtgtgaaccttgcgccgactgttaccaacagtccgacccggtttttaacccgacttcgtcttccacatacaaatctctcacttgctctgctccacagtgctctcttctcgaaacctccgcttgtcggtcaaacaaatgtctctaccaagttagttacggagacggatctttcaccgtcggtgaactcgctaccgatacggtgacgtttggtaactctggtaaaataaacaacgtcgctttgggttgtggtcacgacaacgaaggtctctttaccggagcagccggtttactcggtttaggcggtggtgttttatcgataaccaatcaaatgaaagcgacgtcgttttcttactgcctcgttgaccgtgactcgggaaagtcctcaagtcttgatttcaactcggtccaactcggtggcggagacgcgacggcgccgcttctacgtaacaaaaagatcgacactttctactacgtcggactcaagtggattcagcgtcggtggtgaaaaagtcgtgctgcctgatgcgatcttcgatgtcgatgcttcgggaagcggaggagtgatcttggattgtggaaccgccgtgactcgtcttcagacgcaggcttataactcgctgcgtgacgcgtttcttaaactcaccgtgaatctcaaaaaaggatcttcgagcatctctctgttcgacacgtgttacgatttctcgtctctctccactgtgaaagtaccgacggttgcgtttcatttcacgggagggaagtcgcttgatttgccggcgaagaattatctgatccctgtggatgatagtggaacgttttgcttcgcttttgctccgacgtcgtcgtcgttgtcgatcatcgggaatgtgcagcagcaagggacacgtatcacttacgatctatccaaaaatgttatcggattgtcagggaataaatgctaaacatgtcaaagtagaaaaattaatagttttacgggtaatcagtaaaactttttatggtactagctagctacggtaacaagatgaaaacaaaatccttaagtgtgaatttttgctaccttttttttaattaatcataagttattgtcgtcttttatcgaataataataggattaattaattttattaaaaaaaaaaaaaaaaaaagcggccgctctagaggatccaagcttacgtacgcgtgcatgcggcgtcatagtctaagtatagtgtcnaacgaaagtacaccaa

SEQ ID NO: 119273 - DNA, 651 bp, Arabidopsis thaliana
  unsure (1)..(651): unsure at all n locations
ttttctctctataaattaaaaacattacttactctttctctcttccacttaactcatatcaaccttcgccggaaataatggcggtcccgcgatttctttctctcctcgccgtcgtcactctctctcttttcctcaccaccactgatgcttcctctcgctctctatccactccacctaaaacgaacgtactcgacgtcgtttcatctctccagcaaacacaaactatcctctcactcgacccgactcgttcctcactcaccaccaccaaacccgaatccctatccgacccggttttcttcaattcatcttcaccactatctctagagcttcactctcgagacactttcgtcgcgtcacagcacaaagactacaaaagcttaacactcagtcgactcgagcgcgactcatcccgagtcgccggaatcgtcgcgaagatccgtttcgccgtcgaaggagtcgatagatcccgatcttnaaaccggtttanaacggaggnttacacggttaccaaaccgggggttctaacggnacctgttnggtttccggggcctttnaagggaaggggggggggttttttnaaggaaatcggttttggganctnccgcggaaaagnnatttnnctttggtttttggaaaacgggaaggggnggg

SEQ ID NO: 119274 - DNA, 589 bp, Arabidopsis thaliana
ttctgtgtgaccttgcaaaccttttctgatgattctccagaattagggacattttcataattcttatactgttctaatctagtttgtctgtatttctctctagaaatattaagtctgtcccacggaatcccctggatatctttccctttccgagcttgctcagccgtggtatcagctactttattgttcgaatagtcaaattcttcaacgtcagaatctgaagcaccaagatcatcaccacgaaactcctcatccatatcatcttcaacatcttccatctcatcatctacgtcttccatgtactcagcatcatctcctcgataattagacattcttttggtagataaataaagacaccctaagattaggcaagaatcaaatgaaaacgaattattcgcttttttcgatctagaaatgagaatttcagcaaataatccccaattatatgcctaattacaatttcaggttcattagataaaaaaaatatcttaaaaggtagcgagcgacgggatcggccgccagagaacgaacaaaagtgaaaacgggaagagagagtgccccccgcctgggatcgagccggcgagattcc

SEQ ID NO: 119275 - DNA, 417 bp, Arabidopsis thaliana
acgcgtccaaaacctacaaaagttaaaagttacaccttactaaacacaaacaacttcataatggctttccacttccggcgactttgcttcttctcagctcttcttgccgtggttctccaactccttcatggcgtctctggccaactagttgtggttgaggaacctatttctgctcctccgcctccgctggtcgacctaaacaccggtgatggcattgtgccggcgctgtttgtcttcggtgactctctaatagacaatgggaataacaataacattccttcctttgccaaagccaattattttccttatggcattgatttcaatggcggtccgaccggtcgattctgcaatggcttaacgatggtcgatgggattgctcaactattgcggctgccactgattccggcctactcggat

SEQ ID NO: 119276 - DNA, 1000 bp, Arabidopsis thaliana
  unsure (1)..(1000): unsure at all n locations
ctttgaatgngcaccgggaccccccctcgaggtcgacggtatcgataagcttgatatcgaattcggggccgcttctcctcctccgcctccgcctccaccgccaccgccaccgccgccgccgacgacttttctcacttactcaacaccagagatcttggtttagtgttataatggaaggtgttggactaagagctgtaggatcacactgttctttatctgagatggatgatcttgatttgactcgagctttggataaaccaagattgaagatcgaaaggaagagatcgtttgatgaaagatcgatgagtgagctatcgactggttacagtagacatgacggtatacacgattcgccgcgaggtagatcggtgcttgatacgcctctttcttctgctagaaactcctttgagcctcatcctatgatggctgaagcttgggaggctttaagaaggtcaatggtcttcttccgtggtcaacctgttggtactcttgccgcggttgataatactaccgatgaagtcttgaactatgatcaggtgtttgtgagggattttgtaccgagtgcgttggcgtttctgatgaatggagaaccggatatagtgaagcattttttgcttaagacacttcagctgcaaggttgggagaaacgtgtggatcggtttaagttaggagaaggtgtgatgcctgcaagtttcaaggtgcttcatgatcctatccgtgaaacggataacattgttgcggatttcggtgagagtgctattggacgtgtggctcctgtagattcagggttctggtggattatncttcttcgtgcttataccaaatctactggagatttgactctctctgagacaccagagtgtcaaaagggaatnaaactnatcttgtctttngtgcttagcttgaagggttttnacaacggttnccnacaactncttttttgcctgattggatgtnccntgntttaacccgaagaattgggngtttaatggggganccc

SEQ ID NO: 119277 - DNA, 1116 bp, Arabidopsis thaliana
  unsure (1)..(1116): unsure at all n locations
tacgcccnnnnnnnnnnnnnnnnnnnnnnnnnnnnnnnnnnnnnnctgcggtaccggtccggaattcccgggtcgacccacgcgtccgtcgatctcgaagtacgtttcggttttcaggccaatctctgaatctgcgtgacaaaagcaacaaattacatatctctctctctgcgcgacttcgaagatcaacatccatggcgtcacaggtaaggtcagtaaaagttggcaatctctcttcaggagcaactgagcatgatattaaagagtttttctctttctctggtgaagttgaaagcatcgatatccaaagtaacgagcatagtgcttatgtcacatttaaagaaactcaaggagcagagactgctgtgctcttatctggagcgagtattgccgatcaatcagtcatcattgagttggctcccaactacagtccaccagcagcccctcatgctgaaacacagagcagcggtgcagaatctgttgtccagaaggcagaagatgttgtgagcagcatgttagcaaagggtttcattcttgggaaagatgctgtcggcaaagcaaaagcttttgatgagaaacatggtttcacctcaaccgccaccgcaggagttgcttcactagaccaaaaaatcggtcttagccagaaacttacagctggaacaagcttggtgaacgaaaaaatcaaggcggtggaccaaaactttcaggtaacagagaggaccaagtctgtgtatgcagctgcggagcagactgtgagcagtgcaggaagcgctgtgatgaaaaaccgttacgtgttaactggtgtgagctgggccgcaggagcattcaataaagtggctcaagcagctggagaggttggncagaaaccaaaaggggaggttgaagctgagcaaccatcgcaaccagcacagtcgcagcngcaactgccagaagggtattctccgattcattcgtccgaatactcgaagaactaatatcatcaagttaaacagtttcctttgtttccccttgttggtttctttgacatggaagttggaaatctggtttggtctttgggatgtaccatataagctatgcctggattttcccttcccctattagactatagtttgggtt

SEQ ID NO: 119278 - DNA, 585 bp, Arabidopsis thaliana
atacggctgcgagaagacgacagaagggggagtgtgaggtgtcatataaagcaaaatacactcttccctctctatctatctacgcatcatcgatctcgaagtacgtttcggttttcaggccaatctctgaatctgcgtgacaaaagcaacaaattacatatctctctctctgcgcgacttcgaagatcaacatccatggcgtcacaggtaaggtcagtaaaagttggcaatctctcttcaggagcaactgagcatgatattaaagagtttttctctttctctggtgaagttgaaagcatcgatatccaaagtaacgagcatagtgcttatgtcacatttaaagcaactgccggaagggtattctccgattcattcgtccgaatactcgaagaactaatatcatcaagttaaacagtttcctttgtttctccttgttggtttctttgacatggaagttggaaatctggtttggtctttgggatgtaccatataagctatgcctggattttccctaccactattagactatagtttgggtttttttccaatatacatatttaataagttgacatttaaatctttctt

SEQ ID NO: 119279 - DNA, 629 bp, Arabidopsis thaliana
  unsure (1)..(629): unsure at all n locations
atccgatctaatcggcaaaattttctgctcctgagaaacaagtagagatactaaagatggaatctttgaactaaattcgaaaccttttaatgggtaccgagtcgggttcggatccagaatcgagctcaaacgggtggagccgtgctcgtggtctagttgtcaagactctggttttaattggcggtgctcttctcatcaagcgtctcactaaatccaccactcgtagagatcacgcccgtgtcgtctctcgttctctcaccggagagaagtttacgagggagcaagcgtcaagagatcctgataattacttcaacataagaatgctgagttgtccagctgctgaaatggtggatggttcaaagggttttttatctcgaacaggcattttggggggctcctcaagaaaccgttttcgccaaaantttatatatgggtgaaaccgtgtcccaaaaggggctaaaaatgtgatgttnagggtaagttcatatgcggtcagagattnttgagggnttcaaaaatttctnttngccggcctaaggnccacggccacttcctgaggaggtttttggtncatttgggggnatttacggctnacancnnatttttntacccnggaacgtnttttcggt

SEQ ID NO: 119280 - DNA, 809 bp, Arabidopsis thaliana
  unsure (1)..(809): unsure at all n locations
aaccagattcggacatctcgtcgaaaatggcgtgctcaattggtaacgctttcaggtgttcttctgatacgctgcgttttgctccccgacaacaatgcagcagccgcctaaaccctaatccttcctctttcctctcctttaattcctccccaattctcgcacagaatttgggtgcttcttcttcgtcactttcccgacggactatacgagctagaacaaaaatggctgcgtcggaggcttccattaacgggagcaacaggatgctggtctttgtgccaccacatcctttgatcaaacactggatctctgttctgagaaatgaacaaactccttgtcctgttttcaggaatgcaatagctgaactagggagattactcatgtatgaagcatcacgagagtggctgccaactgttgtgggtgaaataatgtctccaatgggtcctgcttctggtgaattcattgatcctagagagcctattgcggttgtnccgatattaagagctggtcttgctcttgcggaacacgcatcctcagttttaccngctaataaaatttatcatttaggagtaagtagagatgagaaaacacttttaccatcggtgtatcttaacaagttgcctgatgaatttcccaaggaattcaagagtatttttggtcgacccagttgcttgccacaggtggtaccntaatgggnggcggtggntnctntttaaggaccgtggnttttttttttcagcaaattcaaagggntttttcgggttgtngnaccccctnaanttttngaggttaacnggaatttccccgggntt

SEQ ID NO: 119281 - DNA, 595 bp, Arabidopsis thaliana
  unsure (1)..(595): unsure at all n locations
ccggcatctaatacgactcagtanagggaaagccggtacgcctgcaggtaccggtccggaattcccgactcgaggcaaattcctagtggctcatggcgtcatcatctgatcacacggcgaagataatcgacggcaaggcgattgctcataccatcagatcagagatcgccgaggaagttcgcggtctatctgagaaacacggcaaggtcccaggactagctgtagttattgttgggagccgaaaggattcacagacctatgtgaatacgaagaggaaagcgtgcgctgaggttgggattaagtcatttgacgtgggcctaccagaggaagtttctgaagctgatcttattagcaaagttcatgaactaaattcaaatccggatgtccatggcatattagttcaactcccattgccgaaacatattaatgaggagcatatattgggtgcaatcagcattgataaagatgtcgatggcttccatcctttgaatattggtaagctagccatgaaaggcagagaacccctcttgcttgcttgcaccccaaagggatgtttggaactcctagctagaagcggcgtaaagataaaggggca

SEQ ID NO: 119282 - DNA, 831 bp, Arabidopsis thaliana
ggaaggaatcaaaacggtgcgttccggttacggagcacacacagataggataggaaaccctaaaagtgcttcttcttcttcggcggcttcagttttaggttacgatcgaagcaaaagcggcgcatctgaatcccaaacgagtgacgatgacgatcgattcgcagcaaaaaacgagcaaattcagatggggggaaatggacgaagacgaagatctggatttcttgctccctcccaagcaggtgattggtccagatgagaatggtttgaagacgacgatcgagtacaaattcaacgatgaagaaaataaggttaagataacgactaggacacgtgtccgcaagctagcttctgctcgactcaacaaacgagccatggagaggaggaactggcctaagttcggagacgcagccaatgaggaagctggtagccatctcactatggtttctaccgaagagatccttctcgaacgaccccgagctcctggtaccaaagcggatgaatcaaaggcaacaggagatggcttgtctcagctgggtaaaggtggtgcagttctcatggtgtgcaggatatgccacaagaaaggagatcactggacatcaaaatgtccatacaaggatctagctgcaccaaccgatgtctttattgacaagccacccacaggggaatcatctaccatgtctgctgcacctggaactggcaaggccgcgtatgtcccgcctagcatgagagcaggtgcagacagaagcgctgtgggttcagacatgaggaggaggaacgatgagaactctgtgcgtgtaaccaatctgtccgaggatacccgtgaacctgact

SEQ ID NO: 119283 - DNA, 587 bp, Arabidopsis thaliana
ccacgcgtacatttgcactcagtctagagacaaagagagagagagatggggtcaaagacggagatgatggagagagacgcaatggctacggtggctccctatgcgccggtcacttaccatcgccgtgctcgtgttgacttggatgatagacttcctaaaccttatatgccaagagcattgcaagcaccagacagagaacacccgtacggaactccaggccataagaattacggacttagtgttcttcaacagcatgtctccttcttcgatatcgatgataatggcatcatttacccttgggagacctactctggactgcgaatgcttggtttcaatatcattgggtcgcttataatagccgctgttatcaacctgacccttagctatgccactcttccggggtggttaccttcacctttcttccctatatacatacacaacatacacaagtcaaagcatggaagtgattcaaaaacatatgacaatgaaggaaggtttatgccggtgaatcttgagttgatatttagcaaatatgcgaaaaccttgccagacaagttgagtcttggagaactatgggagatgacaga

SEQ ID NO: 119284 - DNA, 1146 bp, Arabidopsis thaliana
  unsure (1)..(1146): unsure at all n locations
gaaanccgggccgaccgacgcgtccgcctttttctctttcacatcgttctttctctcgcaaacccaaattctctcagcgccggtcaaatacttgtctctctctctctctctctttcactcttgtcttgtctccttcgaagctgtttgttctgtaagaaagatggaagcaggtggcgcgtacaatccacgcactgttgaagaggtgtttagggattttaagggtcgtagagctggcatgattaaggctttaaccactgatgttcaggagtttttccgactttgtgatcccgaaaaggagaacctttgcctttacggacatccaaatgagcactgggaagtgaatttgccagctgaagaggttcctcctgagctcccagagcctgtcttgggtatcaattttgccagagacgggatggcggaaaaggattggttgtcccttgttgctgtccacagtgatgcttggcttcttgctgttgctttcttttttggagccaggtttggatttgacaaagctgataggaagaggcttttcaatatggtgaatgacctcccaacaatctttgaggttgtagctggcactgctaagaaacaaggaaaagataagtcctctgtttccaacaacagcagcaacagatccaaatcaagctccaagcgaggatctgaatcccgtgccaagttctcaaagccggagccgaaagatgatgaggaggaggaagaggaaggtgtggaagaggaggatgaggatgagcaaggtgaaacacagtgtggagcatgtggtgagagctatgcagctgatgagttctggatttgctgtgacctctgtgagatgtggtttcatggaaagtgtgttaagataacaccagcaagagctgagcacatcaagcaatacaagtgcccttcttgcagcaacaaaagggctcgttcctaaatttgttgaccgctcgcttctgtgtatctacctttgcatatgatgatgaacagcttaactgtttggtttagatcagatttgtcatatggatttggtaatttaggaagacattttagttttttccttgttacatttttgggcgaattgaaagggataactcctttgttttaagggggttaatggaaccttttggcccccgtttttaanagttttggttt

SEQ ID NO: 119285 - DNA, 567 bp, Arabidopsis thaliana
  unsure (1)..(567): unsure at all n locations
ccatggtacccggatcctcgaattcttttgctttttaccctggaagaaatactcataagccacctctgttatttacccccaatcttcacaagaaagacggggaagaggaacgtgtggaacaggaggatgaggatgagcaaggtgaaacacagtgtggagcatgtggtgagagctatgcagctgatgagttctggatttgctgtgacctctgtgagatgtggtttcatggaaagtgtgttaagataacaccagcaagagctgagcacatcaagcaatacaagtgcccttcttgcagcaacaaaagggctcgttcctaaatttgttgaccgctcgcttctgtgtatctacctttgcatatgatgatgaacagcttaactgtttggtttagatcagatttgtcatatggatttggtaatttaggaagacattttagttttttcattgttacattttggcgattgaagggataactctttgtttaaaaaaaaaaaaaaaaagnnnnnnnnnnnnnnnnnnnnnnnnnnnnnnnnnnnnnnnnnnnnnnnnnnnnnnnnnnnnnnnnnnnnn

SEQ ID NO: 119286 - DNA, 427 bp, Arabidopsis thaliana
aaacaaaacaatgaaagaacaagacaaccaactcaaaatccctgaaccattacgagctgactggttcatggttctagtcaccatccaagctgatctaatctacaacgcactcgtggtattatcctcacctttctttctcctataccgctcttaccgccgcgcagtcgttaccgtctccgcagcagaaaaagcggttaaacgtgctccagcgcggatagctggtggtgcggggcgggttgttaggaggacatggtttggtatattgggtgcatgccacgtgtcaatggtaatggtgttggctttgattttggcggttgttattggtgttgggattgtgagtttgtatgtagaaaagcctggggttgtgagagacagattgttctttgattacactgaagaaaaccccagtgcggtttttagttttgat

SEQ ID NO: 119287 - DNA, 1607 bp, Arabidopsis thaliana
  unsure (1)..(1607): unsure at all n locations
accacacgtccgatttaataacccatccaacccaaaagcatacaatacaatgtctactcttgttttattcctccaacttttttccatcctaccattagcacttgggttgaaccacccaaattgtgacctgaccaagactcaagaccaaggctctaccctaagaatcttccacatagacagcccttgctcccccttcaaatcatcatccccactctcatgggaagcgcgtgtgctccagacgctggctcaagaccaggcccgtctccagtacctgagcagcctcgtcgccgggagatctgtagtccccattgcctcagggcgtcaaatgttgcaaagcactacatacattgtcaaggctttgatcggtactccggctcagccgctgctcctagccatggacacgagcagtgacgtggcttggattccttgctccggctgcgttggctgtccttctaacacggccttttcccctgctaagtctacatccttcaagaacgttagctgcagcgctcctcagtgtaagcaggtaccaaaccccacgtgtggagcacgcgcgtgctctttcaacctcacctatggaagctcctccattgcggctaacctctctcaagacacgatacgtcttagccgccgttccgatcaaagcctttacattcggatgcgtcaacaaaggcgccggtggaggaaccatcccaccacctcaaggcttgttgggcttgggacgaggcccactttcactcatgtcacaggctcagtctatttacaagtccactttctcttactgtttgccaagtttcaggtctctgaaccttctctggttctctcagactcggccctacctcccagccccagcgcgtgaagtacactcaacttctcagaaaccctagaaggtcttctctgtactacgtcaacctcgttgcgatccgcgttggtcggaaagtcgtcgatttaccgccggcagctattgcttttaatccttcaaccggcgctggaaccatcttcgactccggaactgtgtacacgcggctggctaaaccggtttacgaggcagtgaggaacgagttcaggaagcgcgtgaagccaaccacagccgtggtgacgtcactcgggggtttcgacacgtgctactcagggcaagtcaaggtgccgacgataacattcatgttcaagggagtgaacatgacgatgccggctgataacctgatgttacacagtaccgccggaagcacgtcgtgcctcgccatggctgcagcgccggaaaacgtaaactctgtcgtcaatgtgatcgcaagcatgcagcagcagaaccaccgtgtcctcatcgacgtccccaatggacnactcggtttggcacgtgaacgatgctctnatacagatgaatgagcacnanaagagcctactcananttatgcaganacntgtttgtttgtgttatttgtgtgtntcatttttgtcttgtcttgtgtcgtttgcttcaccagtcttagagggcggaggtgtgtagnatttgtgctatctagtnatttatgnttttaattgttcctcaattatctagagatttggatctaagctaatcaaataatgnnactatattatatttccttaaa

SEQ ID NO: 119288 - DNA, 807 bp, Arabidopsis thaliana
  unsure (1)..(807): unsure at all n locations
ttgtaatgcccccccccccccttgaaatgcactgcccttggcagtaccggtccggaattcccgggtcgacccacgcgtccgtgatgcggttcgagttagctacgcgcttcatttgatgctcgtgttcccgattgttttctaccctcttcggattaacattgacgggctcttgttcccttccgctcgatcattatctacctcaaatgtgaggttcggttgcctcactgccggtctcatctctgtaatcttcttgggtgcaaacttcatcccaagcatttgggatgctttccaattcactggagcaaccgccgctgtttgtctcggcttcatcttcccagcttctatcatactaaaggatcgtcatgacaaagcaacaaacagggacacaaccttagctattttcatgattgttcttgcggtattgtccaatgcaatcgccatttacagcgatgcttatgcgctattcaagaagaacgctcctcgtgagtaaatcccggtatgagaaaatgtgcagtttggtgtttagcttttgctttttcttctatgtgaaatcaaataatgaagaagacaagacttctcttctcttatatgtttgtacttttgtcgttgagtgttctaagcggacttttgcttcggtgttatataccaccatgagtgttgtttgtaaaaaaactctgtataaaaattgtaatgcagatacatattttgccttaaaaaaaaaaaaaaagggcggccgctctagaggatccaagcttannnnnnnnnnnnnnnnnnnnnnnnnnnnnnnnnnnnnnnnngtacctannn

SEQ ID NO: 119289 - DNA, 725 bp, Arabidopsis thaliana
  unsure (1)..(725): unsure at all n locations
ttaggtgcactatagaagagctatgacgtcgcatgcacgcgtacgtaagctcggaattcggctcgagatctacctcaaatgtgaggttcggttgcctcactgccggtctcatctctgtaatcttcttgggtgcaaacttcatcccaagcatttgggatgctttccaattcactggagcaaccgccgctgtttgtctcggcttcatcttcccagcttctatcatactaaaggatcgtcatgacaaagcaacaaacagggacacaaccttagctattttcatgattgttcttgcggtattgtccaatgcaatcgccatttacagcgatgcttatgcgctattcaagaagaacgctcctcgtgagtaaatcccggtatgagaaaatgtgcagtttggtgtttagcttttgctttttcttctatgtgaaatcaaataatgaagaagacaagacttctcttctcttatatgtttgtacttttgtcgttgagtgttctaagcggacttttgcttcggtgttatataccaccatgagtgttgtttgtaaaaaaactctgtataaaaattgtaatgcagatacatattttgccttttcatgactcttagctattgcttcatatctatatacagcggccgnnnnnnnnnnnnnnnnnnnnnnnnnnnnnnnnnnnnnnnnnnnnnnnnnnnnnnnnnnnnnnnnnnnnnnnnnnnnnnnnnnnnnnnnnnnnnn

SEQ ID NO: 119290 - DNA, 1918 bp, Arabidopsis thaliana
  unsure (1)..(1918): unsure at all n locations
tgatctccagctctctactgactcacatctagggaaagctggcacgcctgcaggtaccggtccgcaattcccgggtcgacccacgcgtccgctaaatcgtgaggcctataatttcccttcatctccaaaatcatttctcctcaaatttcttctttagaagattaaaaatcttctctctaatctctccactctttcataaatattttcctaattcttctaccttggtgtctgattctagcaccaaaccattttctcctaccaaaatctgggtttcgatcaattttaggtcttttgattcctacttgtctaatcgtcttgcaatttcaaagatgacagttgttggagatgttgctccaattccaaggaggaacagttctacttgctctaatgatatcgctgctccgttattaccagagtgtcatggagatgaagttgctcatgatgaattcaatggagcttcttttagtggcgcggtttttaacctcgccacgactataattggtgctggtatcatggctttgcctgctacaatgaagattcttggacttggacttggaatcacgatgattgttgttatggctttcttgactgatgcgtcgattgagttcttgcttaggtttagtaaagctgggaagaatcgatcttacggtggtttaatgggtggttcttttggtaatcctggaaggattttgcttcaagccgcggttttagttaataacatcggtgttttgattgtttacatgatcattataggtgatgtgttggctggaaagacggaagatggtatccatcatttcggtgttctcgaaggatggtttggtcaccattggtggaatggaagagctgctattcttctgattactactcttggtgtgtttgctccattggcttgcttcaagcgaatcgattctttgaaatttacatctgccttatccgtggctctggcggttgtatttctcataattacagcgggaatttcgattatgaagttgatcagtggcggtgtggcgatgccaagattgttaccagatgttactgacttaacatctttctggaatctcttcacagtcgtacctgttcttgtcacagcattcatttgccattacaatgttcacagtatacagaacgagctcgaagacccctctcagataagacctgttgttcgatcagcacttatgctctgctcatctgtttacataatgacaagtattttcgggttcctcttgtttggtgatgatactcttgatgatgtccttgcaaactttgacactgatcttggaatcccttttggttctatccttaatgatgcggttcgagttagctacgcgcttcatttgatgctcgtgttcccgattgttttctaccctcttcggattaacattgacgggctcttgttcccttccgctcgatcattatctacctcaaatgtgaggttcggttgcctcactgccggtctcatctctgtaatcttcttgggtgcaaacttcatcccaagcatttgggatgctttccaattcactggagcaaccgccgctgtttgtctcggcttcatcttcccagcttctatcatactaaaggatcgtnatgacaaagcaacaaacagggacacaaccttagctattttaatgattgtccttgcggtattgtccaatgcaatcgccatttacaagcggntgcttatgcgctattcaaggaggacgntcctcgtgagaaatccccggtatgggnaaatgtgnaggtttggtgtttagntttnccttttcctccttggtgaatcaaatantgngggggcaagcttttntnccctaaaatggtttgacctttgtgggtgggggtcntaaggggcctttnnttnggggtatnaccccnctggngtgtttaaaaaacntggtnaatggatggggcctttggctaantt

SEQ ID NO: 119291 - DNA, 399 bp, Arabidopsis thaliana
acccacgcgaccaggacaatggtctcttggtccggtgttgtgttggagtggtgaagtcacgcacagaaggaccgaggtgttacaatatcccggtgccggtttctggcttgggtcagcagtttggaaagcttttggaaagtgggaaaggagctgacgttactttcgaagttgatggagaaacatttcctgctcacaaattggttcttgcagcacgttctgcagttttcagggcacagctttttggcccgttgagaagtgaaaataccaattgtataatcatagaagacgtacaagcccctattttcaagatgttgcttcattttatctactgggatgaaatgcctgatatgcaagacttaatcggcacagacttgaaatgggcatcaactcttgtggctc

SEQ ID NO: 119292 - DNA, 419 bp, Arabidopsis thaliana
aaatatacaaaaatgacttctcacgactcacgccattaaactccacatacacctttccctttcactttcatcttcttcttccctcgattcaatgggttatctctcctgcaaagctggatccgccgtcgcaatcgccgtttcatctgccgcatcaacctccggatccacctccagcaaagcttctgctcctcccgaatctcccattgaagaccgtcctagacttcgtcgtttcctccatcgcgatctcgaatcagccacaggaggtttcgacatcaacaatctcctcggacgtggaagccatggaagcgtttacaaagctgtcatcggttcacgtcacatcgtggtcaagagaccttcgaaatctcgagaaatcagccgtgagttccacaaccaattctagattctcttcaaaatccgta

SEQ ID NO: 119293 - DNA, 434 bp, Arabidopsis thaliana
cccacgcgaccgattcaactcaaccttccaaattccaatggcgacatcacgagctttcactctcttcgctttcacattatctctcctcaccgtagcttctaccgtctccggccataacattactcaaatcctctctgatacgccggaatattcctcattcaacaactacctttctcaaacaaaactcgccgacgaaatcaacagccgcactacaatcaccgtccttgttctcaacaatggcgcaatgtctttcctcgccggaaaacacccactctccgtcgtcaaaaatgctctcagcctcctcgtcctcctcgactactacgatcctttaaaactccatcagctctctaaaggcacaactctcaccaccacgctttaccaaaccaccggacacgctctcgggaacctaggattcgttaacgtcaccgatctca

SEQ ID NO: 119294 - DNA, 743 bp, Arabidopsis thaliana
atttcaatagagaaaatcaactagtattaaataacgcaatgggccaatatgcgacggtaataattaagagctccttaattattcaccttgcttgtctctcctatttaagacgtatttcttctcttctaccatccaacaagtcacacacttaaagcaaaacaaaacaaaacaaaaacagagcacacaaaaagagaaaccaagttttcttaaaaatggagctagaatcttctcctcctctacctcctcatgtgatgctcgtatcttttccagggcaaggccacgttaatccacttcttcgtcttggtaagctcttagcttcaaagggtttgctcataaccttcgtcaccactgagtcatggggcaaaaagatgcgaatctccaacaaaatccaagaccgtgtcctcaaaccggttggtaaaggctatctccggtatgatttcttcgacgacgggcttcctgaagacgacgaagctagcagaaccaacttaaccatcctccgaccacatctagagctggtcggcaaaagagagatcaagaaccttgtgaaacgttacaaggaagtaacgaaacagcccgtgacatgtcttatcaacaaccctttcgtctcttgggtctgtgacgtggcagaagatcttcaaatcccttgtgctgttctttgggttcaatcttgtgcctgcttagctgcttattactattaccaccacaacctagttgacttcccgaccaaaacagaacccgagatc

SEQ ID NO: 119295 - DNA, 558 bp, Arabidopsis thaliana
  unsure (1)..(558): unsure at all n locations
caaccctcgcaactctatttaaacatttatcttgtgacgtttcacataacaagatatatctacaataaccccaagaaatttaacagaatgaaagtaattacttccctaatctcttctattttgcttaaattcatccacaaagacttccatgagatttatgcaagaatgtccctcctcgatcggtttcttcttcttatcgtgcatggagtggataagatggttccatggcataagcttccagtattcttggggttaacctatcttgaagtacgaagacatcttcaccaacaatacaatcttctcaacgtcggtcaaactccgactgggatccggtttgatcctgctaattatccgtaccggactgctgacggaaaattcaatgatccctttaatgaaggcgtcggcagtcaaaataggttttttccggggggaaatttncccccggtggtnagaattaaagtttcgggggccagncccnttgggggnggggaaaactttttggggggaaagttttngcncgggaacatttantggtgaggtntggtcgtcgcccgtggc

SEQ ID NO: 119296 - DNA, 477 bp, Arabidopsis thaliana
gatttatgctagattgtccctcctcgatcggtttcttcttcttatcgtgcatggagtggataagatggttccatggcataagcttccagtattcttggggttaacctatcttgaagtacgaagacatcttcaccaacaatacaatcttctcaacgtcggtcaaactccgactgggatccggtttgatcctgctaattatccgtaccggactgctgacggaaaattcaatgatccctttaatgaaggcgtcggcagtcaaaatagttttttcgggagaaattgtccccccgtcgatcagaaatcaaagttacggaggccagaccccatggtggtggcgacaaaactattaggaaggaaaaagtttatcgacacgggaaaacaattcaacatgattgcagcttcttggattcagttcatgatccatgattggattgatcatcttgaagacactcaccaaatcgaacttgtcgctccaaa

SEQ ID NO: 119297 - DNA, 563 bp, Arabidopsis thaliana
ctctcgctgagctctatggctcccctgaagtcttgcccttagtagccgatgtttccaaactccaagactgcgagcgttttatccgagccacggttcttcattttggacgattggatcatctagtgacaaatgcaggagttgctccactctatttttttgcagacatcgaagatgtctctaaggcttcgccggctatggacatcaacttttggggatctgtgtattgcacattttttgcttctccatacctaaagaagtttagaggaaggattgtggtgattgcttctggatgtggatacattgcttcacctagactaagcttttactgtgcgagtaaagctgctgtgatcgccttttatgaaacactaagaactgagtttggatcagatattggggttaccattgtagcaccggggatcgtcgattcggaaatgagccgaggcaagttcatgacaaaggacggtaaacttgtcgtcgataaagagctcagagatgtgcaaatgagcgtattgccagtagaatcagccgagaggtgtgcgaaagcaataatgcggagcgtatgt

SEQ ID NO: 119298 - DNA, 416 bp, Arabidopsis thaliana
  unsure (1)..(416): unsure at all n locations
caggagtgaggccatgcctgtgtccgtacattccgttatcgccacgaacctagccactacactatcatcgaattaccggaatgtttctcgccgtagaactatctccacctctgtgaattgttcggtggagattacggaggctgatcggtcggtgaaactgaagaacgggaacgattcactggagatatgcagagttctcaacgggatgtggcaaacgagcggaggatgggggaagattgatcgaaacgacgccgttgattcaatgcttcgttacgccgatgctggtctctctactttcgatatggctgatcactatggtcctgctgaagatctttacggtatttttatcaatagagttcgtcgagagcgttcaccccggtactttgggaagtttaaaggtttcnaaaaggggnccc

SEQ ID NO: 119299 - DNA, 547 bp, Arabidopsis thaliana
aggtgcactctagaagagcttgacgtcgcatgcacgcgtacgtaagctcggaattcggctcgagccttacaacaacggcaacagaaaaaaaaaacagagagttaaaaaaaaaaagaaccagacataatgttgtgtttcagatctcaaagagtgtttatacttgtgtctctgtgtttactctcttcgtttcttgtggtcgtcactggaacaacatcgattactggggttggtaacgaagaagaaagaggtgtagaagaagaatggagaacaagtgtaatagaaagagtaattgcagaggaaagtggagagaactcatctctgattttagctgcaaagagaacaagaagaaaagatcctgctgataatttcaaactctacactggtggatggaatataagcaattcccattatttgacttctgttggttatacagcggcgccttttccttataataagcaattagctctggtttggagttctttgggccttccattggcccctgatccgccctttattatttggtctggggcccgccaatcttttaggt

SEQ ID NO: 119300 - DNA, 972 bp, Arabidopsis thaliana
  unsure (1)..(972): unsure at all n locations
agataaatagaacagcatgagtaagggactacggaagcgcgataagaaagggaggagtgaggggagaaaagcgaccaggagggcaaggggaagcgcttctgaaaaaggggggggtttaatcccctctatcgaaacaatatnnnnnnnagtacgcctgcaggtaccggtccggaattcccgggtggaccaacgcgtccgggcgagggacctcgtatggttcgggatgtcttccgtcttgccaaggaaaatgctccagctatcatcttcattgatgaggtagatgccatcgctactgctaggtttgatgctcaaacaggagccgatagggaagttcagcgtattctcatggagcttcttaatcagatggatggatttgaccagaccgtgaatgtcaaggtcataatggcaacaaacagggcagacactctagatcctgctctcttacgtcctggaagacttgatcgtaagattgagttcccccttcctgatagacgtcaaaagaggcttgttttccaggtatgcacctccaaaatgaaccttagcgatgaggttgacttggaagactatgtttcacggcctgataaaattagcgctgctgagatagcagcaatttgccaggaagctggtatgcatgcggtgcgaaagaacagatatgtgatactacctaaggatttcgagaagggctaccgcgcaaatgttaagaagccagacacggactttgagttttacaagtgaagagaaagcagaagtggaaccagattatggctgttgttaaaattccagtgtgttttgagaattattaaggacatggaatcaaatttgcagttaaattaagaactaagttgcatctcctaatttctgtaactcgagttcacatttgtttttagtctatcagctttttacagtttaatgtataagagggcggccgctctagaggatccaagcttacgtacgcgtgcatgcgacgtcagg

SEQ ID NO: 119301 - DNA, 1646 bp, Arabidopsis thaliana
atacgactcaccttagggaaagcacgtacgcctgcaggtaccggtccggaattcccgggtcgacccacgcgtccgctcggttcgcaaaagtctatttaatttcatagcaatctcacttttctcttcccccaccctcaaagatctctcaaagaatggcttccgcggctgttgcatcgatggttcttgaccctaaagcatcaccggccttgatggatctatccaccgcagacgaagaagatctctatggccgcctcaaatcgcttgaacgacaactagagttcaccgatatccaagaagaatatgtgaaagacgagcaaaagaatctcaaacgagagctgttacgagcacaagaagaggtcaaacgaattcaatccgtgcctttggtgataggtcagttcatggagatggtagatcagaacaacggcatcgtcggatctactactggctccaattactatgtcagaattctcagcacaatcaatagagaactcttaaagccttctgcttccgtcgctcttcaccgtcactccaacgcccttgttgatgttttgcctccggaggctgattctagcatctcccttctcagccaatctgagaagcctgacgtctcctacaatgatattggaggatgcgatattcagaaacaggaaattcgtgaggctgttgaattgcctcttacccaccacgagctttacaaacagattggtattgacccacctcgtggagtcttgctctatggacctcctggtactggaaagactatgttggctaaggctgttgccaatcacacaactgctgccttcattagggttggtggatccgagtttgtgcaaaggtatctcggcgagggacctcgtatggttcgtgatgtcttccgtcttgccaaggaaaatgctccagctatcatcttcattgatgaggtagatgccatcgctactgctaggtgtgatgctcaaacaggagccgatagggaagttcagcgtactctcatggagcttcttaatcagatggatggatttgaccagaccgtgaatgtcaaggtcataatggcaacaaacagggcagacactctagatcctgctctcttacgtcctggaagacttgatcgtaagattgagttcccccttcctgatagacgtcaaaagaggcttgttttccaggtatgcacctccaaaatgaaccttagcgatgaggttgacttggaagactatgtttcacggcctgataaaattagcgctgctgagatagcagcaatttgccaggaagctggtatgcatgcggtgcgaaagaacagatatgtgatactacctaaggatttcgagaagggctaccgcgccaatgttaaaaagccagacccggactttgagttttacaagttaagagaaagcaaaagtggaacccagattaaggaaggtgtttaaaatcccagtgtggttttagaaataataaggacaaggaatccaatttgcaggttaaataagaaattaggtggatttcctaaatttcggaacctgaaggtccccaattggttttaggtcaacagccttttaccggttaaaaaaaaaaaaaaaaggcgcgccgctctagagggacccagctttacgtacgcgtgcatgcgacgtcataatctttctatagtgtcacct

SEQ ID NO: 119302 - DNA, 641 bp, Arabidopsis thaliana
  unsure (1)..(641): unsure at all n locations
nnnnnnnnnnnnnnnnnnnnnnnnnnnnnnnnnnnnnnnnnnnnnnnnnnnnnnnnnnnnnnnnnnnnnnnnnnnnnnnnnnccacgcgtccggtagtcatatgcttgtctcaaagattaagccatgcatgtgtaagtatgaacgaattcagactgtgaaactgcgaatggctcattaaatcagttcatggagatggtagatcagaacaacggcatcgtcggatctactactggctccaattactatgtcagaattctcagcacaatcaatagagaactcttaaagccttctgcttccgtcgctcttcaccgtcactccaacgcccttgttgatgttttgcctccggaggctgattctagcatctcccttctcagccaatctgagaagcctgacgtctcctacaatgatattggaggatgcgatattcagaaacaggaaattcgtgaggctgttgaattgcctcttacccaccacgagctttacaaacagattggtattgacccacctcgtggagtctttctctatggacctcctggtacttggaagactatnttggctaaagggctgtttgcaantnananaaacnngctngccttcaattaaggggttttttggnttccnagttttntgcaaaanntnt

SEQ ID NO: 119303 - DNA, 640 bp, Arabidopsis thaliana
cgagaaaaggcgatacaaacgatttcgaatgcttcatcttctcctttgaaaatccggctggtgcttaatgctgctagatatggatctcggtgttcttcttccatcattgcaatctgtttatgtgctggtgttttacttcgtttacttggccgttgccggagaaattctccccgggaaagttattcgcggcgtccttttatcagatggctctcaacttcgttaccgatgcaatggtctattggcactaatattgttggtagctattttgggaatctgtgcaaaacttggcattgtatcacctcttgtggttgcggatagaggacttgagttactctcagctacttttattttctgtgttttggtgacattagcattgtatgttactgggcgaagttcctcgaataagggttcttccctaaagcctcatgtctcaggaaatcttgtacatgactggtggtttggaatacagctgaatcctcagtttatgagcattgatctcaagtttttctttgtcagagccgggatgatgggatggctgcttatcaatctctctattctggcaaaaagtgtgcaggatggttccttgagtcagtcgatgattctttaccagatcttctgtgcgttatatatattggactac

SEQ ID NO: 119304 - DNA, 1309 bp, Arabidopsis thaliana
  unsure (1)..(1309): unsure at all n locations
atgatttgccggcactaatacgactcatttagggaaagccggtacgcctgcaggtaccggtccggaattcccgggtcgacccacccgcccgcccagtcttctgctaaaatcgcgaaagagatatcttacgaatctccacaagtgcgaatttcgaacggagctacgattccatggcgaccaacggagagaaggtcacggctacggtggtgaatggcggagggctatctactggtgaaaaccctaagaaaattgtagacctcaacactacggagttagatcgtactgacgacattctcgacggagaagtcaagggattttcagattctggtgaaaagaaggaagaaaccgactctaatggtattggatcgacggctggtgttgattctggggatatctctccggtcgatgatatccagaagaagattcgacgtgctgagaggtttggtgtttcggtgaaattgaccgaagaggagaagcgcaattctcgtgctgagaggtttggtactgtagctgcagcagtggtgaatggctcagagggaacgaagaaagcagaggaattgaagcgaaaagcaagagctgatagatttggggttccttctgcgacctctactactgataagactgaggaagaggcaaagaagaaagctaggctcgctcgttttgggaaagagactaaagttgattctgctgaagaaaataagcgcaaagctagagcattgaggttttcaaaagaggcttcagcagatgcatcttcagatttacctgagaagcaaattattggcaaggaggcagctgtatcaggaagcgctgcctaaggttcctcaataaagtttttccgtctttgtagttaggtagtgtgctagcgttttatgagtccctctctggctgcttcattctctctttatttctgaattagaagtccatgtgtgtagtatctttactaagttcggtcgtggagcaatcaccagatgagatcttgagaaaccaataagtaacctatagttctgattgtctgaaatgacaattatcaatgtgtttaggacctaggaattctgaagtggctggtattgatgttttccatgttgcaggttctttggagtggtaagtatagttttgagtaataacctttatttccgttttaatactattgggaattgttgggatgggccccctttcaggaatttgcattgttccgtatcaaagcacaaagcacccagcaatttgaaaaatttcgtacctgcaatgcagccaaattattttatgtgaaggggggccattttttttaacctggtttgaacctnggtagaaa

SEQ ID NO: 119305 - DNA, 685 bp, Arabidopsis thaliana
  unsure (1)..(685): unsure at all n locations
aattggcgttgttgttggttgcgttacagattttggactaattattattttcgtgcctgcaaagtcagcacgacgatcgcgtttcgatctgcggagtagaagaagacccgccacaatcacaaatcgcggtgcatatagtctaaagggtcaatggcctcttcttcggatccatggatgagagagtacaatgaggctttgaaactctctgaggatattaatggcatgatgtctgaaaggaatgcctccgggttaaccgggcctgatgctcaacgtcgtgcctctgcaattcgaagaaagatcaccattttggggactcgattagacagtctgcaatcccttcttgtcaaggttcctggcaagcagcatgtttcggagaaagagatgaatcgtcgcaaggatatggttgggaatttgagatcaaaaacaaatcaggtggcctctgctttgaatatgtcaaactttgcaaacagagacagcttgtttggaacagatttaaagccggatgatgcgataaatagagtctctggcatggacaaccaaggaattgttgtatttcaacggcaagttatgagagaacaagacgagggacttgagaagttggaggaaacagtcatgagtaccaaacacattgctctcgctgttaacgagngctcacccctgcagncaaaggcttattgatgcttag

SEQ ID NO: 119306 - DNA, 920 bp, Arabidopsis thaliana
  unsure (1)..(920): unsure at all n locations
cagctctatacgactcatatagggaaagctggtacgcctgcaggtaccggtccgggaattcccggggtcgacccacgcgtccggggaaaacgtctatcgggagactcctcttcgagctcatcttcttctctctctttttatctttggttgtgcgatctcctttctctttcaatctccaaggattttactgtgagatatttggcgggaaaatgtcggggaaaggtgctaaaggtttgattatggggaaacccagcggtagcgacaaggataaggacaagaagaagcctatcactcgttcttctcgagctggtctccagttcccagttggtagggtgcatcgtctgttaaagacaaggtccactgctcatggaagggttggagcaactgcagctgtttacacagcagcaatattggagtatctgactgcagaagttttggagttggctggtaacgccagcaaggacttgaaggtgaaacgtatctcgccgaggcatttgcagcttgcgattcgtggagatgaggagctcgatactctcatcaaaggaactatagctggtggtggagtcatccctcatatccacaagagtctcatcaacaaatccgccaaggaataggacttttttagttacccgctttgttctgtgttgcttttctgttttctaaatgtttttaagagttgttgtttgataagatgctagagaagctctttttaggatcgtttgctattgttcgttcgatcagcgtactttgtgttagagacgccagtcgatttatctatctttaaaaatgtattcgaatgattatccaaaaaccatttctgactaaaaaaaaaaaaaaaaaaaagggcggccgctctagaggatccaagcttacgtacgcgtgcatgcggcgtcatagctcnnnnnnnnnnnnnnnnnnng

SEQ ID NO: 119307 - DNA, 1134 bp, Arabidopsis thaliana
acctgtcccggatttccgggggcggccccacgcgtccgccatttgcaaaaaacttctctctgaatctcagtgagttctcataaaatgagagggatggtgagttttgccgtttgggctctctttgctgctttactctcacagcagctctttgcttctgttgcttccgtaaggtttgaggatgccaaaacatactacttatctcctccctctggctcacatggaactcctccatcacacacgcctccttcttctaactgtggaagtccaccttacgacccttctccttcaactccttctcacccttcacctccatcacatactccaactccttccactccatcacacactccaactccacacactccatcacacacgccaactccacacacccctccttgtaactgtggaagtccaccttcccacccttccacgccttcacacccttccactccttcgcacccaacgccatcacaccctccttctggtggatattactcatctcctccaccaagaactccggttgttgtgactccaccatcacccattgttgatccaggcacacccatcattggaggaagcccaccaactcctatcattgacccaggcactcctggaactcctttcattcctgctcctttcccaccaatcactggaacatgcgattactggagaaaccaccctacattgatatggggcttgcttggatggtggggaactgttggaggagcttttggtacagtcagtattcccagtagcattccagggtttgatcctcacatgaaccttcttcaggcactttccaacacccgctctgatcccattggtgctctctaccgtgaaggcacagcttcttggttaaactccatggtcaaccataagttccctttcacaacccctcaagttagagaccactttgttgcaggactttcctcaaacaaggcagccacaaagcaggcccataccttcaagcttgcttaatgaaggtcgtctaaagcctagagtctgaagttaagagagtttcatttctcagtttgtttggtggtttatatcaaaaacaatcttaattaaaaaaaaaaaaaaagggcggccgctctagaggatccaagcttacgtacgcgtgcatgcgacgtcatg

SEQ ID NO: 119308 - DNA, 1154 bp, Arabidopsis thaliana
  unsure (1)..(1154): unsure at all n locations
attctctctgaatctcagtgaattctcataaaatgagagggatggtgagttttgccgtttgggctctctttgctgctttactctcacagcagctctttgcttctgttgcttccgtaaggtttgaggatgccaaaacatactacttatctcctccctctggctcacatggaactcctccatcacacactccaactccacacactccatcacacacgccaactccacacacccctccttgtaactgtggaagtccaccttcccacccttccacgccttcacacccttccactcctttccaaccaacgccatcacaccctccttctggtggatattacccatctcctccaccaacgaactccggttgttgtgactccaccatcacccattgttgatccaggcacacccatcattggaggaagcccaccaactcctatcattgacccaggcactcctggaactcctttcattcatgttccagtgattcctcgcgtccgcgctggaacatgcgatttctggagaaaaccaccctacattgatatggggcttgcttggatggtggggaactgttggaggagcttttggtacagtcagtattcccagtagcattccagggtttgatcctcacatgaaccttcttcaggcactttccaacacccgctctgatcccattggtgctctctaccgtgaaggcacagcttcttggttaaactccatggtcaaccataagttccctttcacaacccctcaagttagagaccactttgttgcaggactttcctcaaacaaggcagccacaaagcaggcccataccttcaagcttgctaatgaaggtcgtctaaagcctagagtctgaagttaagagagtttcatttctcagtttgtttgttggtttatatcaaaaacaatcttaattaattatcttgtcatttgtgttgctcagtagaatttgaagtgtcctatagtctctagtaatatttatgatggatacttccttttatttaatgttgttgtttcaaaaaatttcttgatcttaaataagatttagtagttcctctgtttctcaaaaaaaagnnnnnnnnnnnnnnnnnnnnnnnnnnnnnnnnnnnnnnnnnnnnnnnnnnnnnnnnnnnnnnnnnnnnnnnnnnntagaattc

SEQ ID NO: 119309 - DNA, 689 bp, Arabidopsis thaliana
ttgtgtatgattcatccatttgtggtgatccagtgaaccttgttttagcccatggaccggttctataataacgtgtcgagcctctcataataatcccctgtgatggcacttgcggtgtaatcagagccacaaattcgccaggcgatggatcggtgtaacttttccaagcagtcaatcctcgcttctcaccagcgacgagattatacatcataattgacgtagggagcagagtattaccaagatgctcaaagctttgccatagagtccttcccgaaactttgtctatgaaaacaagatttccatggtctgtaagctctgcacgagacccattagatgcaaaaatatctccggtagaccacacaacgccatgtttgccattagataacagaagactaccattgctgctgataccgagatttgccgcagagtctgtaacaggcttttctctattagccacccacacaaccacctggggaatgatactcttgaaccaaattccgagatactgattttgggagttattaagactgaagaatcccaattcataaacaccattagaggagctgagagtttgtccaattgaaaagggactctctttggttatccctgcaaagctaaaactcataaagatggtaaaaaagggcaaataagcaaagaacactatcctcttcttccccaactgggttttt

SEQ ID NO: 119310 - DNA, 638 bp, Arabidopsis thaliana
gtaaaactaaaaataaaaggagttccacttttcaatttttctccactccaaaaccagaaagaaagaaaaaaacatcaatcatgacaacaacaacaacgaagaagccgcacgttctggtgataccgtttccacaatccggtcacatggttccacatcttgacctcacgcatcagattcttctccgtggagccaccgtcactgtcctcgtcacacccaaaaactcttcctatctcgatgctctccgttctcttcactccccggaacacttcaaaaccctaatccttccttttccttctcacccttgtataccttccggtgtcgaatctctccagcaacttcctctcgaagctatagttcacatgtttgatgctctctctcgtctccacgaccctctgcgttgactttctcagccgtcaaccaccgtcggatctccccgacgccatcctaggaagctcatttctcagcccttggattaacaaagtagctgatgctttctctattaagtccattagtttcttacccatcaatgctcattcgatctccgtcatgtgggctcaagaagatagaagcttcttcaacgatctcgagactgccacaacggaaagctacgggttcgtcattcaacagtttctacgacc

SEQ ID NO: 119311 - DNA, 467 bp, Arabidopsis thaliana
  unsure (1)..(467): unsure at all n locations
tcccgcncgacccacgcgaacgaaacatcttaattagaaaacaaaaaggagagacataaagatgaatgctattaagtttgttgtgcttctcttgattggagttgtatgtgtcaatgttggtgcaattaggcaactcgagaaaagatccaaagagaccgaattaagcgtctctcttcccaaagctaccaaaggcgttggagctgaatttacagttactgtttatactcagtctataggtgatggcaatggctttggtgatgctaaaataaagggtcgcaaaggttccagcagcaatgcaattggaagcggctccggaattactagtggatatgtcattgcaaagggtcccaacgcaacagctttttctaggagtattgctttcggtctaggccaagctaatgctgtagcgggtcgcaaagggtgcaaccgccaaaggaaatggtttgggacgtggcattactactgca

SEQ ID NO: 119312 - DNA, 518 bp, Arabidopsis thaliana
cggacgcgagcattacaaaaaacatacacacaaatagcaaatggcgaacaagctcttcctcgtctcggcaactctcgccttcttcttccttctcaccaatgcctccatctaccgcacggtcgtggaagtcgacgaagatgatgccacaaacccagccggcccatttaggattccaaaatgtaggaaggagtttcagcaagcacaacacctgagagcttgccaacaatggctccacaagcaggcaatgcagtccggtagtggtccaagctggaccctcgacggtgagtttgattttgaagacgacatggagaacccccagggcccacaacagaggccgccactactccagcagtgctgcaacgagctccaccaggaagagccactttgcgtttgcccaaccttgaaaggagcatccaaagccgttaaacaacaggttcgacaacagcaaggacaaatgcagggacagcagctgcagcaagtaattagccgtatctaccagactgctacgcacttaccta

SEQ ID NO: 119313 - DNA, 733 bp, Arabidopsis thaliana
  unsure (1)..(733): unsure at all n locations
tggaaaactaaaacaacgagtggtgttgctctctccatcttcctcttcatcttcttctgttctctctctataaatacaagtttactcttcctcttcctcaaatctctgactcttctctgcattatctcttcgatctctccaactctccaaaaccttcctcagaatgggaactaccaatggaacagactatggagcatacacatacaaggagctagaaagagagcaatattggccatctgagaatctcaagatatcaataacaggagctggaggtttcattgcatctcacattgctcgtcgtttgaagcacgaaggtcattacgtgattgcttctgactggaaaaagaatgaacacatgactgaagacatgttctgtgatgagttccatcttgttgatcttagggttatggagaattgtctcaaagttactgaaggagttgatcatgtttttaacttagctgctgatatgggtggtatgggttttatccagagtaatcactctgtgattatgtataataatactatgattagtttcaatatgattgaggctgctagggtcaatgggggtaagaggtccttttatgcttcgggggcttgtatccttcccgaggttaagcagttggaggctcctaatgtgggcttgaaggggccagatgcttggcctgcaggccccaagtgctttggttnggnnnttctccgggggnttnaaccttcaccaagttgggtttgnccg

SEQ ID NO: 119314 - DNA, 286 bp, Arabidopsis thaliana
ctaatggcttcttcgaaactccatcatcatcctcaccgcagaaaatccccaatacgttgcttctgtctcttaatcataaccatgtcctccattctcatccttctcttctctctcttcctcttctcctctccctcctcctcctcccgtcaccaccaccaccacaattccggcgacacgtctccggtcaatccttcgtcgtcgctcgccgctcacatccgtctcgcttgtaacgcaactcgttacccagaccaatgcgtcgcttccctatccgaacagggtcgggttc

SEQ ID NO: 119315 - DNA, 1163 bp, Arabidopsis thaliana
  unsure (1)..(1163): unsure at all n locations
gggtagaatcgccggcactatacgactcatatagggaaagctggtacgcctgcaggtaccggtccggaattcccgggtcgacccacgcgtccgctcaagtggttcggagctgtttctaagaaaacaacaggtagttcggatcggagctacgcttgcaaaactcaaaacatggcgaggggtttgaagaagcatctgaagaggcttaatgcgcctaagcattggatgcttgacaaacttggtggtgcctttgccccaaagccgtcttctggaccacacaagtcaagggagtgtcttcccctcgtccttatcatcaggaacaggttgaagtatgctctgacctaccgtgaagtgatttctatcttgatgcaaaggcatatccaagttgatgggaaagtcaggactgacaagacttaccctgctggtttcatggatgttgtatccatccccaagaccaatgagaacttccgtcttctctacgacaccaagggacgtttccgtctccactccatcaaggatgaggaagcaaagttcaagctttgcaaggttagatctatccagtttggtcagaagggaattccatacctgaacacttatgatggtcgcaccatccgttatcctgacccgctcatcaagcctaacgacaccatcaagctcgaccttgaggagaacaagattgtggagttcatcaagtttgatgtgggcaacgttgtgatggtcactggaggcagaaacagagggcgtgttggtgtgattaaaaaccgtgagaagcataagggaagctttgagacaatccacattcaagactcaacagggcatgagtttgccacaagggttggggaatgtgacacaaatcgggaaagggacnaanccatngggnggcccttccaaaaggggaaaggnttaacctngccaccatttnngnancccnggaaaaaanctttgntcccaagcaaccttggtttgaaagcccaactgctttgacccctcaagacccgtttcttttacagactcgctgcttgtctcagtttgtgagtctatttcttttcttatgttgttggatttcaaaacccatcaaaaaatagctgagtagtgctttttgtaatgtttgtatggtggattttttggtgatttaccgtttaaatcagatgacagttggtccaaaa

SEQ ID NO: 119316 - DNA, 1117 bp, Arabidopsis thaliana
  unsure (1)..(1117): unsure at all n locations
nnnnnnnnnnnnnnnnnnnnnnnnnnnnnnnnnnnnnnnnnnnnnnnnnnnnnnnnnncccacgcgtccgccgacgcgtcagagcagctgcaaacatggcaagaggattgaagaagcatctaaagaggctcaatgctcctaagcattggatgcttgacaaacttggtggtgccttcgctcccaaaccatcttctggacctcacaagtcgagggagtgtcttcctcttgtcctgatcatcaggaacaggttgaagtatgctttgacttaccgtgaagttatctctatcttgatgcaaaggcatatccaagttgatggcaaagtcaggactgacaagacttaccctgctggtttcatggatgttgtatccatccccaagaccaatgagaacttccgtcttctctacgacaccaagggacgtttccgtctccactccatcaaggatgaggaagcaaagttcaagctttgcaaggttcgatctatccagtttggacaaaaaggcattccttacctgaacacttacgagggtcgccccatccgttcccctgacccgctcatcaagcctaatgaccccatcaagctcgaccctgaaggccaacaaaattgtcgagttcatcaagtttgatgttggcaatgttgtgatggttacaggaggtagaaacaaagggcgtgttggtgtgattaaaaaccgtgagaagcataagggaagctttgagacaatccacatccaagattcaacaggacatgagtttgcaacaaggttgggtaatgtgtacaccattggcaaaggaacaaagccatgggtgtctcttcccaagggcaaaggtatcaagctgactatcatcgaggaggccaggaagaggcttgctagtcaacaggctgcttaattttgtgattttcagttctttgttatgcttctttagacgtttcatatttcctagactcacttcgtttcttttggtactctgctcagttttgaaacttctcttatattatttatttcaagagttaaaaacatcaaaaaaaaaaaaaaaaaaaagccaaaaaaaaaaagggcggccgctctagaggatccaagcttacgtacgcgtgcatgcgacgtcatagctcgtatatagg

SEQ ID NO: 119317 - DNA, 682 bp, Arabidopsis thaliana
  unsure (1)..(682): unsure at all n locations
agctannnnnnnnnnnnnnnnnnnnnnnnnnnnnnnnnnnnnnnnnnnnnnnnnnnnnnnnnnnnnnnnnnnccacgcgtccgcggaatgggcggacgcgtgggttgagactggcttgcttagccgcggagaactcagaactcattcgctgcaaacatggcaagaggtttgaagaagcatttgaagaggctcaatgctcctaagcattggatgcttgataaacttggtggtgcctttgcccccaagccgtcttctgggccacacaagtctagggagtgtttacccttggtccttatcatcaggaacaggttgaagtatgctctgacatacagagaagtgatttcgatcttgatgcaaaggcatattcaggttgatgggaaagtgaggactgacaagacttaccctgctggtttcatggatgttgtgtctatccccaaaacaaatgagaacttccgtcttttgtatgacaccaagggacgtttccgtctccactccatcaaggatgaggaggctaagttcaagctttgcaaaagtgagatccgttcccatttnggcaagaagggtttcccnaccttgaacanatattntggcggancaacccgtnatccnnacccngntnttaagcttacggaacctnaagttggcctttgggggcaaatttggggnattagtttttgggatc

SEQ ID NO: 119318 - DNA, 821 bp, Arabidopsis thaliana
  unsure (1)..(821): unsure at all n locations
atgatcctgccagctactaatacgactcacattagggaaagctgcgtacgcctgcaggtaccggtccggaattcccgggtcgacccacgcgtgcggggacgtttccgtctccactccatcaaggatgaggaggctaagttcaagctttgcaaagtgagatcgatccaatttggtcagaagggtattccctacttgaacacatatgatggtcgcaccatccgttatcctgacccgctcatcaagcctaacgacaccatcaagctcgaccttgaggagaacaagattgtggagttcattaagtttgatgtgggcaacgtagttatggtcactggaggaagaaacagagggcgtgttggtgtgattaagaaccgtgagaaacacaagggtagctttgaaaccatccacattcaagactcaacaggacatgagtttgcaacaaggttgggaaatgtgtacacaatcggtaagggaacaaagccatgggtgtcccttccaaagggtaaaggtattaagttgaccatcattgaggaagccaggaagagactttctgctcaacaagcttgatagttaatactatgctctgttttccagtttcagaacaaaccatgctttagtttgcagcttttcaatgagtcacttttgttttaaaacttatcttttcggattgttatgagctatattttggaccttttgcgctattaatattaagtttgaactcaaaaaaaaaaaaaaagnnnnnnnnnnnnnnnnnnnnnnnnnnnnnnnnnnnnnnnnnnnnnnnnnnnnnnnnnnnnnnnnnnnnnnnnnnncaannnnnnnnn

SEQ ID NO: 119319 - DNA, 648 bp, Arabidopsis thaliana
  unsure (1)..(648): unsure at all n locations
cctgaacacttatgatggtcgcaccaccgnttaccctgacccgctcatcaagccaaatgacaccatcaagctggaccttgaggagaacaagattgttgagttcatcaagtttgacgtgggtaacgttgtgatggtgactggaggcagaaacagagggcgtgtgggtgtgattaagaaccgtgaaaagcataagggaagctttgagacaatccacattcaagactcaacagggcatgagtttgccacaaggttggggaatgtgtacacaatcggcaaaggaacaaagccatgggtgtctcttccaaagggcaaaggtattaagctgaccatcattgaggaagccaggaagagacttgcttcccagcaagctgcttgaaagtccaactgctttgaatcatcaagacccgtttcttttacagactcgctgcttgtctcagtttgtgagtctatttcttttcttatgttgttggatttcaaaacccatcaaaaaatagctgagtagtgctttttgtaatgtttgtatggtggattttttggtgatttaccgtttaaatcagatgacagttaacccaaagaaaaaannnnnnnnnnnnnnnnnnnnnnnnnnnnnnnnnnnnnnnnnnnnnnnnnnnnnnnnnnntgtaccta

SEQ ID NO: 119320 - DNA, 542 bp, Arabidopsis thaliana
  unsure (1)..(542): unsure at all n locations
gagactggcttgcttagccgcggagaactcagaactcattcgctgcaaacatggcaagaggtttgaagaagcatctgaagaggctcaatgctcctaagcattggatgcttgacaaacttggtggtgccttcgcccccaaagccgtcttctgggcctcacaagtcgagggagtgtcttcccctggtcctgatcatcaggaacaggttgaagtatgctctgacttaccgtggaagtgatctcggatcttgatgcaaaaggcatatccaaggttgattggcaaagtcaggacctgacaaggctttacccctgctgggttcaatgggatgttggagcctttcccccaagaccaaaattggggaccttcccggccttttttttttcgccacccaaggggccggtttcccggcttccactccccatcaaagggttgggggaggctaagggtccaagggcttttaaaaggttaggtctnttnccagntttggtaanaagggggttttccttacctgnnnnntttttnttgggtggnccatncggttncc

SEQ ID NO: 119321 - DNA, 530 bp, Arabidopsis thaliana
acacctctcgctttatttctattttctagtgtctacatatataaaaagatcatgacgaccaccgttattatcattatcttcgttgccatcttcgctacgactcttcacgacgccagaggagcaaccatggaaccgtgtctcgaatcaatgaagactgcttcgcttcctgatcttccgtatgcttatgatgcgctagagccagcaatcagtgaggagatcatgcggctacaccatcagaaacaccaccagacttatgtcactcagtacaacaaagccctcaacagccttcgttctgccatggctgacggtgatcactcctccgtcgtcaaactccaaagcctcatcaagttcaacggcggagggcacgttaaccatgcaatcttctggaaaaacctagccccggttcatgaaggaggtggcaaaccaccgcatgatcctttggcttcggcgatcgatgctcatttcggatcactagaaagattgatccaaaaaatgaacgcggaaggcgctgctgtacagggatctgggat

SEQ ID NO: 119322 - DNA, 419 bp, Arabidopsis thaliana
aagatattctctacctcaagattcagaagaaaatagaggatcagtcggccaaagtgctggtcagagtagcactagtgtcgttgatcaggtccggtcgccagctgatgatgctggtgtcacttcttcatccaccatatgtccagctcctgtttgtaggcaattttggaaagctggaagctataatgatgaattgagttcaaagtctcagcagccaaatggaaaaaattatcttcatgtgcaccctatgttccttcactccaatgctacctcacataaatgggcttttggagctgttgcagaattgcttgacaatgctgttgatgagatccaaaatggggccacttttgtcattgtagataaaaccacaaatccaagggatggtgcaacagctttgctaattcaagatgatggtggtggga

SEQ ID NO: 119323 - DNA, 710 bp, Arabidopsis thaliana
ctaactctcactcttagtacaaatattttcaagaatggtttctccttctttttcaaccaagcttgtcttctttgcttgctttgttctgttcacattctcacacaaactcgtgacaggagaatccgacaaagttgagctcaatctttactacgaatcactttgtcccggttgtcagagtttcatcgtcgatgaactagtcaaagtctttgactccgatctcgatacaatcaccgatgtcaagctcgttccattcggttacgccaaagtctccaataatctgaccgtcatttgccagcatggtgaagaggaatgcaaactcaacgctcttgaagcttgcgtcattaacactttgcctaacccgaaatcgcagtacaagttcatacgatgcgttgaaaacaatacggataactgggaatcatcatgtttaaagggctatggaaatgagaaagccatcaatgatggttacaatagtgatctctctaagaagctcatacttggatatgcaaaacaaacctcgagtcttaagccgaaacatgaattcgtaccatgggtcacaatcaacagcaaaccactctatacgaaactagatgatttggtgggtcaagtctgcaaagcttacaaaggaaagactccactcccaatagactgtagttccgctgccttgtccgagaggaaaatgtcgaatgttgaattctcctatgtagatgaaa

SEQ ID NO: 119324 - DNA, 962 bp, Arabidopsis thaliana
  unsure (1)..(962): unsure at all n locations
gcagtaccggtccggaattcccgggtcgacccacgcgtccgtgaagtagctacatccaacaaagatcaaagtcttgccttccttgttggtgatgcagagagcagccaaggcgctttccagtactttggactcgaagagagccaagttcccctcatcatcatccagaccccagataacaagaagtatttgaaagtcaacgttgaggttgaccagattgaatcatggttcaaggacttccaggacggaaaagttgctgtccacaaaaaatcccaacctattccagctgagaacaacgaacctgtgaaggttgttgttgccgagagccttgacgacatagttttcaagtctggaaagaatgtcttgattgagttctatgcaccatggtgtggacattgtcaaaaacttgctccaatcttggacgaagtggctttgtcattccagaacgacccaagtgtgatcatagcaaaattggacgcaaccgcaaatgatatcccaagtgataccttcgatgtgaaaggattcccgaccatttacttcaggtcagcgagcggaaatgttgtagtgtacgaaggagacaggacaaaggaagacttcataaacttcgttgagaagaacagtgagaagaagccaacttctcatggagaagagtctaccaagagtgaggaacctaagaagaccgaggaaacggccgcaaaggacgagctgtagaaatctcatgagttttgtttcggaatttgagtaggagcgtttctcttcttcaccatatccaacagaatcttcttttttttttagcagttttacagttttatcttttttgctctcttgttcgaacccaaaattatccccattaataaaaagttaaacctaaaaaaaaaaaaaaaaccaaaaagaannnnnnnnnnnnnnnnnnnnnnnnnnnnnnnnnnnnnnnnnnnnnnnnnnnnnnnnnnnnnnnnnnnnnn

SEQ ID NO: 119325 - DNA, 2026 bp, Arabidopsis thaliana
  unsure (1)..(2026): unsure at all n locations
cgnnnnnnnnnnnnnnnnnnnnnnnnnnnnnnnnnnnnnnnnnnnnnnnnnnnnnnnnnnnnnnnnnnnnnnnccacgcgtccggctaaacattgttagagagaaagagagagcgataatggcgatgaggggcttcacgttgttttcgatccttgtgttgtctttgtgcgcttcgtctatcagaagcgaagagacggagacgaaggagttcgtgttgaccttggatcacactaacttcaccgataccatcaacaaacacgatttcatcgtcgtcgagttctacgccccatggtgtggacactgcaagcagcttgctcctgagtatgagaaggctgcgtcagctttgagcagtaacgtcccaccagtggttcttgctaagattgatgccagtgaggaaacaaacagagaatttgcaactcaatacgaggttcagggtttcccaacaatcaagattttcagaaacggaggaaaggctgttcaagaatacaacggacctcgtgaagctgagggtattgttacttacttgaagaaacaaagtggacctgcttctgctgaaattaagtcagctgatgatgcttctgaggttgttagtgacaagaaggttgttgtggttgggattttccctaaactatctggctccgagtttgattctttcatggccattgctgagaaattgcgctctgagttagatttcgcacatacctcggatgccaagcttcttccccgtggagagtcatctgtaacaggacctgtggtcaggctattcaaaccctttgatgaacaatttgttgattccaaggatttcgatggtgaagctctggagaaatttgtcaaagaatccagcattccacttatcaccgtctttgacaaagatccaaacaaccacccatatgttatcaagttctttgaaagcactaataccaaggcgatgttgttcattaacttcactggagaaggagctgagtctcttaaatcaaagtaccgtgaagttgctacatccaacaagggacagggtcttagcttccttctaggtgatgctgagaacagccaaggtgcattccagtactttggactcgaagagagccaagttcctctcatcatcatccagactgctgacgacaagaaatacctgaaaacaaatgttgaggttgaccagattgaatcatgggtcaaggacttcaaggatggaaaaattgctccccacaaaaaatctcaacctatcccagccgaaaacaacgagccagtgaaggttgttgtttcagacagccttgacgacattgtcttaaactctggaaagaacgttttgcttgaattctatgctccatggtggggccattgcccaaaaggcttgctcccaattcttgggccgaggttcctgtgtcgtacccaagggacccaagtgtagtcatagctaagctagatgcaaccgcaaacgacttcccaaaagatacctttgatgtgaagggattcccgaccatttacttcaaatcagcgagcggaaacgttgtggtttacgaaggagacaggacaaaggaagatttcataagcttcgtcgacaagaacaaggacacagttggagagcctaagaaggaggaagagacaactgaggaagtcaaggatgagctctgaaaagagaagtgtgttgtgtctcttagctgctagcttagtttggtagttttgaggaaaatacacagaagaagccagagcattgagtagactgagagacagagagagagagacgacagacagacagagagaatctctttatctattcattaggtttttatatgtgcactcttcagaacaataatggctgcctccttttcttttttttggttgatgttacctttttttgtttgaattcagttctcctttaatatagtttttgaggcatttcttgggacgagttctaacactaaaaatatattaattctgaagcaaaaaaaaaaaaaaaagnnnnnnnnnnnnnnnnnnnnnnnnnnnnnnnnnnnnnnnnnnnnnnnnnnnnnnnnnnnnnnnnnnngac

SEQ ID NO: 119326 - DNA, 445 bp, Arabidopsis thaliana
cgtccgaagaagagcttcttcttcttcttcttctacatggcaggagaatattccggtagccggagttctaacgcacagcttctcgcggaacttgaagctctaagtgaaaacctttaccagaaacctcaggtttcagttggaaacaggagaacaaactctctcgctctccctcggagttctgttccgtcgcttgttacctctgctgatgaagtgagtacagcacgagctgaggatttgacagtatcgaagccgcgggctcggcgtttatcgctgtctccgtggcggtcgagaccgaaacttgaggtagaggaggaagagaatgttactcagagcaacaggattgtcaagaaaccagaggagtcgtcatcgggttcgggtgtgaaggaagagaagaaagggatttggaattggaagccgattcgagggctggttcggattggtatgc

SEQ ID NO: 119327 - DNA, 520 bp, Arabidopsis thaliana
acaaggaggacagaatggtgacgggggccaaggaggacagaagggtggcgggggccaaggaggacagaagggcggcggtggccaaggaggacagaagggcggcggtggccgcggccaaggaggaatgaagggcggcggtggcggcggccaaggaggacataagggcggcggaggtggtggtggccaaggaggacacaaaggcggtggaggtggtggcggccaaggaggacacaaaggcggtggaggtggtggacaaggaggcggtggacacaaaggcggcggtggtggccaaggaggacacaaaggcggtggaggaggtggtcatgttggtggaggcggcagaggaggtggaggtggaggtcgtgggggtggtggaagcggaggaggaggtggtggtggaagtggccgtggaggacgtggacgcggtgggatgtacgatatctctgcctatactagcaagtttttctttaaatgccaagtgtttacgtatattaaactataataaagttacataagcacg

SEQ ID NO: 119328 - DNA, 358 bp, Arabidopsis thaliana
  unsure (1)..(358): unsure at all n locations
aaacgtaatcgattgaaatcttcctccgatcaccacttcttctccaagatggagcatgagcaagatgaccctggtacatcaacaaatgtaggggttgactcgtcagttgatgattcaatggcaagtctctctatatgtgattcagagcatcctaatatttatcgacaagatattgtcaaaagcaaaaagaccggtagtgttggtgttgtcagcgaagtagctggtgattctgactctgatagtgatattagtgatgaggaagaagatgatgatgatgacgaagataatgatgatgatgatgaggatgtagaggaagggnaaaaggctagtgnaggaaatgttgttaatggagttggcg

SEQ ID NO: 119329 - DNA, 1332 bp, Arabidopsis thaliana
  unsure (1)..(1332): unsure at all n locations
nnnnnnnnnnnnnnnnnnnnnnnnnnnnnnnntaatacgactcctatagggaaagctggtacgcctgcaggtaccggtccggacctcccgtctcgccccccgcaaaaccctaactgtttccaagataatggcaaaaactgaagctcctagtttggtggggaagctagagacagaagtggagatcaaagcttcggctggacagtttcatcacatgtttgccgggaagccacaccatgtctccaaagcaagtccaggcaacattcagagctgtgatctgcacgaaggcgactggggcactgtcggctctatcgtcttctggaattacgttcacgatggggaggcaaaggtggcgaaggagagaatcgaggcggtggagccggagaagaacttgatcacgtttagggttatagaaggtgatctgatgaaagagtacaagagctttttgatcacgatccaggtgacccctaagcatggagggcctggaagtattgtgcattggcaccttgagtatgagaaaatcagcgacgaggtagctcatcccgaaactctcctccaattctgtgttgaggtctcccaagagatcgacgaacatctcttatccgaggaagaagaggtgaagacaacagagacacttgagacagaggtggagatcaaagcttccgctgagaagttccatcacatgttcgccgggaaaccacaccatgtctctaaagcaactccaggaaacattcagagctgtgatctgcacgaaggtgactgggggcacagtcggctctatcgtcttctggaactacgttcatgatggggaggcaaaggtggcaaaggagaggattgaggcggtggatccagagaaaaacttgatcacgttcagggttatagaaggtgatctgatgaaagagtacaagagcttcgtaatcacaatccaagtgactcctaagcatggaggttcagggagtgtggtgcattggcacttcgagtatgagaaaataaacgaggaggtggctcatcctgagactctcctccagtttgccgtcgaagtctccaaagaaatcgacgaacatctcttggccgaggaatagaggagaatattcctcgtgtgactatctattatcctgtccgtacatgtatgtgtgattgaagcatgccgatttttatcactctttgaatgtggaaaaataaagagttgtgttggatatatgagagtcatgttgtatgtttttaaagggctatactctaaatttgtataaaaaagaaaaaaaaagggcggcaactctagaggatccaagcttacgtacgcgtgcatgtgacgtcatagaacttctatagtgtgtc

SEQ ID NO: 119330 - DNA, 876 bp, Arabidopsis thaliana
  unsure (1)..(876): unsure at all n locations
agcagcagttatggccgacgtagcaacaaagtattttatggaagatgaggtgaagaagacggtggcgtctagtttggtggggaagctaganacanacgtggagatcaaggcttcggctgataagttccatcacatgttcgccgggaaaccacaccatgtctctaaagcatctccaggaaacattcaaggttgtgatcttcacgaaggcgactggggtcaagtcggctctatcgtcttctggaactacgttcatgatagagaggcaaaggtggctaaggagaggattgaggcagtggagccgaataagaacttgatcacgtttagggttatcgacggtgatctgatgaaagagtacaagagcttcttgctcacgatccaggtgaccccgaagcttggaggccctggaagtattgtgcactggcaccttgagtatgagaaaataagcgaggaggtagctcatccggaaactctcctccaattctgtgtcgaggtctcgaaagagatcgacgaacatcttttggccgaggaatagaggagtactactactcttcgtgtttgaatttaaatgcaataaataaggactaagagccatgtctttgtgagatatatgaatgtgagtgtgcatcatgaatgtatgtatactaagatcgttttacgttggctactgtaactttgagaagcaatgtgtagtagctgtgatgaagctagtataaatatataataagtatgttatatatgtttgctaataataaatgtttggactagcgaaaaaaaaaaaaaaaaaaaaaaagggcggccgctctagaggatccaagcttacgtacgcgtgcatgcgacgtnnnnnnnnnnnnnnnnnnnnnnnnnnnnnnnnnnnnn

SEQ ID NO: 119331 - DNA, 687 bp, Arabidopsis thaliana
  unsure (1)..(687): unsure at all n locations
tcccattntacccccggctcaggattcccncccgttcgccaaaanttccacncatnttnccnngggccnccccattntccaagccaccccccgggtaaattccntggatgtgacctccaccaaagccgcctgggccaaagtcggctctatcggccatctggaaattccgttccatgattggaaagtttaaccagtggggaagaattaagatccgaggccgttggatcccggaaaaggaccctgatcacgttcaaggttttagaaggtgatctgatgaatgagtacaagagcttcgcatttacactccaagtgacccctaagcaaggggagtcagggagtattgcgcactggcacctggagtatgagaaaattagcgaggaggtagctcatcccgaaacccttctccaattctgtgtcgagatctccaaagagatcgacgagcatctcttggccgaggaatagaaaaatactcctcgtctgtgtgtgggtctttgaaacttaagcaagtctttgaaactgcaataaataatgaacgggtccgtctttatgtaagagaaaagagatatatatatatgtgttggtgtgtgtaatgcgtgtatgccctactactacggttgagttatgttggaatagtaaaagcatataatctattttggttcaagtgtttgactcgtagtgaacttgagt

SEQ ID NO: 119332 - DNA, 613 bp, Arabidopsis thaliana
  unsure (1)..(613): unsure at all n locations
ttctgtggggagcaagtgcaagggannntgagcgtgatccaaaacttgatctcgttcagggttatagaaggtgatctgatgaaagagtacaagagcttcgtaatcacaatccaagtgactcctaagcatggaggttcagggagtgtggtgcattggcacttcgagtatgagaaaataaacgaggaggtggctcatcctgagactctcctccagtttgccgtcgaagtctccaaagaaatcgacgaacatctcttggccgaggaatagaggagaatattcctcgtgtgactatctattatcctgtccgtacatgtatgtgtgattgaagcatgccgatttttatcactctttgaatgtggaaaaataaagagttgtgttggatatatgagagtcatgttgtatgtttttaaagtgctatactctaaatttgtatacgtataatgtgttttgtttgtttaataaagtgtaaaatgtttttttaataaaatcttaagcctcgtcttttcttaaaaaaaaaaaaaaaagggcggccgctctagaggatccaagcttacgtacgcgtgcagtcgacgtcataatcttctatagnnnnnnnnnnnnnnnnncgnnnnnn

SEQ ID NO: 119333 - DNA, 1274 bp, Arabidopsis thaliana
  unsure (1)..(1274): unsure at all n locations
ctctattacgactcattatagggaaggctggtccgcctgcaggtcccggtccggatttcccgggtcgacccacgcgtccaagaaaatcaaagcagcagttatggccgacgtagcaacaaagcaccccatggaagatgaggtgaagaagacggaggcgtctagtttggtggggaagctagagacagacgtggagatcaaggcttcggctgataagtttcaccacatgttcgctgggaaaccacaccatgtctccaaagcaagtccaggcaacattcagggatgtgatctgcacgaaggcgactggggcacagtcggctctatcgtcttctggaattacgtacatgatggggaggcaaaggtggcgaaggagaggatcgaggcggtggagccagataagaacttgatcacgtttagggttatagaaggtgatctgatgaaagagtacaagagcttcttgctcaccatccaggtgacccctaagcctggaggccctggaagtattgtgcactggcaccttgagtatgagaaaattagcgaggaggtagctcacccggaaactctcctccagttctgtgtcgaggtctccaaagagatcgacgaacatctcttggccgaggaagaggaggtgaagacaccagagacgcctagtttggtgggaaagctagagacagacgtggagatcaaagcttccgctgagaagttccatcacatgttcgccgggaaaccacaccatgtctctaaagcatctccaggaaacattcaaggttgtgatcttcacgaaggcgactggggtcaagtcggctctatcgtcttctggaactacgttcatgatagagaggcaaaggtggctaaggagaggattgaggcagtggagccgaataagaacttgatcacgtttagggttatcgacggtgatctgatgaaagagtacaagagcttcttgctcacgttccaggtgcccccgaagcttggaggccctggaagtattgtgcactggcaccttgagtatgagaaaataagccgagggaggtagctcatcccggaaactctcctcccaaattcttgtngccaangnctccgaaagaagatccgaccggacaatcttttggcccganggaattagangggagtactaactnactccttccggtgntttgaanttaaaaatgcgaattaaattaaggggccntaagganccaatggcccttttggtnggnannntattgaaatgtnnaagtgtccgacccatgggantgnannggnanaccccaaag

SEQ ID NO: 119334 - DNA, 912 bp, Arabidopsis thaliana
  unsure (1)..(912): unsure at all n locations
ttttacgacagaaggggactcatctcctaaattccttacataatattttcttaagataagcaaaaaaatcatggcagaagcgtctagtttggtggggaaacttgagacagaagtggagatcaaagcttcggccaaaaagttccatcacatgtttaccgagagaccacaccatgtctccaaagcaactccagataaaattcatggatgtgagctgcacgaaggcgactggggcaaagtcggctctatcgtcatctggaaatacgttcatgatggaaagttaacagtggggaagaataagatcgaggcggtggatccggagaagaacctgatcacgttcaaggttttagaaggtgatctgatgaatgagtacaagagcttcgcatttacactccaagtgacccctaagcaaggggagtcagggagtatttcggacttggcacctggagtatgaggaaatttagcgagggggtagctcattcccgaaatctttctccccatttttgtgttcgaggtttcgaaaagagattcccgaacattcttttgtcccgaggaaatagaggaggtcccccccctccttcggtgtttgaatttaaaacgccaataaataaggagctaagaccccatgtcctttgtgaggatatatgaatgttgagtgtgcctccccacatgtatgtatccccaccatcgttttacgttggctcctgtaactttgagaaccaatgtgtagtagctgtgatgaagctagtataaatatataataagtatgttatatatgtttgctaataataaatgtttggcctaaaaaaaaaaaaattaattaaaaaccccacgtcggcnnnnnnnnnnnnnnnnnnnnnnnnnnnnnnnnnnnnnnnnnnnnnnnnnnnnnnnnnnnnnnnnnnnnnnnagacc

SEQ ID NO: 119335 - DNA, 545 bp, Arabidopsis thaliana
  unsure (1)..(545): unsure at all n locations
nnnnnnnnnnnnnnnnnnnnacgactcactattgggaaagctggcacgcctgcaggtaccggtccggaattcccgggtcgacccacgcgtccgcggacgcgtccgcccacgcgtccggagaaaattagcgaggaggtagctcacccggaaactctcctccagttctgtgtcgaggtctccaaagagatcgacgaacatctcttggccgaggaagaggaggtgaagacaccagagacgcctagtttggtgggaaagcgagagacagacgtggagatcaaagcttccgctgagaagttccatcacatgttcgccgggaaaccacaccatgtctctaaagcatctccaggaaacattcaaggttgtgatcttcacgaaggcgactggggtcaagtcggctctatcgtcttctggaactacgttcattgatagagaggcaaaggtggcttaggagaggattgaggcagtggagcccaataagaactttgatcacgtttaggggtttccgacggtgatctgatgaaagagtacaagagcttcttgctcac

SEQ ID NO: 119336 - DNA, 608 bp, Arabidopsis thaliana
cccacgcgtccgtctcactctctcgctacatggagagtctctcgattcccgccgcttcttggttttccggcggaaccattcctccgacgaaggtgagagtttctccgccgcatcatctccggcgacctcccaacaggaattcccatcgcttggccgccattaatgccgcttctcgctctgtgagtgagctagtggaggaggatgtgttgcaaatgttcatgaaagacagagaagaaaatggagatttcatatctaaagtttctgataggctctggttaaaggagattctcgaatctattgatgttaattccaatggagcttcttcttcagctgttgaactagatgatactcgggaaagcttgatagatggcgctgatgatgatgaaagtggtttcttgaaacttaaaccgacacaagaatggattggttgggagagtgattctgcccccatgaataagaaagctctagctaaggcactacgagatgacagcgagagaaggaagaagtttaactttctgaaatatgaagctctgaagcgtgaactcatgtacctgtcgattgtaattggcactggatgcaccggatactgtttactagctttatcagtt

SEQ ID NO: 119337 - DNA, 417 bp, Arabidopsis thaliana
acgcctcttttctcgactctctctctttctaacaatttctctctttctgcaactgatagttaaaaagatattttgagacaacccgattgatatggaaaaagtgagagagattgtgagagaagggagaagagtggcaaaagaagacccgaggagagtagttcactcgttcaaagtgggtctggttcttgccttagtctcttccttctactattaccaacctctctacgacagcttcggtgttaatgcaatgtgggctgttatgacggttgttgtcgtcttcgagttctctgttggggccacgcttggtaaaggacttaacagagtggcggcaacactatttgcggggggacttggaatcggagctcatcacctggccagcatgtctggtccgacaggagaacccattcttctcgcagt

SEQ ID NO: 119338 - DNA, 1156 bp, Arabidopsis thaliana
  unsure (1)..(1156): unsure at all n locations
gggncggaattaccggggcggaccaacccgtccggagagacgaaaggaaaagcatgtttaaactctgtctcgttctcgtcttggttattgcagtagatgcaaatccggttaagtccggttcttgtagttgctccgggaatatatcagcgagcgatgtcgatcgagttcatttcgcgatgaacttggagttcaccgaggcggagttcttcttgaaaggggctaccggaaaaggacttgatgcctataacgcgacacttgctaaaggcggaccaccgccggtaggggccaagaaagccaaccttgatcctataactaaccgaatcatcgaggagtttggttatcaagaaatcggtcatcttagggcgattacggatatgacgggaggaattccacgtccgctaataaatctgacgagagagaatttcgcagtgtttatggacagagcggttggacgcaaatctaatccgcggtttgatccttacgccaactcactcaactatctcttagcttcgtactatatcccttatgttggccttaccggttatgtcggaaccatcccttaccttgtctacttcaatatcaaaaagctagtggcgggtctattgggggtggaatcgggtcaagacgcagtgataagaacgcttctgtacgagagacagaatgagaaggtggaggaatacggtggagtcacggtggctgagctgaccaatgagatatctaacctccgtaatgaactcggtatgtgcgggatcgaaggacgaaggcttgtgcgtgccgttgtggctaggagcggagaatcgcaccaccagcaacatcctctccgctgacccttactctctctcttatgaccggacagcacaagagatcctcagggttatgtacggcaccggtgatgagcaccgacctggtgggttttggccgtgtggtgccaatggaaggatcgctaggatgtttcttgatgaagggtgttatggtgaatattgcgttgtatgttcacatgacaattaaaagtttccattgatacaattcactagaaaataaaatcgtgattaagattgtaatagtgatctcattaatttaatactggtgttattagtccatgtatttattgctatcgaagtttaataaataaataaaaccgtgttgccatttttgt

SEQ ID NO: 119339 - DNA, 275 bp, Arabidopsis thaliana
attgacgaacttggatgacagctggagctttcaacagaggccaaggaaatattgaagcagaggctggatattactttggacgaggtttgctccctgaaagaggagaaaaccacatgcattgccaaatggaatgctgtagctttgcagaatcaaagcttagaggcaaatttgcagaatattactcacgaaaacctcatccttctgcaaaagattgatgaactggaatctgtagtgttggagtctaagagttggaagaccaattatgagacatgcat

SEQ ID NO: 119340 - DNA, 399 bp, Arabidopsis thaliana
  unsure (1)..(399): unsure at all n locations
gaggaagagagagtggccgtgaccggggtaggcacgactcgatacgcgcttaaaccggggcgtataaaaagcgaggacatactcatctgtatcgatgtagatgcagaatcgatggtggagatgaagaccactggaactaatggtaggcctttgatcaggatggagtgcgtcaagcaagccattattctcttcattcacaataagctgtccattaatcctgatcatcgctttgctttcgctacgctcgccaaatcagccgcttggcttaaaaaggagttcacaagtgatgctgaatctgctgttgcttcccttagaggattgtcaggtaataaatcctctagtcgagcggatctcacaactttcttccgngcagcagctcaggaaagccaaaagtttcca

SEQ ID NO: 119341 - DNA, 529 bp, Arabidopsis thaliana
cgcgtccggcttacatgaccggtgtgcctacatcaagaagcatcctcaaacatctcggcaggtttgatttggtcccagagcggtgggtcaattccattctcagagctgcaactctcgagccagagctctcttcctctaacaggtagcagaatcacaagacaagggcgtgaaattcgtcgatccttttgaatagatcacctcagaaaagggtacgcatacgcaggtcctctggatcaccttttagcaattcttaatctatatgactattattatatagaagcatgtgatgtgaatttatatatataatcttcgtaccttgagaagaagaaaaagcctatttgagtagaagacctgagtgagaatcacatatatctgagaggaaatctatatgtgcatataccagaaaagataacaagaaaaggcttcttctttttttttttggaatttgtgtataatgtttgtatagagacagacaaggtttctttgtcttgtccgtacttctacttcagacccattccggatgagacac

SEQ ID NO: 119342 - DNA, 972 bp, Arabidopsis thaliana
agcgtctctacgactcactattgggaaagctggtcacgcctgcaggtaccggtccggaattcccgggtcgacccacgcgtgcgcccacgcgtccggtcttccatcctaaagattgtaaagggaaaccgttttcgattttcagagaagatcacacatctttcgtcccttcactgccatacgtgtcgataaagatggcggctatggcggcgaagcttcagttatcggcgaaatctgatcaaagcagtgtgcgattaccgagagtgatcaacctctcccgcgatccaacgactagagtctcgtttccgcgaaatggatcagtttgttccctccacaccaatttctcttctccacatctcgcgaaaccttgcgccggaggtggtggtggtggaagcaccggtaataacggcggcggaagcggaagcggaggaggaggtggtggttttggaggttcagggggtgaagcaagtgaagaatcatctccatggggaccaatagggttattcatccaaggatggagatcaagagttgcagctgattctcaattccctttcaaggtactaatggaaatgcttgttggtgttagcgccaatgtacttggcgacatggcttcacgccctaatttcggattgaacgagctagatttcgtcttctccactctcgttgtaggttcgattctcaatttcacactcatgtacctcttagctccttctgcaatatctcatggatcctccaatttgttgcctggaatctttagaagctgtccttcgagccatatgtttgaacagggtaacttcacccttatgaaccgttttgggactcttgtgtacaaaggaatggtttttgctaccgtgggattagctgcaggtcttgttggaaccgctatctctaacgggttgatcatgctgaggaaaaagattgatccgagcttcgaaacgcccaacaaaccaccacctacgctgctgaattctttaa

SEQ ID NO: 119343 - DNA, 708 bp, Arabidopsis thaliana
cgaacaagaacttttcaattggatgctatcccgcttgccattggagctttcttatgtgcaacagctcagagtgtgcagactatgattgtgggacgtctgctcgctggaattggaattggaatctcatcagcgattgtaccactttacatatctgagatatcaccaactgaaatccgtggagcactcggatctgtgaaccagttgttcatctgtataggaatacttgcagccttgatagctggattaccccttgcagcaaaccctctatggtggaggacgatgtttggtgttgcagttatcccttccgttctattggccataggaatggctttttctccagaaagcccaaggtggctcgttcagcaaggaaaagtctctgaagctgaaaaggcgatcaaaactttgtatggtaaagaaagagtggttgaactagttcgcgacttatcagcctctggccaaggttcttctgagccggaggcgagatggtttgatctattcagcagccgctactggaaagttgtaagcgtacgtgcggctctcttctttgtttcaacaagttagcccggggttaaacgcagttgttggtattactcccccacatcggtattccgtagtgcgggaatccaatcagatgttgcagccagtgctctcgttggagcatcaaatgtctttggcactgctgttgcttcatcgttgatggataaaatg

SEQ ID NO: 119344 - DNA, 399 bp, Arabidopsis thaliana
  unsure (1)..(399): unsure at all n locations
tgcaanaagtacaaccttaaagaagaaatgggtgagctcccatttttgctgggaggagaaaagcttaatccgttgcttcagcttggaggtaagataagtgacaagagcatatagtctttatgtttcataaaacataattatgtttttactgtaatcttgggttattgtgtaactggttaaatcatctccatgtattattaccagaggttaggggtgatcacaggtactaaaagctaatctaacacttatggaagaatttttctttcttttttttccctattatataaaaataattagagttttggttctaaacctatttgctaagtgtgaatgagtctttacatgttcatatttcagttcaaatggttaaatttgttaaggttctcacttaaaaaaaaa

SEQ ID NO: 119345 - DNA, 432 bp, Arabidopsis thaliana
aacttcttaaaaaaaaaaaaaatgggagaaaacggagccaagcgatggaacttcggagctaacgaggtcgtcgaacgatctaactcacttaccattcgtgattaccttaacaccttaatcaattgtctcgacggtggtgatgtaagacccgtcatcccactaggtcacggcgatccttctccgttcccgagctttcgtaccgatcaagccgctgttgaagccatctgtgatgctgtccgttcgaccaagtttaacaactactcttcttcttccggtgttcctgtcgctaggaaggctgttgcagagtacctctctagtgatctctcttaccagatatcaccaaatgatgttcatatcacagctggttgtgtgcaagccattgagattttgatatccgctctcgcaattcctggagctaacattctgctacct

SEQ ID NO: 119346 - DNA, 597 bp, Arabidopsis thaliana
  unsure (1)..(597): unsure at all n locations
agtgnaagaagaaaaatcgagaaccatcttctcagccgattttagtaaccatcttcttgtttgctccgaacaatcaagagatcgaaaatggctgatgttcacaaaggaaaggtttgtgtaaccggtgccggagggtttttgggttcgtgggtcgtcgatcttcttctctctaaggattacttcgtccatggcactgtcagagaccctgataatgaaaagtatgctcatttgaagaagctcgagaaagctggtgacaaactcaagctcttcaaggctgatttgttggactacggctctcttcaatctgctattgcaggttgcagcggagtcttccatgtcgcttgcccggttccaccagcttcagtccctaatcctgaggtagaattgatcgcacctgctgtggatggcacgctgaatgtgcttaaggcatgcattgaagcgaatgttaagcgtgttgtgtatgtttcctctgtagctgcggctttcatgaaccctatgtggtcaaagaatcaagtattaggtgaggatgttgggctnccaggntcctgaagaaacctnngattggatttttctggnaancacggcnaggggtaattt

SEQ ID NO: 119347 - DNA, 513 bp, Arabidopsis thaliana
  unsure (1)..(513): unsure at all n locations
cnnnnnnnnnnnnnnnnnnnnnnnnnnnnnnnnnnnnnnnnnnnnnnnnnnnnnnnnnnnnnnnnnnnnnnnccacgcgtccgcggacgcgtggggtccaaaagggtcttcttctttgtctctgctcttcactttcaattataacctcttcgtcttcttcgccgtctctggtattaactccggcgagttttttttttttttttttactttgatatgaatttgcgagatttactgtttaattcatgatgacaattttggatttttgatcggatgtgaaattcagagtttttcattcttcttcatcatcttataacaaagaagaaacaaaacaaaaaactttttttttctttctttctattgtttcggaatctatgggtgaagcaagcagacaacaaagggcatggaacagagaaatgacggttacgacaaatctttctctagacatagataaatacccgagagatctgttacgaggtttcatgtctgaaaacggcggtggaagagtctttcacg

SEQ ID NO: 119348 - DNA, 373 bp, Arabidopsis thaliana
acgcgtccaacatactgcaggttctttattcttccaaactctctctgttttgagggtctacatacaaattcaacctttagttgtgcttactctgtttctatgctctgtttttttgtcgtgttctttaaattaatggtttttgtggggttactctggtttgactaatcagcttaatagaagccattgatctgataatcaaaggagcacataatctgattgtccccatacatacaaagccctacactaagaaaaagcagcaaaacgacaacgtttcggtcaccaccaccacccactcgaacggacaacgattctgctggatcacactataagacatcattcagtttctcctcggattcatcgccgcattctctcc

SEQ ID NO: 119349 - DNA, 639 bp, Arabidopsis thaliana
agaaagcccaaaacccagaagaacaaaaaatctctcttttgaaaattctccttttgcaaatcattcaagtgaagcacaatcatcttcttcttcttctccagcttcatcaatctcttctagactttttgcgtttacctgaaaaactgttttgatcttttctgataactcttctcagatgagaagttctaagttacttcttctcaagttcttcttcttcttcttcttcaatctgacttcgcttgagtatcaagttgatggagcatttgttggaacatatgggataaattatggaaggatagctgacaacataccatctccggagaaagtagttttacttctaaagcaagctaaaattcggaatgtgcgtatatacgatgtagatcacactgttcttgaagcttttagtggaactggtttagaccttgttgttggacttcctaatgggtttttaaaagagatgagttcaaatgctgatcatgctttcacttgggttaaagaaaatatccagtctttcttacccaagactcggattcgcggtatcgctataggtaacgaagttcttggaggcggtgattctgagctcgcgggagctttacttggtgctgctaaaaatgtgtacaatgcgttgaagaaaatgaa

SEQ ID NO: 119350 - DNA, 538 bp, Arabidopsis thaliana
cccacgcatccgccaacatcctaaaacccttttgatcaaaacatggcttccatttccagaatcttaccaacagatggcagattaagtcaatgcagaatcaacacctcgtgggttccttctacaaccagaactcaaactcacttagattttcccaagttagtttctgttagtaactctgggataagtttgaggattcagaatagtaaacctattagccctgtctttgctcttgaagcaacttcctccaggagggttgtttgcaaagctgctgctggtgtgtcaggtgacttacctgagagtactcctaaggaacttagtcagtatgagaagattattgagcttttgacaaccctttttccactttgggttattttgggaacacttgttggcatcttcaagccatccttggttacatggttggaaacagatctctttactctaggtcttggatttcttatgcgttccatgggtttgactcttacgtttgaagatttcagaagatgtttacctaatccatggacggtgggtgttggttttt

SEQ ID NO: 119351 - DNA, 435 bp, Arabidopsis thaliana
acccacgcatccacatcatcgttagttacacatcatcgtcttcttcctctcgctccctctgatagcggggccctaaaatgctctcatgctgctactttccgtaaccaaatcccgacgaattaaccctttttttttttggggggataaaatcatcggagtctcttctctggttcggctgtgatgggtgcgagccggaaattacaaggcgagatagatcgggtgctgaagaaggttcaagaaggtgttgatgttttcgacagcatctggaacaagtggaatgtatatgatacagacaatgttaatcaaaaggaaaagtttgaggcggacttgaagaaggaaatcaagaagctgcagcggtatagagaccagatcaagacatggattcagtctagtgagatcaaagataagaaagtcagtgcatcttatgagcaatcc

SEQ ID NO: 119352 - DNA, 1007 bp, Arabidopsis thaliana
  unsure (1)..(1007): unsure at all n locations
nnnnnnnnnnnnnnnnnnnnactagagggacagctggtacgcctgcaggtaccggtccggttattcccgggtcgacccacgcgtccgtacggctgcgagaagacgacagaagggtacggctgcgagaagacgacagaagggtacggctgcgagaagacgacagaaggggatagccacaaaacttttttctttcatcctctaaaaaaaatctttctggtgagtaacgaaaaaaatgtgtccggtggagaacaaatggttaaaggtgggtcaaaaaggagctggtcctggggctagaagctcacatgccatgaccgtcgttgggaacaaagtttactgttttggtggtgagcttaagccaacgatccatattgataacgatctttacgttttcgatcttgagactcaagaatggtcgatagctcctgcgaccggagaggctcctttcccctgttttggtgtctcgatggtaacgatcggttcaacgatctatgtctacggtggccgtgacgataaacggagatacaacggtcttcattcgtatgatactgagaccaatgagtggaaattgttggctcctgttgaggaagggcttcctggtcgtagctatcattcaatggctggtgatgatcggaaagtttatgtgtttggtggtgttactgctaaaggacgtgtgaatacgcttcatgcgtacgatgttgttgatcacaaatgggttgagtatccggcggctggggaagcttgtaaaggcagaggagcgccagggcttgtggttgtggaagggagaatttgggttttgtttgggtttgctggttttccaccgggaaatggagggagttttgtcttggatttgattgataaatttggtgtgtttcttctgatcttttagactattgaacttattgatcaaaaaagttagttcccccgaaaaaccaaaaataaaaaaaaaaaaaaaaaaaaaaagatagcggccgctctagaggatccaagcttacgtacgcgtgcatgcg

SEQ ID NO: 119353 - DNA, 531 bp, Arabidopsis thaliana
ttcaatttgtttccaaataacattctctctttaacacagccgcctttgtgaccgtccgatcttaaatcagcgtttccggttcatttgacggcaactatctctctctctctctctagagaattgatgaagaagagcatctatcttttttgtttttgaaaattaacaacacttcacgagggttgacctgtttcggtggtgtttcttcaattccggattttgatctttcgtttcgatcgaagatcaatcaaagtctccacctttcttcaatggatttggatagcatggactgtacatcaaccatggatgtgacagatgatgaagagatccaccaagatcgccattcctacgcttctgtttccaagcatcatcatactaataacaacaccaccaacgttaatgctgctgcttctgggcttctccctaccaccaccagtgttcatgagcttctcgaatgtcctgtctgcaccaattctatgtaccctcccattcatcagtgtcacaatggacatacgttgtgttcaacctgtaaag

SEQ ID NO: 119354 - DNA, 1194 bp, Arabidopsis thaliana
  unsure (1)..(1194): unsure at all n locations
atgatttgccnnnnnnnnnnnnnnnnnnnnnnnnnnnnnnnnnnnnnnnnnnnnnnnnnnnnnnnnnnnnnnnnnnnnnccacgcgtccgcaaatcgttcatcgtcttccttctctctctctgattctctcattcgcgaatttcaaagctatggcggatacggtagagaaagttcccaccgttgttgagtcatcttcatcatccaccgttgaagcatctaatagcgccgagaagactgagcccacgacggagaagaaaaagtggggcgatgttgaagatgatgatgatgaagaagaagctgtatcggagcttaattcattgagcattaaggaagaagagaaacctgattctattcttgaggaacctgaagattctaacatcaaagctgttacttctggtgacacaccatatacatcagcaagtagatttgaagacttgaacttgtcacctgaattgatgaaaggcttgtacgttgagatgaaattcgaaaagcctagcaagatccaagctattagtttgcctatgataatgacgccgccacacaagcatctgattgcccaggctcataacggatctggaaagacgacttgtttcgttcttggaatgttgagtcgtgttgatcccacattgagagagcctcaagctctctgtatttgtcccactagagaattagctaatcagaatatggaagttcttcagaagatggggaagtttactgggatcactgctgagttggctgtgcctgactcaacgagaggtgcaccggcggcaacaagaggagctcctgtttctgctcatgttgtgattggcacccctggaacgcttaagaaatggatggcatttaagagactaggtctaaatcatttgaagattctggtttttgatgaggctgaccatatgcttgctacgggatgggtttagggatgattccttgaagataatgaaagacattgggagagttaatcccaatttccaggttcttcttttctcggcaacttttaacgaaactgtcaaagattttgttgcgcggacagtcaaagatcccaaccaattgtttgtcaaaagagaggatctggctttggactcggtgaagcagtataaagttgtttgcccgaaggagcaaaacaagatcgaagtcatcaaggatcagattatggagcttggggatattgggcaaaccattatctttgtgaa

SEQ ID NO: 119355 - DNA, 353 bp, Arabidopsis thaliana
cgacccacaacgtcaggtcaaagtcaattcttggtcacatttggtggaacagagcataatacgacatcatgtaatgccataggatttaggtcttccccaagatgcattaggtggcacaacagacaccaagtcaagatcagatgtagagctaagccatctcgcctcaaacatcgagtcacgttccagtcttcagacaacagatatgcggttggctgatcttctagatagcacactttgggaccgcaagcttgctccttcctctgagagaattgtgtacgcattggtccaacagatattccagggcatacgagagtactttctcgcctctgctgagttaaagttcaactgttttc

SEQ ID NO: 119356 - DNA, 506 bp, Arabidopsis thaliana
  unsure (1)..(506): unsure at all n locations
attaaaatggctgctcgtgtcgaggcggcagcaacacacttgtcgtctctccctgtagcttctctggagttttcgcagtcacgaatcttgttttgaagaaattaatttgaacaagggttttagggcttggatgctttgttttcattgaagaagaagtagaaggagtgtatacaaggattatgggaactcacatcaatttcaacaacttaggaggtggtggtcatcctggaggggaagggagtagtaaccagatgaagccaacgggtagtgtcatgcccttggctaggcagtcctcggtctactcccttacctttgatgagttacagaacacactaggtggaccgggaaaagatttcgggtcgatgaacatggatgaactcctgaagagcatatggncttctgaggaagctcaggccattggccatgacttctgcgccanttctncaannggtacncaaccttggtncttggtatcccncccccanggngggatttnccnaggnaaa

SEQ ID NO: 119357 - DNA, 822 bp, Arabidopsis thaliana
  unsure (1)..(822): unsure at all n locations
cacatcgtttgtcgcatacaatcagnagtgccggatgaaatagaagctttaaatcaattctccagtaagatctaaaaggaagcgaaatcggaactaagaggataatgctgatagatccggtctcaaccacgtatgttataacgaagatctaatgcagcatttttatgtgcttataagatgagtagaactaggagcttccttgtagcaccatttcacagtttagtgtagcaaatggcaaggataaccctcttgccctctctcaaattcaattcctcaaaaatggtgaacctagtggcagtgaacaagtgtgataggagaaagattttgctgctcaatctttgtggaatgtgatgagctcatcatcatcatttcttcaaagcctgtttgttctttgccccattacagaggaaagaacaagaaagaagcccttgagatttgttttgagatgaagctgcacatcttgtctttttggatatgatatttgtaaatgcaataagtatatatagttcggttggaagatgttattcatcgagtcagttgtgattttagccgtttggtgtttttaagcaacggattaattagattaatgtacggtgatgaaccatgcatgtttatattgctgtgacgtcattgtagtgaggtgaaaaagagagagagagatcactatttaatcagaattcacattcaaaaatatatataataaatcactgcaatcaattgtattctaaaaaaaaaaaaaaaaaaaaaaaaaaaaaagggcggccgctctagaggatccaagcttacgtacgcgtgcaggcgacgtcaagactcttctatagt

SEQ ID NO: 119358 - DNA, 1841 bp, Arabidopsis thaliana
  unsure (1)..(1841): unsure at all n locations
agggaaagccggtacgcctgcaggtaccggtccggaattcccgggtcgacccacgcgtncgcaattatccattagatagaaactggtcctcgaaacctagaatcatccaccccgcaaagtcgacagatttccagcgaattcaaacccgatccatcgagattctggatcaacccgattacccaagatccaatctttctaattgatgaatcaatcgatcccttctaccgtatcttcttctccgacgactgatacgatggacgcttcgccgcttcttggccggaacagacgtaaccgcccacggtcctctcagccgattcgtggcgcggcgtcgagacttctccgccgtgctagcaaccgccggatgatgctccgtgagccctccgttcgagtccgtgaggtggcggctgagcagcttgaggaacggcagagtcaatgggcttactctaaacccattatagttctcgatatactttggaatttcctatttgtgattgtttcaatcgcgattctagggtttagttctgatgaagatcctgatgttcctcttaggttgtggatcattgggtataatgttcagtgtttgtttcatgttggatgtgtcattgctgagtataaacgtcgccgtgttgctaattctcctcctcctagtggtgaagattcctccaatcacgagtctcttagcggaagtgaagatgaatctgatggctatagcattaacaacactgatgatgatgaccatggaactagtttcactaagcaccttgaatctgcgaataccatgttctcttttgtgtggtggatcatcgggttttactgggtgacggctgataccgaggcactagctcaatcttcgccacaactctactggctctgtgttgcattccttgcgtttgatgttatgtttgttgtcatttgcgtagcggttgctagtcttattggtattgctgtttgttgctgtttaccttgcatcattgcgatcttgtacgcattagcagatcaggaaggtgcaccggatgaagagatagagaggcttttaaaattcaagtttctcacagtaaagaattctgagaaagtgaatggcgaaatacgggaaactcaaggagggataatgactggattagataccgagtctcaaaccgaacgtatgttattaagcgaagatgctgaatgcagcatttgtctatgtgcttatgaagatggagtagaactaagggagcttccttgtagacaccattttcacagtttatgtgtagacaaatggctaaggatcaacgctacttgccctctctgcaaattcaatatcctcaaaaatggtgaacctagtggcagtgaacaagtgtgatgaggagaaagattttgctgttcaatctttgtggaatgtgatgagctcatcatcatcatttacttcaaagcctgtttgttcttttgaccattacagaggaaagaacaagaaagaagcccttgagatttgttttgagatgaagctgcacatcttgtctttttggatatgatatttgtaaatgcaataagtatatatagttcggttggaagatgtttttcatcgagtcagttgtgattttagccgtttggtgtttttaagcaacggataaattagattaatgtacggtgatgaaccatgcatgtttatattgctgtgacgtccttgtagtgaggtgaaaaagagagagagatttccctatttaatcagaattccccttccaaaatatatatattaatccctgccatccattgttaaaaaaaaaaaaaagggcggccgctctagaggatcccagcttacgtacgcgtgcatgcgacgtcagagctgttctataggtacacgc

SEQ ID NO: 119359 - DNA, 1131 bp, Arabidopsis thaliana
  unsure (1)..(1131): unsure at all n locations
nnnnnnnnnnnnnnnnnnnnnnnnnnnnnnnnnnnnnnnnnnnnnnnnnnnnnnnnnnnnnnnnnnnnnnnnnnnnnnnnnnccacgcgtccgatcacaatggtttggttaatgaaagtttttgtctttgtgacattactctctttagtgtttgtaataacagaatcagctcctgaatctgctcttatcaccaaacttcctggtttcgaaggcacttttccttcgaaacattactccgggtatgtgacaattgataaggaacatggaaagaatctatggtattactttattgaatcggagaagaatccatcgaaagatccggtggtgctttggctcaatggtggtccaggttgttcaagcatggatggatttgtgtatgagcatggtccattcaatttcgaactaccaaagaaaaacaatagtctcccactcttgcatcttaatccttatagttggtccaaggtctctaacattatataccttgattctcctgttggtgtgggattctcttactcaaacaataagtctgattacataaccggtgatattaaaaccgcggttgactctcacgcgttccttctcaagtggttccaaatgtttcctgagtttcaatcaaatccttttttcatctctggagaatcttacgccggagtttatgtcccaactcttgcttcagaagttgtcatagggaacaaaaatggagtaaagccggctcttaacttcaaggggtatttggttggaaatggagttgcggatccgaagtttgatggaaatgcttttgtcccgtttgcacatgggatgggactaatctctgatgaactctttgagaacgttacaaaagcttgcaagggaaatttctatgaaatagagggactcgagtgcgaggaacagtatacgaaagttaacgatgatactaaccagttgaatatatacaacattcttgagccatgttaccacggaacatcgctatctgcattcgacattagatcgcttccttcaagtctccttcagctaggcaaaactgaaaaacggttacctataagaaaaagaatgtttggtcgagcgtggccagttcgtgcgcctgttcatccaggcattgtccctagctggtctcaactttttgccgacgtc

SEQ ID NO: 119360 - DNA, 637 bp, Arabidopsis thaliana
taaaaattaaatttataaaccaaaaacaatgaatctcgccacaaagtttcatgtgatggtacttttgctcattgtaattggagatgtttgtgccaatgtaggcgcaaggccgctagaagaagtttccaaagaacttatggataagaagaccgcttcggttcctaagacactgttaccgttcgcaccaatatcattaccaacattaccgccagcgcagttaccaggtttacccactccgccaaagatgtctaatggtgacactggaggagttgatgagaacgcagatggtagactacccaaagatgcttcagcgggttcccatggtgccacagccagaggatatcgttccggaggtggcaggagtgatgcgtcgggcagcactgacccttggccttgagcgtgaggtgatgatgttcaattgttcattgctcaaacctatataataagataataatactctacaaacgcacggtctcttttctgttcataaataaaactagagattgtcccctttaataataagaaatccctaataataatcatgaaatgctactttctatgtgtaatatataaaataaatgtaataatttactacggctttatcttagtgaataatatatgtatgagtgattatggt

SEQ ID NO: 119361 - DNA, 531 bp, Arabidopsis thaliana
  unsure (1)..(531): unsure at all n locations
atcaaaatttcatcaacccaaaaaagtaaaaaaaatctgtagctttcgcatgtaaatctctctttgaaggttcctaactcgttaatcgtaactcacagtgactcgttcgagtcaaagtctctgtctttagctcaaaccatggctagtaacaaccctcacgacaacctttctgaccaaactccttctgatgatttcttcgagcaaatcctcggccttcctaacttctcagcctcttctgccgccggtttatctggagttgacggaggattaggtggtggagcaccgcctatgatgctgcagttgggttccggagaagaaggaagtcacatgggtggcttaggaggaagtggaccaactgggtttcacaatcagatgtttcctttggggttaagtcttgatcaagggaaaggacctgggtttcttagaccctgaaggaggacatggcaagtgggcaaaagatttctcaaggtggttgtgtttnnnaatcggtgttcctcttttgnaaacctttttttccacgggnagcctttt

SEQ ID NO: 119362 - DNA, 700 bp, Arabidopsis thaliana
ggggaaaccctggtcacgcctccagggtcccggtccggaatttccgggctcgacccccggggtcgaattttccccgtcctttgatttatacaaatgccgttcttactaggacgcagaggaaccaaaacttccggtttttcgtcacgaacgcatcgtgctgcggagttggatctcacgatgcttatggttgcggtttacctaacgtgcattcgaagctatgtgagtaccaacggtctttcctattcttcgacggacgtcacaactccgagaaggcgcaagaaatgtttgcccatcttctttttggagccgatacaaatgttgtccaaccgatgaacgtccgtgagcttactgtttacccagtcgatgaacccatgcgtgaattttgggtgcctccaacgccagctactgtccacgccagcgactctagctcgtccactagccgcggttacgagtattactgagtctttttaaaactcaatctttagggtcaatcaggttttctacaatggtcatgagttaatttataaccgaatcaaaatcggaatcttgatgtttttgatttgcaatgttttcctgtttctctagtgagtttttctctataataaaagattgatcttatcatctcgaaaaaaaaaaaaaaaaacaaagggcggccgctccagaggatccgagcttacgcatgcgtgcgtgcgcagtcaag

SEQ ID NO: 119363 - DNA, 1425 bp, Arabidopsis thaliana
tttacaatataaatataacgtatcggtctacgagctaagacacaaaagcaattttctactcatttactgttctgtttcactttctctctctctgtatactctctaaatgatggcaaaaaactgtaatttagtcagtgttctatgtgtatttttggtattgaccctctttaacaaacccatcaccgtcgccgggcagaatattccggcggtgggcttgttcacctttggtgactccaacttcgacgccggaaacaaacagactctcaccaaaaccttactccctcaaactttctggccgtatggaaaatcccgagatgatcccaacggcaaattctccgacggcctcatcgctccagacttcctcgctaaattcatgaggattccgatcgtgatcccgccggcccttcaaccgaacgtcaatgtctcacgtggagctagtttcgccgtcgctgatgctactctactcggagctccggtggaatctttgactctgaatcaacaagtgagaaagttcaatcaaatgaaagcagcaaattggaatgatgatttcgtgaagaagtcagtgtttatgatatacattggtgcaaacgattacttgaatttcaccaagaacaaccctaacgccgatgcatctactcaacaagcttttgtcacttccgtgaccaacaagttaaagaacgatatcagcttgttgtattcatcaggagcgagtaaatttgtgatccaaaccctagctccattgggttgcttacccatcgtcagacaagagttcaacaccgggatggatcaatgctatgagaaactcaacgatttggctaaacaacacaacgaaaaaattggaccgatgttgaacgaattggctagaacagctcctgcatcagctcctttccaattcaccgtctttgatttctacaacgcgattcttactaggacgcagaggaaccaaaacttccgatttttcgttacgaacgcatcgtgctgcggagttgggacacatgatgcttatggttgcggttttcctaacgtacattcgaggctatgcgagtaccaacggtcttacctattcttcgacggacgtcacaacactgagaaggcgcaagagatgtttggtcatcttctttttggagccgatacaaatgttatccaaccgatgaacatccgtgagcttgtcgtttaccctgccgatgaacctatgcgtgagtcttgggtgcccccaacgtcagccaccgttcaactcagggagagccgcggttacgagtattactgagtctctaaaatcaatatttagggatcgatcggggtttctataagggttatgagtcaaattataactggatcaatatcggaatcttgagtagttttaatttccaatgttttcatgtttctctagtgagttttcctccataataaaagattgatctctgc

SEQ ID NO: 119364 - DNA, 670 bp, Arabidopsis thaliana
  unsure (1)..(670): unsure at all n locations
atgatactgccnnnnnnnnnnnnnnnnnnnnnnnnnnnnnnnnnnnnnnnnnnnnnnnnnnnnnnnnnnnnnnnnnnnnnnnccacgcgtccgacaaaacttatctcttcgccttgtctgctttttcatccaaaggtccaattagcctctctcccaaatctctctcctcgccggagatcggctcgattcctccgtcaccaccgcatctaaccggagattttccttccgtcttctctactcacaacgcagagcttcaatttctccctcgcagggattcggatcagttcaatttcaagtttctgaaccactcatggatcaggcggagctgagtatagagcaggtattgaaaagggacattccatgggagacttacatgaacactaagctggtttcagctaaaggtctccagctcttaaggcgctatgataaaaaacctgaaagtgctagggcacagttgctcgatgaagatggtccagcttatgttcatctctttgttagcatcttacgtgatatattcaaggaagaaactgtcgaatatgttttggctttgatttatgaaatgctctcagcaaacccaacacgagctcgattattccatgatgaatctttggcaaatgaggatacttatgagcctttcctgaggttgctttggaagggaaatggttcattc

SEQ ID NO: 119365 - DNA, 921 bp, Arabidopsis thaliana
  unsure (1)..(921): unsure at all n locations
agctggtacgcctgcaggtaccggtccggaattcccgggtcgacccacgcgtccggcttcttaagcccaaatctctctctctttctctctttctcttcctctctcaatctactcgccggagatcggctcgattcctccgtcaccaccgcatccgaccggagatttccttccgttttctttacttcacaacgcagagcttcaatttctcccctcgcagtgattgatcaaagatgggaagtcagaagaatgcgaaacacctcgaggaatgcactgtctccaatgcattggggaacttgggtattctcagtcctaggcgcattgggtgccatcccggtaggccataaacgcaggcctttaggtccacttgggttcttcggcacaaccggaacaatgctcgccatttccttggtgggagcaatgccgagagagaacccgccgaccaccaaccgaagttcctcccagactcttaaatgggcccagcaccaccaccacccccaacacagggactggggggtggttttccctggcccaatcttgttttacctccttctcatggatggcccttggaggccaccccacagatttaacctttttccaaaaattggggagttattcccctttntccgtgagaaaaccaaaaaaaaaagctctttggtggattaaacacgtgaaacaaaacaaaaagaggggcggccgctcttaaaggaatcaaagattaccttcccggggcctccgaggcattagtcttttttagggggccccaagtgaacccctcgggcgcggttttacacgggcggggtgggaaaacctcgggttccccacattatcgccctggccccatcacctctgcccagtgggaaaaaagaagggccccccacccccttcccacgctgccactcgatggcggaggggccgcccttg

SEQ ID NO: 119366 - DNA, 488 bp, Arabidopsis thaliana
ttccttccgttttctttacttcacaacgcagagcttcaatttctccctcgcagtgattgatcaaagatgggaagtcagaagaatgtgaaacacctcgaggaatgcactgtttccaatgcattgggaacttgggtattctcagtcctaggcgcattggttgcaatcccggtaggcatcaaacgcaagtctctaggtccacttgtgttcttcggcacaaccggaacaatgctcgacattatcattggtgtgagtcaatgcgagagagaacacgcagaacaccaaacgaagttactccaagactctcaaaatgccgcaacaacaacaacaaccaccaacacagagactgaggatagctcttccatgtcctaatcttttttacatctttctcattgatgtactttgatgctactcacaagttaaacttttttcaagatattgtgattattccacttctcttgagaaaacaaagaaaaaagcttttgatgatt

SEQ ID NO: 119367 - DNA, 693 bp, Arabidopsis thaliana
  unsure (1)..(693): unsure at all n locations
gacccacgcgtnccgcacaaagcaacaacaaacaccacaaaagcaaaagaagaaacaaacgcaagagttctcaagcaagctcaaacatggcactaatgaagaagagtctctctgctgctcttctctcatcaccacttctgatcatatgtcttatcgcattgctcgctgatccgttttcagtcggtgctcgccggttattggaggatcctaaaccggagataccaaaattgcctgagctacctaaattcgaagttcccaagttgccggagttccctaaaccagagttgcccaagttacccgaatttccaaagcctgagttgccaaagatcccggagattccaaagccagagttaccaaaggtaccggagattccaaagcctgaggaaactaaactgccagatattcccaagcttgaattgcccaagtttccggaaattccaaaacctgagctcccaaagatgccagagattccaaaacctgagttaccaaaggtaccggagattcagaagcccgagttaccaaaaatgccggagatttccaaagcctgaattaccaaagtttccagaggtttcaaagccctgattttgcaaagttttccagnggntttcaaaagccttnanggtgcctaaaggttaantnggggcttgaaaaggcttangggttcctaaaggngnccanaggatttccaaaggc

SEQ ID NO: 119368 - DNA, 449 bp, Arabidopsis thaliana
  unsure (1)..(449): unsure at all n locations
aagccagagttaccaaaggtaccggagattccaaagcctgaggaaactaaactgccagatattcccaagcttganttgcccaagtttccggaaattccaaaacctgagctcccaaagatgccaganattccaaaacctgagttaccaaaggtaccggagattcagaagcccgagttaccaaaantnccggagattccaaagcctgatttaccaaagtttccagagattccaaagcctgagtttccagagaattcaaagcctgaggtgcctaagctaatggagactgaaaagcctgaggctcctaaggtgccagagattccaaagcctgagttgccaaagttgccagangttccccaaggcttnaggcttcctaaggtaccacagatccacaagccggagttgcccaaaatgccggagttacctaagatgccggagattcagaaacctga

SEQ ID NO: 119369 - DNA, 465 bp, Arabidopsis thaliana
ccggaacggaagggccgacccgaccgttctctactctctcctcaaaaactcaaaagagcaaaaaaaagagaagaagaatcaaaatcccacacaatggcaacacactcttccttcaccgcaacaacacctctctttctcatcgttcttctatccctatcctccgtctcagttctcggcgcatctcaccaccacgcaacggcgccggctccgtctgtagactgttcgactctcatactcaacatggctgactgtttatccttcgtttcgagcggaggcacggtggcgaaaccggaaggtacatgttgctctggtcttaagacggtgcttaaagctgactctcagtgtctatgtgaagcgtttaagagcagtgcttctcttggagttactttgaatatcactaaggcttctactcttcccgccgcatgcaagcttcacgctccttctatcgctacttgtggattgtct

SEQ ID NO: 119370 - DNA, 606 bp, Arabidopsis thaliana
  unsure (1)..(606): unsure at all n locations
tgatatttcnnnnnnnnnnnnnnnnnnnnnnnnnnnnnnnnnnnnnnnnnnnnnnnnnnnnnnnnnnnnnnnnnnnnnnnnccacgcgtccgcccacgcgttcgaccacgcgtccgcccacgcgtccgggcgagaattgaaagacgctgcgagagagatagatcatctccgttaaaccctagcgattggaatacggatatactccaaatggctttcttaagtaaagttggaaggttattcagtcagaccagcagccatgtcactgcctctagctcgatgctacagagcatccgttgcatgtcttcatcaaaaatctttgttggaggtatctcctacagcactgatgagtttggcttaagagaagcttttagcaaatatggagaagttgttgatgcaaagattattgtggaccgtgaaacaggcagatctaggggctttgctttcgtaacatttacttcgactgaggaggctagtaatgccatgcaattggatggacaggaccttcatggtcgaagaattagggtgaattatgcaactgaaagaggaagtgggtttggaggaaggggattcggtggtcctggtggtggttatcgagcctcagatggt

SEQ ID NO: 119371 - DNA, 651 bp, Arabidopsis thaliana
cccacgcgaccaaaaaaaaaaggagaagaagaccatcgttgttctccgatggctattaacagaattgctcatggttctctgtttctgacggtagtcttgttctttctgacggttaattacggcgaagctatatggttgacgattccgacgacgggtggaacgaagtgtgtctccgaggagatacagagcaacgtcgtcgttttggctgattactatgtcgtcgatgagcataatcctgaaaatacacctgctgtttcttctaaggtaacatctccgtatgggaacaatcttcatcaccaagaaaatgtaacacatggtcagtttgcattcacaactcaagaagctgggaactacttggcttgtttctggattgattccagtcatcacttagccaatcctataacccttggggttgattggaagatgggtattgcagctaaagactgggactctgttgctaaaaaggaaaagatcgagggtgttgagcttcagttgaggagactagaagggttggggcttgcgattcgtgaggacctaaactatataaaagacagggaagcggtgatgcgagaagtgagtgaaacaaccaactcaagagtggcttggttcagtataatgtcactcggggttagcgttgtggttggggttcac

SEQ ID NO: 119372 - DNA, 552 bp, Arabidopsis thaliana
  unsure (1)..(552): unsure at all n locations
nnnnnnnnnnnnnnnnnnnnnnnnnnnnnnnnnnnnnnnnnnnnnnnnnnnnnnnnnnnnnnnnnnnnnnnnnnnnnnnnnncccacgcgtccgagattttcttcaagcaaaaagggagttatgagatgattggtcgtcctcgccggagaaaagatacgagacttgtctctcaatcctgaagcagactcgattcatccatcagtcaacaaatcttccttcacaatggatgaagaagaagcaatgttactgctaaaggaagaagatgaaggaacaagaagaactagtgttcctacacaactcatgaaactaaaacgaacccattggtggattcttgtctttataagtatcttcttcctcatctctgcacaagccattgctgttcttcttggtcggttttattacaacgaaggtggaaacagtaaatggatctctactcttgtccaaacttgtggttttccgattctctatctccctctttgtttccttcctgcttcacactcttcttcatcttcttgttctttcaagactctggtttggatttatctttctct

SEQ ID NO: 119373 - DNA, 764 bp, Arabidopsis thaliana
cgcgtccgaattcctttttatttctccctttactttttttataatcgcaaaaacaaatttcaatagttcttgtaagcgcaacgtgtaagtagagacatacacacatttgtagtgttttgttttgtataataacatcatcgcatatagagaaaagaagttaagacgaccgtatatatcgttttgaaaaccgggtcggataaaaaaaaaccggtttctttaaccgagtcggcgcgcatggagctatgcaatcaaaacaatcacatcaccgccgtctcgggcgatccgttgaactggaacgcgacggccgaagctttgaaagggagccacctggatgaggtgaaacgaatggtgaaagagtataggaaagaggcggtgaagttaggaggtgagactttgacgattggtcaagtagccgccgtggctagaggaggaggaggatctacggtggagctggcggaggaggctcgtgccggagtcaaagcgagtagcgaatgggtgatggagagcatgaaccgaggaacggacaggtattggagttaccacagggtttggtgcaacttcccatagaagaaccaaacaaggcggagcacttataaatgagcttattaagttcttgaatgccggaatatttggccccggcgccggggacacgtcacacacgttgccaaagccgacaacaagagcggcaatgctcgttcgtgtcaacactctcctccaaggctactccggtatacgcttcgagattctcgaagtaattacaaagc

SEQ ID NO: 119374 - DNA, 512 bp, Arabidopsis thaliana
gctttttctgtcttatttttttgtcattaaactatataaccaaacacaaacatcatctttctccttcatttcacaaacttaaaattctctgtttttgtttcttcttctttcaaaatctcaagcaaaagaaaaaatggagctattcacaaaaggtaacaacgttaagttacgtagccacctagataagtttttagtcgccgacgatgaccaagaaaccatccgtcaaagccgtaaaggagatgcacggcgtgccgtttggacggtggagcccgtcgtcgataaacctaatctgataaggttaaagagcagccacggcacgtacttaacggcgagcaacaaaccgttattgttaggtatgaccggtgagaaagtgactcaaacggcgtcgtttaacaagctgatggattggcaaacgcagtgggaaccggagcgagatgggtttcaggtgaagctaaaatcttggtgcggtaagtggatgagggctaacggtggaacgccgccgtggagaaact

SEQ ID NO: 119375 - DNA, 621 bp, Arabidopsis thaliana
  unsure (1)..(621): unsure at all n locations
nnnnnnnnnnnnnnnnnnnnnnnnnnnnnnnnnnnnnnnnnnnnnnnnnnnnnnnnnnnnnnnnnnnnnnnnnnnnccacgcgtccgctcttctgcttcttcttcttcaaaatctctctcttcaccaaatcctcagaagatgagcaacgacaaggatagcttcaacgtctccgatcttactgctgctcttaaggacgaggatcgagctggccttgtcaatgctctaaagaacaagctgcagaatctggctggtcagcgttctgatgtgctcgagaatctgactcccaatgtgagaaagcgcgttgatgccttgagggatatacagagccaacatgatgaactagaggcaaaattccgtgaggagagagctattcttgaagccaagtatcaaacgctgtatcagcctttgtatgtcaagcgttatgagattgtgaatggcactactgaagttgaactggctccagaggatgataccaaggtggaccaaggagaggagaaaactgcagaagagaaaggagttccaagtttctggctgacagctctgaaaaataacgatgttatttcccagggaggtcacagagcgggatgaaggggctctcaaatatcttaaagatattaagt

SEQ ID NO: 119376 - DNA, 428 bp, Arabidopsis thaliana
acgcgtccaaaaactactctctccgaccccaaatccagaaattcaagcgaggaatagaatctcccactagagaaaagcaatcccagaaaccctaagttcttcacgtttcgttcttttgcttgttgatcaagcaggatatctccgagatttgtgagtctcttgctacttcttcctggagaacgattcagggtttgatgtgataagaatagtcatcgaggaagatagatttggggattttttttttatttgtagattcatgaaacaaattcgtcgatggcagaggattttgatcctcgctctgctatcgatatctgtattcgctccgcttattttcgtatcgaatcggcttaagagcatcactcccgttggtcgtagagaatttattgaagagttatccagaattagattcacgacaaatgaccttagac

SEQ ID NO: 119377 - DNA, 680 bp, Arabidopsis thaliana
acgaaaaacatacacaagtaattaactaacaacaaatggcgaacaagctcttcctcgtctgcgcagctctcgccctgtgtttcatcctcaccaacgcttccgtctatcgcacggttgtcgagttcgacgaagatgacgccagtaaccccataggcccaatacagaaatgtcagaaggagtttcagcaagaacagcacctaagagcttgccagagatggatgcgcaagcaaatgtggcaaggacgtggtggtggtccttccctcgacgatgagttcgatatggaagacgacatcgagaacccgcagagacgacagctactccagaagtgctgcagcgagcttcgccaagaagagccagtttgcgtttgccccaccttgagacaagctgccaaggccgttagattccagggacagcaacaccaaccagagcaagtcaggaaaatttaccaggcagctaagtacttgcctaacatttgcaaaatccagcaagttggtgtttgccccttccagatcccttcaatcccttcttactactaaattccaaacaagtgtgagcgtgtggttgttgatatatgttaacaccacatctcgccttgtgtttttataaaaaaataagctttgggatgtttgaggctaatgtaataattagcatacaacgtaataaataagagaggtttgttt

SEQ ID NO: 119378 - DNA, 731 bp, Arabidopsis thaliana
acgcgtccgatttgaaagtgaatgagctagttacatggggttatatatattaataggatgcttggacaaccgtcacttattcgagaatcttcaatacgtagatttccatggacatgctcagtgtctcaatttaagatcaggatctcatggaacaagttttctcagtgaaactcttagtttaaaagaagaaaatgaggtgaacccatctcttgattttgatttgtcttctatttaatcatcaagatactaaaagtgtttttttttaatctctccaacatttgagatgctattaaggttcatattctcttcgtttgtcatctggtggatctgacctgatatgtgagggtttgttctctcatcctaatgagatttgggaccttgcttcttgcccttttgatcaacgcattttctccaccgtcttctccactggtaaattcgcttgtcttgagttgactagcaagaatttggagctctggtctttgtattgatttatagcgtgagtgtgtcaaaaactgataatggttttatccgttaaggtgaatcgtttggagcagcgatatggcaaattcctgagttatatggtcaactgaattctccacaattggagcgtgttgcttctcttgatgctcatgttggtaagattaattggtgagtttatgatcaaacgttttcagcgttctattgctaacagttatgtaaaagtgtttaagagcttatttttttcttatcct

SEQ ID NO: 119379 - DNA, 488 bp, Arabidopsis thaliana
gtgcgtctggctcaggtgacaatgcaaggaggatcatcgggtattggatacggtttgaagtatcagtctagatgtatatcggatgtgaaagccgatacggattacacaagctttctcactggaactcttagtttagaagaagaaaatgaggttcatcttcttcgtttgtcatctggtggatctgagcttatatgtgagggtttgttctctcatcctaatgagatttgggaccttgcttcttgcccttttgatcaacgcattttctccaccgtcttctccactggtgaatcgtttggagcagcgatatggcaaattcctgagttatatggtcaactgaattctccacaattggagcgagtcgcttctcttgatgctcatgttggcaagattaattgagttctttggtggccttctggaagatgtgacaagttaatcagcattgatgaacaacatattctcttgtggagcttagactgttcgaaaaagtc

SEQ ID NO: 119380 - DNA, 957 bp, Arabidopsis thaliana
aaccgcccacgcgtccgaaattgtccaatttccatcttacggccaacaaaaaaaagagtaaaataacaatttaattttgtatcgattgcgtcgtcgttagttttcccatttcctcataattctccatctctttcctttctcatctctcgattcctttctttctttccatattccattgatttctctcttcttataaaaatacagattctctcttcttagaaccatcaccgattcgaacagatctaataaatcgtttttttcaccagatttttttcgccggagtttgttttgatccattctgttatggcggaagaacacagacttcaagaaccacgattatgtgctaacaattgtggcttcttcggaagcacagctacacaaaatctctgttccaaatgttttcgagatcttcaacatcaagaacaaaactcttccaccgccaaacatgctcttacccaatccttagccgccgttggcgctgctgcgtcttcctccgtgtcgccaccgcctccgcctccagctgattcgaaagaaatcgttgaagcgaaatcagagaaacgagcggcggctgaaccggaggagggcggatggtccgccgcaagatccgaagcggtgtttgacttgtcggcggcgcgtgggaatcacggggtttcgggtgtaaggtgtggctttcgttttctgcgggacccattagggtacgcggagcaccatgaatgttccgtttgatttcaagcggtttggggaaggataagatccctaaagcgaatccgattgtgaaagctgataagcttgagaagatttgactttgttgtttgttgtttgttgttgttgctttggttttgtgcgtttgaatgaaacacacatgaagaagaaagagcaagaaacaaacatgtcaatgtaaatttaagctttatttgatgatttcttcagtttggtaaataaatttgcttattattg

SEQ ID NO: 119381 - DNA, 1256 bp, Arabidopsis thaliana
  unsure (1)..(1256): unsure at all n locations
gaagttgccacgtgccaatgagttgaccaatgaggaaactcagtgcgttatccgtagggataatcagataagcagaatctgattttgtcaccagagtgcttttatagattacacagactcactatatggaacacacgttcgtttctttcttcttctaacacactctgagtcttgaaggtcaacaacgtcgagaataatggcatcatctctttgtgcttcttctgccatcgctgccatttcttctccaagtttcttgggtggtaagaaactgaggctgaagaagaagttgactgttccagctgtgtccaggccagatgcgtcggtgcgcgccgtcgcagctgatccagatagaccaatctggttcccgggaagcactcctccagagtggctagacggtagcctccctggtgacttcggatttgatcctcttggtctttcatcggacccggacagtctaaaatggaacgtacaagccgagatagtccactgccgatgggctatgctaggagccgccgggatattcatcccagagttcctaacgaagatcggaatcctcaacactccgtcatggtacacggcgggagagcaagagtatttcacggacaaaaccacactctttgtcgttgagctcattttgatcggatgggcagaaggacgtagatgggccgatatcatcaagcccggtagcgtcaacactgacccagtcttcccaaacaacaaactgacgggcacagacgttggttacccaggtgggttatggttcgacccgttgggttggggatccggtagcccggctaagctcaaggagttgaggaccaaggagatcaagaacggaaggttggctatgttggcagtgatgggtgcttggttccaacacatctacactggcactggtcctattgataacctttttgcacatcttgctgatcctggtcacgccacaatcttcgctgctttcacacccaagtgagacaacgaaaaagggttatggggaggtgaatgcgtttgtgtgtgatcatgtttgtacaaatatcattttgaacttaaaattattatgtactttatataaattgtggtcgaatgcaaattaaggttccccgtaacactcttttcctaactcaataatgcttttcctttattggggtaagggccttaatttttttcnnnnnnnnnnnnnnnnnnnnnnnnnnnnnnnnnnnnnnnnnnnnnnnnnnnnnnnnnnnnnnnnnnnnnnnnnnnnnnnnnnnnnnnnnnnn

SEQ ID NO: 119382 - DNA, 540 bp, Arabidopsis thaliana
  unsure (1)..(540): unsure at all n locations
tnaaggtcaacaacgtcgagaataatggcatcatctctttgtgcttctnctgccatcgctgccatttnttctccaagtttcttgggtggtaagaaactnaggctgaagaagaagttgactgttccagctgtgtccaggccagatgcgtcggtgcgcgccgtcgcagctgatccanatagaccaatctggttcccgggaagcactcctccagagtggctagacggtagcctccctggtgactttcggatttaatcctcttggtctttcatcggacccggacagtctaaaatgggaccgtacaagccgagatagtccactgccgatgggctatgctaggcagccgccggggatattcaatcccagagttcctaacggaagatcggaatcctcaacaattccgtcaatgggtacaccggcgggagagagcaaggagtatttcaacgggccaaaaccacatttttttggtgggtcattggctcggttggcaatcgccgtagtggccgtgttataagnccgngggtaaaatncccntttccaaaa

SEQ ID NO: 119383 - DNA, 768 bp, Arabidopsis thaliana
  unsure (1)..(768): unsure at all n locations
taggtacacactatagaagactatgacgtcgcctgcacgcgtacgtaagctcggaattcggctcgagggaacgtacaaggcgagatagtccactgccgatgggctatgctaggagccgccgggatattcatcccagagttcctaacgaagatcggaatcctcaacactccgtcatggtacacggcgggagagcaagagtatttcacggacaaaaccacactctttgtcgtttagctcagtgtgatcggatgggcagaaggacgtanatgggccgatatcatcaagcccgggagcgtcaacactgacccagtcttcccaaacaacaaaacttgacggggcacaggacgtttggttacccaggtgggttatggttcgacccgtggggttggggaatccggtaccccggctaagctcagggagttgaggaccaaggagatcaagaacggaagggggcctatgttggcagggatgggtgcttggttccaacacatctacactggcactggtcctattgataacctttttgcacatcttgctgatcctggtcacgccacaatcttcgctgctttcacacccaagtgagacaacgaaaaagggttatggggaggtgaatgcgtttgtgtgtgatcatgtttgtacaaatatcattttgaacttaaaattattatgtactttatataaattgtggtcgaatgcaaattaaggttncccgcggccgcgtaattacgatatncaagcttnatgcgatgaccgtacgnaccttcgtag

SEQ ID NO: 119384 - DNA, 375 bp, Arabidopsis thaliana
aaaagagttgtgcgattgaacatcaaggaggagactaggaagttcgatttgtgtaatctcgatgtcgactctatcagctgccagggcagataactcttactatcctccagaatggactccggatcaacgttccttgaacaagtttcaaggacagcatcctctcagagagagggcaaagaaaattggcgagggaattttggtcataaggttcgagatgccctataatatatggtgtggtggctgtagttctatgatcgccaagggtgttcgatttaatgcagaaaagaagcaagttggcaactattattctacaaagatatggagctttgcaatgaaatcaccatgctgtaaacatgagatagtcattcagacaga

SEQ ID NO: 119385 - DNA, 920 bp, Arabidopsis thaliana
gttcccaataaaacctaggggcctttttgccttgttttaaatttggaatatattgacagggaactaaggccttgaaggcttttttgaaccacattctcaagccctccggctttttggttggccaaccggcacccgtggaaccgtttttgggcccccaaggagtttggacggggtcttaaatcctccaggtccaaaattttttggttccccaagaaacaaccactttatgttaatccccaggaatactttcggggggccggtttcaaatccattaacttgttggggagaattacccgaaaagttccaactccctcaggggtttccttaagaaggagtttaagttgagaccatccaggagatgtccagaagggttcacccacctatcgaaccagaacccacccataagaaaaccgaggaaatctgctcccaaggaacaccaagaggtacaacttgaagaaactgacttacaagagaggaagaacaagttgatcgagagagtgaaggcattaaacggagcaggtggtgatgatgatgatgaggatgatgaagagtaaatcaccaatcaagccttctttgtctcatgcctctagtagctttttacttatttattttcagactaaaacactcagtttttgttttcacattttagttgcgtttgaagattttgaattcgaggatatgttttgtttgaagaatttattatcatctcttattacaccatcgtcattttcaggaatttgcctgtcaatagttagattttatgcgtagtgtggttttagtgcttgtggaaaatggggattcttgaagtaatgaaagtgatcattagtgaaaaaaaaaaaaaaaaaaaaaaaaaagggcggccgctctagaggatccaagcttacgtacgcgtgcatgggacgtcatagctattctatagt

SEQ ID NO: 119386 - DNA, 990 bp, Arabidopsis thaliana
  unsure (1)..(990): unsure at all n locations
nnnnnnnnnnnnnnnnnnnnnnnnnnnnnnnnnnnnnnnnnnnnnnnnnnnnnnnnnnnnnnnnnnnnnnnnnnncggcgcgtgcgcccacgcgtccgcactgttggtcttaccaactatgctgcagcttactgtactggccttcttttggctcgtcgtgttctgaaaatgctggaaatggatgatgagtacgagggaaacgtagaggccactggagaggacttttctgtggaaccaactgattccagaagacctttccgtgctcttcttgatgttggacttatcaggactaccactggaaaccgtgtgtttggtgcactcaagggagctttggacggaggtcttgatatccctcacagtgacaagagatttgctggtttccacaaagagaacaagcaacttgatgctgaaatccacaggaactacatctacggtggccacgtctcaaactacatgaagctgttgggggaagatgagccggagaagttgcaaactcacttcagtgcttacattaagaaaggagttgaagctgagagcatcgaggagatgtacaagaaggttcacgcagctatccgagcagaacccaaccataagaaaaccgagaaatctgctcccaaggaacacaagaggtacaacttgaagaaactgacttacgagagaggaagaacaagttgatcgagagagtgaaggcattactcgcagcaggtggtgcatgatgatgatgaggatgatgaagagtaaatcaccaatcaagccttctttgtctcacgcctctagtagctttttacttatttatcttcagactaaaacactcagtttttgttttcacattttagttgcgtttgacgattttgaattcgaggatatgttttgtttgaagaatttattatcatctcttattacaccaaaaaaaaaaaaaaaagnnnnnnnnnnnnnnnnnnnnnnnnnnnnnnnnnnnnnnnnnnnnnnnnnnnnnnnnnnnnnnnnnnn

SEQ ID NO: 119387 - DNA, 1275 bp, Arabidopsis thaliana
  unsure (1)..(1275): unsure at all n locations
gccnnnnnnnnnnnnnnnnnnnnnnnnnnnnnnnnnnnnnnnnnnnnnnnnnnnnnnnnnnnnnnnnnnnnnccacgcgtncgcggacgcgtgggttcactcacaatctcacagcaaagcctctcgttgctagaggaatcaaacaatggtgtttgtgaagtccaccaagtcgaatgcttacttcaagaggtaccaagtgaagttcaggagaagaagagatggaaagactgactacagggcaaggatccgtcttatcaaccaagacaagaacaagtacaatactcctaagtatcgttttgttgtccggtttaccaacaaagacatagtggcacagattgtatctgcaagcattgctggtgacattgttaaagcttctgcttacgcacatgaactgcctcagtatggtctcactgttggtcttacaaactatgctgcagcttactgtactggccttcttttggctcgccgtgttttaaagatgttggaaatggatgacgagtatgagggaaacgttgaggccactggagaagacttttccgttgagccaactgattcaaggagacctttccgtgctcttcttgatgttggacttatcaggaccacaacaggaaaccgtgtgttcggtgctcttaagggtgctttggatggaggtcttgatatccctcacagtgacaagagatttgctgggttccacaaggagaacaagcaacttgatgctgaaatccacaggaactacaatttacggtggccatgtttcaaactaccatgagggcttntttgggggaagtcttagcccgagnaagttccaaactcccttcaaggggttacattnaggaaaggagttaaagctggagcaccgggggggtgtccaagaaggttcacgcggctttccgggcagaaccccaccataagaaccccgagttaatctgctcccaaggaacacaagaggtacaacttgaagaaactgacttacgaagagaggaagaacaagttgatcgagagagtgaaggcattaaacggagcaggtggtgatgatgatgatgaggatgatgaaaagtaaaataccaaacaaggcttctttggctcatgcctttaggagctttttacttaattattttcagactaaaacactcaagttttggttttacattttagttgggtttgaaggttttggattcgaggatatggtttggttgtagaatttatttttattttttatttcaccaatttgtatttttaggtaattatttatgttttattttatttattattata

SEQ ID NO: 119388 - DNA, 611 bp, Arabidopsis thaliana
  unsure (1)..(611): unsure at all n locations
acgactcactatttggaaagctggtccgcctgcaggtaccggtccggaattcccgggtcgacccacgcgtccgcccacgcgtccgcttttgtcactcatcttcacaggaaacaatggtgtttgtgaagtcctccaaatcgaatgcttacttcaagaggtaccaagtgaagttcaggagaaggagagatgggaagactgattacagggcaaggatccgtcttatcaatcaagacaagaacaagtacaacacccctaagtaccgttttgttgttcgatttaccaacaaagacattgtggcacagattgtatctgcaagcatagctggtgacattgttaaagcttcggcttacgcacatgagcttcctcagtatggactcactgttggtcttaccaactatgctgcagcttactgtactggccttcttttggctcgtcgtgttctgaaaatgctggaaatggatgatgagtacgagggaaacgtagaggccactggagaggacttttctgtggaaccaactgattccagaagacctttccgtgctcttcttgatgttggacttatcagggctccactggaaccnggtnttnggcaccaagggggtttgcggggg

SEQ ID NO: 119389 - DNA, 557 bp, Arabidopsis thaliana
  unsure (1)..(557): unsure at all n locations
atgtctcaaactacatgaagctgttgggagaagatgagccagagaagttacaaactcacttcagtgcttacatcaagaaaggagttgaagctgagagcattgaggagttgtacaagaaggttcacgcagctattcgtgctgaccccaacccaaagaaaaccgtgaaacctgctcccaagcaacacaagaggtacaacttgaagaaacttacttacgaggagaggaagaacaagttgatcgagagagtcaaggcattgaatggagcaggtggtgatgatgatgatgaggacgatgaagagtaaatcagtcaagccttctttatctcatgcctcttgtagttttttatcttttgagcttaatgcctcaaattttctgttttcagactaaaacactcagcttttgtgttcacattttaattgtgttcgaggattttgatattgaggatacattttctttgaagtatcattaaaaaaagattaccttnnnnnnnnnnnnnnnnnnnnnnnnnnnnnnnnnnnnnnnnnnnnnnnnnnnnnnnnnnnnnnnnnnnataatcg

SEQ ID NO: 119390 - DNA, 470 bp, Arabidopsis thaliana
  unsure (1)..(470): unsure at all n locations
acccacgcccccgaccacgcgtcagcccacgcgtccggtttgtgaagtcctccaaatcgaatgcttacttcaagagctaccaagtgaagttcaggagaaggagagatgggaagactgattacagggcaaggatccgtcttatcaatcaagacaagaacaagtacaacacccctaagtaccgttttgttgttcgatttaccaacaaagacattgtggcacagattgtatctgcaagcatagctggtgacattgttaaagcttcggcttacgcacatcgagcttcctcagtatggncctcactgttgggtcttaccaactattgctgcnagcttactgtactnggccttctttttggctcgtcggtgttctgaaaatncttggaaattggnttgnatngaggtncgggggggaaaccgtangagggccacttngnggaggggctttttcttttgggacccaaccttntttcc

SEQ ID NO: 119391 - DNA, 1015 bp, Arabidopsis thaliana
cggacgcgtccgcccacgcgtccgtaatttttgccgaactcgtcttctgctgaaaaccctagatctacagatctcccgaatctcccagggagataatttgaagatggtgtctgacgctagcaagaagaaggcagctcagaagaaagctgctgccgccgctaaaagaggtggtaaagctgctgctccatccaaatccgccgctacttcttccaacggtgttgatagcttgtcaagcggtgtcgatgctcttcaaatttctgatcggacttgtaccggagttctctgttctcatcctcaatctagagatatccgaatagaatctctgtctgtgacgtttcatggttatgaccttattgttgattcaatgttggagcttaactatggaaggcgttatggtctccttgggttgaatggttgtggaaagtccactcttttaactgcaatcggacgcagagagataccgattccggatcaaatggatatctaccatttgtctcacgagattgaagctactgacatgtcttccctggaggctgttgttagctgtgatgaggagaggttgaggttagagaaagaagttgaaattcttgtacagcaggatgatggaggcggagagcgtcttcaatctatctatgagaggttagacgccatggatgcagaaaccgctgagaaacgtgctgctgaaattctgtttggacttggtttcgacaaggaaatgcaggcgaagaagacaaaagatttctctggtggttggaggatgagaattgcattggcaagagcactcttcattatgccgacaatccttttgcttgatgagccgactaatcatttagatttggaagcttgtgtgtggctagaagagagcctgaagaattttgatcgcatccttgttgtggtatcccactcacaggatttcttgaatggagtgtgtacaaacatcatccacatgcagagcaaacagctcaagtactacactggtaactttgatcagtattgccagactcgttctgaactt

SEQ ID NO: 119392 - DNA, 385 bp, Arabidopsis thaliana
atcgtcttggcgcacagaagatggaactcgggcttggaattcatggagaacctggtgctgctgtggttgacgttgaacctgtggatgtggtggtgtcccatgttcttcagcaaatacttagtcctgagaccaattatgttccaattactcgtggtaacagagtggttctcatggtcaatggtttgggaggcacacctttaatggaacttatgattgctgctggaaaagcagtccctaaactgcagttggaatttggacttgccgttgatagggtgtatacaggcttttttatgacttctcttgatatggcaggattctcgatttcaatcatgaaggctgaccattcgattttagaccgattggatgctccaaccaaggctccaaa

SEQ ID NO: 119393 - DNA, 655 bp, Arabidopsis thaliana
gcaacaatcccttttaaacacaagaaccaactcaatacgcatcacaaagaaccctaaattcctggaagatctcaaaaggaaaattcaaaaccaaagcttcaagcaatcatcaagcaaaggaaaagctcaaattttgggtcttttatatatttatttcttaaagttacaatctttttgattgtggtttcagtgtacgaacacgcaagaactcgcgtgaaaaaattgtatccaagcttcgtgaaaggagtctctctgtatttagtggcgttttgttctgttgttatttctgaaatattgaagcttttgatttgggtttcaagagagcagagatgtgtagtttgtcggcgattatgttgttaccaacgaagctgaaaccagcttattcagacaaacggagtaacagtagcagcagcagctcactcttcttcaacaatagaagatccaagaagaagaaccaatcgattgttcccgttgcaaggttgtttggaccggcgattttcgaatcatccaaattgaaagtactcttcttaggggttgatgagaagaagcatccttcaacgctccctaggacttacacactcactcacagtgacattacagctaaactaaccttagctatttctcaatccataaacaactctcagttgcaaggatg

SEQ ID NO: 119394 - DNA, 527 bp, Arabidopsis thaliana
cggacgcgtgggaaaaaaaaacagagcacaatgactagatttgcggtattgccactctctgttctccttctcgttctcttgttcctctgcactgagtcgttggctaagtcggaggagtctgaagaatacgacgtcgctgtgccttcatgttgcgggttttcgtctcctcttctgattaagaaagatcaatggaaaccaatcttcgagacgaagtttggacagatttcaaccgttcaaatcggcaatggatgcggtggaatgggaccttacaagatacattccataacgttggagccaaacacaattttgctccctcttcttcttcattccgacatggtcttcttcgttgactctggaagtgggattctgaattgggttgacgaggaagcgaagagtactgagattagactaggggacgtttacaggctacgtcccggttcggttttctacttacagagcaaaccggtggatatcttccttggaaccaaacttaagctttacgcaatcttctccaacaacgaggagtg

SEQ ID NO: 119395 - DNA, 419 bp, Arabidopsis thaliana
acgcgtccgaactatctctctccgcctccttttaagaccaaatctctctctacctctatctctctctccgccattaccagagctcaacgagctctcactttctttacgcacacttgttggaacgaaatatattcatagagaagaagaatctcgaaactcttgaatctaaaacaactcggagactctgttttccctttccggagatcagatcggatcaagatgcagacaaccaacggctcagattcgacgttggcaacttccggagccacaccgccgaatcaacaaacccctcctccacctcagcagtggcagcagcagcaacagcaacagcaacagtggatggctgccatgcaatatccaccagcggcggcgatgatgatgatgcagcagcaacagatgctgatgtatcctcatcaata

SEQ ID NO: 119396 - DNA, 494 bp, Arabidopsis thaliana
gagaagatgacgatcatggcccagaaagatgataaaacaagaaggctcctgtgaaaagaaagaagtcaaagaaagagacacccagtagagaaatagtctttgagggtgaacccgatgaggagaatgaagacgagattgagaaggctccggtcaaaccaaaaaagtcaaagaaagagcaacgcagtagagaaaaagtctctgaaggtgaagagaaagacgagctaacaagcaagaagacacgagagctcaagaagaagcccaagatagtggccacaccatcaagaagactaggtttaagttttgaagacccattgttaacttggctctgatctgagctacagttttgaactaaacactcgcacaaaagaaacagagtttgtgtgttatctataaagactagttttgataaaacgatgcctcttctcaaaaaaaaaaacccaaagggcgacagctctagaggatccaagcttacgtacgcgtgcagttctccccat

SEQ ID NO: 119397 - DNA, 510 bp, Arabidopsis thaliana
agaaaggattttgggattaggggatcttggatgtcaggggatgggtataccggttggtaaattggcgttatattcagcacttggaggtgttcgtccttctgcgtgtttacctgtcaccattgatgtgggaacaaacaatgagaaactgttgaatgatgagttctacataggactcagacaaaagagagcaactggtcaggaatatagcgaactcttgaacgaattcatgagtgctgtgaaacagaactatggggaaaatgttcttatacagttcgaagattttgctaatcataatgcctttgagttacttgcaaaataccgcgatactcatctcgtcgtcaacgatgatatacaggggacagcatcagttgttttagcaggattagtttccgcacagaagttaacgaatagcccacttgcagagcacaccttcctctttcttggtgctggtgaagctggaactggaatagcagaactcatagctctctatatgtcaaaacagatgaatgc

SEQ ID NO: 119398 - DNA, 1062 bp, Arabidopsis thaliana
  unsure (1)..(1062): unsure at all n locations
taatacgactcacttagggaaagctcggtcgcctgcaggtaccggtccggaattcccgggtcgacccacgcgtccgcccacgcgtccggaagatgagcctatccttgagaaggccctcgggacggagattgagtggtatcctggaaagtgtttgacacagaagattctaaaaaagaagccaaagaaaggatccagaaacacacaagccgatcacttaagaactgatggactgtgagaaagtttcttcccaactttttcaagtccaccctttcaagttcctgaccgaatgatgaggatcccttgatgatgacatggccgctgatgaccactccaaggaccaaatccggagcatgatcctatgatatcggttcaacaatcaaagagaaaatcatctcgcatgctgtgtcatggttcactggtgaagctgttgaggcagatgaccttgatattgaggacgacgatgatgagattgatgaagatgatgatgaagaggacgaggaagatgatgaggatgacgaggaggatgatgatgaggatgatgacgaggaggaagaagcagatcaaggaaagaagagcaaaaagaagtcatcagctgggcacaagaaggctggaagaagtcaacttgcggaaggtcaagcaggtgagaggccaccggaatgtaagcagcagtgaagaagtgaagaatcttggcttagttatgatgaagaagaagagtgaagagtgtctttgagccgaggttgtgtttctttaatttgcagagtcatggtccggtttattatatatcagttttgggtgattggtttgctatttaaaaaaaaaaaatgggttctttggtttggtttgtgtctcttgatttttccttttgtaatgatcttatgaatttgtttcgagttaatgtcgttctctggtcagatttcgaattcaattctatttatcctccctcgttaatgagagaatttgtgagcccttcaaaaaaaaaaaaaaaaaaaaaanaaagggcggccgctctagaggatccaagcttacgtacgcgtgcatgcgacgtcatagctgttctaaggg

SEQ ID NO: 119399 - DNA, 919 bp, Arabidopsis thaliana
  unsure (1)..(919): unsure at all n locations
nnnnnnnnnnnnnnnnnnnnnnnnnnnnnnnnnnnnnnnnnnnnnnnnnnnnnnnnnnnnnnnnnnnnccacgcgtccggggttttaaggtttcttatccttcctcttcctccgccagattcttttcttgcgaagatgagcaacgacaaggacagcatgaacatgtccgatctctccaccgctcttaacgaggaggatcgtgccgggcttgttaatgctcttaagaacaagttgcagaatttggctggacaacactctgatgtccttgaaaacttgactccaccagtcaggaagcgtgtcgagtttctaagagagattcagaaccaatatgatgagatggaagcaaaattctttgaggagagagcagctcttgaagctaagtatcaaaagttatatcagcctttatataccaagcgatatgagattgtgaatggtgtggtcgaagttgaaggtgcagctgaagaagtaaaatccgaacaaggagaagataaatcagctgaagagaaaggagtaccagatttctggcttattgcattgaagaacaatgaaattactgcggaagagataactgagcgagatgaaggggctctcaagtatctcaaagatatcaagtggagtagggttgaagaaccaaaagggttcaagcttgagtttttctttgatcagaatccttacttcaagaacactgtcttgaccaagacatatcacatgattgatgaagatgagcctatccttgagaaggccctcgggacggagattgagtggtatcctggaaagtgtttgacacagaagattctaaaaaagaagccaaagaaaggatccaaaaacacaaagccgatcactaagactgaggactgtgagagtttcttcaactttttcagtccacctcaagttcctgacgatgatgaggatcttgatg

SEQ ID NO: 119400 - DNA, 737 bp, Arabidopsis thaliana
  unsure (1)..(737): unsure at all n locations
cgnnnnnnnnnnnnnnnnnnnnnnnnnnnnnnnnnnnnnnnnnnnnnnnnnnnnnnnnnnnnnnnnnnnnacccacgcgtccggaagaagttaaagcaaaacacatacaaacgcagtcaccttctctatcgcctccttcttcaatctcatcgcaatcatgatcatatcagagactaaccgccgtgagatctccaagtacctcttcaaagagggtgttttgtttgctaaaaaggatttcaacttaccacaacatcctttgattgagagtgttccaaatctgcaagttatcaagttgatgcagagtttcaaatctaaggaatatgtgagagagacctttgcttggatgcattactactggttcctcacaaatgaaggtattgactttctcaggacttaccttaatctcccatctgagattgttcctgctactttgaagaagcaacagaagcctcttggtcgaccttttggaggtggtggtgaccgtccccgtggccctcctcgtggtgatggagagaggaggtttggtgacaaagatggataccgtgggggccctaaatcaggtggggggtttggtgccaaggctggagcacctgctgtttaccagcctggcttcaggggtggggttgttggcaagcaaagggttgccgtgnccttgtggtttggggnggcttgccnctctgncttcntccctnaaaggttttttttttttgcttttaggaaagncctttgcggttttc

SEQ ID NO: 119401 - DNA, 630 bp, Arabidopsis thaliana
  unsure (1)..(630): unsure at all n locations
ctatcngaattgcggccgctctcttctcctgcttcgttctctccgcgatcatgatcatatcagagactaaccgccgtgagatctccaagtacctcttcaaagagggtgttttgtttgctaaaaaggatttcaacttaccacaacatcctttgattgagagtgttccaaatctgcaagttatcttgttgtttgcagtagtttcaaatctaaggaatatgtgagagagacctttgcttggatgcattactactggttcctcacaaatgaaggtattgactttctccaggacttaccttaatctcccatctgagattgttcctgctacctttgaagaagcaacagaagcctcttggtcgaccttttggaggtgggggtgaccgtccccgtggccctcctcgtggtgcatggcagagaggaggtttggtgaccgagatggactccggggaagggcctaaatcaggtggagaagtatcggggacaaggctgcgacctgctggttacaanctggctcaggggngaactggtgancaagcaagggttggccctgnactggngggtccggggggggncccggactaactccttaaagngttnctggtcctttgncatttnangnaaaaaacccttggc

SEQ ID NO: 119402 - DNA, 502 bp, Arabidopsis thaliana
gtccgaattgagttcttcttggtttcttcttcttctccactgctactaaatcacaagaatcttccgttgtctacgtttctggtgcttcccccgaaatccccatttctcaggcttctccacgaatgggagctcaatccccaggacctcccattgttaaagtggtgcttcgccaggacttgaacaagaagattctaattgctcttatagtctcatcatctctgctctgtgtcacagtcatgttccttgtgtatctcttgctatggaggtacaggaatatgaagaacagcttcaccggtatcaaacgcaaatccgattcggtgaagagtgtaaccacgaaaccgactgtacacaagattgattctgtgaggaaaggaaccatccctgtgtatgaatatcaattgctggaatctgcaacaaacaagtttagtgatagtaatgtgttgagccgaggtggtcgtggatgcctttacagagcttgtctcgatgaaaaatcctcagtcac

SEQ ID NO: 119403 - DNA, 538 bp, Arabidopsis thaliana
caacaacaatcactccaaattttgtctgctcaccatttttccacaaagccaattctcttgtatccaatgcctatgttctactcctctcgttttctcttcttcttcaccatcgtccccttactcgtctctatcgctctctaccaactcgacacattcgaccccgctccggttccttccgaggcattcgcctcctctgctacttcactcccgccgcttatcagcgacgaatttctcaccggagctgagtttatcggcgtcggtcttctcgatatacccgaagatatcgcctaccatcaggactctaatctcatctacactggttgtgttgatggatgggtgaaacgagtcaaggtcgccgactcggttaatgactcagtcgttgaggattgggtcaatactggtggtagaccgctcggaatcgcgttcggaatccacggcgaagtcattgtcgcagacgtacacaagggactgttgaatataagcggtgacggaaagaagacggaattgttgacggacgaagcggacggtgtgaagttta

SEQ ID NO: 119404 - DNA, 575 bp, Arabidopsis thaliana
cgggtcgacaacgcgtccgctcgtctcctaatctgtacggttcttatttcgaaagggtaaaaaccaaaagcgacgcaaagggcaaaatcggaaaaagtgttttatttatggccgccgttagtagttcgtcggagaccggagactgcggcgttacgggaaagagagatgagatcatgttgttcggagttagagtcgtggttgatccgatgagaaagtgtgtgagtttgaacaatctctctgattatgaaaagtcttctccggaggatgagatccctaagatagtcaccgccggagctggagatggtgaagataagaacgaaacggatgcgacggtgattgtcgctgacggttacgcctccgccaatgacgctgtccagatttcgtcttcttccggcgggaggaaacgaggggttccatggacagagaacgagcataagaggttcttgattgggtttcagaaaagtaggaaaaggagatttggaaggaatatcaagaaactttgtgaagagtagggctcctactcaagtagctagtcatgctcagaaatacttcctcccgacgaacaacctcaaacg

SEQ ID NO: 119405 - DNA, 585 bp, Arabidopsis thaliana
  unsure (1)..(585): unsure at all n locations
acgcgtccgaaagagatagaagtaaaaaaaaaagaaggggattttcgcatttgccctgagcgaaagagagagaatgtatttgacgagttccaggagaaatcagagctagagaaatctagtggtaatggggagagaacttgtagacaaacacatggataagaaagcgaatagtttgacagctagctcgacgggatcttcagatgataataaagtcccaagtccgtctactaatgaagctgcagaggtgaaagaatgcaccgagcagaatttggttgcggatgatgctcgtttgaggcaacaagggataactgagacacctggatcccataaatcttctgttaaacctcgtgttactgcgaaaacaactgttccaaagccgttttccctgtcggctgaaaagcctaggaagagcagccggtttgataataaattccattaagggaaatngtgcttagnccataanctnttcnttcagcntnaaggngtttcacagcttaaacttttcctttnccaactagggggggtncccgttcntaaggttccccctttntnaagnaggtagnttttttntttngttcccaacta

SEQ ID NO: 119406 - DNA, 411 bp, Arabidopsis thaliana
aagaaaataaaattaaggatggctttgagcggcggcgatgatcaggtacctcctggaggtccgatgacagtttcaacacgtctgattgatgccggatcgacgatcatgcagcggcgattaccggtgaagcagatgaacactcatgtctctactttggcgatatatggtggtgacatgtcccggctaatagggactcaccactatgtccaccgcgtcaacgacgagttccttcagtgtgctgtttacgcctctgaccgctccgatgcacctctaatcggaattgaatatgtaatatccgaccgattatatgaaactttgtctgaggatgagcaaaagctttggcactctcatgcatatgaggttaagtcaggctcgtgggcttatccacgattgcctgagttgtggctgctc

SEQ ID NO: 119407 - DNA, 613 bp, Arabidopsis thaliana
  unsure (1)..(613): unsure at all n locations
agaaatgtgtgcatcatacctgtttctgcacacgggacaaaccctgctagtgctgccatgtgcggaatgaaaattgttgccgttggaactgatgccaaaggaaacattaacatcgaagagttgaggaacgccgccgaagccaacaaggacaacttggctgctcttatggttacatacccttccacccatggagtctacgaagagggtatcgacgagatctgcaacataattcatgaaaatggaggccaagtttatatggatggtgctaatatgaatgcacaggtgggtttgacaagccctggttttattggagcggatgtttgccatctcaatctccacaagaccttctgtatccctcatcggaggtgggaggtcccggaaatggggccctatcggtgtgaagcaacatttttgggntccattcccacccttttttacccagtggttacctacccggtgggatcccttgaccccgggcaggcattaaccgttcgggaccatttttttaaganccatgggggttttngttatttnncaattccggatacttnnattcatnatgggtntnggggctaccgntncccaaagttaaattttanggtctncatgnaag

SEQ ID NO: 119408 - DNA, 1140 bp, Arabidopsis thaliana
agcgtctctacgactcactatatggaaagctggtcacgcctgcaggtaccggtccggaattcccgggtcgacccacgcgtgcgtaatacacgaaaatggaggtcaagtgtacatggatggtgccaacatgaatgcacaggttggtttgacgagccctggttttattggagcggatgtgtgccatctcaatctccacaagaccttctgtattcctcatggaggtggtggtcctggtatgggtcccattggtgtgaagaatcatttggcaccatttcttccttctcaccccgtgataccgactggtggtatcccacaacccgagaagacagcacctttgggtgcaatatccgctgcaccatggggatctgcgcttatcttgcctatatcttatacttacattgccatgatgggatctggtgggctcactgatgcctctaagattgcaattttgaatgccaattacatggcaaagcgcctagagaaacactacccagttcttttccgtggtgttaacggaacagtagcacacgaattcatcatagacttgagaggcttcaagaacactgctggaatagaaccagaggatgtggcgaaacggctaatggactatggattccatggacccacaatgtcttggcctgtccctggaactcttatgattgagccaaccgagagtgaaagcaaggcggagttagacaggttctgcgatgctctcatttcaatcagggaagaaattgcacagattgaaaaaggaaatgcagatgtccagaacaacgttctcaagggagctccacatcccccatcgttgctaatggcagacacatggaaaaagccgtattctcgagagtatgctgctttccctgcgccttggctccgctcctccaagttctggcccaccacagggcgtgtggacaatgtatatggagacaggaaactggtgtgcactctcctcccagaggaagaacaagtcgcagctgcagtgtctgcttgattactgctctgtcccattgtgttgtgtccctttctctcaccacgcactcttctctttcacattctgtccatagtgttctcattatacgctttctgtctcttactctattatttcattcgaatacatcttctataaattatatattccac

SEQ ID NO: 119409 - DNA, 590 bp, Arabidopsis thaliana
  unsure (1)..(590): unsure at all n locations
aaaagttgcagcttgtgcaaagcattttgttggagatggaggtacagtgagaggaattgatgagaacaacacggtgattgactcgaagggcctgttcggaattcacatgcctggatattacaatgctgtaaacaagggtgttgcaacaataatggtgtcttactctgcctggaacggtttgagaatgcatgctaacaaggaacttgtcacgggtttcctcaagaacaagttgaagttcaggggttttgtcatctctgattggcaggggattgataggatcacgactcctcctcatcttaactattcatactctgtttacgcgggaatcagtgctggaattgacatgattatggttccgtacaactacactgagttcatagacgaaatcaacagtcagatacagaaaaagcttatnccgattagcaggatcgatgacgccgtgaagagaatcttaagggtcaaattcacaatgggactctttgaggaaccacttggctgatctncaacttttgccaaccagccttggtngcaaggancataggggacctagctcntaaagccnttaaggaagnntctagtgctgcnnaaga

SEQ ID NO: 119410 - DNA, 973 bp, Arabidopsis thaliana
  unsure (1)..(973): unsure at all n locations
tgaactatcgatgagctatgacgtcgcatgcacgcgtacgtaagcttggatcctctagagcggccgccctagttattcagatcgccgaatttgcagtaaggagacgaaaatatggtgcacgtttgctactaccgcaactatggaaagaccttcaagggaccacgtcgtccttacgagaaggagcgtcttgattctgaattgaagctggttggtgagtatggtctgcgtaacaagcgtgagctctggagagtgcagtactctcttagccgtatccgtaatgctgctagagatcttttgactcttgatgagaagagtccaagaaggatctttgaaggtgaggctttgctccgtaggatgaaccgttacgggcttcttgatgagagccagaacaagctcgattacgtcttggctttgactgttgagaactttcttgagcgtcgtcttcagactattgtgttcaagtctggtatggctaagtctatccatcactctcgtgtcctcatcaggcagaggcatatcagggttggaaagcaattggtgaacattccatcattcatggtgagacttgattcacagaagcacattgactttgccctcaccagtcccttcggtggtggccgtccaggaagagtgaagagaaggaacgagaagtctgcctccaagaaagcctcaggtggcggtgatgcagacggtgatgacgaagagtaaatctgaagtcgcaccgttttagctatgaatcaatctgctttttgatattttgtagtaagcaactttgttgttcgttttcagaggattgttttatggtttctttcttttactctcgagattgctaaacctttgggttatcatctatttctcacaattatcttttaaagttttgccttaaaaaaaaaaaaaaaaagggannnnnnnnnnnnnnnnnnnnnnnnnnnnnnnnnnnnnnnnnnnnnnnnnnnnnnnnnnnnnnnnnnnn

SEQ ID NO: 119411 - DNA, 613 bp, Arabidopsis thaliana
  unsure (1)..(613): unsure at all n locations
agctccctacgactcactattgggaaagctggcacgcctgcaggtaccggtccggaattcccgggtcgacccacgcgtgcggatcgccgaatttgcagtaaggagacgaaaatatggtgcacgtttgctactaccgcaactatggaaagaccttcaagggaccacgtcgtccttacgagaaggagcgtcttgattctgaattgaagctggttggtgagtatggtctgcgtaacaagcgtgagctctggagagtgcagtactctcttagccgtatccgtaatgctgctagagatcttttgactcttgatgagaagagtccaagaaggatctttgaaggtgaggctttgctccgtaggatgaaccgttacgggcttcttgatgagagccagaacaagctcgattacgtcttggctttgactgttgagaactttcttgagcgtcgtcttcagactattgtgttcaagtctggtatggctaagtctatccatcactctcgtgtcctcatcaggcagaggcatatcagggtggaacaattgggacatccacatcatggggncttgtccagagncatgncttgccccagcctcgggggcgcccaaataaaaanaaaant

SEQ ID NO: 119412 - DNA, 510 bp, Arabidopsis thaliana
atacgactcactttagggaaagcacgtacgcctgcaggtaccggtccggaattcccgggtcgacccacgcgtccgcatcatcatcgtcttcatcatcatctctctctctcttctcttcgttcctctttctttacacgcttgaaaccctagcaatttcaatttcgtttcctctaatagaatcttcatctttttatggcgtaacgttacacgaatttcaacgatttaggttttttttttttttttttgaagaatcaaacacaaagatagaaacaatgtcaacggagactaccacgggaaattcctcgttaattccagcatcatcatcatcgtcatcctccgacgctatcgatccagctccgttgcttttaaacggcgacgataatgaaggaagcaacggaggaggaggaggtggggaacggagatctcaggagacaagggttgagagaagctgcgaggtttcttagtcgtgctagtagcggacgcgtgaggcgtgagccttctatgcttggg

SEQ ID NO: 119413 - DNA, 456 bp, Arabidopsis thaliana
aaaaaaaacaacacagagacctctccgtcgtgttctctccccctctcttgaactttccgattttgtatcaaacacgaacctaatactgcttccttgactggtaatgtaagtatttgggttgttaactccatggaaaaatcaggcccggtgcagaaagccgttgttctccagccatttgtcaagttggtgaggcttgtagcgagggctttctatgatgattatactacgaaaagcgataatcagcagaaatctgctagaagtgacaacagagggattgccgctgtggtgctagacgcgctggcaaggcggcaatgggttagagaagaagactgggcaaaagatgtgcagttgcacgccaagcaacttcgaaaaataatatgactctttgaagaagaaaagttgattatgcgtgaccaccggaaagagactgcaaagggtgcaaagatgtatagtgct

SEQ ID NO: 119414 - DNA, 622 bp, Arabidopsis thaliana
atcagaaagctgaagcaatgtgggcagacttcagctcacgatggttctctttgatgcacagcactaggccgatgcgattacacgatgtcaatgaacttgcagaccatgcggcctctgcttttgagacggtgagggacataaacacagcatctcgtttgataggggacatgcgaggagacacactcgttgatccgttgtctgataggtacaaaaaacttggctgcaagatatctgtggtagacaaagagtctgaagattacaagatggttgtgaagtatctcgagactacttatgagcctgtgaaagtctctgatgttgagtacggtgtgtcagtgcagaatgtttttgcggttgagtcagatgcaattccttcattagatgatatcaagaagttaccaaataaggtccttttatggtgtgggtctcggagctcaaatctattgagacatatctacaaagggttcttacctgctgtatgctctcttccggttcctggttatatgtttgggagagcgatagtgtgttcagatgcagctgcagaagcagcaaggtatggttttacggctgtggatagaccagaagggtttcttgtattagccgtagcatcacttggtgaggaagt

SEQ ID NO: 119415 - DNA, 466 bp, Arabidopsis thaliana
aatggaaacaatggttatgatgagatccgtgctgccattagggaagctaaggctgtaacagacaagcccactttgattaaggtcactactacaattggttatggttctcccaacaaggcaaactcatacagtgtccatggagctgcgcttggtgagaaggaagttgaggctacccgaaacaatcttgggtggccatatgagccgttccatgtacctgaggatgtcaaaagccattggagccgtcacacgcccgaaggggctgctcttgaagctgattggaatgccaaatttgcagcttatgagaagaaatatccggaggaagctgcagagttgaaatctattatctcaggtgaattgcccgttggttgggagaaggcacttcctgtaagtagaactttctggtaatctataacgttctatcagtattcttcatatataaggctcttattttaggcaacttaaaatt

SEQ ID NO: 119416 - DNA, 794 bp, Arabidopsis thaliana
  unsure (1)..(794): unsure at all n locations
nnnnnnnnnnnnnnnnnnnnnnnnnnnnnnnnnnnnnnnnnnnnnnnnnnnnnnnnnnnnnnnnnnnnnnnnnnnnnnccacgcgtccgcccacgcgtccggattttgttgttgtcatgtgtgtgtaaaatcaaaatcgtaaagatcagaatcaatattctcttgccacatatatcctttatatatacacctttctctcccgcatcttcaacatatatccagtgccattgcaattttctcgagaaagtgacggaaaatggctccgcagctgcaaaattgagattcggattctcccttctttcgtcactctcattcattctcgcctgtatcaggcgtacacgcgttgttatcatctgttgcttatatttgaaccatggcgcaaccaaggtacactaggatagataacaggaggccctcatcaaattattgctctacagtgacagtagttgtgtttgtggccctatgcttagtcgggatctggatgatgacatcatcttctgttggaccggctcagaatgttgatgaggtttctctggacaacaaagatgggataaagaaacagatgaccccacctgcagaggagggtaatggtcagaagtttgaagacgcacctgttgaaacaccgaacgaggataaaaaaggagatggtgatgcaagcttgcccaaagaggatgagagctcaagcaaacaagataaccaggaagagaagaaagaagagaaaactaaagaagagtttactccatccagtgagacgaaaagtgagaccgaaggtggggaagatcaaaaagatgact

SEQ ID NO: 119417 - DNA, 604 bp, Arabidopsis thaliana
aaaaacctctcttaacgaggaaaaacaacaacatggcccctggtttctcttctctttcgaatctatcttcttcttttatccaatcctttcctatttttattctcaccttctcctcgtttttcccgaaactgttcttttgccctcttctctcaattttaatccaccaaacaaatcgaacagtgttcgataacttttagattgcaagtcctgtttttgatttggtcgggagaaagaaaactagggttttgatgggaactgatacagttatgtctggacgagtaaggaaagatctatcaaaaacgaatccaaatgggaatattcctgctaattcacgtaagaagatccaacgacggagtaagaaaaccctaatctgtccggttcaaaaactattcgatacttgtaagaaagttttcgctgatggcaaatctggtaccgtcccttctcaagaaaacattgagatgcttcgagccgttttggatgaaatcaagcctgaggatgttggtgtaaatcctaagatgtcgtattttcgatctacagtgaccggacgatctccgttagtgacgtatcttcacatctatgcatgtcatagattctcgatttgcat

SEQ ID NO: 119418 - DNA, 684 bp, Arabidopsis thaliana
gtccgccaaccccatttttaagcccctttctttgtttttatcctccgatcgatcaaaccaagaaaaaacactttcgtatttccctcgacgaaaaaaatggcaaccatttcgaatctcgctaatcttccccgcgccacctgcgtcgactccaaatcttcttcctcttcctccgtcttacctagatccttcgtcaatttccgcgctttgaatgcaaagctttcctcttctcagctttctcttcgttataaccaacgatcaataccttccctctctgtgaggtgttcagtgtctggtggaaatggaactgctggaaagagaacgactcttcatgatctatatgagaaggaaggtcagagtccttggtatgataatctttgccgtccagtcacagatcttctcccgttgattgctcgtggtgttagaggtgttactagcaaccctgcgatcttccaaaaagccatttccacttcaaatgcttataatgatcaattcaggacacttgtggaatcgggaaaggacattgaaagtgcgtattgggaacttgtggtgaaggatattcaggatgcctgcaaactttttgagccaatctatgaccagacagaaggtgcggatggctatgtctctgttgaagtttcacctaggcttgctgatgatacccaaggaactgttgaagctgctaaatat

SEQ ID NO: 119419 - DNA, 782 bp, Arabidopsis thaliana
  unsure (1)..(782): unsure at all n locations
gaagaatccacacacacacagaagaagaatctcatcacgaattttagctatgggttcaatccaacacagagcacacagaagaggatgtgacagaccagatggtgggaagatccgctcttccgaatcagtttgaggataaaaacccgctaaacttcccgggactccgcagagatgtagacgccatcgaacgccatttcttgagcggaatgaagagtttctttgatgcggctgaagagatgacaagcagcttatttgatatcatgggagaccatcacccaagcaccaggagaggagggatacccattgaaaaccatcccaaggtacaggagcaccgcaatgacgaaactgcccctacacgaccacactcctctggcgagattgatctctcgggcttggccaaggacgtttgagaaaggtcgtctgcttcgtcttcttcttctttttttttttcacaaaggtcgtcttgttctagcttttggcatatataatcttaaaaatgtaatgtgactttctaagaagcgtggggattgtagccccatgttagcggcttgcacgtttttccgagtgggtgctactactatctatcaatatcatcatactactatattactatgtgttatgcttgtgtcttttattatcactttgtcttaaaagttattttacatttttaaacatgttaccttatacaaaaaaaaaaccaaagnnnnnnnnnnnnnnnnnnnnnnnnnnnnnnnnnnnnnnnnnnnnnnnnnnnnnnnnnnnnnnnnnnnnnnnnnnnnnnn

SEQ ID NO: 119420 - DNA, 393 bp, Arabidopsis thaliana
cccacgcgtccggagtatagtttagcatatcgggcgcttcgagtttttcttgaggaagaatccacacacacacaggggaagaatctcatcacgaattttagctatgggttggatctggattgacgattcatccgcctctaaagccggtgctgatctcaccgataaaccgctcggagattctgccgccgccgccgaaaattgctccacgaccacggtggtaagatctcagtgcaagacggaggaggtcgagcctggaaagttcgtcaggaaatgcgacaaaacagaagaaatcctccgccactgttttgggaagccctctgaagtcgttcaatccaacacagagcacacagaagaggatgtgacagaccagatggtgggaagatccgctcttcc

SEQ ID NO: 119421 - DNA, 918 bp, Arabidopsis thaliana
  unsure (1)..(918): unsure at all n locations
nnnnnnnnnnnnnnnnnnnnnnnnnnnnnnnnnntacggctgcgagaagacgacagaagggtacggctgcgagaagaccacgcgtccgtacgggctgcgagaagacgacagaagggggcagcccgattcttctattagccgccatggtgaagtactcgcaagaacccgacaatcagaccaagtcttgcaaggctagaggatccgatcttagggttcacttcaagaatactagggaaacagcgcacgcaatcaggaagctaccattgatcaaggcgaagaggtaccttgaggatgtgatagctcacaagcaagcaattcccttcacacgtttctgcagaggtgttgggagaactgctcaagctaagaacaggcactctaatggtcaaggacgttggccagccaagtctgctcagtttgttcttgatttgctcaagaacgctgagagcaatgctgaggtgaaaggtttggatgttgatgccctcttcatatcacacatccaagtgaaccaggccgcaaagcaaaggagaaggacttaccgtgctcacggaagaatcaacccttacatgtccaacccatgccacattgagttgattttgtcagagaaggaagagcctgtcaaaaaagagccggagactcagttggctgccaagtccaagaaatcagcagcttaagctttctttctttattttcatgtcccttgtgttcttgaacgagattttgttctcttttttctttagctcgaatcgttttgtaagacaatggatagatttatcttggaaattttcgttctatgacttatgaaatcagtgatcatggttctccccaaaaacttgnnnnnnnnnnnnnnnnnnnnnnnnnnnnnnnnnnnnnnnnnnnnnnnnnnnnnnnnnnnnnnnnnnnnnnnnnnnnnnnnnnnnn

SEQ ID NO: 119422 - DNA, 564 bp, Arabidopsis thaliana
  unsure (1)..(564): unsure at all n locations
agctcccnnnnnnnnnnnnnnnnnnnnnnnnnnnnnnnnnnnnnnnnnnnnnnnnnnnnnnnnnnnnnnnccacgcgtgcgcccacgcgtccgcaataacacaatctccctggaaaaattctctacgacttcctctcgtcgtcgagcttgttattgatcggagagagagatcagtgttctttggatcttccaatttcttccacgtttgtgcttgaattgcagaagaagttttgtataggactctgttttgcttgttgatagaatttgggaatctagggtttatcgaatcgtttattttggttttcgtttagtttctcttcttcgagctggtgtttctcaactagttagagagtttctcgattggtcagagctgcttttattgaattttctttggatttcgtgcttatagatctttgaaaagtctgagaatcctgttttggagttactgctccaagttattggaagaaattaggggttcgatccaattttagaattgactcaaggaattccgatattggggttttgttgtagttctgattctcagtgaataagatagaagataat

SEQ ID NO: 119423 - DNA, 402 bp, Arabidopsis thaliana
gaattttgcaacgatgggacaaggtaaagaagttaagacgagaccagatcctcaagttgagattcaggaaagaggagaaatattcttcttttatagaccaaaggttaacaaagaagaagctcacagtgtggacgatgttcaaaggctatacatagtgatgcgtcctgagtctggtgagaatcccaccgaagagaaacaagaccctctttcaggtaaagaaggctccgataaagattccggtgacggagaggcgagtggtagctcctccggcgccaagaaccaaggtgaaggaggacacggcgtcgagaaagtgaacatcgtgaaacagcttctgctacgattcattgtgatgggcaagataatgtcttcctgatccgagcaagaagtcgcaatctttttggg

SEQ ID NO: 119424 - DNA, 665 bp, Arabidopsis thaliana
tatacgacttacttagggaaagctggtacgcctgcaggtaccggtccggaattcccgggtcgacccacgcgtccggtttaataatctccttctcttgtcttgcttccttgtgaatcaaaaaccagcgatcaaaagtcttcttcttgtgaatctgtgatctcaaaagctcctttaaccatggcgacttttgatgatggagatttcccagctcaaacccattctccgtctgaacacgaagactttggtggctacgataatttctccgaagcacagcaacctccgactcaacatcaatccggtggattctcttctttcaatggagatcctgcttccccaaatggatatggatttggtgcttcttcacctaaccatgacttttcctcgccttttgaatcttccgttaacgatgctaacggaaacggcggcggcagcggtggtgatgcgatcttcgcttccgatggtccgattcttccagatccaaatgagatgagagaggagggtttccaacgccgtgagtggcgccgtttgaacaccattcaccttgaggagaaggaaaagaaagagaaggagatgcggaatcagatcataactgaagcagaagatttcaagaaagccttctatgagaaaagagacaagaccattgagaccaacaagactgataaccg

SEQ ID NO: 119425 - DNA, 1488 bp, Arabidopsis thaliana
  unsure (1)..(1488): unsure at all n locations
atttaattttattttattgtttccattaaagcaaaaaccccacactctctctctctcttgctcctcgctctcttcctgtctctatctctctctgcaaaaaccctaaatttcctccgatttcaccatcttcaatctccttcacaccccaacttagcctcttaatcactccccaagctaaaccctccaacgattttccatgattcgaagatacagagccttagcgatgaagaaaaagccctaaaaaccaaagctttgatctctccgaaatcggagtttctttctttgtttggtaaatttggttttcgaaatgtataagaaccagctacaagagttggctcagaggagctgctttaatcttccttcgtatacttgtattagggaaggtcctgaccacgcgccgcgattcaaggctactgttaactttaacggcgagatctttgagagtcctcagtattgttctactcttcgtcaagctgaacactctgctgctgaagttgctctcaatgctctctctaatcgtggtccttctcactctcttgccgccaggatcttggatgagacgggtgtgtataagaatcttttgcaagagatagctcaaagagtgggagctcctttaccgcgatatactactttcaggtcaggtcttggtcaccaacctgtgtttactggtactgtagaattggctggaattacgttcactggagatccagctaagaacaagaagcaagcagagaagaatgctgcaatggctgcttggtcttccctaaaacaattggcaaaagaaacatcaagttcaatgcctgagcctgagaacattgacgaactagaacaggtgattatagcaagagctttgataaactatcgtatcaaggaaaacattggcacaggaagctcctcgagtgccccagttccatttgcaaagaagttctttatgcagaaccttagaccaacaagtccacagccttctcctgcaaccacatcgagaatcttaccctttatttgcccaaaacaaccttccagaagcagcagatcatccttagcagcaacttccggtattgacagaattatggcagcagccttggaaagccgcagctaccagcggcctcagcagagatttgcaaatccgccttatgttcctatgaggcaattttagatcgcaatgccatggggatggctccaccctgtcacaatcagaaccgctgtaaccggtcttctcttgcaccttccaatgcctccttccaccatgtacaaacaacactcagcgtccctcttctgtgtatgtcccatcgctgatgcgaactgcaccacctgtgangatcgcgccgcctgtcacaatcagaaccgcggtgcccgtatttgcttctgcgccaccggttagaattanaaccgctgtgaagcccacagttgaaggcaggagaaaacccgcntatcatcnntcccagaaaaaggagaattatncccngtcttggcctgatantcttgaaaatt

SEQ ID NO: 119426 - DNA, 760 bp, Arabidopsis thaliana
  unsure (1)..(760): unsure at all n locations
cgcagagaggagaaacctgccccnnatttcnctaatgtcaaggagnnnctgagacaaaagcgtatcgtaatggaggttattggtcaaatggaatactcaaggaagattagcccaggagatggtgttactacttctggagctggtgatagggtcatggatttcggctcagtgttccttccatctcctaccaagggtgatacagctgtagcagctgcagcaactcctggagcgaatattgctgaactcattatttcccgtggcttagggactgtggttcgacatcgtgactttgaagagaggtcgaaccattatgacgctctcctggctgctgaagctcgtgctattgctgggaagaagaatatccattctgcaaaggattctccagccctacacattgcagacctgactgtggcctcggccaagaaggctaaagatttcctgccatccctgcagagaatcaaccagatatctgccgttgtggaatatgtgctaagtggacatcggttcaagctatacattccaaaagaatcgtgcagcattgcctttgcattctctggtgtcagatgtcctggccgtggcgaaccctattcggaagaagctattgctttaatgagacgtaagatcatgcagagagatgtcgagattgtagttgaaaatgtggatagaaccggtactttcttgggatcaatgtgggagaaaaactcaaagacgaacgcaggaacatatcttcttgaagctggcctggcaaaaatgcagactg

SEQ ID NO: 119427 - DNA, 585 bp, Arabidopsis thaliana
aaaaaagcttccaccatttttttttctgtgcttcctcttttaagctattttcttgatgttttgggtttcactggaagaagaaggataagaaaaaatggcaggtgatggcgtagaaaatgcaaagccaccgcagaaacaggaagatcttcagcctcatccggtgaaggatcaactttacggtatcacttactgcctcacaagtcctcctccttggccggagacaatacttctggggtttcaacactacttagtgatgcttggaacaactgttctcattccaacaatgttagtttcaaagattgatgcaagaaacgaagataaggtaaagttgattcagacgttgctctttgtgtctggaatcaacacgttatttcaaagcttctttgggactcgtcttcctgctgtcattggagcttcttactcttatgtgccaactacaatgtcaatcgtcttagctgctcgttacaatgacattatggatcctcaaaagagatttgaacagatcatgcgtggaatccaaggtgctcttattattgcctcatttcttcatatccttgttggtttcagtggcctttggcgcaatgt

SEQ ID NO: 119428 - DNA, 392 bp, Arabidopsis thaliana
gatccttttaatgtatcgcagaccatcctcagctatggcctcctgtgtgtccttttaggtatcttcggagctcttcaccgtaaataatcccgacccatctagaggacggagccgccggcgaggaaattcaggcagattacatcggcgatttggccttgttttcaacgaagatcgtcttgttagggtttcgtccgcagctatggattctctgtcaaatgcgggtattgatatgaatttcggctttcgtgatgacggaatctatctggttaaacgatcaatcttctcctcggtcgatgataccttcagcaaaaccagtggctaatgtccatcgccagaggtgtaggagtgtcttcaagttactagtccagagggaaatttcaccaaacacaaag

SEQ ID NO: 119429 - DNA, 886 bp, Arabidopsis thaliana
cgcccgacggacccggaaggcccgggggggcccacccatccggacgaggatggttcatgatgagagagtcgaggcaagtgatcaaatcagaaggtggagagatgagagttgtgttatcaccaagaggaaggatcattgagaagccaatgcacattgggtttctaacaatggaacctaagaccctctttgtccctcagtatcttgactcaagccttctcatctttattcgtcaaggtgaagcaacccttggagtgatatgcaaagacgaattcggagagaggaaactgaaagcaggagacatctactggattccggctggttctgtcttttatttacataacacaggcctaggtcaacgccttcatgtcatttgcagcattgatccaacgcagagtctcggcttcgaaaccttccaacctttctatataggtggagggccttcgtctgttctagctggatttgatcctcacactttaacttcagcattcaacgtttccctacctgagctgcaacaaatgatgatgagtcaattccgtggcccgattgtacacgtcaccgaagggccacaaccacaaccacaatcgacggtatggacccaatttttggggttgagaggggaagagaaacataagcaactcaagaaactcttggagactaaacaaggatcccctcaagatcaacaatacagttcagggtggtcttggaggaatattgtaagatcgattttggttctaacagaagaaaagaataaagggtcaggatcttctgaatgtgaggactcgtacaacatttatgataagaaagataaaccaagtgttgataacaaatatggatggagtatagctcttgattatgacgattacaagcctcttaaacactcgggatc

SEQ ID NO: 119430 - DNA, 643 bp, Arabidopsis thaliana
gaaaaacaagagagctatcggatttttacttctggtcgtacttatcaatggagttatgatgacgagatcaaatgggtatgaaggagaagaagagtggggaggagcaggaggaggagagtggggaggagcagaaggaggaggagcatggggaggaggaggtggaggaggaggagcatggggaggagaaggagaaggaggaggagagtggggaggaggaggagaaggaggtggtggaggaagaagaggatggttcatgatgagagagtcgaggcaagtgatcaaatcagaaggtggagagatgagagttgtgttatcaccaagaggaaggatcattgagaagccaatgcacattgggtttctaacaatggaacctaagaccctctttgtccctcagtatcttgactcaagccttctcatctttattcgtcaaggtgaagcaacccttggagtgatatgcaaagacgaattcggagagaggaaactgaaagcaggagacatctactggattccggctggttctgtcttttatttacattacacatgcctaggttaacgcctttttgtcattttcagcatttatccaacgttcagatttggtttcttatctcttcttcttttttatatatgttgttttccttttttt

SEQ ID NO: 119431 - DNA, 515 bp, Arabidopsis thaliana
ggcccgcatcatcaaggatcgaaaacattaagtagctagttaagagagagagagagatggagatgaacattaagtttccagttatagacttgtctaagctcaatggtgaagagagagaccaaaccatggctttgatcgacgatgcttgtcaaaactggggcttcttcgagctggtgaaccatggactaccatatgatctaatggacaacattgagaggatgacaaaggaacactacaagaaacatatggaacaaaagttcaaagaaatgcttcgttccaaaggtttagataccctcgagaccgaagttgaagatgtcgattgggaaagcactttctacctccgtcatctccctcaatctaacctatacgacatccctgatatgtcaaatgaataccgattggcaatgaaggattttgggaagaggcttgagattctagctgaagagctattggacttgttgtgtgagaatctagggttggagaaagggtacttgagaaggtgttcatgggacaac

SEQ ID NO: 119432 - DNA, 459 bp, Arabidopsis thaliana
gtgtgtgcaaaacgtctctctctctgtctcataaaatctcagagaagaaacatcgtcgggtcaggtcgaagaaaggagagaaatgagtggtcacgattcgaaatacttctccacgacgaagaagggagagatccctgagctcaaggaagagcttaattcccagtataaggataagagaaaagatgcagttaagaaggttattgcggcgatgactgttggaaaggatgtttcatcacttttcactgatgtagtcaattgtatgcaaacggaaaatttggagttgaagaagcttgtttacttgtatctcataaattatgcgaaaagccagccagatcttgctattcttgcagtaaatacctttgtaaaggattcacaggatccaaatccgctgattcgtgctttggctgtgcggacaatgggctgcattcgtgttgataaaatcacagaatatctatgtga

SEQ ID NO: 119433 - DNA, 633 bp, Arabidopsis thaliana
  unsure (1)..(633): unsure at all n locations
atcgccgggaaaaaatcacagatttcttcgacgccgccgatgaggttccggtacgcaatggtttgttcgtcgaatcagaaccggagcatggaagctcacgctcttcttaagagacaaggactcgacgttgcttcgtacgggactgggtcacatgtaaaactacctggaccatctctgagagagccaaacgtttacgactttggaactccttacaagcagatgttcgatgagctcaggcgcaaagatcctgaactatacaagcggaatggtattttgcagatgattaagaggaatttatccgtgaaacttgctcctcaaagatggcaagataatgctggtgatggtgtgtttgatgtggttatgacttttgaagaaaaggttttcgattcagtccttgaagatctcaacaacagagaacaatcacttacgaaaacaatacttgtgatgaacttggaggttaaagataaccacgaagaagcagctataggggggccgactttgcctttggaanccctgnccaagagatttgaaagggnattgaaacntggggaagattcgntccnttgncatttgttnccgggttttnnaaaaccaaccnaggnggnaaccggggctaagnnncccctttccccg

SEQ ID NO: 119434 - DNA, 449 bp, Arabidopsis thaliana
  unsure (1)..(449): unsure at all n locations
aacaactggtttcgcttctccttctacagagcttccctcgtttcctccgccggagagacactccattaaaatcccttcttcatcgatccttcattagatttacaacaacaacaatgccaagcgtcaagctcacacaccattctccacctgacactattgcctccgactccgtccgtctcctttcccgtgaaactttccgaatcagcgcctctttcgcttctcctcccgttgatgatctccctcctcactctcctccacctccagattctcaattttttcattcggctctgagattgatctgtttgcgggggaaatcgcatggccgtcggtttaaagtatgtcggttgagagcgattggttctgggagattcaagaaggatttcaagttcggtggctaattaagntttgggaggnctcccnaagactcctttttgaanggaagnngggnt

SEQ ID NO: 119435 - DNA, 373 bp, Arabidopsis thaliana
caagcgtcaagctcacacaccattctccacctgacactattgcctccgactccgtccgtctcctttcccgtgaaactctccgaatcagcgcctctctcgcttctcctcccggtgatgatctccctcctcactctcctccacctccagattctcaatttcttcacgcgactctgagattgatctggtgcgaagaaatcgatggccggcggtttatgtatgtcgctgagagcgatggctctgggagattcaagaagaattcagcgcgcgctattagcttggagtctcctcagactccttgtgatgaagtggcctcgtctcttagatctcacgttgcacctgaagggtcatcctgggagtgttaatgagtctgatg

SEQ ID NO: 119436 - DNA, 894 bp, Arabidopsis thaliana
ccggggatttctgtctcaagagttgtatccgcctgctcatttaaagctatgaaacaggtagctggaaaattaaaattggaattggctcaattcgctgaattagaagccttttcccaattttcttctgatctcgataaagctactcagaatcaattggcaagaggtcaacgattgcgtgagttactgaaacaatcccaatcagcccccctcacagtggaagaacagataatgaccatttataccggaacaaatggttatctggatggattagaaattggacaagtaagaaaatttctcgttcaattacgcacttacttaaaaacgaataaacctcagtttcaagaaatcatagcctctaccaagacattaaccgctgaagcagaaagctttttgaaagaaggtattcaagagcaactagaacgtttcctacttcaggagaaagtataaaaaacgaaacggattattcttaatttttgattctttagtcaattttactctttaattttaattaattttttaagaaattctagaaatagaagtctataagtcaagtatatataatagaaagaagtatctaactaatatctgtttaatattaaatcttaaagcattcagaatttctttcttattctatttatttcttatcttttttcgaaatagatattatatataatatataggaatgggaattatagattaatatccatatagatatatttatattgcgtccaataggatttgaacctaaacccaaggtttaaaagacctatgtcctatccattaagccaaggacgccttttggctttttttaccttcccaatggtaaaaaaaaaaaaaaaaggcggccggtttaaaagaatccaggctaaggaaggggggcatgcgaggtaaaag

SEQ ID NO: 119437 - DNA, 879 bp, Arabidopsis thaliana
  unsure (1)..(879): unsure at all n locations
gaaacaggtagctggaaaattaaaattggaattggctcaattcgctgaattagaagccttttcccaattttnttctgatctcgataaagctactcagaatcaattggcaagaggtcaacgattgcgtgagttactgaaacaatcccaatcagcccccctcacagtggaagaacagataatgaccatttataccggaacaaatggttatctggatggattagaaattggacaagtaagaaaatttctcgttcaattacgnacttacttaaaaacggataaacctcagtttcaagnaatcataggctctaccanggccattaaccgctgnagcagaaagcttttttgaaagaagggtnttcaagggcaactnggaccggnttccnacttcangggggaaggttttaaaaccgggancggggttattcccttaaatttttggcattcctttgggcaatttttacccctttaattttaaattaaattttttaaggaaattcctgggataggaggccataagtcaagtatatataatagaaagaagtatctaactaatatctgtttaatattaaatcttaaagcattcagaatttctttcttattctatttatttcttatcttttttccatagggggattatatataatatatagaaatggaaataatagataaatatcaatatagatatatttatattgcgtccaataggatttgaacctataccaaaggtttagaagacctatgtcctatccattagacaatggacgcttttcgcttttttttactttcctattgttaaaaaccaagaatgtgcaaaatctttttaagcaatgatgtatttgagtgaattcaatacacaattgctattagacaattctaata

SEQ ID NO: 119438 - DNA, 903 bp, Arabidopsis thaliana
  unsure (1)..(903): unsure at all n locations
nnnnnnnnnnnnnnnnnnnnnnnnnnnnnnnnnnnnnnnnnnnnnnnnnnnnnnnnnnnnnnnnnnnnntcccttttttttttttttttaagactgaaacctggtaaaaaatatagtttatttacatatacaatgcatagcaattcatgttgtggtttaattacaaatttcacatttaattaagaaccttcaaagattgacctccgatgtaattgtcgaagtcacttatatccaggaatctagccaccccactagcttcaagaaactggtctctgaagactcttgtcatggagagacatccaccaggaagcattgattgcatattaagtgcgatgttagggttatgaatactctgcctcatatgcacccaaccatactcttccccactctcttcatcactcactcttgccctgtacatctgaggcatcaatggcagatggatgatcatttgagtccaccaagcaaccttcagtcacccaacaatccccacacgtgcctaattcccaccctttcagttctccttcctcaatgtattgcctgaaagtctcaatggcttcaatgccttttgctttggcatctcttggctctgataaaatattcaaccggagctcaaccgcttctaacggctcctcaagatcttcgatcaaactaccgataccttcgtttgatcccgcgagtctcattctcaccatttcaattatggtcttcgccaccatgtatgcaccatcatccaagaagtgattctccttaaccgcaccatgtcctgaagtttccatcatgagatgagtctcgatgccgtctttgttcagctctactcccttgtcaatcacgtttctataccctactctatacggacaatgccgccctcctcgttacgtttacacctacatagccccatactcg

SEQ ID NO: 119439 - DNA, 532 bp, Arabidopsis thaliana
  unsure (1)..(532): unsure at all n locations
nnnnnnnnnnnnnnnnnnnnnnnnnnnnnnnnnnnnnnnnnnnnnnnnnnnnnnnnnnnnnnnnnncttttttttttttttttggtaaaaaatatagtttatttacatatacaatgcataagaattcatgttgtggtttaattacaaatttcacatttaattaagaaccttcaagattgacctccgatgtaattgtcgaagtcacttatatccaggaatctagccaccccactagcttcaagaaacctgatcaaccacacacataaattcaaagttatcatcaaatgttttactcataaccatatctttcacactgagaagtagatcgatcatatatatgaaatttactggtctctgaagactcttgtcatggagagacatccaccaggaagcattgattgcatattaagtgcgatgttagggttatgaatactctgcctcatatgcacccaaccatactcttccccactctcttcatcactcactcttgccctgtacttgtgactcttcaatagcagatggatgatcattt

SEQ ID NO: 119440 - DNA, 1526 bp, Arabidopsis thaliana
cagcatgaagagtgcataaaggaaggttctgaggttttgggatatgatgcaaggaatgtcaaagccctatacagaaggggtcaagcttacagagatttgggcttgtttgaagatgccgtctctgatctaagcaaggcccatgaagtttccccagaagatgagacaattgccgatgtgttaagagatgttaaggaaagattggctgtcgagggacctggcaaggcatcaagaggtgtggtgattgaagacataactgaagaaaataatgttacttcccccgtccgtaaaaaaccgtcaaaagaggctaatggtcatgctcagggcgtaaagactgatgttgatggattgcaagctctcagagataatccagaagcaatcagaactttccagaatttcatttcaaaaactgatcccgatacacttgctgctctaagcggaggcaaagctggagacatgtcaccggacatgttcaaaactgcgtcaagtatgataggcaaaatgtcacctgaagagattcaaaaaatggttcaaacagcctcttcgtttaaaggagataaccctttcgccccgactgcgccatctaccgaaaacggttttacacccacacctgacatgcttaaacttgcatctgatatgatgggtaagatgtcaccagaagagcgtgagaggatgtttaacatggcatcgtctttgaaagcaaacgctccagcttcaacatcatacggcaatgcagaagcatctgaaccccgggaaagtttaggagccagtgggagttcttcgggaaattcccttgtggctccaagaaggcggtttcgaaccaagcatcccttctgctccgcctgctgacttacaggaacagatgagaaaccaaatgaaagatccagcgatgcgacagatgttcacgtctatgataaagaacatgaaccctgagatgatggctagcatgagcgaacaatttggaatgaagctttctcaagaagacgctgcaaaagctcagcaagccatggcttctctttctcccgacgccttggagaaaatgatgcgatgggcggatcgggctcaaaccgggatggagaaagcgaagaaagcaaagaaagtggttgttcggaaaaggcggattgatctttgcaatattaatgctcgttttagcaatggtccttcaccgtctcggctatattggaaactagaggaaacaacggtatcttaaggcttaatccttcgtgaagataaaaccagtcttcggtgggttcgtttagtttgtaaaactgtaacatcgttttatcttctttttctttcctctaactctcagctttttgttagtccacttgtgtctaaatttctttacactttcttctgtagtgaattttaaattagagaaaatacgaatatttccttatattcgttattttataaacataattatgcttctggtaaaaaaaaaaaaaaaaaagggcgaccgctctagaggatccaagcttacgtacgcgtgcatgcgacgtcatagattttctagtagttgcacctaa

SEQ ID NO: 119441 - DNA, 302 bp, Arabidopsis thaliana
  unsure (1)..(302): unsure at all n locations
aagtgtacatggatttcatggggagaaagcacgacatgctgagcttttggctgccggaggtgaggagatgagagaacgtgaaggtaaagaatcagcaggtggtgttggtggtcgtagcgtaaaagatacggtagccgagaaaggacagcaagctaaggaaagtgtangagaaggtgctcagaaagcgggcagtgctacgagtgagaaagctcagagagcttccgagtatgcaacagagaaaggaaaagaagctggaaatatgacagctgaacaggcggcgagagcaaaagactatgctctgc

SEQ ID NO: 119442 - DNA, 558 bp, Arabidopsis thaliana
  unsure (1)..(558): unsure at all n locations
cagctcnnnnnnnnnnnnnnnnnnnnnnnnnnnnnnnnnnnnnnnnnnnnnnnnnnnnnnnnnnnnnnnnnnnccacgcgtccgcggacgcgtgggaacaggctatggctgtcacaagcttggctcctccatgggtcatcttgagactagctttccggtcagtagcagcttcttcctgtctccacacaaatcaaaaaaccctaatcacgaatctctccattcccacttcgtttcctctccgacagtcagctttgagaagatgttacagtgcagaagctataaaaggagatgtagattttctcctcaaaggagttggagaccaagctgttgccaaagaagtcaagcaaattcttgaaatggcaagacgtgcatcatcaaaaagagaagttcttcatacagattttctcacaccacctattgttaaggaatcagtttcactattggaaaaatttgctgatgttaagatagttgctcaaggaggttaccctgaggctgaacggtgtaggatctcgattggacattctttgtgtcctaactagtgatccagatatagttgct

SEQ ID NO: 119443 - DNA, 1133 bp, Arabidopsis thaliana
agattaccatttcttaaatttctctccctaaatattccgagttcttgatttttgataacttcaggtcaaaatgggagtatactcgagagcggttgcgttttcggtctttgtgtcgtttctgctgtttttcactgcttattctaagagaaatgatggaacattcagagttggcctgaaaaaactgaagttggatcctaacaaccgactcgcaacacgctttggttccaagcaagaagaggccttgagatcttctttgcgttcgtacaacaacaatcttggtggtgattctggagatgctgatattgtcccgctcaagaattacttggatgctcagtactatggtgagattgctattggtactccaccgcagaagttcactgtcatttttgataccggaagctctaacctttgggtgccatcaggaaaatgttttttctcgctgtcttgttactttcatgctaagtacaagtcctcgcgatcaagcacatataagaagagtggaaaacgtgccgcaatccattacggctcaggatcaatctctggtttctttagttatgatgctgtcacggttggtgatttggttgtcaaagatcaggagtttattgagacaaccagtgagcctggtttaacattcctggtggctaagtttgatggtcttcttggtcttgggttccaagagatcgctgttggaaacgctactcctgtttggtacaatatgctcaagcaaggccttataaagaggccggtcttttcattttggcttaaccgtgatccaaagagtgaagaaggcggtgaaatcgtattcggaggtgttgatccaaagcattttagaggagaacatacatttgttcctgtgacacaaaggggttactggcagttcgacatgggtgaggttctcattgccggtgaatctactggatattgtggaagtggttgttctgcgatagcagattctggaacatcgttacttgcgggtccaacagctgtggttgccatgataaataaagctattggagcatctggagttgctagccagcaatgcaagactgttgttgaccagtatggacaaaccattttggatttacttttggctgagactcaaccaaagaagatttgctcacaaattggtcttt

SEQ ID NO: 119444 - DNA, 511 bp, Arabidopsis thaliana
cggacgcgtgggaaaaaaccaggtgtgtaggtcgtcaattaattttgcatgtgtgcaaaaacacaatgaagatgaattcgcgagctttaatagtttggtttctattgttgtcggctgttttcgccatcaaggttgttgcctccatcgatgacacaaaacaagttggtgaaaaccaagtggaggagtcaaagtcgacatgcaagtatggaaattgtgcacagtatggagagaatcattttgtagaaacagatgaagtccttgatggggaagaagaagaagaatccaaaaataaccaaggtggaattgggagaggccaaggaggacaaaaaggcggtggtggtggtggccaaggaggacaaaaaggcggtggcggtggtggccaaggaggacaaaagggtggcggtggtggccaaggaggacaaaagggcggtggcggtggtggccaatggggacaaaaaggcggtggcggttgtggacaaggtggacagataggtggtggtgggggcggtct

SEQ ID NO: 119445 - DNA, 626 bp, Arabidopsis thaliana
  unsure (1)..(626): unsure at all n locations
cnnnnnnnnnnnnnnnnnnnnnnnnnnnnnnnnnnnnnnnnnnnnnnnnnnnnnnnnnnnnnnnnnntcgaaccacgcgtgcgcggacgcgtgggcggacgcgtgggcggacgcgtgggcggacgcgtgggcaagtaaaaaaaaaatcctaatctttgcgtcaccgttcgtgtttcctcttctctctagggttctccttcaacagttttccagtaaacatgagtcgtcatcctgaagtgaagtgggctgagactaccgagaagattttcctcactgtagtattagctgatactaaggataccaaggttaacctagacccagaaggagtctttgatttctctgcgaaagttggtccagaaaaccacgtttatgagctcaaactggaacttgccgataaagtcaatgttgaggaaagcaaaatcaacattggagagagaagcatattctgcataattgagaaagcagagccggaaaggtggaataagctactccgtgtgaagaagcccccacactatgtcaaggttgattgggacaagtgggttgatgaggacgatgaaggcagtgctggtgccgcagatatggatatggcaggaatggaaggaatgggaggaatgggaggcatgggc

SEQ ID NO: 119446 - DNA, 934 bp, Arabidopsis thaliana
  unsure (1)..(934): unsure at all n locations
nnnnnnnnnnnnnnnnnnnnnnnnnnnnnnnnnnnnnnnnnnnnnnnnnnnnnnnnnnnnnnnnnnnnnnnnnnnnnnnnnnnccacgcgtccgtgaatagcttattagaggaggctaagaagcttgaagagcataaaggaatggattctggaaacaatgagatagatacgctaaagcaacagatcgaagatttagattgggagttagactcttacaagaaaaagaacgaagaacaagagatactattagatgagcttactcaggaatatgagtccttgaaagaggaaaattacaaaaacgtttcctcaaaattagagcagcaagaatgctcaaatgcagaagacgaatacttggattccaaggatattatagacgaattgaaatctcagatagagatattggaaggcaaactgaagcagcaatcgttggagtattctgagtgcttgattacagttaatgaacttgagagtcaggtgaaagagttaaagaaagaactggaggatcaggcacaggcttatgatgaagatatcgacacaatgatgcgggaaaaaactgaacaagagcaaagagccatcaaagcagaggagaacctgaggaaaacaagatggaataacgctataactgcagagcggcttcaagagaaatgcaagaggctttctctagaaatggaatcgaagctgagcgaagcatgagaatctgacgaaaaaacattggctgaagccaacaaccttcgtctgcaaacaaaactcttgaggaatgcaagagaaacacttccgagattacacagagaagaacaagggagccgtggagagaagacaagctttgcaataaagtcaatgcttgaagtgagcctgagctacaactgaagatgattaggcacactctgaacgaaaatatcagagggagaagagagagattggaaaattcttggta

SEQ ID NO: 119447 - DNA, 443 bp, Arabidopsis thaliana
ccgatcgacacaatgatgcgggaaaaaactgatcacgagcaaagagccatcaacgcggaggagaacctgaggaaaacagggtggaataacgctataactgcggagcggcttcaagagaaacgcaagaggctttctctagaaatggaatcgaagctgagcgagcatgagaatctgacgaaaaaaacattggctgaagccaacaaccttcgtctgcaaaacaaaactcttgaggaaatgcaagagaaaacacataccgtgattacacaagaggaagaacaaaggaagcacgtggaagagaagaacaaagctgtgtcaatgaaagtccagatgctttgaaagtgaggtcctgaagctcccaaagccgtgagatgagtcgagtgcagcagctactgaaaccgagaagataatacaggagtggaggaaagaaagagatgaatttgaga

SEQ ID NO: 119448 - DNA, 427 bp, Arabidopsis thaliana
agctctctttcccagcatcaccatctcttgtaccagtttctgattagattcaacaatgaacggcgcattaggtaactcctccgcctccgttagtggcggagaaggagccggaggaccagcgcctttcttggtgaaaacctacgagatggtcgacgattcatcaacggaccagatcgtatcgtggagcgctaacaacaacagcttcatcgtttggaatcatgccgaattttcacgcctccttcttccaacctacttcaaacacaataacttctcttccttcattcgtcagctcaatacctatgggtttagggaggttgctccagagagtgtgggagtttttgtgatggagattttaatgagcatcagcagcatcttctcgagaatcttcgtaggaggcctctactcagccgcagatcagttcatcctc

SEQ ID NO: 119449 - DNA, 447 bp, Arabidopsis thaliana
  unsure (1)..(447): unsure at all n locations
aatttccttctctctatctctcaccntattcgcgattaaaaactctcaacttttctctcaaatttctgatcctttgatccaacagttagaagaagattcatctgatcatggccctcgaagcgatgaacactccaacttcttctttcaccagaatcgaaacgaaagaagatttgatgaacgacgccgttttcattgatccgtggcttaaacgcaaacgctccaaacgtcagcgttctcacagcccttcttcgtcttcttcctcaccgcctcgatctcgacccaaatcccagaatcaagatcttacggaagaagggtatcttcgccctttgtcttcctcatggttcgcttaaaggttcaacccgtcggaaaacgggggttttcatcaaaccaggggggaattcggttaaacggcnggcggcacagttcaaanaacctccccggaaaagg

SEQ ID NO: 119450 - DNA, 955 bp, Arabidopsis thaliana
  unsure (1)..(955): unsure at all n locations
nnnnnnnnnnnnnnnnnnnnnnnnnnnnnnnnnnnnnnnnnnnnnnnnnnnnnnnnnnnnnnnctcagcaaaatcgccacgcgtccgagaaaaagcctccgtctcctcctctctctctattcatcagcctcaacctctctttcgtcgtcgactcagtttccgatttagggttacccaatcttcgccatgtatcgcacggcagcttcacgagccagggctcttaagggagttcttactcgtagtttgagaccagcgcgttatgctagttctagtgctgttgcggagacgagttcgtcaacgccggcttacttgagctggttgagtggtgggtctcgtgctgcgcttacttcattggatatgcctctacaaggtgtttctcttcctccgccgcttgctgataaagtcgagccgagcaaacttcagatcactactcttccaaatggtcttaagatagcctcagagacgactccgaatccggcagcttcgattgggttatatgttgattgcggttctatttatgaggcgccttatttccatggagctacacatttgcttgaaagaatggctttcaagagcacgttgaacagaactcattttcgtcttgtgagggaaattgaggctattggaggcaacacatccgcttctgcgtctcgagagcaaatgagttacactattgatgctcttaagacctatgtccctgaaatggttgaagttcttattgacagtgttagaaaccctgctttcttggactgggaagtgaatgaagagctacggaagatgaaggtagagatagcggaacttgcaaagaaccctatgggtttcctcttggaggccattcattctgctggttactctggtccattggcaagtcctctgtacgcaccggagtctgctttagatagattgaatgttgagctcttggaagagtccatgactgagaatttcactgctgcac

SEQ ID NO: 119451 - DNA, 442 bp, Arabidopsis thaliana
cagagagatagattttttttctgggggagaatctagcagaagaagcctactagggtttggtttcttgagtcacatagatcttcttctctatctgtctctcttggattcttcaatgttcactttcagtcattggaaaaaaagggactatgtaatctaactctttttgtacttgagagaagaagctgaagtacatttgttcatcatttggttttatagtattaataactgccaaactccagagctttaagatgtatgactctcaagttttgaaatctaaatacaacccatttctcagacgttcgcattctggaaagaaatttcagggcacagttaccatgtcagagggcagagaaacttgcgaagaatctacgagtggtgaatcttttccatatagatttcaacttgaagaggatgtaaaaagattgcaactgcaactccaaca

SEQ ID NO: 119452 - DNA, 905 bp, Arabidopsis thaliana
  unsure (1)..(905): unsure at all n locations
nnatgatatnnnnncannnnnnnnnnnnnnnnnnnnnnnnnnnnnnnnnnnnnnnnnnnnnnnnnnnnnnnnnnnnnnnnnnnccacgcgtccgcggacgcgtgggtttccggagatttttctctttgcctttgttatttgctgcttttgctgcagctacagtagaatcttgtgtttttgtggtggggaggtgagatttcttatgacggggaagcgatcaaagactaattgcagatctgcttctcacaagctcttcaaggataaggctaagaaccgtgttgatgatttgcaaggcatgcttttggatcttcagtttgcgaggaaagagagtaggcctactgatgttactcttcttgaggagcaagtgaatcagatgcttcgtgagtggaaatctgagctcaatgagccttctccagcttcatccttgcaacaaggtggtactctggggtctttctcatcagatatttgtcggctgctgcagctctgtgatgaggaagatgatgctaccagcaaattagctgcccccaagcccgagcctgctgatcagaatctcgaagctggcaaagctgctgtcttccaaaggggatacaatctggttcaggggaagtcagaacatggattaccattggttgataattgcaaagatttgtccttagcagctggtaacaatttcgatggaacggctcctttggagtatcatcagcagtatgatctgcaacaagagtttgaaccaaacttcatggtggtttcacaattgtccagttatggtgagtagagggcctatcctatctctatttatccnactatttgcctcacctctgattcttggtcaaatgtgctcttggatgcctangcactaggattgattggtcagattctgagagcttccctgactgcttataagg

SEQ ID NO: 119453 - DNA, 873 bp, Arabidopsis thaliana
ctgaaagtggcatgacctgcaacactattcatcagcaagctatgaacttatccatgctctaatactactctttcaaaactataatttggtaagatcataaaacaggaatcatgagctcaagcaataactctaactactccacaagattatgttaccaaaccaaacaaacctattatcagatcatctataccggttccttcaagatctcatctttctcgatttctcttctaacttgtgcataattcgtaacaatcgaacactaaagataaagcattgagaagcaaaccaaccgaatactgcaacagaaagccagcgaagagctccttgggcatcgataaagcgccacgaagatcatcaagggtcaaagtcattcccattccaagcatagtgatcgtaagacctaccatggtccaatttggagtaacccaattgaaagtacttggtctcatcagtcccaacaagcatcccagagaaacccatatcggaaacgccgtcgaaaccgcctctcccacaaactcaacccactccccaaagctcttctttttctcagtaggcaaatcgttcgacgaaatgccgcaacgaggaacgaagtcaaacctactacgcctacacgaaataggaacagtagattgagttttgagagaaatttcgcgactcgagggagagtaagatagtctagaacaagagatagttcgaagatgaagtggagtgagtctagatttgtggagcgaattcgatttcaaaggcgttgctccgtttaagagagaaagagaaatcgccgacgccattttcggacgcgtgggtcgacccgggaattccggaccggtacctgcaggcggccaggctttccctatatgagtcgaatagtgccgg

SEQ ID NO: 119454 - DNA, 426 bp, Arabidopsis thaliana
gggggggacggacggagaaagcaaaatcaaagttgtgatgaaatctctattgatgagaaccggttcgatgccggttcttcaaaaccggttaatttcaggtggttcatcgcggaagatgacgcctatctccaggaccaactccgtcgaatcattatccagctacggcgagagattcgccggcgggaagatttcgatcgaggttaaggctaatgtagggatgcggagggtgttatcggaaagtgatgtgattagatctgagagaatgttgaaaagagttggatctaagccttcgccggcgagaatcccggaggatgatgaagcgggggaggaagaaattaggtttgcagatggttgggggtctatgatctccggtggtttacctgtggaggagaaatgtttcacgggtggcggtgttggtggtggatc

SEQ ID NO: 119455 - DNA, 1055 bp, Arabidopsis thaliana
aataaaaagaagcatcttctagagagagacatattgagaaagagagagaaagctttagggtttcaaaaaaaaaaaactgagaccctttagaaatctcctaacaggaatttttttctcaatcgctatagaaaatgggagtcatgatcaatcaccatttcctcgcttttatcttcggcatcttaggaaacgtgatatccttccttgtattcctcgctccagtgccaactttttatagaatatacaagagaaaatcgacggagagtttccagtcgctaccgtaccaagtgtcgctatttagctgcatgctatggctctactacgcattgattaagaaagacgcttttctcctaattaccatcaactcctttggctgcgtcgtggagactctctacatagccatgttcttcgcttacgccaccagggagaaaaggatatcggctatgaagttgttcatagcaatgaacgttgccttcttctcgttgattctaatggtaacacatttcgtggttaaaactcctcccctccaagtctctgtactcggctggatttgtgttgccatttctgtttctgttttcgctgcccctctaatgatcgtggctcgtgtgataaagacaaagagtgtggagtacatgcccttcacgctttctttcttcctcactataagcgccgttatgtggttcgcttatggtttattcctcaatgacatatgcatagcgattccaaacgtggtgggattcgtactagggctgttgcaaatggttttgtacttggtttacaggaactcaaatgagaaaccagagaagattaattcgtcagaacaacaacttaagagtattgtcgtgatgagtccgttaggtgtgtcggaagtgcacccagttgtgacggaatcggtggacccgctctctgaagccgttcatcatgaggatctgtccaaagttactaaagtggaggagccgtcaattgaaaacggcaagtgctacgtggaggctactcgtcctgaaaccgtttgaagtgtcaatatgtgaagctcaaaatatagctctctctctctctct

SEQ ID NO: 119456 - DNA, 1104 bp, Arabidopsis thaliana
tatacgactcactaagggaaagctggtacgcctgcaggtaccggtccggaattcccgggtcgacccacgcgtccgcccacgcgaccgcccacgcgtccgcttctcttcttcttcttcaagccgcggctaaagatccctacttctctcgacacttatagagtttcagtcatggccgcctccgcagaaatcgacgctgagattcaacagcagcttaccaatgaggttaagctcttcaaccgttggagctttgatgacgtttcggttacggatattagtcttgtggactacattggtgttcagccatcgaagcacgcaacttttgttccccatactgctggacgatactctgtgaagaggttcagaaaggcgcagtgcccaattgttgagaggctcactaactctctcatgatgcacggaaggaacaatggtaagaagttgatggctgtcaggatcgtcaagcacgccatggagattatccacctcttgtctgacttgaacccgattcaagtcatcattgacgccattgttaacagtggtccacgtgaagatgctaccaggattggatctgctggtgtggttaggaggcaggctgttgatatctctcctctaagacgtgtgaaccaagcgatcttcttgcttacaactggtgcacgtgaagctgcctttagaaacatcaagacaatcgctgagtgccttgctgatgaactcatcaatgctgcaaagggatcttccaacagctatgccatcaagaagaaagatgagattgagagagttgctaaggccaatcgttaagggatctccctttcctctaagtttgcattatatcaaagagtttttgtgttgtttccattagctttggatatgtttcagatgatctctctatctttaatgaaattttgacgcttataatcgacttgggatcttgatcatcaaacggtttcatatttaaaattatttcatctatatatttttcagtttaaagtgcttaaaaaaaaaaaaaaaaaaaaaaaaaaaaaaaaaaacaaagggcggccgctctagaggatccaagcttacgtacgcgtgcatgcgacgtcatagtaattctatagttgtcctaaatag

SEQ ID NO: 119457 - DNA, 922 bp, Arabidopsis thaliana
  unsure (1)..(922): unsure at all n locations
nnnnnnnnnnnnnnnnnnnnnnnnnnnnnnnnnnnnnnnnnnnnnnnnnnnnnnnnnnnnnnnnnnnnnnnnnnnnnnacgaccacgcgtccgctcgttttctctgccgtctctctcattcgcgcgacgcaaacgatcttcagccatggccaccgccgcagatgttgacgctgagattcagcaggcgctcactaacgaagtcaagctcttcaaccgctggacctatgacgacgttacggtcacagacatcagtcttgttgactacattggagttcaggcagctaaacatgctacctttgttccccacaccgctggaagatactctgtgaagagattcaggaaggctcagtgccccattgttgagaggctcaccaactctctcatgatgcacgggaggaacaacggtaagaaattgatggctgtcaggatcgtcaagcacgccatggagattatccacctcttgtctgacttgaacccaattcaggtcatcattgacgccattgtcaacagtggtccacgtgaagatgctaccagaattggatctgctggtgttgttaggagacaagctgttgatatctctcctctaagacgtgttaaccaggctatcttcttgattaccactggtgctcgtgaagctgctttcagaaacatcaagactatagctgagtgccttgctgatgaattgatcaacgcagccaagggctcttccaacagctatgccatcaagaagaaggatgagattgaaagagttgccaaggctaatcgttaaggattttccctttgccctgtgcgttacaatctcgtatcaatgagtttaatgttttatcttcatttagattgaaatatgtatctcagatgtttgctctnttggtttatgaagtttatttcgtctgaactactttgaatagataaaattttgatg

SEQ ID NO: 119458 - DNA, 368 bp, Arabidopsis thaliana
cggccaagaggctctccaacttctcaattgcgtcgcggagtctaatttcgatcaagagaaatgcgtccgatttttgcaatctctcagagaatgcgttctatcaaagaaagtaaagaagttctcgataccgagtcaagatcacgactctgagggagcagcttcagctacaaagagaccttcataacgttctttgttccgattttcttttatcgtttgagttgtaatcatgtaattgattttaatgtcatgccttggattcataagctgggtcatgccttgtttcccctttgttgtcttgtatgttgaatattgcaaactctaaagagcatatttataagaagaaataaaagtttctacatttgactttc

SEQ ID NO: 119459 - DNA, 903 bp, Arabidopsis thaliana
  unsure (1)..(903): unsure at all n locations
cgattaaannnnnnnnnnnnnnnnnnnnnnnnnnnnnnnnnnnnnnnnnnnnnnnnnnnnnnnnnnnnnnnnnnnnnnnnnnctttttttttttttttgtaagaacagatcataactcaaatcaacaatcacaaaacaaacctctaaaaataagcaatacagttttccagttcctcctatacatccaatgagaagaaaacaaaatcatttatgtgctaaaaagataacaaaaatagaagatgataaaggaaaagatcaacaagtagttgagccgaagaacctaagaagtagaaaagcttcaaacttagaagacctttttttcactaagatagtttaaaacactaataatcagctcgtagaaatttctcgtactcagtcccattcaaagtcttgtttatatcttcccaattctttatatgatctgacaaatctcctctatgtattttcacctgtctgcttgacaaatccttcactggaatgttcaaaaactcttgaacttgtttcaatgtcgtttgatttgttatgagatcttcgtagaagacaacaatatgacgagtggtattgaaatattctaaagcctttgcagctgaattctctgtttcttgtaaatcgtggatcaacgatgtcgagttgattaccggcttatatctagaaagtgcatctgcctctgcaggagaatgaacatgagacttatgagttccattcaaaagcttagcataacggtcataagaatttgccaacacagaaaccattcttcttaaaggattccttctaaacagaaatatcgcagagacgcctcttcggttaatgttctgctgctcggacgcgtggnnnnnnnnnnnnnnnnnnnnnnnnnnnnnnnnnnnnnnnnnnnnnnnnnnnnnnnnnnnnnnnnggagagct

SEQ ID NO: 119460 - DNA, 776 bp, Arabidopsis thaliana
  unsure (1)..(776): unsure at all n locations
ccnggcccttggtgggccccattgggggggncccaggntttncnccgngttccaaaaggttgggggtagcnttccccatcnccaggtcttcctaaaanaaggggatgggtccccaattttataccaatancctaattttgntccccattaaaanaaaggttccaggaagttatttgtaattaagntcatagtcgaatcttccatattcaaacagatttgcataccaacatctagatatttttttggtgaacttgaatctaattaggttctttcatttagggaaaagaggataaaatttaggaaatagaaatgatccagatttagtatggctaccaaaaaaattaaatgtttgaattgagagttcgttcatacgtcaagattttttggatcttttgaattgttggaaaaatcaaaatcgtgaatttgtttaagacagtattaagaattttatcgaaaacttacagcggcttgccaaacaaaggctaagagaagaaagaaaagaggtattacgggcataacatctacgattggattcaaaaaggcgtaggcctctggcaatttggcgactaaaaaagtgcttgaaaaaagggtagaattaaaaaaaatacagatcaaattaaatatattaagcataacaaaaattggtgttcttgtggataatttaattttgattgagtttttaatatattttttatataaggaaaaaataaagaaagatagtctaaaaagactttgttgaacttactcaatcaaaaatccttttattctcttatgag

SEQ ID NO: 119461 - DNA, 952 bp, Arabidopsis thaliana
  unsure (1)..(952): unsure at all n locations
aaaaaaccctaatcttctcgggcttgtcatctccaaaattcagggttcaatttcttcaccatagaagatatagcgttatctccggcgtctaaggggactttagggacattcttgtggtggagaaatgggagacgaccagctagatttcgagctcccagaagaggttttgtcggtgattccgatggacccttttgagcagctggatctcgcgaggaagattacatcaatggcgatagcttcaagggtgtcgaatctggactctgaggtggttgaattgagacagaagcttctgggtaaggaaagtgttgtccgtgagcttgaggagaaagcgtctcgcctggagagagactgccgcgaggctgattcgagattgaaggtcgttctcgaagataatatgaacctgacaaaggagaaggattcactggcaatgactgtaacgaaactcacccgtgatttggctaagctggagacattcaagcggcagttaatcaaatccctgagcgatgagagtggtccgcaaacagaacctgttgatattaggacatgcgaccagccaggntcatatccaggcaaagatggaaggntcaatgcacactcaattaaacaagcttacagtggatctacagacacgaacaatccagttgttgaagcttcaaaatacactggaaacaaattttcaatgacatcatacatatctccacgtcttaccccaaccgcaacaccaaagntcatctccacaagtgtgtctcctcgaggctattctgcagcagggttcttcctaaaaggaccatcaggtgcagttnttccncaaangggaacactntggtcccgtnnagtnagcattatnggttgggnttttctcctngaaccgaaattccagnttgncncggggtggtngaaaggttttccggaagccgggcggtttctttgnaatngtcctttgtaatangtt

SEQ ID NO: 119462 - DNA, 806 bp, Arabidopsis thaliana
cggacgcgtgggtttatacatccccatttatatgtttggtaacgccgactctgtgaagcggtttgcagcactcctttcctttcccccacaaactaaacaaaaaaccattcacaaaaaaaatagagagaatcatctgagagagtagtagtgatgatatgatcgcttcttctcctacaatctcagaaacctccgatcacggttttagatatcttctacaacggatacaatggagagcaccgattcttccggtggtccaccaccgccacaacctaaccttcctccaggcttccggtttcaccctaccgacgaagagcttgttgttcactacctcaaacgcaaagcagcctctgctcctttacctgtcgccatcatcgccgaagtcgatctctataaatttgatccatgggaacttcccgctaaagcatcgtttggagaacaagaatggtacttctttagtccacgagatcggaagtgtccaaacggagcaagaccaaacagagcggcgacttcaggttattggaaagcgaccggtacagataaaccggtacttgcttccgacggtaaccaaaaggtgggcgtgaagaaggcactagtcttctacagtggtaaaccaccaaaaggcgttaaaagtgattggatcatgcatgagtatcgtctcatcgaaaacaaaccaaacaatcgacctcctggctgtgatttcggcaacaaaaaaaactcactcagacttgatgattgggtgttatgtagaatctacaagaagaacaacgcaagtcgacatgttgataacgataaggatcatgatatga

SEQ ID NO: 119463 - DNA, 567 bp, Arabidopsis thaliana
  unsure (1)..(567): unsure at all n locations
cagctctccacgactcactatggggaggctggcccgcctgcaggtaccggtcccggattcccgggtcgacccacgcgtccgcaaattccttgatagaaacaaaatggaagacaataaaagaaaagtattagatgaagaagcgaaagcttctctagacatatggaagtatgtctttgggtttgcagatatagcagctgcaaagtgtgccattgatcttaaaataccagaagccattgaaaaccatccttcttcacagcccgtaacactagccgaactctcctccgccgtctccgcctctccctcgcatctccgccgtataatgaggtttcttgtacaccaaggaatctttaaagaaatccccacaaaagatggtttagctacaggctacgttaatacgccactctctcgccgtttgatgatcacaagacgtgatggaaaatcgctggctccttttgttctcttcgaaacaactcccgagatgctcgctccatggttgagacttagctcagtcgtttcttcgccggtcaacggttcaactccaccaccgtttgatgcagtgcacnnnnn

SEQ ID NO: 119464 - DNA, 1245 bp, Arabidopsis thaliana
  unsure (1)..(1245): unsure at all n locations
aaaaaaaacaatacatctttccattgaactagaataaaacattttcactgtccttttgaatcagaagaagaaagagaaaaaaaagagatggagagaaacacgccggtgagaaaccctcacacttccaccgccgatctgctttcttggtcggaaactcctcctcctcctcaccactcaaccccttccgccgctcgttctcaccagccgtccgatggaatcagcaagattctaggcggtggtcagatcacagatgaagaagcccagtcgcttaataagctaaagaattgttcagggtacaagttaaaagagatgactggtagtggcatatttactgataagggaaaagttggatctgaatccgatgctactactgatccaaagactggactccgttactatcagcagactctgaatggaatgagtcagatatctttcagtgctgacggtaatgtttccccgaagaaaccaaccactttaaccgaggttgcaaagcaaagagagctgagcgggaacttgctaaccgaggcggatttaaagagcaacaagcagatatcaagtgctaagattgaagagatcagcggtcatgacatctttgcacctccatctgagattcagcctcgatctttggttgctgcacagcaagaagctagaggtaacagagacatgggagagcctgcaccaaggaacttacgcacttctgttaaagtttccaaccctgcaggaggacaaagcaacatactattcagtgaagaacctgttgtgaagacatcaaagaagatacataaccagaagtttcaggaactcccaggcaacggcattttcaaaggcgatgaatcacctggtagtgcggataagcagttaagctcagctaaactccgtcaaatgagcggaagcaccattttcgcagacggaaagtcagagtcccgagactactttggcggcgtgaggaaacctcccggaggtgaaagcagcatttcattggtctaataagtaagactcggggctgtatggtattatccgcgcatatgctcaactctcacatttcagcttctttagaatttagtttcttagagtctgaagagagctcattgtacggatcctttaaaaccttttggtgttgtctctaatacttgaagtttcttacctgtttctcaaaaaaaaaaaaaaaaagnnnnnnnnnnnnnnnnnnnnnnnnnnnnnnnnnnnnnnnnnnnnnnnnnnnnnnnnnnnnnnnnnnnnnnnnnn

SEQ ID NO: 119465 - DNA, 710 bp, Arabidopsis thaliana
ctcataacaacaaaaaaacaaaaaaaaaacctaattagttttttctttctgcagagattatggaggtaccggtgattaatagaataagagatttcgaagttggtataaactcgattaatgatccttcgtttctttctcgatctgttgctgtttccggaatcggaaagctacaccaagcttatggtttttggaaatggggagctttgattatcgcatttctagcttatttcaccaactttgttagtaaactcaacagtctagttgttaggttaagaaaaatagatgtctctgtttcctctccaactctttttgatgattacgatagcgattccgatgtttcttgttcctctaccgtctcctctgacgatgaaaaagacgaagaagatgaggctgatgatgaagatgaggatgttgactcgatctttaatcgaagacgagtcaacggaggtttccgcgttagaggatctgattattacgatgatgatgatgatcagggagacaatggtaattgcacatggatggggaggcgatatagtggtagttttggagatttgttctcatggcctgatcttggtgggattggttcgagtggagtcgtgaagctttgggatcatttagatatcgatggcgatgatcatgagaatgttgtggcaacgtttctcaagaactataactcaacctcgtcaccgtttttttgggcggcggagaaa

SEQ ID NO: 119466 - DNA, 796 bp, Arabidopsis thaliana
  unsure (1)..(796): unsure at all n locations
cgnnnnnnnnnnnnnnnnnnnnnnnnnnnnnnnnnnnnnnnnnnnnnnnnnnnnnnnnnnnnnnnnnnnnnnnnnnnnnnnnnctttttttttttttttactttcatgaaaagaaatttattattattattattgaaacttagaattctacaatgtgcaatggaaaaaaattataagtctacttcgtaaatttgaaattctaataattctatactattctatgactatatagatatatatatagaattaaggttatgttttatttatttaatgatgaatgatagtcactatttatgtgagctatattctgttctagaatatatagaatatcattaattctaactagataaggaaaaatattaatagaatagttaattgatacgatctagtagtttagtgaatttgtatgcatgcgctattttatttgagcccgcttagctcagaggttagagcatcgcatttgtaatgcgatggtcatcggttcgattccgatagccggcttttccatattttttcgtttttttttacatgatttttaatgtactttcaaaatcaaagaagattgaaaagacttctttgacctttttccaagagttaccactccatttatattatgtcatataaacttccatattaggaatatatattgggtaaaagagtttgatctttgcaaaattaatcaagaaaataaaggaaaatttttcggacgcgtgggtcgtcccgggaattccggaccggtacctgcaggcgtgccagctttccaaatagtgagtcgtatgtgagctggaagaatcat

SEQ ID NO: 119467 - DNA, 1425 bp, Arabidopsis thaliana
aatagttaattgatacgatctagtagtttagtgaatttgtatgcatgcgctattttatttgagcccgcttagctcagaggttagagcatcgcatttgtaatgcgatggtcatcggttcgattccgagagccggcttttccatattttttcgtttttttttacatgatttttaatgtactttcaaaatcaaagaagatggaaaagacttctttgacctttttccaagagttaccactccatttatattatgtcatataaacttccatattaggaatatatattgggtaaaagagtttgatctttgcaaaattaatcaagaaaataaaggaaaatttttgtgatttagttgatttatatatattgtatatacaataaaaaaaatctgtatattgagagaatatatcttcttactctttgtattccaatagtggagtgtatttcacgtcatttatcattatcatttagttcagttttaattttatttagttttgtacaatttcaatcaaaaaaggagtctttatgtcacgttaccgagggcctcgttttaaaaaaatacgccgtctgggggctttaccgggactaactagtaaaaggcctaaggcaggaagcgatcttagaaaccaatcacgctccgtaaaaaaatctcaatatcgtattcgtttagaagaaaaacaaaaattgcgttttcattatggtcttacagaacaccaattacttaaatatgtgcgtatagccggaaaagccaaggggtcaacaggtcaagttttactacaattacttgaaatgcgtttggataacatcctttttcgattgggtatggctttgactattcctcaagcgcgccaattagttaatcatggacatattttagttaatggtcgtatagttgatataccaagttatcgctgcaaaccccgagatattattacagtgaaggatgaacaaaactctagaactttggttcaaaatcttcttgattcatctgcccctgaggaattgccaaaccatctgactcttcacacattccaatatgaagggttagtcaatcaaataatagataggaaatgcgtcggtttgaaaataaatgaattgcttgtcgtagaatattactctcgacagacttaataaacctaacttaagtaaaaaaaaaaattactaaaaacaagagttcggacaactccccttttccattaaaaataaaaaggcacaaggtaagggattttgtcaaagaatatttttcctattcatgtatcatagattggtagggagattgggatcccttgtttgctcttcccagcattttccatatggaaggaaatttggggtagagaatctatttcaaaatcaaaacaaggtagatcttatatcgattcttttttattggatttgatacattgtggtcaatcacgtaagattggtgaattt

SEQ ID NO: 119468 - DNA, 654 bp, Arabidopsis thaliana
  unsure (1)..(654): unsure at all n locations
acgccatgagaggagctctcttgagaaatgcatctctctgcgctcgcagaatcattctttctcctcgtataacccatcagatctcccccaatgttccctttctcgctccaatcgccgctcctgctgctcccaagttcagatttttctcctccgaatccggtgagaactcgactacggcccctgagtcttcgccgactgattcacccgagaagaaagatctcgttgtagaagatgtaagcaacaaagagcttaaaagccgtatagagaagtatttcaatgagggtaatgaagatgctttacccggagttattgaagcacttctacagagaagacttgtagacaaacacgcagagactgatgatgaattgttggaaaaaatcgagtctctacctttcaaagatgatgtcaaggatgaagattttgaatccgatttcgaggaagcacattctactgacgaagaacttgaggatttgtacaattctcccgagtatgtagctgaaaagatgaggaagaatgagtttttcaacatggatgataagaagtgggatcacatggttagagaaggtatccaccatgggnggcttactgntaccttaangantncgnnggnggtnctttnggggttttccccaaatngggcccccnttttttccc

SEQ ID NO: 119469 - DNA, 409 bp, Arabidopsis thaliana
  unsure (1)..(409): unsure at all n locations
ccggnncggaaancccggggcggcccaacccgtccgtttttgggtttgccttgaaagtgtttgtgtttttgcctctgagaaaaaatctttgccgactggtaggttcgggactatccgtgaatgggtttatgacgctatctctgctcaacgcaatgagctcctctctcttttctccagatatgtagcccagggaaaggggatattgcagtcccaccagctgattgatgagttccttaagactgtgaaagttgatggaacattagaagatcttaacaaaagtccattcatgaaagttctgcagtctgcagaggaagccatagttttgcctccatttgttgctttggctatacgtcccagacctggtgttagggaatatgtccgtgtgaatgtgtatgagctgagcgtagat

SEQ ID NO: 119470 - DNA, 966 bp, Arabidopsis thaliana
ccggggccacccacgcgtccgcacacgcgtccgcccagagtagcagaatctgatccatcccacctttttcaattctcaggcaaagataagtcaaacttgaaaaaatggaagggactgtgttcacgccttgtttggaaggaatgaagcatgtcaaatctgatcaaggcgagatgcttactaagccatttttagagctttgcaagaccatcttgcctgttatagataaatttggagctgctatgactctcgtgaaatctgacattggtggcaacataacgaggttggagaagaactacttatctgatcccgacaagttcaagtacttgtacacctttgttcaagtcgaaattgagtctaagatagcaaaaggatcgtctagctgtacaaacggtcttctctggttaaccagagcaatggatttcttagtggagctgttccgaaacttggtagcacatcaagactggtcaatgccacaagcttgtgctgactcataccaaaaaacactcaagaaatggcacggatggctcgccagctctaccttctctatggctttaaagctagctccggacaggaagaagttcatgcatgtcatatctggttctggtaacatccaagccgacatggaaaggttttgtgctgagtttggtccgtttcttcatgataatcataagtttctggctagcgtcggtatggatgacatgaaagcttcttaagtcatcatatgattatcgccggtatcaaatcttctttgccggaatctttgtctgttttaacttttctccttccaattatagaacctccaaaaagaaacagaataatgtggttggtttctatctgaatgttcactttatattacaagttataacatacgaatcaatcttatcaactctcctggttaatggttggtatgaaacctggaacctttctttcaaaactcaaagaaatttattccaaaaaaaaaaaagc

SEQ ID NO: 119471 - DNA, 413 bp, Arabidopsis thaliana
cccagagtagcagaatctgatccatcccacctttttcaattctcaggcaaagtgtttgatctcatattcagataagtcaaacttgaaaaaatggaagggactgtgttcacgccttgtttggaaggaatgaagcatgtcaaatctgatcaaggcgagatgcttactaagccatttttagagctttgcaagaccatcttgcctgttatagataaatttggagctgctatgactctcgtgaaatctgacattggtggcaacataacgaggttggagaagaactacttatctgatcccgacaagttcaagtacttgtacacctttgttcaagtcgaaattgagtctaagatagcaaaaggatcgtctagctgtacaaacggtcttctctggttaaccagagcaatggatttcttagt

SEQ ID NO: 119472 - DNA, 861 bp, Arabidopsis thaliana
  unsure (1)..(861): unsure at all n locations
gcttctgctttctttgtgactcagactttgcgtgctttatcacgagatggaaggacggtgatagcatcgatccaccaaccgagcagtgaggtttttgagttgtttgatcggttgtatctgctttctggaggcaaaactgtttactttggtcaagcttcagatgcatatgagttctttgcacaagctgggtttccatgtcctgcgttaaggaacccttctgatcatttcctgagatgcataaactcagactttgacaaagttagagccactttgaaaggttctatgaagctaaggtttgaagcaagcgatgatccgttggaaaagatttccgcggccgcggcggttagactattggttgactattaccacacttctgattactactacacagcaaaggctaaggttgaggagatatcccaatttaaagggactattcttgactccggaggcagccaggctagtttccttctgcagacctacactttaacaaagcgatcattcatcaacatgtcaagggactttggttattactggctcagacttctaatttacatcttggtcacagtctgcattggaaccatctatctgaacgttgggactagctacagcgccattctggcacggggctcatgtgcgtctttcgtctttggctttgtaacattcatgtcaattggtggatttccttcgttcgttgaagacatgaaggtcttccaaagagagagactaaacgggcactatggagtagctncgtttgtgatagccaacacattatctgcaacaccattcctgatcangataactttcatctccgggacantctnttacttcatggnngggtctgcatccaggnttcantcacta

SEQ ID NO: 119473 - DNA, 398 bp, Arabidopsis thaliana
agttatgtttcccaatctgataattatccgtatcgatggccgtgagttttccagattttctcaagttcacaagtttgaaaagcctaatgatgagacatctctaagtttggggaattcatgtgcatcttcggttttagtagagtatcctgatatagtctttgcatatggatatagtgacgagtacagctttgtattcaagaaagcatcaagattctaccagagacgagccagtaagattctgtctttggtagcctcattttttgctgcggtctatgtaacgaaatggaaagagttctttcctcatacaagaattagaatatgctccttcatttgcttcaaaagttgtaagttgtgcatcggtagaggttcttcaagcttaccttgcgtggagacaacat

SEQ ID NO: 119474 - DNA, 669 bp, Arabidopsis thaliana
  unsure (1)..(669): unsure at all n locations
cccccctagacttcgacggtatcgataagcttgatatcgaattcgcggccgctaggtcgacatgcctggtacagtggtgtatggtgattacgtaattgaaaggaacaatgccaacggttcagattcagacgagggtggtgatgatgatgggatcgatgctgcatttggtaggaatcttgtgaatgttttccttctgttacatgcttttggggcatcaggtaatcagatcagacgctctgattcagattcgaatgactcgacaacaatcaaccgaggaacaagtgagctgaatttctctgaagaagaagaggaagaggaggaggaggagaggcatagtaacagtaactctttggcaagtcgaatgaggcgacaaggacgcgttctgctgggacgttcaggtaggagacgtagagatagagaagctaaccagaacaccagggcctcctccctagatgagagagaatcacaccggattcaaaagaaaaccctgtctgattttggggttccagggaagctttatgggatgggtagggccaatgtagttccgccaagtttaaacccaaccaaaaaagggtttngccttctggaannccattgngaattttggnattnncccnatcntcaatnctgnaacagggtnanccncggttattccgnacccgggnnnnc

SEQ ID NO: 119475 - DNA, 884 bp, Arabidopsis thaliana
  unsure (1)..(884): unsure at all n locations
ttggagaaggcttgagatcgagcatgaccgggacgatgttatgagcacgattaggtcgacaatgcctggtacagtggtgtatggtgattacgtaattgaaaggaacaatgccaacggttcanattcagacgagggtggtgatgatgatgggatcgatgctgcatttggcaggaatcttgtgaatgttttccttctgtnacatgcctttggggcatcaggtaatcagatcagacgctctgattcaaattcgaatgactcgacancaatcaacccgaggaacaagtgagcctnaatttntnttnangaaggangaggnaagaggaaggaggaggagagccatagtaccagtaactctttggcaagtcgaatgaggcgacaaggacgcgttctgctgggacgttcaggtaggagacgtagagatagagaagctaaccagaacacaggtcctcctcctagatgagagagaatcacacgaattcaaaagaaaacccctgtctgattttgggtttcaggtaagctttatggtatggttaggtacaaatgtagtttcgacaagtttaaaacaaaacaaaaaaaggcttttggcctttctgctatcaccattggagaatttgggaatttgactcgaaattctttcatatgctagagaagcaggcttgcaatctcatgttttatttactgtattctgatgtaactttctgggtggaaaattcacaaatatctatccttgtgaataagcatgatcagtgatgatgaccaatgaagtcttttagcgaattatgaaattgtgtttccttgtgtttatagattccatgtgcgcttagagacttacctatgaatcgttgtagagtcttctaagagacttagaccacacacactcacaa

SEQ ID NO: 119476 - DNA, 727 bp, Arabidopsis thaliana
  unsure (1)..(727): unsure at all n locations
cccacgcatccaagaaaagaaaagaactgtcttttctgtatacttatgtttactttccccggttccgttgcgtctgcgggctttacgcaggtgatcggatcatctagatatcccttcaacacaacataggtcgtcgaaaggatctcggagacccgccaaagcacgaaagccataatctttcagaaaatgaattcctattcgaagagtgcataaccgcatggataagctcacactaacccgtcaatttgggatccaattcgggattttccttgagggatattggtaaggaattggaatgtaataatatcgattcataatggattcatatcgatacagaagaaaaggttctctatcgattcaacaagtgctgtacttatgggaaagcgatagagaaagagaaaaaaaaaaacgaagatttcacatagtgatttttttttttttttttgatcaaaaataaatctgattgaatttatttcgtaccccttcgctcaatgagaaaatgggtcagattctataggatcaaacttatgggacttaagaatgatggaagggaataaaatcaaaaaagaaatcaaataaagaaaagagagagaaaataaagaaaaaataagtaattcaaaaaaaaaaaaaaaggnnnnnnnnnnnnnnnnnnnnnnnnnnnnnnnnnnnnnnnnnnnnnnnnnnnnnnnnnnnnnnnnnnnnnnnnnnnnnnnnnnnnnnnnnnnnn

SEQ ID NO: 119477 - DNA, 786 bp, Arabidopsis thaliana
  unsure (1)..(786): unsure at all n locations
tgattacctccaggtcatcnnnnnnnnnnnnnnnnnnnnnnntgcaccnaccggtctttaattcccgggtcgacccacgcgtccccaacctcatcatatatctcccgctaatctttttttctttgatcttttttttttttttgcttattatttttttgactttgatctcccatcagttcatcttcttcttcttcttctgatcaaccatggctgctgctataagtgctgcagtctctttaccttcctccaagtcatcctctctcctcaccaaaatctcctctgtatcccctcaaaggattttcctcaagaagagcacagtgtgttacagaagagttgtgtcagtgaaggctcaggtgacaacagatactaccgaggcaccaccagttaaagtagtcaaggagtctaagaaacaggaagaagggattgttgtcaacaaattcaaacctaagaacccttacactggtcgctgccttttgaacaccaagatcaccggtgatgacgctcccggtgagacttggcacattgtcttcaccaccgaaggtggggttccgtatagagaaggacaatcgataggagtgattccagagggaatagacaagaacgggaagccgcacaagctcaggctttactctatcgcgagtagtgccattggtgactttggagactccaagaccgtttctttctgtgtcaaaggattagtttacacacatttgggccgataaattgttaacggggtccgctcccacttcttagggtacataaaaccgggtgaagaagctcaaaaca

SEQ ID NO: 119478 - DNA, 799 bp, Arabidopsis thaliana
  unsure (1)..(799): unsure at all n locations
cggatggtattttgttaaggtctgcaaattgcgaggttacccaactgcatagtcccggtagccagctggatccctaaccccctgcccttttgtggatggcccaattcgcgcttggcctagtttcaatccccaagttgaaatttccagataatgtggttacgtctcaaggagnattatcctccctcctgtacgcaagggcgtctatgaagcattttcatcccattggaccccctgtcaacctcgggtggagccgaagtacccccaagtatttagcaaggcagccccatcctgttgacccaagcactcggtngaccaccccttgacctctgtgaaggctcgtgtcaatagtgcgggtattgcaagtgctctcattcaacacgagtggaaacccaagtcattcttcccaatctctggagaagtcgacacaaagtcaattgccaagagtgctaaagttggattggctctcgcactcaagccttgaaactgagatggaagaagaagttgcaatagtttttttaaactagtttctttctacgtactctgttttttctctgcttggttcatggtttgagtgggcaactactgatctttcccattttcctgccggatttgtagaagaataaaaaggttgaaaatgatcatcttgagatggtgatggcctcctaaaaaaaaaaaaaaataaaaaaaaaaaataaaataaaacccgcacgccgtggnnnnnnnnnnnnnnnnnnnnnnnnnnnnnnnnnnnnnnnnnnnnnnnnnnnnnnnnnnnnnnnnnnnntgctggcaggatcat

SEQ ID NO: 119479 - DNA, 1209 bp, Arabidopsis thaliana
cccacgcttccgaaaacattttagggttttcctcagtctctctctcttatagacgccaaccacgttttccagctcttgttctttcgattctcagagaagacttttcagaacatcctccaactttctcagataagcaacaatggtgaaaggtcccggtctctacaccgaaatcggcaaaaaggccagagatcttctgtacaaagaccacaacagtgaccagaaattcagtatcaccactttctctcctgccggtgttgccatcacctcaaccggaactaagaaaggtgacttattgttgggagatgtcgcttttcagtcgaggcgaaagaacattactactgatttgaaagtttgcactgattctacttttctgatcaccgctaccgttgatgaggctgcacccggactgaggtcaatcttcagcttcaaggttcctgaccaaaattctggcaaggttgagctgcaatacttgcatgagtacgccggtatcagcacaagcatgggattgactcagaacccaactgtcaacttctctggtgtgattggctccaatgtcttggctgctggtactgatgtttaatttgacaccaagtctggaaatttcaccaagatcaatgcttgtttaagcttcaccaaggaggacttaattcgcctcccttactgtgaacgacaagggcgatctattgaatgcatcttactatcacattgtgaacccgctgttcaacactgcggttggagccgaagtgagccacaagttatctagcaaggacagcaccataactgttggaacacagcactcgcttgacccccttgccctctgtgaaggctcgtgtcaatagtgcgggtattgcaagtgctctcattcaacacgagtggaaacccaagtcattcttcacaatctctggagaagtcgacacaaagtcaattgacaagagtgctaaagttggattgggtctcgcactcaagccttgaaactgagatggaagaagaagttgcaatagtttttttaaactagtttctttctacgtactctgttttttctctgcttggttcatggtttgagtgggcaactactgatctttcccattttcctgccggatttgtagaagaataaaaaggttgaaaatgatcatcttgagatggtgatgaaactctttaaaaaaagaaaataaaaaaaaaaaaaaagggcggccgctcgcgatctagaac

SEQ ID NO: 119480 - DNA, 631 bp, Arabidopsis thaliana
  unsure (1)..(631): unsure at all n locations
agaccggtnccggnaattacccgggtcgaacccacgcgtccgagaacttcctccaactttctcagataagcaacaatggtgaaaggtcccggtctctacaccgaaatcggcaaaaaggccagagatcttctgtacaaagaccacaacagtgaccagaaattcagtatcaccactttctctcctgccggtgttgccatcacctcaaccggaactaagaaaggtgacttattgttgggagatgtcgcttttcagtcgaggcgaaagaacattactactgatttgaaagtttgcactgattctacttttctgatcaccgctaccgttgatgaggctgcacccggactgaggtcaatcttcagctttcaaggttcctgaccaaaattctgggcaaaggttgagcttgcaatacttgcaatgagtacggccggtattcagcaccaagcatngggntttactnagnacccaactgtcaaacttctctgggngtgattggtnccaatggctttggctgttgganctnntggttnaatttgcaccaaggcttggaattttnccaggtcaatnctggntaaggttnccangggggttattncncctntttncnaaaggggttttntganttttttcatgc

SEQ ID NO: 119481 - DNA, 398 bp, Arabidopsis thaliana
ggacgccaaccacgttttccagctcttgttctttcgattctcagagaagacttttaagaacattactactgatttgaaagtttgcactgattctacttttctgatcaccgctaccgttgatgaggctgcacccggactgaggtcaatcttcagcttcaaggttcctgaccaaaattctggcaaggttgagctgcaatacttgcatgagtacgccggtatcagcacaagcatgggattgactcagaacccaactgtcaacttctctggtgtgattggctccaatgtcttggctgttggtactgatgtttcatttgacaccaagtctggaaatttcaccaagatcaatgctggtttaagcttcaccaaggaggacttaattgcctcccttactgtgaacg

SEQ ID NO: 119482 - DNA, 438 bp, Arabidopsis thaliana
ttatcttttaacacttaattacaaaatctttagaatcgaaaaccaaaaggaaaagaaaaaaatgaaagttcaaattttcatcctccttttgataatctcatggcttacaccgaagattacttctcttcctcctgaatctcaagtccttgatcgaagtagttttcctgatgatttcgttttcggaaccgctatatcggcctttcagagcgaaggtgcaacaagcgaaggtggaaaatcgccaactatttgggattacttcagccacacctttccagaaagaaccaatatgcagaatgcagatgtagccgtcgatttttaccatcgttataaggatgacatcaaattgatagaagagctaaatgtggacgctttcagattttcgatttcgtgggccagattaatacccagtggaaaggtaaaggatggagtaaacaaaga

SEQ ID NO: 119483 - DNA, 610 bp, Arabidopsis thaliana
  unsure (1)..(610): unsure at all n locations
cccacgcatccattttctctcattttattgactttccgaatctccaaaaatctaacccaaaaaataaacaatagttttttttttctccgcaaaggaaaaatcttttcttcaccaaataatttgtctctttcgcaaatctcagctctctctcgaagtgcctttcaacgataaatttgtgggctttattcatttatagtgttgttttgatgatgacagattctattaccagaaattgatcaaagagaaaaacgttgctctctcttgatttcttttctgttttttttttttatataattaatttgttccggtgaatgatcgtcgtcttatggaaggttgtagctaatttctaatctatagagagagagagatgggaggttgcgtgtcgacgccgaagagctgtgttggagcaaaactgaggtcaagtaaacgaaggaagagtcgtgccgacgaaaaattcaaaggaagagagccgccgtctcttctcgtcactctgacggatctttcgacaatctcggtcatcaatcatcgcaacttctctaatccccgttttgggcaacctggcganncnnaatggttagcccatttccgggtttaaanaagcntnngtttc

SEQ ID NO: 119484 - DNA, 555 bp, Arabidopsis thaliana
atcaattaaataaaaagaaaaaaattattattatcccttcttcttcttcttcgtccgtgggtttgattctcctgattcatgtcgcttaaatttttagcgatcttcgaatcccattttccttcgggaatctgacattttttctcgggaaatttttttatccaaatcggagtaaagtatcgaatctagagaatccgctatggatgagacctattttgatctattgaatttctttaagaatccctcttttacagagacatttgtcgacatcttactatgcgcagttccgatttggctcgccgttatgatcgggttattaatcggatggtcttggcgtccaagatggaccggtttgatctatttagggtttcgttctaagcttcggtttttatggaccgcaccgcctgggtttggtgctcgtcggctttggcttgctttcaccgctctctctgctttctccgtttgccgaaccatcttggtcaaaggaatgacaccagacgctaataaaatcggcggaccgggttcagcttcgtcgcagacgcctgttgaggataatga

SEQ ID NO: 119485 - DNA, 1458 bp, Arabidopsis thaliana
  unsure (1)..(1458): unsure at all n locations
gcccgnnnnnnnntatacgactcactattagggaagctggcacgcctgcaggtaccggtccgaattattcccggtcgcgagctactagtcggcgggcggccttttttttttttttttgtttaacgaccaaaattcaactaattgtaaatgataaaccgttttttgcggaataaataacttgagaatcttccaacacagaaaacaagaagagagaaaagtaaactggcaggtaattttaataggggacgacgacgaaacacaggacaatataaagaaacataaacttagagagtcgctgcgaccgaccacagtaacccaacgagagcttctctctcagcacttgacctccttcaaaccatgagcgaagtacaaaaatgttgggttagttgaaccctccttgtagtaagcaaagaccaaagtgctgtcatcatgcataccctccccaacaaagaattggaagtcactgagcctggggagcaaaaacttggtagctccctcaatacccttcttgaagacagcttgatcttcttcgctgagcttgggtgtcaaaagcttaatgtatttcttaatgtaagcgatgaatcccttcttgtcataagttggttgctcctgaagtctgaaggtgtcgacaatgtcaacaaccttttgagtagagtcatcaacaccttcatcctcaccaccttcttcagcagatggattggcaccaatgttaacatctacagctcccacagtaacccactttccttctacttcccagaggattccattctcaatctccttgtaagggaaagagtcagacagaagctcatcaccggtgagaagatcttggtacaccaacatggtcgcttattgattgttttctctctccgatggatgcgaataaacgaaaatcgaaggttgcgggagagagacgcccacgcgtccgcccacgcgtccgcccacgcgtccgcccaagcgtcagcccgatgttgtctggttctggctggagaaaggaaagtcctttgaatgcccggtttgcactcagtactttgagctggaagtggttggtcctggtggtcctccggatggtcacggtgacgaagacgatgagcaccaccactgattccggcctctcccttgccgcaaatttttctttttttatttgcacattttcatatctttaaaaattttatgaatggaataaaacaaaatatctcccgttttggtgaaacacagttgaaaatgttttttgatctttttagaacaagactcggcatcagagtttcccaagtgccaaaactcttatgaccgttgtttttatttttgtaacactcttgaatcagaatcagaatcattcttggcttttgcttattatatgattcaccttttattaaaaaaaaaaaaaaagnnnnnnnnnnnnnnnnnnnnnnnnnnnnnnnnnnnnnnnnnnnnnnnnnnnnnnnnnnnnnnnnnnnnnnn

SEQ ID NO: 119486 - DNA, 779 bp, Arabidopsis thaliana
  unsure (1)..(779): unsure at all n locations
cnnnnnnnnnnnnnnnnnnnnnnnnnnnnnnnnnnnnnnaaccggacccggtaattacccgcgcgtccacccacgcgtccgctccgattcagtagagactcctgcgacgaagaaggtggaggatgtaatgcccattgcgactggacacgagaaggaagagcttgaagctgaacttgagggaaggaggctggatgatattgacttccctgaaggtccttttggaactaaggaagctcctgctattgtgaagtcctactatgacaagcgaattgtgggctgccctggtggtgaaggcgaggacgagcacgatgttgtctggttctggctggagaaaggaaagtcctttgaatgcccggtttgcactcagtactttgagctggaagtggttggtcctggtggtcctccggatggtcacggtgacgaagacgatgagcaccaccactgattccggcctcttccccttgccgcaaatttttctttttttaatttgcacattttcatatcttaaaaaattttatgaatggaataaaccaaaatatctcccgttttggtgaaacacagttgaaaatgttttttgaccttttttaacaagactcggatcagagttcccaaggccaaaactcttataccgttgtttttatttttgaacactcttgaatcagaatcaaaatcattcttgccttttgcttattaaaaaaaaaaaaaaaaaaaggctnnnnnnnnnnnnnnnnnnnnnnnnnnnnnnnnnnnnnnnnnnnnnnnnnnnnnnnnnnnnnggt

SEQ ID NO: 119487 - DNA, 698 bp, Arabidopsis thaliana
  unsure (1)..(698): unsure at all n locations
aaaccggncccggnaattacccgggatcgtacccacgncgtccgctcccgattcagtagagactcctgcgacgaagaaggtggaggatgtaatgcccattgcgactggacacgggaaggaagagcttgaagctgaacttgagggaaggaggctggatgatattgacttccctgaaggtccttttggaactaaggaagctcctgctattgtaaagtcctactatgacaagcgaattgtgggctgccctggtggtgaaggcgaggacgagcacgatgttgtctggttctggctggagaaaggaaagtcctttgaatgccccggtttgcactcagtactttcaagctggaagtggttggtcctggtggtcctccggattggtcacggtgacggagacggtttnagcaccaccactgcattccggccccttccctttgccgcaaaatttttcctttttttaatttgcacattttcaaaaaccttaaaaatttntatgnatggntaaaccaaaattttttcccgtttggtgaaacaaagttgaaaatgtttttccacctttttacaagctnggataangttccaggccaaacttttccntggtttttttganacccttnnnnnnnanaaattttccttttgttttaaaaaaaaaaggggcccttngggcncnttggcgggatacnggaagtttntggcccaat

SEQ ID NO: 119488 - DNA, 924 bp, Arabidopsis thaliana
  unsure (1)..(924): unsure at all n locations
taaaaatcgaaaatggattataaggtgaccttcgtctttggttgaccatcaaaaactacaacgctctttctccgtaggaaaggggaagcaaataaattatcgaagcccactggtttcggagctgatcggtctctatttctctcttcatacatatctcaagcagataaagttgatcggatactagaatgggaggaggatttagagttttgcatttggtgaggccattcttggcttttctgcctgaggttcagagtgctgataggaaggttccattcagagagaaggttatctacactgtcatctctctcttcatctttcttgtctgcagtcagcttcctctttatggaatccattccaccaccggtgcggatccattctattggatgcgtgtcattcttgcgtccaaccgtggaactgtcatggagctcggtattactcctattgttacatctggacttgtgatgcaactcttggctggttccaagattattgaggttgacaacaatgttcgtgaggatcgtgccctcttgaatggtgctcagaagcttctaggtattctgattgccattggtgaggctgttgcatatgttctttctggaatgtatggtcccgttggacagcttggtgttggaaatgccattctgatcatccttcagcttttctttgctggaatcattgttatctgccttgatgtactccttcagaagggatatggtctcggatcaggaatctccctttttaattgccaccaacattttntgaaaaggcattatcttggaaaggcaatttaagcccaaactaccattaaaaaccgggcgtggagctgagttttaaagggcgcntgtnaattgcactgnncccanatgcngataanccaagncccaaaaaagnttgggggttnntcccgcaaaggtttttttccgg

SEQ ID NO: 119489 - DNA, 1049 bp, Arabidopsis thaliana
gaaaaaaaatttggccaagatttaagggtggttttaaaaccggttgtttcccttcgttggggttctccaaaggggggttcctcaaaccaagtttctccggcatccaaagaccgggttccccaacccaaaaaatgttcgaaagctggtcttttccgacccaaaagaacttttggagcgttccgctggtgtcggtgaagctcctgaatttgttggagccggtggtgttgaagctggtcttggtggtgtcgccggtggagttggtggtgttgccggagttttgcctgttggcggtgtaggcggcgaaattggtggtatagacggtggtgtaggtggtcttggcggtctaggtggtataggtggtggttcaggtcttggtcatgtagtaggtggaattggtggtgaccctggtattggtagtggtatcggtggactcggcggtgcaggtggtttagacggtataggcggtgttggtggtttgggtggaattgtcggtggaaacgattgcggtggcgtaattcctcaccattgatgttaaacgtttttttttttcgtttttttgctctctataaaccaaagatcggtcgaaaggttcataattattatgttttaagttcttttatcgatgtttatgttttaagtcgtttgttttctatatatgtttcttgttttgtttgttatgctgtttgttattaattacttgtgagaaacttgtgttatcaataaatagtgtttttttttgtttaaaaaaaaaaaaaaaagattcaactaattgtaaatgataaaccgttttttgcggaataaataacttgagaatcttccaacacagaaaacaagaagagagaaaagtaaactggcaggtaattttaataggggacgacgacgaaacacaggacaatataaagaaacataaacttagagagtcgctgcgaccgaccacagtaacccaacgagagcttctctctcagcacttgacctccttcaaaccatgagaaaagtaaactggcaggtaattttaataggggacgaccggacgcgtgggcggacgcgtg

SEQ ID NO: 119490 - DNA, 1330 bp, Arabidopsis thaliana
  unsure (1)..(1330): unsure at all n locations
taggacaactatagaagacnatgacgtcgcctgcacgcgtacgtaagcttggatcctctagagcggccgcccttttgttttgtttttgtaaatgataaaccgttttttgcggaataaataacttgagaatcttccaacacagaaaacaagaagagagaaaagtaaactggcaggtaattttaataggggacgacgacgaaacacaggacaatataaagaaacataaacttagagaggggctgcgaccgaccacagtaacccaacgagagcttctctctcagcacttgacctccttcaaaccatgagcgaagtacaaaaatgttgggttagttgaaccctccttgtagtaagcaaagaccaaagtgctgtcatcatgcataccctccccaacaaagaattggaagtcactgagcctggggagcaaaaacttggtagctccctcaatacccttccttgaagacagcttgatcttcttcgctgagcttgggtgtcaaaagcttaatgtatttcttaatgtaagcgatgaatcccttcttgtcataagttggttgctcctgaagtctgaaggtgtcgacaatgtcaacaaccttttgagtagagtcatcaacaccttcatcctcaccaccttcttcagcagatggattggcaccaatgttaacatctacagctcccggctcgagctcgaccccctttcccggacgcgtgggtcgacccacgcatccgctccgattcagtagagactcctgcgacgaagaaggtggaggatgtaatgcccattgcgactggacacgagaaggaagagcttgaagctgaacttgagggaaggaggctggatgatattgacttccctgaaggtccttttggaactaaggaagctcctgctattgtgaagtcctactatgacaagcgaattgtgggctgccctggtggtgaaggcgaggacgagcacgatgttgtctggttctggctggagaaaggaaagtcctttgaatgcccggtttgcactcagtactttagctggaagtggttggtcctggtggtcctccggatggtcacggtgacgaagacgatgagcaccaccactgattccggcctctcccttgccgcaaattttcttttttttaatttgacaatttccataccctttaaaatttttatgaatgggataaaccaaaatatcttcccgttttgggaaacacagttgaaaatgttttggcccttttgccaacccggatcaagtcccagcccaaatcttgccgtgtgtttttggaccctgaccaccactctttttcccttattttaaaaaaaaaangggccctttngccncttg

SEQ ID NO: 119491 - DNA, 625 bp, Arabidopsis thaliana
  unsure (1)..(625): unsure at all n locations
ncgcaggacgcccgggggaggaagaaataataaccattttgggagaagtgttcttcgctaatccttcaaggtgtgacctgagaatcacaacacaaaacaatctcactcgaaattcctttgactcatcatcatcaccatgtggagaagaatcgtctcctctcagctcaaaaccctagccgccgatgtcgtcgctgcttctcctcgtcgatcgatagccgccaccaccagacctgtcggtttctatctcgccgccaatcgatcagccatttccgcatcttctttcgttatccctcgtcgtttcagctccgattcagtagagactcctgcgacgaagaaggtggaggatgtaatgcccattgcgactggacacgagaaggaagagcttgaagctgaacttgagggaaggaggctggatgatattgacttccctgaaggtccttttggaactaaggaagctcctgctattgtgaaggcctctttgcaagggaatttttgggtttccctgggtggttaaaggggaggccgggcangattttttnttggtttctggctttgggaaaggaagcccttttaatccccggtttactagaatttagntgaagggttgcctggggcccgatntngc

SEQ ID NO: 119492 - DNA, 964 bp, Arabidopsis thaliana
gccccccttccttagcctggattcttttaaaccggccgcccttttttttttttttttaaaaaggcaagcttgagaagtttccccccaaataccccaaaaggtaccgcccaaactccacctaatggaaaatgataacccgttttttgcggaataaaaaactggagattcttccaccccagaaaacaggaaaagatttttttttccgggcaggaaattttattaggggacgacgacaaaccacaggacattttaaagaacctttaaccttaggagagtccatcttggcgaacccggaccccacaggtaaaccacaacgggaagaggcttcttcttttcaggcactgtgagcctccttgcaaacccatggagcgaaagtccataaattgttgggttaggttgaaccctccttgcggtaagcaaagaccaaagtgctgtcatcatgcataccctcccccaacaaagaatggggaagtcactgagcctggggagcaaaaacttggtagctccctcaatacccttcttgaagacagcttgatcttcttcgctgagcttgggtgtcaaaagcttaatgtatttcttaatgtaagcgatgaatcccttcttgtcataagttggatgctcctgaagtctgaaggtgtcgacaatgtcaacaaccttttgagtagagtcatcaacaccttcatcctcaccaccttcttcagcagatggattggcaccaatgttaacatctacagctcccacagtaacccactttccttctacttcccagaggattccattctcaatctccttgtaagggaaagagtcagacagaagctcatcaccggtgagaagatcttggtacaccaacatggtcgcttattgattgttttctctctccgatggatgcgaagcggcaaagaataaaatgcagcccgggggatccactagttatagagcgcccgcccccgcgggggggccagct

SEQ ID NO: 119493 - DNA, 627 bp, Arabidopsis thaliana
acatcgttgttctctgctaacgagagaatgtcagagtaaaaccggtatggactactctgtttctgactccttgaattgtaagagataacacagccaaatgattcaagtcttttagcaacaaatgatccaatgctccccaatccaactatcccaactctcttcccacttaccttggaccctaattgaaaatccccaaatttcgcccaattaccagcccggacgtaacgatcggcggcaggaatacgacggagaacgctaataagcaaaccgacggcacaatcagcaacgtcatcggaaaacgcgttgccagcgttggtgataacgatgccgcgacgcttgcatgcggcgagatcgatgtgatcgatgccgacgctagtgcagacgagtatctggagagaagggagatgagaaaggagttcttcggttaccggaagtctgccgctgataacgaaggctctggcggaggaggcgtgacgggggaggaagctcgggagtgattccgatgaggaagtgtcggtgatgagagtacggaattcacgagtcagaatctcgtccatgaaagttagagacggtggtcggtgaaggagagcacaaccggaggctctgaagattccgccattgtttttt

SEQ ID NO: 119494 - DNA, 846 bp, Arabidopsis thaliana
  unsure (1)..(846): unsure at all n locations
gaagagctttgacgtcgcctgcacgcgtacgtaagcttggatcctctagaggggtangtgaggtggggtgaccactattataaagntttttgtggaacgaataacaaccgactctggcaacaccgaaaacaacaagagagaaacctaaacttggcaggggggattcaaatactggggggggggacgagtcacaggaaatataaagaaacatattcttagagaggggctgcgaccgaccacaggaacccaacaagagcttctctctaagaacttgacctgcttcaaaccatgagcgaagtacaaaaatgttgggttatgttgaaccctccttgcagtaagcaaagaccaaagtgcggtcttcgatgcgggccctccccaaccaaagaattggaagtcactgaggccgggggaggcaaaaacttggaggctccctcaatacccttcttgaagacagcttgatcttcttcgctgagcttgggtgtcaaaagcttaatgtatttcttaatgtaagcgatgaatcccttctggtcataagttggttgctcctgaagtctgaaggtgtcgccaatgtcaccacccttttgagtagagtcatcaacactttcatcctcaccaccttcttcaacaataggattggcaccaatgttaacatctccagctcccccagtaacccactttccttctacttcccagaggattccattctcaatctccttgtaagggaaagagtcagacagaagctcatcaccggtgagaagatcttggtacaccaacatggtcgcttattgattgttttcgcggccgcgaattcgatatcaagcttagttatnccgtcgaaccgagggg

SEQ ID NO: 119495 - DNA, 752 bp, Arabidopsis thaliana
  unsure (1)..(752): unsure at all n locations
aatnngacntnatcgaaacccgnttccanctttngtaataccattcccnaccgtttcatccggcnaatcgattttaccnttcccaccnttgttcanccganttttttgganaaanggganttgagaaaggganttcttcgnttcccggaagttctccngttgataaccgaaggcttnttgccggaggaagccntnaccgggggnagaaagctcgggagttgatcccgatgatgaagtgtcgttgatgagagtaccggaattcacgagtcagaatctcgtccatgaaagttagagacggtggtcggtgaaggagaacaaccggaggctctgaagattccgcccggacgcgtgggtcgacaatgtcaacaaccttttgagcagagtcatcaacaccttcatcctcaccaccttcttcagcagatggattggcaccaatgttaacatctacagctcccacagtaacccactttccttctacttcccagaggattccattctcaatctccttgtaagggaaagagtcagacagaagctcatcaccggtgagaagatcttggtacaccaacatggtcgcttattgattgcggacgcgtgggtcgacccacggtcgancntttatctcccaaaacacaaanaaaaaaaaataggcttccacngctctctcaagcgccatcgtcgggaacttcatttcatccgtcgttncccaagctccaannnagtctcnggttccctnccntncggcnancacanca

SEQ ID NO: 119496 - DNA, 511 bp, Arabidopsis thaliana
  unsure (1)..(511): unsure at all n locations
agctannnnnnnnnnnnnnnnnnnnnnnnnnnnnnnnnnnnnnnnnnnnnnnnnnnnnnnnnnnnnnnnnnnccacgcgtccgcggacgcgtgggcggacgcgtgggcggacgcgtgggcggacgcgtgggcggacgcgtgggctacaacgctctttctccgtaggaaaggggaagcaaataaattatcgaagcccactggtttcggagctgatcggtctctatttctctcttcatacatatctcaagcagataaagttgatcggatactagaatgggaggaggatttagagttttgcatttggtgaggccattcttggcttttctgcctgaggttcagagtgctgataggaaggttccattcagagagaaggttatctacactgtcatctctctcttcatctttcttgtctgcagtcagcttcctctttatggaatccattccaccaccggtgcggatccattctattggatgcgtgtcattcttgcgtccaaccgtggaactgtcatgg

SEQ ID NO: 119497 - DNA, 475 bp, Arabidopsis thaliana
gggcaaaaacactagagttaagttacatatagagtaaggaagagatggcagttaggtgtttagccgtgttcctcgttgctctcatggtgtctcaagcagtcaccgcaacaagaccggctccaaccaagaatgtcggagctggtcttgacgaccaaaagaactttgtagcgttcgctggtgtcggtggagctgctggaattggtggagcccgtggtgttggagctggtcttggtggtgtcgccggtggagtccgtgctgttgccgatgcgtgtcattcttgcgtccaaccggggaactgtcatggagctcggtattactcctattgttacatctggacttgtgatgcaactcttggctggttccaagattattgaggttgacaacaatgttcgtgaggatcgtgccctcttgaatggtgctcagaagcttctaggtattctgattgccattggtgaggctgttgcatatgttcttt

SEQ ID NO: 119498 - DNA, 448 bp, Arabidopsis thaliana
  unsure (1)..(448): unsure at all n locations
nnnnnnnnnaaaaaaacaaaaaaaaaactttgaatccgtttgttgcttcttcgcaacgttctctctcaaactcgcagagtaacagattcgataatgggaggaggatttagagttttgcatttggtgaggccattcttggcttttcttccagaagtgcaaagtgctgacaggaagattccatttagagagaaagtgatctacactgtcatctccctcttcattttccttgtttgtagtcagcttcctctctatgggatccattctaccaccggtgctgatccgttctattggatgcgtgtcattctcgcatcgaatcgtggaacggtgatggagcttggtattactcctattgtcacatctggattagtgatgcaactcttagcagggtcaaagattattgaggttgacaacaatgttcgtgaggatcgtgctctcttgaatggtgctc

SEQ ID NO: 119499 - DNA, 392 bp, Arabidopsis thaliana
  unsure (1)..(392): unsure at all n locations
aacaaaaacactagagttaagttacatatagagtaaggaagagatggcagttaggtgtttagccgtgttcctcgttgctctcatggtgtctcaagcagtcaccgcaacaagaccggctccaaccaagaatgtcggagctggtcttgacgaccaaaagaactttgtagcgttcgctggtgtcggtggagctgctggaattggtggagccggtggtgttggagctggtcttggtggtgtcgccggtggagttggtggtgttgccggagttttgcctgttggcggtgtaggcggcggaattggtggtctaggcggtggtgtaagtggtctttggcggtctacggtgggcctaggttggtggttcaagacttttggaaatagngtaaggtgggant

SEQ ID NO: 119500 - DNA, 398 bp, Arabidopsis thaliana
cttcttctgatcctcctcttagcccctgttttgatttcgcattccttctgtgatttgcgcggctagtagatctgtaattgcaggactatcaaattcacaatgcggatctgagatttcgtggataattctagtaacagattcgataatgggaggaggatttagagttttgcatttggtgaggccattcttggcttttcttccagaagtgcaaagtgctgacaggaagattccatttagaggggaaagtgatcctacactgtcatctccctcttcattttccttggttgtagtcagcttcctctctatgggatccattctaccaccggtgctgatccgttctattggatgcgtgtcattctcgcatcgaatcgtggaacggtgatggagcttggtattac

SEQ ID NO: 119501 - DNA, 411 bp, Arabidopsis thaliana
  unsure (1)..(411): unsure at all n locations
cttaaagatatcaagtggtgcaagattgangaaccaaagggattcaaacttganttttnntncgaccagaatccttacttcaaaaacaccctattaacaaaggcgtatcatatgattgatgaagatgagcctctgcttgagaaggctattgggacagagattgattggtatcctggaaaatgcttaactcagaagattcttaagaagaagcctaagaaaggtgcaaagaatgccaagccaattaccaaaactgaagattgtgaaagctttcttcaacttcttcaatcctccccaagttcctgattgatgatgaagacattgacgaacaaagagccgaggaacttcagaatctgatggaacaagattatgacattggttctacaatccgggagaagatcatacctcatgctg

SEQ ID NO: 119502 - DNA, 1146 bp, Arabidopsis thaliana
  unsure (1)..(1146): unsure at all n locations
nnnnnnnnnnnnnnnnnnnnnnnnnctcactttagggaaagcacgtacgcctgcaggtaccggtccggaattcccgggtcgacccacgcgtccgcttgataacttgaggcatcaagcgactcagattgtatcgatgaggctgacccgagcagaaccacctctaaggaaagaagtagttgagtatatgcttgatgtgggttctcacatgtggagtatgcggagaagcaaagcaaactttttcaggattatgggagttttgagtgggttaatcgcagtaggaaaatggtttgaacaaatctgcaactggaagaatccaatcacaacagtcttgatccatctcttgttcatcatccttgtgctctatcccgaactaatcttgcccaccatcttcctctacctcttcctcatcggtatctggtactaccgttggagaccgaggcatcctcctcacatggacacacgtctctctcacgctgactcagcccaccccgacgagctagatgaagagttcgacacttttcctacttcccgaccatctgacatagtcaggatgaggtatgacaggttgaggagtattgctggtaggattcagacagtggtaggtgatctagcaactcaaggagaaaggcttcagtctctgctaagctggcgtgatccgcgtgcaacagcgctcttcgtcttgttctgcttgattgccgcagtcattctctatgtgacacctttccaggttgtggctctctgtattggatctatgctctgagacatccgagggtagatacaactaccatccgttcctctcatttcttcagaaggctcctgcagaaactgatgatgctctgacctgcaaactgcttcaatacgaaaaactctatagacatgagttggtttggaaacttgttaaaaatatcatgatgactctttttagtttgttcattgttaaaaatgtcatgatgactcttttcttggtgatggtgatgatgtatccgtctgtcttttaacattattaagacttttgtttgaaagtagtaaagaagtatcttgtgtggtagaaaaaaaaaaaaaaagnnnnnnnnnnnnnnnnnnnnnnnnnnnnnnnnnnnnnnnnnnnnnnnnnnnnnnnnnnnnnnnnnnnnnnnnnnnacaatc

SEQ ID NO: 119503 - DNA, 673 bp, Arabidopsis thaliana
tgactcagcccaccccgacgagctagatgaagaggttgacacttttccttcttcccggccatctgacatagtcaggatgaggtatgacaggttgaggagtaatgctggtaggaatcagaccagtggtaggtgatctagcaactcaaggagaaaggcttcagtttctgttaagctggcgtgatccgcgtgcaacagcgcccttcgtcttgttctgcttgattgccgcagtcattctctatgtgacacctttccaggttgtggctctttgtattggaatctatgctctgagacatccgaggttcagatacaaactaccatccgttcctctcaatttcttcagaaggcttcctgcaagaactgattgcatgctctgacctgcaaaaactgcttccaataccgaagaaaacttctataagacttgtagtttgttcttgttaaaaatatcatgatgactctttttagtttgttcattgttaaaaatgtcatgatgactcttttcttggtgatggtgatgatgtatccgtctgtcttttaacattattaagacttttgtttgaaagtagtaaagaagtatcttgtgtggttgaaaaaaaaaaaaaaagggcgaccgctctagaggatccaagcttacgtacgcgtgcgtgcgacgtcatagtcttctatagtgctccta

SEQ ID NO: 119504 - DNA, 947 bp, Arabidopsis thaliana
tgttgctggagttgatgaagcaaagcaagatttcatggaagtggtggagtttttgaagaaacctgagagattcactgcggttggtgccaagatcccgaaaggtgttcttcttattggtcctcctggtaccgggaaaacccttttggcaaaagccattgctggtgaagctggtgtgcctttcttctccatctctggttctgagtttgttgagatgtttgtcggtgttggtgcctcgagagtccgtgatcttttcaagaaagccaaggagaacgctccttgcattgtctttgtagatgaaatagatgctgttggtaggcaaagaggaaccggaattggtggaggtaatgatgaaagagaacagaccctcaatcagctcctaactgagatggatggttttgaaggtaacactggtgttatcgtagttgctgcaaccaatagagcagacattcttgactctgctttgttgaggccaggacggtttgaccggcaggtaagtgttgacgttcctgacgttaaggggagaacagatattctcaaggttcatgccggcaataagaagttcgacaatgatgtttcacttgaaataatagcaatgagaacacctggatttagcggagcagatctcgctaacctcttgaatgaggctgctatattggccggaaggcgagcacggacatcgatatcatctaaagagattgatgactccattgatagaatcgttgctggcatggaaggaacagtgatgaccgatggcaagagcaaaagcttggtagcttaccatgaagttggtcatgcagtgtgtggaacattgactccaggacatgatgctgtgcaaaaggtaacgttgataccaagaggccaagcaagaggtctgacttggttcattccatcagatgacccgacactcatctccaagcagcaactctttgcaagaattgttggtggac

SEQ ID NO: 119505 - DNA, 411 bp, Arabidopsis thaliana
acgaagaaaaagccttttcttctctctcgttttcgcgacaaccttttcttcgaagaagaagaagaacgaggttttctctcagagctgccaaccatcgttgcccggagatttaaaaaacctgtgataaatcgtaactgagtgagagatatatacacatatatatacacagagggacaaggaaagagattgggatatgcgagtgcgcatcggttctgtcggaacggctaactcgcttgacctagggtttcgtcttccttgtgcttcgtggagtttttcgaatgggagaaagaacctttttgctttctaaccgtgttctatatttttggagttgtcataagtaaagcagtatgacgcttgaagatttctttaccctaacagaaataaaagatggactcacggtcacttctcgtg

SEQ ID NO: 119506 - DNA, 950 bp, Arabidopsis thaliana
  unsure (1)..(950): unsure at all n locations
nnnnnnnnnnnnnnnnnnnnnnnnnnnnnnnnnnnnnnnnnnnnnnnnnnnnnnnnnnnnnnnnnnnnnnnnnnnnnnnnnnnnnnnnnnnnnnnnnnnnnnnnnttttttcaacaaagaaaacattaattcccactttctaaaaaaagttaccacatttgttttctttagaggaacaaatgaaagaaattatccctagaattgaacattatgagtttctttaatcacaaaatggaggaaaaggatgatttcactagacaagaacctcatcgtcatcttcaaaactcagattcaaagtctgtaacttaaatccagctccttgtatagtctccaccaagtttgacgccactcctgttgcttgaaccgttgtttgcttcaaaagctcaacgacggcaacaccttcagaaacctgaacctttaaattggaaactccatcaatatcctgtaaggcccttgtcacattaggaatagctgcttcgttcaaagttccatcagcctggaaaaacatggtgagcatgtctgaaggagagacaggaacagagacagtctcttgcggttgctcctctgcgacagcgacaccttctcctccttctccaatagacgaaagcttcctcaatccaaggcgattttgttttataaacccagcaaaactgcaattgcggctatttccgatagctctggtccgaaagttgaggtttttcgacaaaggaagaaggtgggtcgaagaaagattagggcttttggttctgcaaaacgagtgaaaggtagaagaagctgcaatcgacgccatttttcactactgacccaatcttctttcactcgataaggttgtgcgagttacaagcccacgcgtccgcggacgcgtggnnnnnnnnnnnnnnnnnnnnnnnnnnnnnnnnnnnnnnnnnnnnnnnnnnnnnnnnnnnnnnnnnnnnnnnnnnnnnnnnnnn

SEQ ID NO: 119507 - DNA, 1379 bp, Arabidopsis thaliana
  unsure (1)..(1379): unsure at all n locations
atgctacgccgagctctatacgacttacttagggaacgctggtacgcctgcaggtaccggtccggaattcccgggtcgacccacgcgtccgcggacgcgtgggcggacgcgtgggcgatcacagcgacgaggtcgaatacgatcttcttacccctgtcgacagttctgaattaatatcaattttcattgtcttcctatctctctttctctctttggcttcttccaatctaatttcagtgatttacttgttaagaattcaccttttgagaggcccagttttgaaatatggctggccaaaacgcgcgtttgaatgtggttcccactgttactatgctcggggttatgaaagctcgtcttgttggcgctacaagaggtcatgctctcctcaagaaaaagagtgatgctttaactgttcagtttagggcacttctcaagaaaatcgttacagctaaggagtctatgggagatatgatgaagacatcgtcttttgctcttaccgaagtaaagtatgttgctggtgacaatgtcaaacatgttgtcctcgagaacgttaaagaagctactttgaaggttcgttctcggacagagaatatcgctggagtgaagctgcctaagtttgatcacttctctgaaggtgagaccaagaatgacttgaccggtttagctagaggtggtcaacaggtccgagcttgccgtgttgcttatgtgaaagccattgaagttctagttgagcttgcttctctccagacttctttcttgacccttgatgaagcaatcaagacgactaaccgtagggtcaacgctctggagaatgtggtgaaaccaaagctggagaatacaatcagttacatcaagggagagcttgatgagcttgagagagaggatttcttcaggttgaagaagattcagggatacaagaggagggaagtcgaacgacaggcagctaatgctaaggagtttgctgaggaaatggttcttgaagacatctctatgcagagagggatttcgataaacgctgctcgtaacttccttgttggtggtgctgagaaggattcagacattattttctgaggtgtgggctctctctctctctctctctctctctttgtgccttctgtgtttgctcggtttctattttcgccttcgcgctgttattactctcttcatcagacttatgtttcttcaaataaaatggatttgatgtagatgaaatactgtatcatcttggattgtgctttgatataaaatttttcgagagatttgtgattaagaaaaaaaaaaaaaaaaagaaagnnnnnnnnnnnnnnnnnnnnnnnnnnnnnnnnnnnnnnnnnnnnnnnnnnnnnnnnnnnnnnnnnnggaaatcgcaacctcaacct

SEQ ID NO: 119508 - DNA, 790 bp, Arabidopsis thaliana
  unsure (1)..(790): unsure at all n locations
gcgnnnnnnnnnnnnnnnnnnnnnnnnnnnnnnnnngactcactatagggaaagctggtccgcctgcaggtacccgcccggacgcacaaccgctttcatcggaagaagaacaagttggattgattttgctttggatctcacatctgagatcagattaatctctctgtgaagtcgaagaacgaaaccctagttcccatggatctctcttcacgcttctcatcgatccttatccttctcttgatctccatctccatagcttcggctgagattcgtaaatcagagatccgatccgatgatcgtccaatcatccctttagacgaattcggtttcactcacagcggtcgtcttgagcttgacgcttccaagatctggctttccaacagcaatcccgatctcgatctctccaaagtgggcttctttctctgcactagagacgcttgggttcatgtgatccaacagcttgaagaagaagagatcacgtgcgctctacaatcagatctcgttaagcatgtgttcaccttcaacaatctcaagggaggagataagagcagattctccaccgtattcaccgagaacgatgcggatcacgactctcttcgtcttcgctaattgtctccacaggtcaaatcagtatgatgttaatccgttgatacctgaggtaaaggtggcggatatctttgtgagactgtctctaggcattctatcctgatcattcctccgcgccgtgactcgtcttatagacgttactgttcgcatcattctctgtggagtgtgctgaacttacctcttg

SEQ ID NO: 119509 - DNA, 781 bp, Arabidopsis thaliana
ccgggttcgacccacgcgtccggaacaagttggatggattttgctttggatctcacatctgatatcatattaatctctctgtgaagtcgaagaacgaaaccctagttcccatggatctctcttcacgcttctcatcgatccttatccttctcttgatctccatctccatagcttcggctgagattcgtaaatcagagatccgatccgatgatcgaccaatcatccctttagacgaattcggtttcactcacagcggtcgtcttgagcttgacgcttccaagatctggctttccaacagcaatcccgatctcgatctctccaaagttggcttctttctctgcactagagacgcttgggttcatgtgatccaacagcttgaagaagaagagatcacgtgcgctctacaatcagatctcgttaagcatgtgttcaccttcaacaatctcaagggaggagataagagcagattctccaccgtattcaccgagaacgatgcggatcagtactctctcgtcttcgctaattgtctccaacaggtcaaaatcagtatggatgttagatccgctatgtataaccttgaaggtaaaaagggaggtcgtgattatctctctgctggaagaactgttcttcctaagggctatttcttattctctgttatctatttctctctcgccgccacgtggatctacgttctctataagaaacgtctcactgttttcgcaatccatttcttcatgttgggagttgttgtcttgaaagctttgaaccttctttgtgaggc

SEQ ID NO: 119510 - DNA, 1553 bp, Arabidopsis thaliana
gcggtaccgcaccggaattcccggatcgacccacgcgtccgagaaacaattacaaccgacagtatccaataacatatctggactctcttcaggtggggagaagcttagctcaaagaccaatggaggatcaaaaagggagctactgcttccaagggatggacttggacaaattgctgctcatacatttgctttccgcgagcttgctgctgcaactatgaactttcatcctgacactttcttaggcgaaggtggatttggacgtgtctacaaaggaaggcttgacagcaccggtcaggttgttgctgttaaacaactagacaggaatggtctacaaggtaacagagaatttctggtagaggttcttatgctcagtcttcttcatcatcccaacttagtcaaccttattggttattgtgctgatggagatcaacgcctcttggtctacgagtttatgccgttaggatcattggaagatcacctccacgatcttccaccggataaggaggccttagattggaacatgagaatgaaaatagctgctggtgcggccaaaggattggaatttctacatgataaggcaaaccctccggttattaatagagattttaagtcatcaaatattttactggatgagggtttccaccctaaacctttctgattttggacttgctaaaactcgaccaacgggagacaaaattcatgtcttcaataaagttatgggaacttatggttattgtgctccccgagtcgcaaaggaccgggacaattgacaggaaaaatcagatgttttccagtattggggggggtttttcttcgacctcattaactggaccaaagctatagacagcgagatgcctcatggagagcagaacctgggtggcttgggcctcgcccattgttcaacgacaggcgaaagttcataaaactgggctgatccaaggttaaaggggcggtttccaacggcgtgcactctaccaagctttagctgtggcatcaatgtgcatccaagaacaggcggctacacgtcctctcatagcagatgttgtcactgcactctcctatcttgcaaaccaagcttatgatccaagtaaagatgatagtagaagaaaccgggatgaaagaggtgcaaggttaataacaaggaacgacgatggaggtggctcgggaagtaaattcgatttagaaggttcagagaaagaagattcaccgagagagacagctcggatattgaaccgagatatcaatagggagcgtgcggttgcagaggctaagatgtggggagagagtttgagggagaaacgaagacagagcgagcagggtacttcagagagcaacagtaccgggtagaaccggtttgggtcggtcttgacccttttttgttcttatttctctcaagactctcatttattgtcaaacatagaaaacaaacaaaaaaacattgggacgacgagttgctgtacattatatatgtgatgttgcaataaaaaaaaaaaaaaaaagggcggccgctctagaggatccaagcttacgtacgcgtgcatgcgacgtgatag

SEQ ID NO: 119511 - DNA, 751 bp, Arabidopsis thaliana
ttagagtcttcactcttcaccgaaccctctgattctcgtatagacacacacatacctatacatacacactttaacacttatatctgtagagtatagccatgggagaaggagaagcaaaagcagagcacgcagccaaagcagatcacaagaacgctccctccgcttcttcaacgccagaatcttactctaaagaaggcggaggaggcggtggagatgctcgccgcgcaatctgcggcgcgatcttcaccatccttgtcatactaggtatcatagccttaatcctttggctcgtctaccgtccacataaaccacgtctcaccgtcgtcggagccgccatctacgacctgaatttcacagcgccgccgttaatctcaacctccgttcagttcagcgttttagcaagaaaccctaaccggagagtctccattcactacgacaagctctctatgtacgtaacgtacaaagatcagatcataacaccgccgcttccactaccaccgcttcgtttaggacataaatctacggttgtgatagctccggtgatgggaggcaacggtataccagtctcgccggaagtagctaatggtttaaaaaatgatgaagcttacggcgtcgttttgatgagagtggtgatttttgggaggctacgttggaaagctggtgcgattaagactggacggtatggattttacgccagatgtgatgtgtggttgagatttaatccatcttctaacggacaagttcctcttct

SEQ ID NO: 119512 - DNA, 648 bp, Arabidopsis thaliana
acccacgcgtccgggaaacaacaccgataagtaatttatgacgaatcttttggccttgtggggggtcttgagcacttgactggcggcggaggtatggtctccgagtccagccatgaccacccacaacacggcggtggcgtcagagggagaagtcatcgtcaaagacggacaccacgttgtggtggttgagtacgatcgcgacgggaaaaccaataccagagtctcgatctcgccaccatcggcagatcaaggagaagaaaaagagaatgaagtagagatgggaacttctatgtttataaatgttaaagagaaagctaaagaaacggcgtcgtatcttccacacgtcggccaaggaatctcccagccggagatgacagacgaggcgcgtgatcaccacgcgacggctggggaagtcatatgcgatgcgttcggcaagtgcagccagaagcatcgcgagtgtggtaggtcgggctaaagaccgcaccgttgattccgtcggcgagacagcttctgatgtcagagaagccgccgctcataaggctcacgatgtgaaggaaacggttacacatgcggcacgtgacgtggaagacacggtggctgatcaagcccagtatgctaagggtagggtaacagaaaaggcccatgatg

SEQ ID NO: 119513 - DNA, 800 bp, Arabidopsis thaliana
gagtttgcctgaaggtccgattgagcctgcaactccattatctgaggttaagcaagagccgtacaaccttccttctgtttacgagtggacgacatgtgatatgaactctgatgatatgtgttcagaggtatacaaccttctcaagaacaactatgttgaggatgatgagaatatgttcaggttcaattactccaaggagtttctaaggtgggcactacgtccaccgggttattaccagagctggcatattggagttcgagccaagacttcgaagaaactcgttgctttcatcagcggcgtgccagcaagaatcagggtgcgtgatgaggttgttaaaatggcagagatcaatttcttgtgtgttcacaagaagctcaggtctaagaggctcgctcctgtcatgatcaaggaggtgactagaagggttcacttggagaacatatggcaagcagcttatactgcaggagttatccttcctacaccaatcaccacctgtcaatactggcacaggtcattgaacccgaagaagctaattgatggtggggtttcaaggcctggtgcgaggatggcaattagcaggaccatccaactttaccagttaccagaaggcccggtcaattctggaatcaaggaaatgggaccaccgcatggtcctggtggtaacagggtggcttagcacctccccagcccggttggaagtcgccaccgcttttaatgagaatgaggccaagcattggctactcccaaaagaagatgtggtggacggtaaccaagtagaaagccctgaacccacgcgtccg

SEQ ID NO: 119514 - DNA, 393 bp, Arabidopsis thaliana
gaaaaaaaaaaaaactagtggtgcgaaatcaacgactgtttaaggaattgggattttttgtcttccaacaaaatgcttccggtgaaaaaagttccgccatggctacaatatctccgggaggagcttacatcggaactccctcaccgtttctcggaaaaaaaatcaaacctttcactctaacttcaccgattttgagttctaaaccaacggttaagctcaattctaactgtcgcgctcaattgatcgatacagttcacaatctcttcgtcggagttggagtcggacttccatgtacggttatggagtgtggtgatatgatctatcgcagtactttgccgaaatctaatggtttaccgattactgctcctggagtagctttagctctcactgctc

SEQ ID NO: 119515 - DNA, 1352 bp, Arabidopsis thaliana
  unsure (1)..(1352): unsure at all n locations
taggtgacacttagaagagctatgacgtcgcatgcacgcgtacgtaagctcggaattcggctcgagcggctgcgttctgcgacttgggttcgtcttcttcttctttctattcagattcacaataattgccaagcgaacaagtctttgcctctttggtttactttcctctgttttcgatccatttagaaaatgttattcacgaggagtgttgctcggatttcttctaagtttctgagaaaccgtagcttctatggctcctctcaatctctcgcctctcatcggttcgcaatcattcccgatcagggtcactcttgttctgactctccacacaagggttacgtttgcagaacaacttattcattgaaatctccggtttttggtggatttagtcatcaactctatcaccagagtagctccttggttgaggaggagcttgacccattttcgcttgttgccgatgagctgtcacttcttagtaataagttgagagagatggtacttgccgagggtccaaagcttgcctctgctgctgagtacttcttcaaaaggggtgtgcaaggaaaacagtttcgttcaactattttgctgctgatggcgacactctggatgtacgagttccagaagcattgattggggaatcaacagatatagtcacatcagaattacgcgtaaggcaacggggtattgctgaaatcactgaaatgatacacgtcgcaagtctactgcacgatgatgtcttggatgatgccgatacaaggcgtggtgttggttccttaaatgttgtaatgggtaacaagatgtcggtattagcaggggacctttcttgctctccccgggcttttgggggctctcgctgctttaaaggaccacagagggttgtagcatttacttttcaaactgctttaggaccatccttgttaccggtgaaaccatggagataactagttcaaccgagcagcgttatagtatggactactacatgcagaagacatattataagacagcatcgctaatctctaacagctgcaaagctgtttgccgttctcactggacaaacagcagaagttgccgtgttagcttttgagtatgggaggaatctgggtttagcattccaattaatagacgncattcttgatttcacgggcacatctgcctctntcggaaangggatcgttgtcagatattcgccatggngtnataacagccccaatcccnctttgccatggangagtttcctnaacttcngggaagtttttttgatcaaaggttgaaaaagntccntaggaattttttgncaaattncttttaggaggatcntttgggaagtgcaaaggggntttcagagggccaag

SEQ ID NO: 119516 - DNA, 621 bp, Arabidopsis thaliana
  unsure (1)..(621): unsure at all n locations
agcatttctctatattaatggtgcttcctctctaaaccattcctctctctttctctctaccaccatttattctctccttaatcactgactcgactcgggtcgtgaccagttttttctatctgagctatggcaacgggacagcttttttctcgtaccacacaagctttgttctacaactataagcagcttcctgttcaacgaatgctcgatttcgactttctctgtggacgtgaaacgccttctgttgctggaatcataaatcctggttctgaaggttttcaaaagctctttttcgggcaggaggaaatcgctatccctgttcatgccgccattgaggcagcttgtgctgcgcatccaacagcggatgtattcatcaactttgcatcttttaggagtgctgctgcttcatccatggctgctttgaagcagccgactattaaagttgtggcaattatagctgaaggtgttccagaatcagacactaagcagctgattgcggatcctcgtgcaaacaataagggtggtattggaccggctactgttgggggatcaaatgcgccttaaaatggggaactgnggacaattggaaattaccagggagcannanccgnctgtgggttc

SEQ ID NO: 119517 - DNA, 537 bp, Arabidopsis thaliana
  unsure (1)..(537): unsure at all n locations
atgatactgccnnnnnnnnnnnnnnnnnnnnnnnnnnnnnnnnnnnnnnnnnnnnnnnnnnnnnnnnnnnnnnnnnnnnnnnccacgcgtccgctcccatttaatggtttcctcttaaaccattcccttcccttcctcctaactgcaatctactctccacctaacattgctccgttttgactcgctcgactcggctaagtgaccacagttcctttcgagccaataaaatggctacgggacagctattttcacgcaacacacaagcgttgttctacaattataagcagcttcccattcagcgtatgcttgattttgatttcctctgtgggcgagaaactccttctgttgctggtatcataaacccaggttccgagggattccaaaagctattttttggtcaggaggagatcgccatccctgtccacgcagccattgaggcagcatgcgctgcgcatcccacagcagatgtattcatcaacttcgcatcgtttagaagtgctgctgcttcatccatggctgctttgaagcagccaacta

SEQ ID NO: 119518 - DNA, 1358 bp, Arabidopsis thaliana
  unsure (1)..(1358): unsure at all n locations
nnnnnnnnnnnnnnnnnnnnnnnnnnnnnnnnnnnnnnnnnnnnnnnnngtccgaaagaaaagaaaaatatagcaagtacactgcatttcaacactctcatatctctccttcctacttcctcggtttcatcgtccactgtctcaacaatggcgtcattgtcggtaccttgcgtcaagatctgtgctctgaacaggcgggtcggatctctccctggaatctctactcaaagatggcagccgcaacccaatgggatctcctttccctccgatgtttctcagaatcattctgcattctggaggttgcgtgcaacaactaatgaggttgtttctaactccactccaatgactaatggtgggtatatgaacggaaaagcgaaaaccaatgttcctgaacccgccgagctctctgaatttatggctaaagtctctggtcttcttaagcttgtggattcaaaagacatagtggaacttgaactaaagcagctcgactgtgagatcggtattcgaaagaagggaagctttacagcaagctgtaccaccaggctccagtttatcactcaatgcctcctgtaatggcaggcttttcaatgcctccagctcaaccagtggctcttcctccttctcctactcctacctcaacgcctgcaacagcaaaaccaacatccgccccatcctcgtctcatcctccactcaagagtcccatggctgggactttctatagatctcctggacccggtgaacccccttttgtaaagggtgggggggtggtgcagaagggtcaaattgtttgtattatcgaagctatgaaactgatgaacgagattgaggctgagaagtcaggaaccatcatggaactactggctgaagatggaaaaccagtcagcgttgacacgcctctttttgtcatcgcaccttgaaacgaagaaggatccttttagctgcttcaaaacatcttcaaagtctcggttaagctatagcaacgtgctaaaactcatcaagtaattatttcagcttaagttggttggtttcggatttctgcttgtcgcttcaataattgacccatcttttgggatttcacgtaacgtactacactttgctttttagttttctgcgaaactaatgtattttgtagccttctcaatcctggctctctgtcccatacttcagttttttacacaacgcactgcttataaaagcacagttaaaggtgtctaaaggagaatggtgtgtctttgactgaggcaacaaataaaacagtgaaaagttaaggttttacatgatgcattaccttagtaaaacatgtttccatgttttcatctatnnnnnnnnnnnnnnnnnnnnnnnnnnnnnnnnnnnng

SEQ ID NO: 119519 - DNA, 1087 bp, Arabidopsis thaliana
  unsure (1)..(1087): unsure at all n locations
cccacgcgtccgcccacgcgtccgcccacgcgtccgcccacgcgtccggggtcggatctctccctggaatctctactcaaagatggcagccgcaacccaatgggatctcctttccctccgatgtttctcagaatcattctgcattctggaggttgcgtgcaacaactaatgaggttgtttctaactccactccaatgactaatggtgggtatatgaacggaaaagcgaaaaccaatgttcctgaacccgccgagctctctgaatttatggctaaagtctctggtcttcttaagcttgtggattcaaaagacatagtggaacttgaactaaagcagctcgactgtgagatcgttattcgaaagaaggaagctttacagcaagctgtaccaccaggctccagtttatcactcaatgcctcctgtaatggcagacttttcaatgcctccagctcaaccagtggctcttcctccttctcctactcctacctcaacgcctgcaacagcaaaaccaacatccgccccatcctcgtctcatcctccactcaagagtcccatggctggtactttctatagatctcctggacccggtgaacccccttttgtaaaggttggagataaggtacagaagggtcaaattgtttgtattatcgaagctatgaaactgatgaacgagattgaggctgagaagtcaggaaccatcatggaactactggctgaagatggaaaaccagtcagcgttgacacgcctctttttgtcatcgcaccttgaaacgaagaaggatccttttagctgcttcaaaacatcttcaaagtctcggttaagctatagcaacgtgctaaaactcatcaagtaattatttcagcttaagttggttggtttcggatttctgcttgtcgcttcaataattgacccatcttttgggatttcacgtaacgtactacactttgctttttagttttctgcgaaactaaatgtattttgtagcctctcaaaaaaaaaaaaaaaaaaaaagnnnnnnnnnnnnnnnnnnnnnnnnnnnnnnnnnnnnnnnnnnnnnnnnnnnnnnnnnnnnnnnnnnnnnnnnnnn

SEQ ID NO: 119520 - DNA, 634 bp, Arabidopsis thaliana
  unsure (1)..(634): unsure at all n locations
taaacttaaaccttgttggtcaatttttnaatctaatgaagcggtatcgtcaaagggttacgttacattctccttaacaaatggtcctgaataccatgtttntaanattactgatgccgtgatggtggcgaagatcttggagcaactcttgtgcttcctgacattagaggaagcaaacctggtgatgaaatgaaatttgaagatatctatgatgtggataaactcattaaaaccttggaaagtgtcgtcaaagttgtaagaaaattgccgagccacgtatctctaagagatattgccattgtcaaagttcctacccgagttgcagaagattacatcaaggaacatattgatcccatcttcaaatcaaaagggaacataagggttacaacctatttcccttctgtgaatttgaggaaatcttcgcagggtgctgaaaccgaccctgtctcttgtttggcaatgtttggttccttggagttgcaacctgcagtgaatgaattggttgagtcgatgattcagcggttgaagacacatagcaagaaatccggtggccgtttcatagccatagacttgagggttgagatacttgaaaagaaaaactgccatgaaacaggtgcagtggggtccaaaacat

SEQ ID NO: 119521 - DNA, 442 bp, Arabidopsis thaliana
agacacgaagacacagaacaagtagccactctctcatctcaccacccctctttctctctacttgctctctatctctctctgtgtctctccactttctcttcttcttcttcttcttcttcttcttgctctagagatctctctatctccattcttttctctctctgtttctagaaagacaacagtgacattttgtctgaacgcatctatggctgctctggtgctttcacttctccttctatccttggctggacattctagtgcctcatggtgtgtgtgtaagacagggctgagtgatacagtgctacaggcaaccctagactatgcttgtggaaatgggggcacattggaatcctacctaacccaaacaatcttgcttcaaccctgacaatgttaggtctcattgcaactatgcagtcaatagcttcttccaaaagaagggtca

SEQ ID NO: 119522 - DNA, 853 bp, Arabidopsis thaliana
attagagcagaccccgaactcttccactctccagtcacagccacagagagatttgatcagcttcgtgtgttttccatggcgtcggaagcgagggaatcaccagcaaacaatcctggcttgtcaacgaatcgagatgaggctacaaaaggatacatcatgcaacagactatgtttcggatcaaggaccctaaggctagtcttgacttttactcacgtgtgctggggatgtcattgctgaagaggctggatttctctgagatgaaatttagtttgtacttcctgggctacgaggatactacaacagctccaaccgatccaacagagagaacggtttggacatttggtcaaccggcaacaattgaattgactcacaactggggtacagagagtgatcctgagtttaaaggttatcacaatgggaactctgagcctcgtggatttgggcacattggggttaccgttgatgatgtgcacaaggcatgcgagagatttgaagaattgggagtagagtttgccaagaaaccaaacgatggaaagatgaagaatatagccttcattaaggatcctgatggctactggatcgagatctttgatctcaagactatcggaactactaccgtaaacgcagcttgatctcaagactatcggaactactaccgtaaacgcagcttgatctcaagactatcgggactactaccggaaacgcagcttgaggaagtagcgattgcgctatttgtgttcttttgctcattccacccgagtgtgtgcatacagttaaagaattttcatgtttcatcgaataatcggaacaagatggtcgttgtttatcaatgtggtctgtttcttgacatat

SEQ ID NO: 119523 - DNA, 495 bp, Arabidopsis thaliana
tacgtgaagacgtagctcgtgtttatttccagttattgatctcagccgttgatttctgtcatagccgtggtgtttatcaccgagatctgaaaccggagaatctcttgttagatgaagaaggtaatctcaaggtgactgattttggtctctctgctttcactgagcatttgaaacaagacggacttcttcatacaacttgtggaactccggcttatgttgcgccggaggttatattgaagaaaggatacgacggagctaaggcggatctgtggtcttgtggtgttatactttttgtgcttcttgctggttatttgccgtttcaagatgataatcttgtgaatatgtataggaagatttacagaggagatttcaaatgtcctggttggctttcttctgatgctagacggcttgtgactaagcttcttgatccgaatccgaatacgaggattactattgagatggttttggattcgccttggttcaagaaacaagcaa

SEQ ID NO: 119524 - DNA, 892 bp, Arabidopsis thaliana
  unsure (1)..(892): unsure at all n locations
atgatacctnnnnnnnnnnnnnnacgactttatatagggaacgctggtacgcctgcaggtaccggtccggaattcccgggtcgagccacgcgtccgggcaaagcacttttaaacggacctgggaattattccttcaacaaggctactgatgactctaaggaagcagagtcaggtaatgggtggaaagaaaattcagaggagaagccacaaagtgaagaccctgaagcagcaactgaggacagtgtccctggtgttttgtatgatttactacagaaagaagtagtttctttgaggaaagcctctaatgaaaaggatcaaagcctcaaagacaaagatgatgccatcgagatgctagcgaagaaggtggaaacattaacaaaggcaatggaggttgaagcaaagaagatgagacgggaagtagctgcaatggaaaaagaagttgctgcaatgcgtgtggagaaagatcaggacgccagagccaaaaggttttcaaatagcaagagcccatccaacaccgcccagattcttgcgggaagagctgctggacgaagtggcgggttaacgaagagtacccagtgaagggagattcaagaaaataacaagtaaaagaatgtccttggctcttgttattcagctgttttaaccttatatcatggcttttactttgtttttgtttacctcatgtgattggttgtatcaccatatataacttagcatgctgataatcccatcctcacccctatagcctagtaaaaagactcagaaagagagtttgtgacataaaaaaaaaaaaaaaaaaacaaaagnnnnnnnnnnnnnnnnnnnnnnnnnnnnnnnnnnnnnnnnnnnnnnnnnnnnnnnnnnnnnnnnnnnnnnaataaatgtaattcgg

SEQ ID NO: 119525 - DNA, 543 bp, Arabidopsis thaliana
agaaaattccaagtaaaagaatgtccttggctcttgttattcagctgttttaaccttatatcatggcttttactttgtttttgtttacctcatgtgattggttgtatcaccatatataacttagcatgctgataatcccatcctcacacctataacctagtaaaaagataagaaagagagtttgtgacatagatttggtgttaaagtggttagagggaggagaagaaaagccgagggagagagtgagagatgttgacattttggctaacattttcatctctcttttcgggagttagtttgtttttggtgtataggtttggtatttggcttctctagagcttgtgtacctctgattccttttatttgtttgttactctattgcactctttgtgtgatttattcgtttgtattttgggtttgctgatatataatatatgatttgataaaaaaaaaaaaaaagggcggccgctctagaggatccaagcttacgtacgcgtgcctgcgacggctcaaaactctttctaataagtgtcaccctaattc

SEQ ID NO: 119526 - DNA, 810 bp, Arabidopsis thaliana
  unsure (1)..(810): unsure at all n locations
aatccacaggaatactgcaagaaaactgagaattggtattgtctggcaaagacacgagcagagagtgaagcttttgaatttgcaaaacgaaccggacttcatctcgtcagtgtttgccctacccttgttttgggacctatactgcagcagaacacagtaaatgctagtagcctggttcttcttaagcttcttaaagagggttttgaaacacgtgataaccaagaacgtcatttggtagatgtgcgtgatgtagctcaagctttactcttggtttatgagaaagcagaagctgaaggaagatacatatgtacatcccacacggttaaagaagagattgtggttgagaagctgaagagtttttatccacattacaactacccaaagaaatacattgatgcggaagatagagtgaaggtgagttcagagaaattgcagaagttgggttggacttaccggccgttggaggaaacacttgtggattctgttgagagctaccggaaagctaagcttgtggactgaaaacttggaaagaagagcaaaatagtgttttagcttcatatgttatagttatagtgttccattctgcacacacacacacactctctcatcgtttactcaataataagagttgtgcattcaccatggatttctgagtttttgttattttctttttagatatcattacttttattaccaatctacaattttctttccataataaaaaaaaaaaaaaagnnnnnnnnnnnnnnnnnnnnnnnnnnnnnnnnnnnnnnnnnnnnnnnnnnnnnnnnnnnnnnnnnnnaacgaaat

SEQ ID NO: 119527 - DNA, 391 bp, Arabidopsis thaliana
tccggtggctcaagctttacttttggtttatgagaaagcagaagctgaaggaaggtacatctgcataggccacacggttagggaacaagaagtcgctgagaagctgaaaagtctttatctaaattacaactacccaaagagatacatcgaagcggatggaaaagtgaaggtgagttcagagaagttgcagaagttgggttggacttaccggccgttggaggaaacacttgtggattctgttgagagctaccgcaaacgctaagcttgtggactgaaaactgggaacgaatagcatatgagtgttttgggtccatgtgttaagtgttcctatctgcacacgctctttcatcttctactcaagaataagagttgtgcaacatatataacatcc

SEQ ID NO: 119528 - DNA, 519 bp, Arabidopsis thaliana
atacgactcaccttagggaaagctgctacgcctgcaggtaccggtccggaattcccgggtcgacccacgcgtccggtgactttatatttatttagatgagtttcattctaatgggatcttttatttaatgttttggttataatccaacgcagtgagccaaatcaagatggtgacgccaactacaattagaaccgtcgatctccgctccgacacggtgactaaaccaacagagtcaatgcgttcagcaatggcaaacgcggaagtagacgacgacgttttgggaaacgatccaacggctctgcgtttggagaaagaggtggctgagatcgctggaaaagaggcggcgatgtttgttccgtcagggacaatggggaatctgataagcgtgttggtccattgtgatgagagagggagtgaagtgattcttggagacgactctcacattcatatatatgaaaacggcggcgtttcaagcctcggtggtgtgcatccgaggacggtgaagaatgaggaagacgg

SEQ ID NO: 119529 - DNA, 483 bp, Arabidopsis thaliana
cccacgcgtccgcccacgcgtccgcggacgcgtgggcgaagcacatctcttttgatctcttcgccaagaaaacaaaaagcatagcctaacagaacagaatctagtgagccaaatcaagatggtgacgccaactacaattagaaccgtcgatctccgctccgacacggtgactaaaccaacagagtcaatgcgttcagcaatggcaaacgcggaagtagacgacgacgttttgggaaacgatccaacggctctgcgtttggagaaagaggtggctgagatcgctggaaaagaggcggcgatgtttgttccgtcagggacaatggggaatctgataagcgtgttggtccattgtgatgagagagggagtgaagtgattcttggagacgactctcacattcatatatatgaaaacggcggcgtttcaagcctcggtggtgtgcattcgaggacggtgaagaatgaggaagacggtacgatggagat

SEQ ID NO: 119530 - DNA, 548 bp, Arabidopsis thaliana
  unsure (1)..(548): unsure at all n locations
ggaaaagaagaaatcaataattaatctgaagtggtatatattacatcaactacaacacacccaacacagaaacaaaagttccatgcccgttttgggtaccctaaggacttattgcccggccaaagatgatatcccggaacatgaccctataggttcctctgcctttttgggtaccattggatgataatgtcttgtttaaatctgttagcttcttctattgtataaaaaagtggaatagagcgagtgtgcctctgtctcactctctatttggcttcttgctccaacaatggaatcttcttccatgtctcatctaagccatttaactggtaagaggcggcaatggaaaacacactaacagtagaacttccactcccggatctccttcaaaacccggcaaggcagcgattgtgctctccatatgaagctctccatggacttaggcccgganacnctgctnggaaaccccagcncagttcgtagcaggggagtctggtcagcatgcccagatcctggnagctgacaaagccgagggaangggcggagnctnt

SEQ ID NO: 119531 - DNA, 599 bp, Arabidopsis thaliana
  unsure (1)..(599): unsure at all n locations
cacttacgtttcccagaaaataaaagagctatgaagtttggtaagagtctcagcaatcagatcgagcagacacttcctgaatggcaagacaagttcttgtcttacaaagaactcaaaaaacgnctcaaactcatcggttccaaaaccgccgatcgtcccgttaaacgactccgtttagatgagttttccggcggaatatcgaaagaagagatcgatttcatccaattgttagaagacgagttggagaaattcaacaatttcttcgttgagaaggaagaagaaatatatcatcagactaaaggaatttttgagataggaattgcgaaaccttaaggattcaattggagaagatgataaaaatcaggaaggagattgttgatttccatggagaaatggttcttcttgagaattacagtgctcttaattacactggattggttaagatactgaagaagtatgacaaaagaactggtgatctcatgcgtttacctttcatccagaaagttcttcagcaacctttttacactactgacttattgtcaagcttgtcaaggaatctgaggcaatgcttgatcagatctttcctgctaacgaaactg

SEQ ID NO: 119532 - DNA, 438 bp, Arabidopsis thaliana
cggacgcgtggcatctccttcctccgatcttcgtctccaattcggaatcttcctatcacaatttcaaggctcctttaacccttgatcatcaccgattcaatcaattcggaatcacaatttcaaatcgagagaatttcaatttctcttgtaaaaccctaaattatgtacagcaatttcaaggaacaagcgatcgagtacgtgaagcaagcggttcatgaagacaatgctgggaattacaataaagctttccctctatacatgaacgcgcttgagtacttcaaaactcatctcaagtatgagaagaaccctaagatcagagaagctattacccagaaattcaccgagtatctccgtcgtgctgaggagatccgtgctgttctcgatgaaggtggatcgggtccaggatctaacggtgatgcatccgtcgcaacgaggccc

SEQ ID NO: 119533 - DNA, 582 bp, Arabidopsis thaliana
aatacgaccctctatagggaaacctggtacgcctgcaggtaccggtccggaatttccgggtcgacccacgcctccgcagatcactgtgccgtcgcccgtcgccgccgccgccacactatcatctctctcaggtttttgattttccacggcaatggagtcttcgattctcaaaagccctaatctctcttcaccatcgttcggtgtaccttcaattcccgccttatcctcctcctccacctcaccattttcatctcttcatctccgatcacagaaccaccgtaccatctctcttaccaccgccggaaaattccgtgtctcgtattctctctccgcttcttcacctctaccacctcatgctcctcgccgtcggccccattacatcccctaaccgtatatcgcgagcccaattaccgtcagaatcttcgatacaacctctccgagaccgtggaaccgtcttccggaacctcccttaccttccaaggaaaagcttgatattggtcgggaaattaaccaacctcgggagtcaacctcattcgaacctggttttcccgttgctccaaaggacaattcgaaaccggtaaa

SEQ ID NO: 119534 - DNA, 1669 bp, Arabidopsis thaliana
ggcggctcaagatcagcctcatgaaaaccttatattccctgaggaggttctaccacgtggaaacgctctttaatggaactttagctttagctggtcgtgaccaagaaaccaccggtttcgcttggtgggccgggaatgcccgacttatcaatttatctggtaaacttttgggagctcatgtagcccatgccggattaatcgtattctgggccggagcaatgaacttatttgaagtggcccattttgtacctgaaaagcccatgtatgaacaaggattaattttacttccccacctagccactttaggatggggggtaggtcctgggggagaagttatagacacctttccgtactttgtatctggagtacttcacttaatttcttctgcagttttgggctttggcggtatttatcatgcacttctgggacccgaaactcttgaagaatcttttccctttttcggttatgtatggaaagatagaaataaaatgaccaccattttgggtattcacttaattttgttaggtgtaggtgcctttcttctagtattcaaggctctctattttgggggcgtatatgatacctgggctccgggagggggggatgtaagaaaaattacaaacttgactcttagcccaagtgttatatttggttatttactaaaatctccctttgggggagaaggatggattgttagtgtggacgatttggaagatataattggaggacatgtatggttaggttccatttgtatatttggtggaatctggcatatcttaaccaagccttttgcatgggctcgccgcgcacttgtatggtctggggaggcttacttgtcttatagtttagctgctttatctgtttgtggtttcattgcttgttgttttgtctggtttaataataccgcttaccctagtgagttttacggacctacggggccagaagcttctcaagctcaagcatttacttttctagttagagaccaacgtcttggagctaacgtggggtctgctcaagggcctacaggtttaggtaaatacttaatgcgttctccgactggagaagttatttttggaggagaaacaatgcgtttttgggatctgcgtgctccctggttagaacctttaaggggtcctaacggtttggacttgagtaggttgaaaaaagacatacaaccttggcaagaacgacgttcggcagaatatatgactcatgctcctttaggttcgttaaattctgtagggggcgtagctactgagatcaatgcagtcaattatgtctctccgagaagttggttatctacctctcattttgttctaggatttttcctattcgtgggtcatttatggcacgcgggaagggctcgggcagcggcagcgggatttgaaaaaggaattgatcgtgattttgaacctgttctttccatgactcctcttaactaaagtagtaggtaaaacaaataggttcatattaaaaagtcttctttgtttctttcaattcaatctaaatttttctggctcggctatactatccagccccgccagaaaaatttatttatcatgctaagaagtaaaaaaagccaataaagagaaaaatagattcatccaacaaaaggagagagagggattcgaaccctcgatagttatttttatgaactataccggttttc

SEQ ID NO: 119535 - DNA, 1199 bp, Arabidopsis thaliana
gaaaaagattgcagtcagtttgataatgatcgagtgacattgctttttcgctccgaaccaagggatcccttatatatgatgcaagatggatcttgttctatcgttgatcagagatttctctatgaaaaatacgaatcggagtttgaagaaggggaaggagaaggagtcctcgacccgcaacagatagaggaggatttattcaatcacatagtttgggctcctagaatatggcgccctcggggctttctatttgattgtatcgaaaggcctaatgaattgggatttccctattcggccgggtcatttcggggcaagcggatcatttatgatgaaaagtatgagcttcaagagaatgattcggagttcttgcagagcggaaccatgcagtaccagagacgagataggtcttccaaagaacaaggcttttttagaataagccaattcatttgggaccccgcagatccactctttttcctattcaaagatcaaccctttgtctctgtgttttcacatcgagaattctttgcagatgaagagatgtcaaaggggcttcttacttcccaaacggatcctcctacatctatatataaacgctggtttatcaagaatacgcaagaaaagcacttcgaattgttgattcagcgccagagatggcttagaaccaatagttcattatctaatggatttttccgttctaatactcgatccgagagttatcagtatttatcaaatctgttcatatctaacggaacgctattggatcgaatgacacagacattgttgaaaaaaagatggcttttctcggatgaaatgaaaataggattcatgtaatgtaacaggagaagggtttcccattacttagccggaaagatatgtggccatgaaatagggattaagtggaacggaattgactgggtggtagagttgtataaacacctgtttcttccacttagctccatggaacaatatgctactactgaaacatggaagaattgaaatcttagatcaaaacactatgtatggatggtatgaactgcctaaacaagaattcttgaacagcgaacaaccggagctattactcactacatcaaaaaaatttccattaataaaagatggaaatccattggaaaatcaaaaatacgcatgtcggattaaattgttgttgctatctgttccaataacgaatcaactgaataact

SEQ ID NO: 119536 - DNA, 409 bp, Arabidopsis thaliana
tgaattttcacggacgacctctctctctcatctactaagctctcctccgagtattgttggcttcagaccaaatcttctccggcgctgtagcgtttcccccgtttcccctttttaacctttgcaaacaatgagtgggcgattttctcggtcaatctatgttggtaacttgcccggtgacattagggaacatgagattgaagatatcttttacaagtatggccgcattgtcgatattgaattgaaggttccacctcggcctccatgttattgctttgttgagtttgagcattctcgggatgctgaagatgccatcaagggccgtgatggctataatttggatggctgtcgcttgagggttgagcttgcacatggtggtcgaggacagtcttcaagtgatcgtcgtggtggc

SEQ ID NO: 119537 - DNA, 559 bp, Arabidopsis thaliana
  unsure (1)..(559): unsure at all n locations
cnnnnnnnnnnnnnnnnnnnnnnnnnnnnnnnnnnnnnnnnnnnnnnnnnnnnnnnnnnnnnnnnnnnnnnnccacgcgtgcgctgctttaatggaaggaccttgacacttctctctctctttctctttgctattcatcttctacagtttcttaaaaattatactcttcttctccaaaatatctcagactctcttatttttgatcgtcttcttcttcttcgttgtgagcttccatttttcatccaggatttgttttttccgtttgaggtaaagcagctttgcagttaaagaaaccttgagtatccaatgtccccggaagaggagctacagagcaatgtatcggtggctagttcttcacctactagcaattgcatctccaggaacactctaggaggacttaaagagcataactacttgggtctctctgattgttcttctgttggaagctctactctctctccccttgctgaagatgacaaagctactatcagcctcaaggctacggagctgacacttggtcttcctggatcacaatctcctgcgagagacacagagctta

SEQ ID NO: 119538 - DNA, 874 bp, Arabidopsis thaliana
tttggtttagtttagactctctctttctttgtttgtatataaatacacaaaccattttattcagctccttcttcttcaaccttcgcacgacctcaaaaatctctcaacaacacacaaaaagatccaaaatccaaaatcatcctctccctccatttcggacgaccctctaaattcttttgtctaccggaaaattttcgattggatccaaattttctggcgcctaatttatcgatttggttttctattgtcattttcttttcacaggtcactcgattttctccattttcttttcatttgggactctcttctcgccgtcgccatcaccggagataaattccgtggtgctgcgtttggccttaccaaaatttgagatctcaattgaagaaagaaacatagcgaagaagaagacgatcaaggaattgaaattagattctgttatctctctatcatcttcaatttttttaatttgattgttttcaccaaaaaaacaaaaactatgaacacgacgttacgttacgatccgagacagatctcgaggcaaacgaaaccgtcagatacaccatcgtcttctccgtctcgtagtaaccggagacagcctttgcttcagagaagtctctcttctccgtcaccacgagcttcttgcggcggatctactcccgccgagttttgcggtggtacgacggcgagttgcgccgccgtgtggtgttgttgtccctcggactcgttaacctactcgttctcgcgatctacaaagttcctaaaggaatctgccgtcgcgctatcagaagtcgccgccgtaaacaactcgtgaagaacggaatccttccgccgcttccgacggacgggaaaaacgagcggatgcagagagttttca

SEQ ID NO: 119539 - DNA, 837 bp, Arabidopsis thaliana
ggccccccctcgaggtcgacggtatcgataagcttgatatcgaattcgcggccgccctccacatcatcagccacaaaagcagcatcagcagcagctaactggtcaaatgctccagagccatgctcctaacaaccagaatgggagtgcttccactggttcctcagcagctcaaaagcatctgcagaaccaacagttgaggccaccgattaatcatgggaactctcaaggatttccaactcataaagtgcaatcgcagcctttgaattttcagcagaggcagcaacccagagaaaatgctactcaacatagtgagactgtaggggaagatagcccatcaactgctgatagccggggttctcgttccaatgttgcctatggccagaactatggtatgcaaatgcaaccaactaacttgggtttgatgagttcccctgcccctggtggtggggtggttggatcttcgagcagtcatggtgaaaagaaatcacagcagcaggtttcaaaggctggtgtagaatccttccagtcaccgggttatgctatgacttttgcgacgttcaatggggctaacactgctcctaccctaaacatgtcatcaattgctcagaatcacgctatgttccacagcatgcccgaagcagcaaggcaaggttatcagatgatggctgcttaagcagctcaacaaaaaatgaactacggtgccttcaattagaagatggaaaaatcttgggttctaattgggtggtgcctgcctactggcttaataaataccccccttgaaggaaacaaaaaggaaagtccagggaaggaaggggggcaaatagggggaaaaaacca

SEQ ID NO: 119540 - DNA, 550 bp, Arabidopsis thaliana
ccgagagacagctagaagaaatcaattaatgcttcaacaagctttgcctccaggagcagctaatagcatcttgcatggtccgacattcatattccccttgggccaacagcctcacgctgccgctacaatagctgccgcatctgtcagacctcctaatagtggcatcacatcttctggaccaacagctacttctacctccatgaatggttctgcatcagctactccagctggtgccccaacaatgagcttcagttatcctgccatgccgggaaatgaaacgcagtacctggccattttgcagaataacggctatccatttccagttccagcacatgttggtgcacaacctgcttatagaggtgctcctgggcagccgatgccattttttaatggttcattctattcctcccaaatgatccagcctccacatcatcagccacaaaagcagcatcagcagcagctaactggtcaaatgctccagagccatgctcctaacaaccagaatgggagtgcttccactggttcctcagcagctcaaaagcatctgcag

SEQ ID NO: 119541 - DNA, 1004 bp, Arabidopsis thaliana
  unsure (1)..(1004): unsure at all n locations
cagctctctacgactcactatanggaaagctgacacgcctgcaggtaccggtccggaattcccgggtttacccacgcgtgcgcggacgcgtgggctcagcagctcaaaagcatctgcagaaccaacagttgaggccaccgattaatcatgggaactctcaaggatttccaactcataaagtgcaatcgcagcctttgaattttcagcagaggcagcaacccagagaaaatgctactcaacatagtgagactgtaggggaagatagcccatcaactgctgatagccggggttctcgttccaatgttgcctatggccagaactatggtatgcaaatgcaaccaactaacttgggtttgatgagttcccctgcccctggtggtggggtggttggatcttcgagcagtcatggtgaaaagaaatcacagcagcaggtttcaaaggctggtgtagaatccttccagtcaccgggttatgctatgactnttgcgacgttcaatggggctaacactgctcctaccctaaacatgtcatcaattgctcagaatcacgctatgttccacagcatgcccgaagcagcaaggcaaggttatcagatgatggctgctcaagcagctcaacaaaaaatgaactacggtgcttcactagaagatggaaaatctgggtctattggtggtgctgctactgctaataatacccctgaggaacaaaggaagtcaggaggaggggcaatagggaaaacgagtggtgggaatggtgggcagtctattgctttctctaacaaacaggatttagctgatgcatctgtttctgctgtcacgagtggtagcatcgttgatagctcatcccgtttactcaaccttggttctgctctgcacagagttcgggttctttacccacgtctcatcatcaacaactactacaacaacagcagcaacagcatatgcaacggagtcaatcgcagcaaccttataccaccatgtacctccagaagcagcaacggtatg

SEQ ID NO: 119542 - DNA, 417 bp, Arabidopsis thaliana
ttagaattagcctaacttaaaaaccaatttgtttaaatacatctaaaaaaaataggaagcaaaagaagaaaaaaagacaatatatagataaaatatataaaaaataaaggttcgcatttttttagttccaaaaaggggattcgtatttttcccatcactaccttgagacaataataaaaaaagatcttttatttcctcttaatgaggaaataaaagatcttgaaattaattactttaagtgagcaaaaaatcttatgtttgtacaatataaaaagatacatcaaaaaaaatattttgataatttttttgatttctcttgagcaattaggaaaatctaattttatttaaaattgctaaggattttgaagaagtttttatttttcgaaaaagcatttttttatcaatatttcttcatat

SEQ ID NO: 119543 - DNA, 505 bp, Arabidopsis thaliana
  unsure (1)..(505): unsure at all n locations
ccatttnaaaaccatctttgatcttttcattttccctctttttgagtgatgatgatcagtaagcaaatcttgagcataccccatcttcggattcttaaaatcaacactctttttaactcagattttggtactgatgttgatgttccgagcagcaccatctcaatttcaactaaaccaaaccgctctgagttagtttgtttttcgatggtccgggtttggaattggttagtgaaatcatgacgaatttcggcttgatggtttagcatgtttttaccggttaagttatgtacggttcatgatcaatggatctctgagggatctaggagtgtttaagtctacttataaagtcaaactacatattgctacgaaccctattatccgacataggaacaacgacatttcctttaagagatgatgatttggaagatctctgaatttgattaattggtagaattaaaatgtgttcatcagcagtggtatcaatacatttctcagatgatgattg

SEQ ID NO: 119544 - DNA, 512 bp, Arabidopsis thaliana
  unsure (1)..(512): unsure at all n locations
cgttaacccatccctncctttctcgtggccccaggcgaaaacatgncccccnggnntngcctgataacatcccttatagttcncngatatngtagtncgcactgattatgcagtccctaagatgcattctcggngcagccagccgtttagtgggnttatttttttcgggtccccctgagcaaaatcggttcttggcctctgggtttacctagagcaaaaccagttccgatggttacttgagttttgctcaggtcttatgggattggagtggaaggtcgtgcgctcggcagcatggaagctttctcctttcaatcagcttcagtagagttttggtttctttgtttgttttttatttgctttaagaatttaatgtaaataaaaagccaatgaggattatcatacaatgtcatgaaggatctatgaattagtatctaatgttagtatatattatggtttttcctaagttggtactttctctgtttgaagtttgattatcatacatgtatttgtta

SEQ ID NO: 119545 - DNA, 1026 bp, Arabidopsis thaliana
  unsure (1)..(1026): unsure at all n locations
taaaaacccaaacaaatccattaaaatgtatcaaaagtcatgagaaaatttcctatacttgttcctttatatctgcgagaagtcatgaaccttatccatttattagttttcttctgaccgactaaacctgataatcactaatccaccgttagatcttaaaattccaaatccaaaatggacggtcaagatcacttaacgaaaaagaaaacagtttcctgtccagaaatgtctaaccttgaggcctttttctctttcctttaaacttttttttttcgattataaattttctcgtgaagctaatttttcctgagaaagaaagcgaaacttcgctggcgactaaagattgctgagaagacacgtcgtctctgtgagaactttttctttttcttctggtatattctggagacagatattgttttttcttctgattagagaataatatgacggaagtgattagcaaaacgagtttgttcttaggagcttgtggtaatcatcaccgtgttgatgatttctctttctctccggtgagttttggtgggtttggtttgaaaaagagtttctcttgtctgaagcttaagagtcagaagcctcttagaagtgtattttacggaaaacagatcgttttcggagattctcaagacgagagcttcagaagatcatcagctatcacagctcagacaactttgaggattgggacagctcagaagtggtgggagaaaggtctgaaagataacatgagagagatctcttcagctcaagagctcgttgattctcttactaacgctggtgataagcttgttgttgttgatttcttctcacctggctgtggtggctgcaaggctctccatcccaagntatgtcagtttncagagatgaacccggatgtccagttctcaggtgattacgggggcataagccntgtgtaaagccttgggccatgtctccntttnccgtttnccggggttcagggcggttcanttagttccatnccggcaaaatnagngtctgaaaatgccangncccttc

SEQ ID NO: 119546 - DNA, 562 bp, Arabidopsis thaliana
  unsure (1)..(562): unsure at all n locations
tcctttcnccanaaggcccacttcttcccccaaccctncccgttggaaagacccccccnctgatnaacccaagccccctgccctcttccttcgatgccccaatgccgaaaaaccattggtctccgcagggagatgagcctgaataaccatctccctgtatagtttgcgtgatagtagtagtagcagcagctggatatattgcagtacctaaagatgtcagttctcggagcagccagccggtttagtggggtttagttttttttcgggtcccctgagcaaaatcggttcttggcctctgggtttacctagagcaaaaccagttccgatggttacttgagttttgctcagttcttatgggattggagtggaaggtcgtgcgctcggcagcatggaagctttctcctttcaatcagcttcagtagagttttggtttctttgtttgttttttatttgctttaagaatttaatgtaaataaaaatccaatgaggattatcatacaatgtcatgaaggatctatgaattagtatctaatgttagtataaaaaaaaaaaaaaaaagaaa

SEQ ID NO: 119547 - DNA, 549 bp, Arabidopsis thaliana
  unsure (1)..(549): unsure at all n locations
tggccacggccccccctcgatgtcgacggtatcgataagcttgatatcgaattcgcggccgcgagatgccttggcaaagcatggtccagataggtgcagcctcggaccgaccaaaggccttgaagagaaagagcttgtggcacttgcagccaacaaagaactcaactttacttacacaccaaagcctgtaccagttgagaaagaagcagccactcctgattcaaacccaagtctccctgttcctcttccttcgatgagctccaatgacgaaaaaacattggtctccgcagggagatgagactgaataaacatttccctgtatagtttgcgtgatagtagtagtagcagcagctggatatattgcagtacctaaagatgtcagttctcggagcagccagcccgggtttagtgggggtttaggttttttttcggggccccttgagcaaaattcggttctttggcctctgggggtttacctagagcaaaaccacgttccgatgggtacttgtaggttttgctcagttccttattggnttttgngttggaagg

SEQ ID NO: 119548 - DNA, 555 bp, Arabidopsis thaliana
gtattttacggaaaacagatcgttttcggagattctcaagacgtgagcttcagaagatcatcagctatcacagctcagacaactttgaggattgggacagctcagaagtggtgggagaaaggtctgaaagataacatgagagagatctcttcagctcaagagctcgttgattctcttactaacgctggtgataagcttgttgttgttgatttcttctcacctggctgtggtggctgcaaggctctccatcctaagatatgtcagtttgcagagatgaacccggatgtggcagtttcttcaggtgaattacggggagcataagtccatgtgttatagtcttggtgtccatgttctcccttttttccgattctaccgtggctctcagggttcgtgtttgcagctttagctgtaccaatgccacgatcaagaaattcagagatgccttggcaaagcatggtccagataggtgcagcctcggaccgaccaaaggccttgaagagaaagagcttgtggcacttgcagccaacaaagaactcaactttacttacacaccaa

SEQ ID NO: 119549 - DNA, 603 bp, Arabidopsis thaliana
gaccacgcgtccgctgattcatctcctctgtttaagcaaagcacttttctaaaatcccacaggagaagagagatcggaagagatgacgaagctggcggaaaaatcgggaagcagaccaccgtgggtgggattagcggcagccgcatgggttcaggtctcggcgggaagtggttcgacgttcccgctttactcctccgctctcaaatcggttttgggttttagccagcagcaggtcacgatccttggcgttgcttgtgatttgggtgaaaacatgggtcttcttcctggatacgccagtaacaagcttcctccatggtcgatgcttctcatcggagcttcctcttgtttcctcggcttcggcgttctttggctctccgtcagccaaatcgttcttggcttgcctttttggctgctttttgtagctctagctttagctaccaatagcaactcgtggttcggtacagcatctcttgtcaccaatatgaggaattttcctatgagccgaggccctgtggctggacttctcaaaggttatattgggatcagtggtgcagcattcactgacttgttcagcatggtgcttcaccattcagctatggatct

SEQ ID NO: 119550 - DNA, 971 bp, Arabidopsis thaliana
  unsure (1)..(971): unsure at all n locations
cccaagcgtccgtgcaaacaaaggaagaagaatcaagatggctctggaaatctgtgtgaaagctgctgttggtgctcctgatcatctcggcgactgtccgttcagccaacgggctcttctcacactcgaggacaagagtcttacctacaaaatccatctgattaacctctcggacaaaccccagtggttcttggacatgagccctcaagggaaagtaacccgcccaaggtgctttaaattacgacccttcgactaataagggaaaagcttgggtaacgccctgcaagggtacccggttccggaaattcccggggtcgacccaacgcgtccgttcaagactcctgctgattttgcctctgttggatccaacatttttggtacttttgggacattcttgaagagcaaagactccaatgacggatctgaacatgccttgcttgttgagctagaagccttggagaaccatctcaagagtcacgatggtccttttatcgccggggaaagagtttccgcggtggatctaagcttagcaccaaagctttaccaccttcaagttgctcttggccatttcaaaagctggtctgtccctgagagctttccccatgtccataactacatgaagactctgttctcgctcgactcttttgagaaaactaagaccgaggaaaagtatgtgatctctggatgggctcccaaggttaacccttgaaactatgcaccgttatgagatcgttggtgtggtaatgttgttcaaggtctctctcttatatcagtcaaataatgtacttggaccttttttatgtaatgtactgtatcaatcaaataagaagcctattttggaataaaaaaaaataaaaaagctcggtcgtccgctctagaggatccgagttcacgtacgcgtgcgtgcgccgtcatagctcttgtatagtgtcacnnnnnnnnnnnnnnnnnnnnnnnnnnnnnnnnnnnnn

SEQ ID NO: 119551 - DNA, 1198 bp, Arabidopsis thaliana
  unsure (1)..(1198): unsure at all n locations
nnnnnnnnnnnnnnnnnnnnnnnnnnnnnnnnnnnnnncgaccacgcgtcagcccaagcgtccgattctcttcgtctcaacatttagggtttcagagatcggctgattttcacatccacaagtatggcgactcaaatcagcaagaagagaaagtttgtagcggatggtgtattctacgctgaattgaatgaggttctcacaagagagctagcagaggatggttactctggtgttgaggttagggttactccaatgaggactgagattatcatcagagctactcgtactcagaatgttcttggtgagaaggggaggagaattagggaattgacatctcttgtccagaagagattcaagtttccagttgacagtgttgagctctatgctgagaaggttaacaacagaggtctctgtgccattgctcaggctgagtctctacgttacaagcttctcggtggtcttgctgttcgcagggcctgttatggtgttttgagagtttgttatggagagtggagctaagggatgtgaggtcatcgtgagtggaaagctccgtgctgcacgtgctaagtccatgaagttcaaggatggttacatggtttcatctggtcaaccaactaaggaatacatcgatgctgcagtgagacatgttttgctcagacagggggtgttgggaatcaaggtgaagatcatgcttgactgggaccctacgggcaaatcaggaccaaagacaccattgcctgatgttgtgatcattcatgctcctaaagatgatgttgtctactctgcacctgctcaggctgctgctccagttactcttgtgcaagaagctccactcacaaccgtagattaccctgagatgattcctccagtggcctagagaagacctttttttactattactccatgggattttgttctttttgttataacttttctacttttgacactctctagtcgtatctcttatatcctccaagcagacaagttttttctcatgttgtttcttaacctatgtcaagttttctggaggttgaatgcttttagttcccattgattttttggtcctaagactcgttattagaaaaagaattgcggccaccatggctgggttttggcggcccgcgaaattctgcaggcccggggattcccttaggtactaaaacggcccccccccccgtgaagctcccgccgttgtccc

SEQ ID NO: 119552 - DNA, 736 bp, Arabidopsis thaliana
gataagccttctcactgattaactcacgacccaacccgtcgctgcaaacaaaggaagaagaatcaagatggctctggaaatctgtgtgaaagctgctgttggtgctcctgatcatctcggcgactgtccgttcagccaacgggctcttctcacactcgaggagaagagtcttacctacaaaatccatctgattaacctctctgacaaaccccagtggttcttggacattagtcctcaagggaaagtaccagtgcttaagatcgacgacaagtgggtgactgattccgacgtcatcgttggtatactcgaggagaagtatcctgatccaccactcaagactcctgctgaatttgcctctgttggatccaacatttttggtacttttgggacattcttgaagagcaaagactccaatgacggatctgaacatgccttgcttgttgagctagaagctttggaaaaccatcttaagagtcacgatgggccttttatcgccgggggaaagagtttccgcggggggatctaagcttttcaccaaaagctttaccacccttcaagttgctctttggccatttcaaaaaggctcggtctggcccaggagagctttccccatgttcataactacatgaagactttgttcttgctcgacttttttgagaaaaactaaaacccggggaaaaggtatgtggatctcctgggaaggggcctcccccaagggtgtaaaccccctttgaaa

SEQ ID NO: 119553 - DNA, 843 bp, Arabidopsis thaliana
  unsure (1)..(843): unsure at all n locations
cggagcacggtgattttccgatgaaggtttattgttcagatgatgacacgtggaggtacgtgagtggtgagaagctacagggggagaagtattcggcgtcctttcgccgtgacgggagctgatgatcgtgtgtttgtggtggccagtgggattaacgtagcggaagggagagtgagtgaagggcaaaatggggattttagtgttgagtggaagatggtttcgtctcctaaaagttctattcagttttcacctgctagttgtcatgtgctatatgtttgatgtgtaattgttgttagttttgaatttgtaaactcttttgcttgaattcaagcattctcttcgtctcaacatttagggtttcagagatcggctgattttcacatccacaagtatggcgactcaaatcagcaagaagagaaagtttgtagcggatggtgtattctacgctgaattgaatgaggttctcacaagagagctagcagaggatggttactctggtgttgaggttagggttactccaatgagggctgagattatcatcagagctactcgtactcagaatgttctcggtgagaaggggaggagaattagggaattgacttcccttgttcagaagagattcaagtttccagttgacagtnttgagctttatgccgagaaggttaacaacagagggtctctgtgccatcgntcaaggctnaagcctttacggtacaaggttcttnggtggtctcgctnnttncgaaggggctttccaatggtgtnttgagggntttgttnttggngaantgggcctaagggattccgagggtntncntnagtggaaacttcngnccttccaaa

SEQ ID NO: 119554 - DNA, 575 bp, Arabidopsis thaliana
  unsure (1)..(575): unsure at all n locations
tgcacacaaaggaagaagaatcaagatggctctggaaatctgtgtgaaagctgctgttggtgctcctgatcatctcggcgactgtcaccatcttctctttctctctctgtgtctgttttgcattaagctccattttgcaattcttagttcctgagctttgatcgttggtaaaattactaatttaagtgtttgtttgtcgttttaggtccgttcagccaacgggctcttctcacactcgaggagaagagtcttacctacaaaatccatctgattaacctctctgacaaaccccagtggtcagtttctctcacggctaaacccttaagatcgggtctagtttgaacttgtttagccataatctctgaaattttactttgtaactggtacggggctttgtgttanccggaaatttggattgggttcaaggtgcgnncattgtngttaaccgggaccttgaaattgggngntttnggttttanatatnntgcagggttntttgncantnagncccaaggggaagtnccagtccntaaaatcgccggcaagtgggggnctntttccgccggnancnttgg

SEQ ID NO: 119555 - DNA, 474 bp, Arabidopsis thaliana
  unsure (1)..(474): unsure at all n locations
aaggtttagatatcggtgttgtaaccgccattgctgctccagcaagtttgaaggtggaatttgaaggcaatggaggtnatgctggtgctgtacttatgccatatagaaatgatgccgggcttgcagctgcagagttggctcttgccgtggagaaacatgtattagagtcggagtcaatagatactgttggaactgttggtattctggagctacatcctggggcaatcaacagcattccaagcaaatcccatcttgaaatcgatacaagggatatcgatgaagcgagaagaaacaccgtgatcaagaaaattcaggaatctgctaacacggtagctaaaaaacggaaagtgaagctatcaggattcaagattgtaaatcaaggtccnccagcactnttntgncaaacntggtaatcaggaaatggcagngnagccccagnncttaanttttcnnnaagttgtngtnaccggnttt

SEQ ID NO: 119556 - DNA, 514 bp, Arabidopsis thaliana
  unsure (1)..(514): unsure at all n locations
cccacgcgtccgcggacgcgtgggttcagatataggcagattctcacatttgcaaacatgacgactcagatcagcaagaagagaaagtttgtagcggacggtgtgttctacgctgaattgaatgaggttcttacaagagagctagcagaggatggttactctggtgttgaggttagggttactcctatgaggactgagattatcatcagagctacacgtactcagaatgttctcggtgagaaggggaggagaattagggaattgacttcccttgttcagaagagattcaagtttccagttgacagtgttgagctttatgccgagaaggttaacaacagaggtctctgtgccatcggtcaggctgagtctttacggtacaaagcttcttngtggtctccctgttcgtagggcttncnatggtgtttttaaggtttnttattgagagtgggcctaagggttccangtatcntnantggaaacttcntcnttccaanccatcnttaagtcaaaaang

SEQ ID NO: 119557 - DNA, 299 bp, Arabidopsis thaliana
cgaaggtttagagattcgttggaaggagctccgaagaggctagacaatagtcatgtgtgaagattagttggcaatggaggtcatgctggtgctgtacttatgccatatagaaatgatgccgggcttgcagctgcagagttggctcttgccgtggagaaacatgtattagagtcggagtgagtatacgcggtggatctaagcttagcaccaaagctttaccaccttcaagttgctctgggccatttcaaaagctggtctgtccctgagagctttccccatgtgcataactacatgaagac

SEQ ID NO: 119558 - DNA, 793 bp, Arabidopsis thaliana
  unsure (1)..(793): unsure at all n locations
nnnnnnnnnnnnnnnnnnnnnnnnnnnnnnnnnnnnnnnnnnnnnnnnnnnnnnnnnnnnnnnnacccacgcgtccccacgcgtccgcccacgcgtccgcttcttcacagaaggaacgttcgaattgattcgcttcttaatgtcactctctacaatagcttctggtatcggcgttctcgagcttccttgtttgcgtctgttaccaatctcaagcacccaaatccagtttctcactgttgaagctagaaaacaatctagaagaataagacgcgagcgctccttcagcccttttccagtacttattcaatcgaaccgtcgtcttcgtcatggtttctcagagctcaattcgagttttgatcgttccaacagtggagaaactggttccgataccactcttaaagatggtgaagaagtgaggagtgaaagctcttcaggtgttggtgatagctatgtgggcttgtttgtgggaatgctcggtttggacaacgatcctcttgatagagagcaggcgatagagacgctatggaagtactctttgggtggaaagaaatgtattgatgcgataatgcagtttcatgggttgtttgaatctaattgtcaatcttctcaagtctgagtccagctccgcctgtgaagctgctgctgggcttatacggtctatagcttctgtgaatctgtacagagaatcccgtgctgagagtggagcgttggaaagataaccgctctactgagccgaccttcgctagcttcaggggggaaagaacaatgcttatgtgctctggggaatctgact

SEQ ID NO: 119559 - DNA, 623 bp, Arabidopsis thaliana
gctctatacgactcattaggggaaagctggcacgcctgcaggtaccggtccggaattcccgggtcgacccacgcgtcccgagaaaagggaaaattaccagacaagagttcttctttcttctctctgcctgcttctttttcctctcttttctctctctctctctttctttgtgaaaatctagaagaagagaaagctacaaaaatctcaacatcgaggtaagagttttggctacagagcaaccatgctaacttgcgccttctcccaaaatcttatccactaatctcggtaaggaaagtgatgttggcaaaatggtgaagaaaggaagttggttttctgctatcaaaagggtttttactccacattccaaagagaagctagccaatcaggaaccagagagaaagagtggcaaagaaaagaagaagaaaggttttgggaagctaaggcatggcgagaccaattcatttcttcccatcttcagagagcctagtagtatcgaaaagatcttgggcgaggctgagagagatcacaatcttgtcttcaggcctcctactcctgatcgaccaaatccatattcagcctctcctcctccgaggcctgcttctcctcgggtagcttccccaaga

SEQ ID NO: 119560 - DNA, 1457 bp, Arabidopsis thaliana
gccggccctaatacgactctacttagggaaagctggtacgcctgcaggtaccggtccggaattcccgggtcgacccacgcgtccgcccacgcgtccggagttcttctttcttctctctgcctgcttctttttcctctcttttctctctctctctctttctttgtgaaaatctagaagaagagaaagctacaaaaatctcaacatcgaggtaagagttttggctacagagcaaccatgctaacttgcgccttctcccaaaatcttatccactaatctcggtaaggaaagtgatgttggcaaaatggtgaagaaaggaagttggttttctgctatcaaaagggtttttactccacattccaagaaccctttcaccaaagcctccttctccaagagctgaagttccaagatccctttcaccaaagcctccttctccaagagctgaccttccaagatcactttcgccaaagccctttgatcgatcgaagccatcatcagcctctgctaatgcccctcctactcttaggcctgcttctactcgagttccttctcagagaattacacctcacagtgttccttctccaagaccaagttcaccaagaggtgcctccccacatgccatctcttcaaagccgccttctccaagagcagagccaccaacattggacactccaagacctccctctccaagagctgcttctctaagagcagacccaccaagattggatgctgcacgacccaccacgcctaggcctccttctccactagcagacgcaccaagattggatgctccacgacccactacgcctaagccgccttctccaagatcagacccgccaagattggatgctccaagacccactacgcctaagcccccttctcacaagatcggtttctcctagggctgtgcagcggcgggagattgtttatagtccagagccaacgcttccggtccatcatgcttctgcatcaaagattcaaggagctttcacagtgttacatggcaaggtcgagttccagagctctcaaaggtcctgtcatgacttcaaggtgtggtgagaggattacagcgcgaagcggcagacgataaatgcaatgaagtacatgcagcaagtggtccgtgttcaatcccaaatccagtcacgtcgcatcaaaatgttggaaaaccaagcccaggtagagaaagatgaagccaaatgggctgcgtctgaagctggtaatgataattgggatgacagtgtgctgaccaaagaggaaagggattctagatcacaaagaaagactgacgcaatcatcaagagagaaagatccatggcctatgcatattctcgcaagttgtggaagaacagtcctaaagtctactgaggacaatcgttctttccctcaatggtggacctgggtggaccggcagaatcctcttgctagtcctgcaccgagctatagccaaccacaaagagatt

SEQ ID NO: 119561 - DNA, 543 bp, Arabidopsis thaliana
tacgactcactattgggagagctggcacgcctgcaggtaccggtccggaattcccgggtcgacccacgcgtccgccaagagttgcctcaccacgagtcccttctccaagagctgaagttccaagaaccctttcaccaaagcctccttctccaagagctgaagttccaagatccctttcaccaaagcctccttctccaagagctgaccttccaagatcactttcgccaaagccctttgatcgatcgaagccatcatcagcctctgctaatgcccctcctactcttaggcctgcttctactcgagttccttctcagagaattacacctcacagtgttccttctccaagaccaagttcaccaagaggtgcctccccacaagccatctcttcaaagccgccttctccaagagcagagccaccaacattggacactccaagacctccctctccaagagctgcttctctaagagcagacccaccaagattggatgctgcacgacccaccacgcctagggcctccttctcactagcagacgcaccaagat

SEQ ID NO: 119562 - DNA, 551 bp, Arabidopsis thaliana
  unsure (1)..(551): unsure at all n locations
cnnnnnnnnnnnnnnnnnnnnnnnnnnnnnnnnnnnnnnnnnnnnnnnnnnnnnnnnnnnnnnnnnnnnnnccacgcgtccggaaaagggaaaattaccagacaagagttcttctttcttctctctgcctgcttctttttcctctcttttctctctctctctctttctttgtgaaaatctagaagaagagaaagctacaaaaatctcaacatcgagtttccaatttggttcatgcaggtaagagttttggctacagagcaaccatgctaacttgcgccttctcccaaaatcttatccactaatctcggtaaggaaagtgatgttggcaaaatggtgaagaaaggaaggcggctttctgctatcaaaagggtttgtactccacattccaaagagaagctagccaatcaggaaccagagaggaagagtggccaagaaaagaagaagaaaggtttttgggaagctaaggcatggcgagaccaattcatttcttcccatcttcagagagcctagtagtatcgaaaagatcttgggcgaggctgagagagatcaca

SEQ ID NO: 119563 - DNA, 702 bp, Arabidopsis thaliana
ggtcgagcacgcgtccgatttaagttctgtttcttgtttgttcactttctggccttctggggtgtttcaaaagatctgtctttttttgttctctttgatgtctctagtcttgttgggatgtgaaacacatgattttcgaggagtagagagagacagagagaaattaagggaaagagctcacttgtgtgacttgttctgtgagaaaattctctaagcaaaattctcaattttttcagcttctttctaatttatgcatattaaaattcagagcttttacacttgaaagttgtcatctttgtctcagtctctctctctctctctcgtttgcatagaagaaacaatttttgtgttgatttagtcagttcacctaatctgaagagaagttaaaaagtttggctaagatttgtctaaaacttaaaacttccttttcatggaagctcaacagcttaatctctttggcagtttccttatcttagtttctttggatctgcctttgattttctttcatttgtcttttaactgcagtttccaatttggttcatgcaggtaagagttttggctacagagcaaccatgctaacttgcgccttctcccaaaatcttatccactaatctcggtaaggaaagtgatgttggcaaaatggtgaagaaaggaagttggttttctgctatcaaaagggtttttactccacattccaaagag

SEQ ID NO: 119564 - DNA, 904 bp, Arabidopsis thaliana
  unsure (1)..(904): unsure at all n locations
cccaagcgtccggtgaggtgctacaagcatgagaagctatgggaaggcatccagtcgcttggaagtctcgaagagatggatctgtcagaatctgaaaacctgacagaaattccagatctttcaaaggccaccaagctcgagcctttgatatctcaacaactgcaaaagtttggtgacacttccttctacaattgggaatcttcatagattggtgaggttggaaatgaaagaatgcacagggctggaggttcttccgaccgatgtcaacttgtcatctctcgaaaccctcgatctcagtggttgctcaagtttgagaacttttcctctgatttcaactagtatcgaatggctctatctggaaaacaccgccattggagaagttccctgctgcattgaggatttcacgaggctccgtgtactactgatgtattgttgccagaggttgaaaaccatctccccaaacattttcagactgacaagtcttgtgctcgccgactttacagactgtagaggtgtcatcaaggcgttgagtgatgcaactgtggtagcgacaatggaagatagcgtttcttgtgtaccattatctgaaaacattgaatatacatgtgaaccgtttctggggtgagttgtatggtgaatgggtgattgggacttagggacctgaatattttagcttccgtaatttgcttcaaaattnggtagagatgcncgaanacctcattcctaccggtcaatgctcaaagcctttngccttaccagggngnngaatccctaaggatttcacggatncggnttnttgngnntcccnaacctgcactttnccccgggggntttttntcaaacctctttcngtttaagntttcnncgtggttacccccttcnagggaaaggntttntcgatttc

SEQ ID NO: 119565 - DNA, 773 bp, Arabidopsis thaliana
gggagctctatacgacttacttagggaaagctggtacgcctgcaggtaccggtccggaattcccgggtcgacccacgcgtccgcaactatacacatataacaaaacaaaacactctcctgtgacttctcttctcttcttctctctcgatctcttccccaaaaatcttcagatctctacatcaccggagagacgagaaacactcaccgtgagaaaaccatgattccttacgctacagtcgaagaagcttcaatcgcactgggacgaaacctcacacgtctcgaaactctatggttcgattactccgccacgaagtccgattactatctctactgtcacaacattttgttcttgttcctcgtcttctctctcgttcctctccctctcgttttcgtcgaattggctcgatctgcttctggtttgtttaatcggtataagatccagcctaaggttaattaccctttatctgatatgtccaaatgttacaaagacgtcatgacgatggttatcctcgtcggtgggccattgcacctcgtttcttatccttcgattcagatgattgagatacgatctggattacccttaccaacaattaccgagatgctgtcacagttagaagtctactccttggtagaagactacactaccactggggacatagattctttcatagtaatggggagacgaatagatcatcgggtcatcaccagtccccagtcctatagattgctgtcctatgcacttggggtgaagtttgcttctggatcccacgtta

SEQ ID NO: 119566 - DNA, 839 bp, Arabidopsis thaliana
  unsure (1)..(839): unsure at all n locations
ctaatacgactcacaatagggaaagttggtacgctccagggaccggtccggaattcccgggtcgacccacgcgtccaaaaaaaaaagcgtgtttctaatgagtctgattctgattcggattctggagataggaagagaaggcggaggtcgatgaagaagcggagttcgcataagagaaggagtttgagtgagtctgaggatgaggaagagggaaggagtaagagaagaaaggagaggagaggaagaaagagagatgaagatgattctgatgagtctgaggatgaagatgacagacgtgtgaagagaaagagtagaaaggagaagaggagaaggagaagccgtcgtaatcattctgatgattctgattcagagtcttctgaagatgatagaagacagaagcggaggaacaaagtcgcagcttcttctgactcagaagcaaatgtttcaggcgatgatgtttcacgcgttggacgtggttcttctaagcggtctgagaagaagagcaggaaacgtcatcacaggaaagagcgagagtaggaaatcgatctatatgagccattttcactctccatttctctcttatcaatgttatgtacaataatgaaacatgtctttgtatgttggatttgatttgtgttgaaacatgtctttgtattttcactctccatactctggtttggtctgtttgtttcaagcttgtgttataacactattgagatacttggtgttnnnnnnnnnnnnnnnnnnnnnnnnnnnnnnnnnnnnnnnnnnnnnnnnnnnnnnnnnnnnnnnnnnnnnnnnnnnnnnnnnnnnnnnnnnnnnnnnnnnnnnnnnnnnnn

SEQ ID NO: 119567 - DNA, 638 bp, Arabidopsis thaliana
  unsure (1)..(638): unsure at all n locations
gccggcactnnnnnnnnnnnnnnnnnnnnnnnnnnnnnnnnnnnnnnnnnnnnnnnnnnnnnnnnnnnnnnnnccacgcgtccgcggacgcgtggggcgaagaacaaagtttgaaccttttcttcatccatctctctccgtcgcttcttcctaacgattccttcactcgaatcaggtttgtgaaggttttttctagggtttcgaaaagatgccggcgacagcaggaagagtgcgtatgcccgcaaacaatcgggtgcatagtagtgcagcgcttcagactcatggaatatggcagagtgcgattggttatgatccttatgcaccaactagtaaagaagagcctaagacgacacaacagaaaaccgaagatcccgagaactcgtacgcgagttttcagggacttttggctcttgctaggattacgggttcgaataacgatgaggctcgtggttcttgtaagaagtgtggccgtgttgggcatttgacgtttcagtgtaggaatttcttgagtactaaggaggataaggagaaagatcctggtgcgattgaagctgcggttttgccggggttgggnangtaggagagnttttgnaaagtaggttnggngtnanagttngggaanggggtaaatnttntgc

SEQ ID NO: 119568 - DNA, 753 bp, Arabidopsis thaliana
  unsure (1)..(753): unsure at all n locations
gcttcaacccacccccccccccaaanaaccctagccccccaccanaacccnaaacccccaaacncnnccccnagtttncaggccctttgcctcttcctagaatcccggtccgaataccgatgaggccccgtggttcttgtaacgaagtgtccccctgttgggcattttgccgttccagtgtaggaatttcttgagtactaaggaggataaggagaaagatcctggtgcgattgaagctccggttttgtcggggttggagaagattaggagaggtgttggtaaaggtgaggttgaggaggtgagtagtgaagaggaagaggagagtgagagttctgattctgatgttgattctgagatggagaggattattgctgagaggtttgggaagaagaaaggtgggagtagtgttaagaagacgagttcggttaggaagaagaagaagcgtgtttctgatgagtctgattctgattcggattctggagataggaagagaaggcggaggtcgatgaagaagcggagttcgcataagagaaggagtttgagtgagtctgaggatgaggaagagggaaggagtaagagaagaaaggagaggagaggaagaaagagaggtgaagatgattctgatgagtctgaggatgaagatgacagacgtgtgaagagaaagagtagaaaggagaagaggagaaggagaagccgtcgtaatcattctgatgattctgattcagagtcttctgaagatgatagaagacagaa

SEQ ID NO: 119569 - DNA, 451 bp, Arabidopsis thaliana
ctcaatctcaatctcacgtcaacgaccgtcgccgtcaccggaaggaaacgatttcatcatcttctacaatgatcccatacgctatcattcgaagaagcgtcgatcgcattagcgcgaaacctcacatggctagagactctctggttcgattactccgccaccaaatccgattactacctctactgccacaacattctcttcctcttcctcaatcttctctctcgttcctctccctctcgttttcatcgaatcatctcaatccaacctcagatttgtttcaatcgctacaaaatccaaccaaaagtgaaaaactcatttctcatcgattgttcaaatgttacaaagacgtcatgaagatgttcatcctcgtcgttggtccattaacaactccgttcttatccttcgattcagatgattgagataccgaggggattaccattaccatcatgta

SEQ ID NO: 119570 - DNA, 422 bp, Arabidopsis thaliana
agaaaaccgaagatcccgagaactcgtacgcaagtttttcagggacttttggctcgcgccaggattacgggttcgaataacgatgaggctcgtggttcttgtaagaagtgtggccgtgttgggcatttgacgtttcagtgtaggaatttcttgagtactaaggaggataaggagaaagatcctggtgcgattgaagctgcggttttgtcggggttggagaagattaggagaggtgttggtaaaggtgaggttgaggaggtgagtagtgaagaggaagaggagagtgagagtcctgattctgatgttgattctgagatggagaggattattgctgagaggtttgggaagaagaaaggtgggagtagtgttaagaagacgagttcggttaggaagaagaagaagcgtgtttctgatgagtctga

SEQ ID NO: 119571 - DNA, 333 bp, Arabidopsis thaliana
acccacgcgtcaggtattctgaaattgatcgttttggttcttcacctttccttttctttgctttctgcttcctcccttaaatacatttcactctgttatcatcgatttttttttcttagatctcaatcttattttgtttgtcttttctccatttttgtttcgttaagaagaaacaatggttatggctatggatcggatcgctttgttctcttcctcatcatcatctgtttatcgtcatcgttcgtctcattctcatggctccaaatcttccagagttttcactattcgttccgactctacagcggttggtaggaaactgtatattcctcctcg

SEQ ID NO: 119572 - DNA, 523 bp, Arabidopsis thaliana
  unsure (1)..(523): unsure at all n locations
nnnnnnnnnnnnnnnnnnnnnnnnnnnnnnnnnnnnnnnnnnnnnnnnnnnnnnnnnnnnnnnnnnnnnncccacgcgtccgaccacgtgagagagagagagtcatagacaggagacgtttgagattgatgaacagcgaattcgaaacaaatcacatggaagaagagctctctttcgctaccgttaccttctccacttttctccttcattagggttttctctcttatttagctgcgcagctctctctctttcttacggattcacttcttaaaactcgttaatttcttgtgggtttttgtctcttttgcgatctgattccgaaagttgagtgagagtgagagaatcatggaggaaggaagtatgttcagatctctattagcgattcttcagtggtggggtttcaatgttaccgtcatcatcatgaacaaatggatctttcagaaactggattttaagtttccactatcggtttcatgtgttcacttcatatgttcgtcgattggagcttacatcgttatcaaag

SEQ ID NO: 119573 - DNA, 769 bp, Arabidopsis thaliana
  unsure (1)..(769): unsure at all n locations
nnnnngtagcccagtagctctaatcgctacgattgctacacaccacatcccttaagaaaaccctaatcatctctctctcgcattctataggaatcgcttcccgaagcttccaacattctcttgtttctcctttgtctctcaatttcagtttcctatattatacgcttgtattaatcaccagtatacattttgtcgtttctgggtctggaaccctagtagttattatagcatccatcgctttcttcaatcgccgtccatcagagtttcaagggatttgctttaaagatcaatcctttcctaagaaaatagcgacaattcatcagcttttcctttcccatccttcattaccttaacttactcgagattcatcttccagctgaaattgtgaaacttcgtttctgggtttttatcagaaaacactctgtgacttattgtgtggtgatcgaggaaagaaaaaagatggttggtggtggaaacaggagagatgagggatcgatgccgattcagaacaccaacttgtttgctgctttggatacttcgaggaagaagaagaagtctgataaggctggtaagagcaaagcttcctctaagagagaagattcacagaaggagcctgagccacaggttttctgggcacctacgcctctcaaagcaaaggcttgggctgatatcgatagcgatgatgaagatgatgattattacgctaccactgctccacctcagtccctgtggagcacttctgaaagcctccattcagatgcttaagacg

SEQ ID NO: 119574 - DNA, 494 bp, Arabidopsis thaliana
cttcttcttcttccttccttctctctccttattaagaaagaccaacacagacacggaagaagtagcttggttcttctctttgtgaaggtgaatgcgggagatggggactggagattctgcttcgagactgattctctggttctgcttagggtttttgattctaggtgttggatttgtgcaatgtggagttacttatgaccggaaagcacttctcattaatggacagagacgaatcctcttctctggctccatacattaccctcgaagcactcctgatatgtgggaagatttgattcagaaggcgaaagatggaggcattgatgtgattgagacgtatgtgttctggaatcttcatgagccttctcctggaaaatacgattttgaagggagaaatgatttggtgagattcgtgaagacgattcacaaagctggtttatatgctcatcttcgaattggaccttatgtttgcgccgagtggaattttggaggattcc

SEQ ID NO: 119575 - DNA, 1747 bp, Arabidopsis thaliana
  unsure (1)..(1747): unsure at all n locations
atgatactgccagctactatacngactcactatagggaaagctggtacgcctgcaggtaccggtccggaattcccgggtcgacccacgcgtccgaaaccctagagagattgagagagcgaagagaagccatcatcagccatggcgatgaagaatctactgtccctagctcgccgatctcagaggcgtttattcctcactcaagccacacgatcttcctcttcgttttcagctatcgattcggtgccggcttccgcatctccgacggctctatctccaccgccgccgcatcttatgccatacgaccacgcggctgagattataaaaaataagatcaagaagctcgagaatcctgataagaggttccttaaatacgcatctccacatccgatcctcgcttcccacaatcacatcttgtcagctccggagactcgtgtcactaccttgcccaatggtctacgagtcgctactgagtcaaatctctcggctaagaccgccaccgttggagtctggatcgacgctggatctcggtttgagtccgatgagaccaacggaacggctcattttttggagcatatgatattcaaaggcacggataggcgtacagtgagagcgttggaggaagagatcgaagatattggtggtcacctgaacgcgtatacatcgagggaacagaccacttattatgctaaggttttggattccaatgtgaaccaggctttggatgtcttggctgatatcctacagaattctaagttcgaggaacagagaattaaccgcgaacgagatgtcatcctcagggaaatgcaagaggtggagggacaaaccgatgaagtggttcttgaccatttacatgccactgcattccaatacacaccccttggaagaactattttgggacctgctcagaacgtcaaatcgatcaccagagaggatctacagaactacattaagactcactacactgcttccaggatggtgattgctgctgcaggagctgttaagcatgaggaagttgttgagcaagtgaagaagctatttaccaagttgtcgtctgatccaacaactacttctcaactggttgccaatgaacctgctagttttactggttctgaggtccgaatgattgatgacgacctaccccttgcacaatttgctgttgcctttgagggagcatcttggactgatccagattccgttgctcttatggttatgcaaactatgttgggttcgtggaacaaaaatgttggtggtggaaaacacgtgggttctgacctgacccagagggttgccattaatgaaatagcagaaagcataatggcattcaacactaactacaaggatactggactgttcggcgtttatgcagttgccaaggccgattgcttggatgatttatcatatgccattatgtatgaggtaaccaagctggcctaccgagtttcagacgctgatgtgacacgtgcacgaaatcagctgaaatcatcattgttacttcacatggatggaaccagcccaattgctgaagatattggtcgtcagctgctgacctatgggcgtagaatcccaaccgctgaactctttgctaggatcgatgctgttgatgccagcacggtaaaacgtgttgccaacaaatatatctatgacaaagacattgccatctcagctattggtccaatccaagattttccnaggctttaaaaaantttaggcgggggncccttcttggnacccggtncttagggcntt

SEQ ID NO: 119576 - DNA, 870 bp, Arabidopsis thaliana
  unsure (1)..(870): unsure at all n locations
aaaacacgtgggttctgacctgacccagaggggttgccattaatgaaatagcagaaagcataatggcattcaacactaactacaaggatactgnactgttcggcgtttatgcagttgccaaggccgattgcttggatgatttatcatatgccattatgtatgaggtaaccaagctggcctaccgagtttcagacgctgatgtgacacgtgcacgaaatcagctgaaatcatcattgttacttcacatggatggaaccagcccaattgctgaagatattggtcgtcagctgctgacctatgggcgtagaatcccaaccgctgaactctttgctaggatcgatgctgttgatgccagcacggtaaaacgtgttgccaacaaatatatctatgacaaagacattgcaatctcagctattggtccaatccaagatttgccagactacaacaaattcagacgcagaacctactggaaccggtactaaggctctgaaataaaggtcactgaatcgcaaggttcgcccacggggagattccgtaggcggagagagcagaacgaggtgatgatggattcattatttttgagtttttcttactgtatcttcataatttaccatcatcgctggtaaaataagtgtaccatttactctttgtcctctactggaaaaatgctagagatcctctgtgtgtgttttttttgttctcttcataattttcccatacacatactaataagttctttgatgtttggttgaaaacttgaattggatacatttcattatcgataccgtcgacctcgaggaagggcnnnnnnnnnnnnnnnnnnnnnnnnnnnnnnnnnnnnnnnnnnnnnnnnnnnnnnnnnnnnnnnnn

SEQ ID NO: 119577 - DNA, 814 bp, Arabidopsis thaliana
  unsure (1)..(814): unsure at all n locations
aggatctgactgtcgcgttatcagtgccagccgatgctgnatattatcatagccatatgtataggacccaagctggcctccgagtttcagacgctgatgtacacgtgcacgaaatcagctgaaatcatcattgttacttcacatggatgaaccagcccaattgctgaagatattggtgtcagctgctgacctatgggcgtagaatcccaaccgctgactcttttgctaggatcgatgctgttgatccagcacggttaaaacgtgttgccaacaaatatatctatgacaaagacattgcaatctcagctattggtcaatccaagatttgccagactacaacaaattcagacgcagaacctactggaaccggtactaaggctctgaaataaaggtcactgaatcgcaaggttcgcccacggggagattccgtaggcggagagagcagaacgaggtgatgatggattcattatttttgagtttttcttactgtatcttcataatttaccatcatcgctggtaaaataagtgtaccatttactctttgtcctctactggaaaaatgctagagatcctctggtgtgtgttttttttgttctcttcataacttttcccatacacatctactaattaagttctttgacctgtttggcttgaaaacttgaattggacctacatttcattttcttctttgtgaaacttctatcaattcactcctgtgatttgatccaaaaaaaaaaaaaaaaaaaaaggannnnnnnnnnnnnnnnnnnnnnnnnnnnnnnnnnnnnnnnnnnnnnnnnnnnnnnnnnnnnnn

SEQ ID NO: 119578 - DNA, 551 bp, Arabidopsis thaliana
ggatctaacctgttgaacccgcccgggtaaaacgtggttcccccaaatatatttttgcaaagcccttgccatctcagctattggtccaatcccaagatttgccagactccaacaaattcagacgccagaaccttactggaaccgggtactaaggctctgaaataaaggtccactgaatcgcaaggttcgccccccggggagattccgtaggcggagagaccagaaccaggtgatgatggattcattatttttgagtttttcttactgtatcttcataatttaccatcatcgctggtaaaataagcgctaccattcactctttgtcctctactggaaaaatgctagagatcctctcgtgtgtgttttttttgttctcttcataattttcccacacacacactaataagttctttgatgtttggttgaaaacttgaattggatacatttcatttaaaaaaaaaaaaaaaaaaccaaagggcggccgctctagaggatccaagcttacgtacgcgtgcatgcgacgtcatagacttctatgagtggtacctaaa

SEQ ID NO: 119579 - DNA, 852 bp, Arabidopsis thaliana
ggatgaaagtgatttaattaatgttacattagtgaaacagccaagttcgaagtctcgtttctttgatgagagccagacaacaagacagaggataaattaggaggtagccaaacataatcaatggcatccatttgcaggtgcaaatcaggcaaaggcgtgcttgttgatcccattaataaccgggccaacaacgcccctggtcgccttcacatatgaaaggtattcgctataatgcatgctgaataatgtactctggtaacgcgttagattgattcgcctacgcactgcttctgttattacaccattgtatcctgctttacgcaccagcgaatcgattgcctctatctttgtccagccttcatgagctggcacctcaggcaaatatgtggcgcttcgctttgtattagcctcaggttcagtaaactcaatgattataccatgcttaccaacctcccaatcaaggtaatcttctgcatctttataatcagtcaagacagacaccgtacactgcagagatggcaattctttggcctgtataggtgggaacctgcgatccctcaaggcacttgtcaaggcataatccttgaagccactgatcaagcggcgtgcttccagtgtaccaatacatccacgcaaccgaggctctccaccattcactattttcttccaggtaacaaacaatggatgattggcctcttcaaaggcaggtggtggagtctcttcattgttgtagtgagagaccaaagtgtcgaaacagtaaacagccatttctctgttcgcccacccccttgttgcttggaagagaaaaccgcaaataaaaaaaatccaaatcagcaagtaatgtgaaacgga

SEQ ID NO: 119580 - DNA, 593 bp, Arabidopsis thaliana
  unsure (1)..(593): unsure at all n locations
caaaaacccttttaatctctctctcgtgtagatctatcactctccatttcccttcttctctgtaaaccctttataaatctcacttccttcttcttcatcaatccttcctcagatctcttcttattcaaattcaattgagagatactctcttcttcttctttttctctatccagttccttctgtgcgaagttcttctgattaatttgagtttcttggaagcttttactcgatcttcatcggatcttagggttttgtttaaatccagatcttgggttttgttaaataatggcgactccttatcctggagcgacgcaggtgggttcgtactttgtggggcagtattatcaagtgttgcagcagcagccagatcttattcatcagttttattctgagcctagtagagctattcgtatcgatggtgattccaccgagactgctaattctttgctgcatattcataacatgggtatgtcactgaatttcactgcgattgaagtgaagacgattaattcagtcgagccgtgggaaggtggtgttcttgtgggggttcagggccttgaaaacaaggtttttgnacaaaggggtttttgctg

SEQ ID NO: 119581 - DNA, 452 bp, Arabidopsis thaliana
cagctatggttaacgtcagatttttctttaactatgggaaaacattcaataaggcacggggtccttatgagaaagagcgtgttgatgctgagctaaagcttgttggagaatacggtcttcgttgtaagagagagctttggagagttcaatatacacttagcagaatccgtaatgctgcaagagaactcttaactcttgatgagaagaatcctcgtcgtatctttgaaggtgaagctcttcttaggagaatgaatcgacatggtcttcttgatgaaacccataacaagcttgattatgtttcttgctttgactgttgagtatttccttgaacgtcggctccaaactattgcctttaagtctgttatggttaagtacaattaccatgctcgtgttcttatccgacaaaggcttattagggttgtgaggcaacttgtgaactttccattagttta

SEQ ID NO: 119582 - DNA, 620 bp, Arabidopsis thaliana
ctttgaagctttaacattgttgcgaagaccagactctcagactcagactcgggagtgatttcacttcaactttctgctcagatggcagtccactactggacagccctgtttctattgctgccatgccttttctgtatttcaaatgctagtgctggcgatgctgatccagattacaggacatgtgtttcagaatgtgagataagcggttgtgttggaccactttgctttcctcagtgcaattcttcatccgatggtggtccatggtacatccaagaacctctgtatttacaatggaaaaaatggggttgtcaaggtgattgccgttatcaatgtatggttaatagagagagtgaacgggaaactctcggtcaagccccagtcaagtaccatggtaaatggcccttcaagcgggtacttgggattcaagagcctgcttctgttgctttctctggactcaacctagcaatgcatttccatggttggctttcctttttcatcatgatccactataagttgcctctgaaacaagattggacaagcgtctatgaatacgttgggttgtggcatatctacaggctactgtacatgaactcttgagtctggagtgctggtttccacag

SEQ ID NO: 119583 - DNA, 657 bp, Arabidopsis thaliana
  unsure (1)..(657): unsure at all n locations
tcccctgttncccttttncccccctggggtccngtttcacccgntccntttagnttcattgaccttgatgggccctancatcccgattntcccagaagtggnggatggccccgaatcagcttctgcttcactagtggnctttccnctaaaggaggggatattgaaccattcttaaggnccattncaggaagacctggtattagggagggtttagttacagcaggtttcttcgctgttgggctctttcgtttgcttgagcttgcaagtgctactgatccaactgtcttggacaagctttgtgcatccctaaatatcaacaagaaaagcgtggatcgggacctggatgtgtatcgtaacctgctttcaaagcttgtccaagccaaggaattgcttaaggagtatgtcgagagggagaagaagaagcaaggagaaagagcccaatctcagaaggctaacgaaacaatctccaagtgtctgggagatactctatataacccatctttcttggttgaacggaaatcttagaaaatcatttgtgacttctttttttgttttcttagcaacaactatgcccaagaacatatatatctcatttctaagaacatttcagacgtgtatatgtttgctttttttcctttcaattacatgagtttacat

SEQ ID NO: 119584 - DNA, 319 bp, Arabidopsis thaliana
gagtgatcaagaccgagatgccatttttaaggcttacattgaagccttgaatgaggatcctaagcaataccgaattgatgctcagaagatggaggaatgggcacgaagtcagacttctgcttcactagttgacttttcctctaaagaaggagatattgaagcagttcttaaggacattgcaggaagagctggtagtaaggaggggtttagttacagcaggttcttcgctgttgggctctttcgtttgcttgagcttgcaagtgctactgatccaactgtcttggacaagctttgtgcatccctaaatatcaacaagaaa

SEQ ID NO: 119585 - DNA, 420 bp, Arabidopsis thaliana
gtctggaatcaattacttcctaaaggttgccatttgttaacttactctgttagtctactaccgaccaataactatgtttttcgatggataccattatcatggaacaacctttgagcagagttaccggtgttatccggcatcttttatcgacaagccacaacttgaaagtggtgacaagattataatgccaccatcagcccttgatcgtctagcctctttgcatattgactatccgatgctgtttgagcttcgtaatgctggaattgaacgtgttacacactggggagtccttgagttcattgcagaaggaaggcatgatttacatgccatattggatgatgcagaatctgctgctgcaagaaggagacattgtgagagttagaaatgtcactcttccaaagggaacttacgttaaactac

SEQ ID NO: 119586 - DNA, 673 bp, Arabidopsis thaliana
  unsure (1)..(673): unsure at all n locations
atgatactccnnnnnnnnnnnnnnnnnnnnnnnnnnnnnnnnnnnnnnnnnnnnnnnnnnnnnnnnnnnnnnngttctgccccacgttctctgcagcttctcctcttctcagaaattagggttccgtctcaaattacgagcagatctcgtactctctgatgtctgaagatccggagtaccgttgcttcattggtgggcttgcttggacaacgtctgatcgtggtctcagagatgcctttgagaagtatggtcacctcgttgaggccaaggtggttcttgacaagttttctggtcgctcccgtggttttggattcatcactttcgatgagaaaaaagctatggatgaagctattgcagcaatgaatggaatggatttggatgggcgaactatcactgttgataaagctcagcctcatcagggtggtgcaggcagagataatgatggtgaccgtggtcgagaccgtggatatgatcgtgatcgcagtcgtccctctggtgggcgaggtggtggagattgctttaaatgtagcaagcctggacattttgcaagagagtgtccttctgaaagtagtagagatggtggtggaaggttcagctcaaaggatgataggtacagttcgaaggacgataggtatggtgcaaagatgataggtatggtgcaaaggaggatagg

SEQ ID NO: 119587 - DNA, 522 bp, Arabidopsis thaliana
gcttgttaagtacctccttgccttctcattcctcacccgtaagatggtgtccagggaaggtgtcccctagcagatcagtcataagatccagctggtgaaccacattctttccagggaaaagtggtttacccatcaacacctccgcaaaaatgcagcctatactccagatgtcaattgcgggtgtatacttagagtaaaaagatccacaaagctctggagctctataccatctggtagcaacatagtcagtccagaagattgttgtgggggtatcattgtatgcaacccttgccaatccaaaatcacaaatcttaagtttacagtttgcatttgccaatatgttctttggtttcaggcctcggtggtagacattagctgtgtgaatgtacttcagtgcacgcaataactgatacaggaaaaactggtaatgctctctagtcaaatcatcacggacgcgtgggtcgacccgggaattccggaccggtacctgcaggcgtacgtgctttccctaattgagtcgat

SEQ ID NO: 119588 - DNA, 802 bp, Arabidopsis thaliana
  unsure (1)..(802): unsure at all n locations
ggcacctaccccttctttaattttcgggtcgacccacccgtccgcttatgaaagaagtgagtgacgaactttgccagatggtaccagatagctggaaagtagaaataactgatactattgatctggacattctctcacagttgctcaactccggcaccttggatatcgattaccttggaaagatgcttgagtttgcgttggctactctgcggaaactctctgccccagctaatgaccgtgagaatgaaagcacccaccgggatttactcaaggaacttcacaggttgtgtgaagctgaagatgagtctggtaacttccgtgctgttgcaatagtcaaggggatccgcttcattcttgagcaaattcagggacttaagcgagagattaggcataggtcgcataacaatcatggaaccccttttttgcaagggccagcaggctttgtttaccttaccaaaagcatttgaaaagcgttatggacctcccactcaagcctacgaatcactaccagtgacacgaaggtggatatcaactcttttgtctagcaaagaagagtgggaagaacacaacaatacgctttcagccttgaatgtggttgagagatcctccatgggtatttctctcaaaacgggtggaagcctttctatccccaagtcaataccacgtccaagatcaactggttatggacacctgcaggtccacttatcagcaatgcaaggggaggaagaagttgattctggcagtaaggctttgggtttgtttgnaagctggtgantcagggtngctgggtttaacaccctga

SEQ ID NO: 119589 - DNA, 554 bp, Arabidopsis thaliana
aatgtattaggaacaactatagaagagctatgacgtcgcacgcacgcgtacgtaagctcggaattcggctcgagctcaactttcctggtggatccactgtcaaggatgaagaggacaatcttaagagaaggataaaggagactatggagagagctttctgggataatgtcatggaatccatgaaattggagaagccagactatagctgcatctctaaccttatgaaagaagtgagtgacgaactttgccagatggtaccagatagctggaaagtagaaataactgaaactattgatctggacattctctcacagttgctcaactccggcaccttggatatcgattaccttggaaagatgcttgagtttgcgttggctactctgcggaaactctctgccccagctaatgaccgtgagaatgaaagcacccaccgggatttactcaaggaacttcacaggttgtgtgaagctgaagatgagtctggtaacttccgtgcatgttgcaatagtcaaggggatccccttcattcttgagcaaattcaggaacttaagcg

SEQ ID NO: 119590 - DNA, 303 bp, Arabidopsis thaliana
aggacaaatctaacagattttgttaacgtgcctcggtcccattctcttgagacattccacaaaatggtggttgaaaacggagggaagttttcaatgaacttaaacaactcactgacgcggtgcattgcagcacaaagcactggtacgtacgtgcttaccattacatattgatttttccccaacccttttgtacacatgagtgagtctcaaaacaattttaataatacgagcatgacaatgagatactatttcaggaataaagtatcaggcagcaaagcgtcagcgagatgtcatccacttttc

SEQ ID NO: 119591 - DNA, 866 bp, Arabidopsis thaliana
  unsure (1)..(866): unsure at all n locations
tgatgaaaccaaatggacccatatgattgggagatttggataacagagaatccacaaaagtgtatccttcacaaaaccaaaacacactctccattttcttcagacaactctttctcctttcttctctcttctctgtctcatcacaaaccagaaatgggaggagtgtccttcctctccactgttccttccttcaccaacacaaccaatcatcaacatctcactacactctcttcttcttctcatcgctctgctgttatacgatgttccaagattgaacctcaagtttccggtgaaagtttagctttccaccgccgtgatgttctcaaactcgccggcactgcagtcggaatggaattaataggcaacggtttcattaacaatgtgggtgatgcaaaagctgctgacttgaatcaacgtagacaacgatccgagtttcaatcaaagatcaagattttgctttcaaccaccattaaggctaaaccggagcttgtaccttccttactcaaactagctctcaatgatgctatgacttatgataaggctactaaatcccggggagccaatggttccatacggttcagctctgagctaagtagagcagagaatgagggactttntnatgggttgagtttgatagaggaagtgaagaaggagattgactctatctcgaagggaggtcctatttcatatgcagatatcattcaattagcaggacaatcagcggtcaagtttacgtatttagcatcggctatccgaaaatgtggtgggaatgaagagaagggggacttcctttaccacagcatatgggttcagccttggtcagtggggggtgtttgtttgtagtaaatgattgaaggggggtgatt

SEQ ID NO: 119592 - DNA, 448 bp, Arabidopsis thaliana
gatccgggcaccacgcgtccgggacgcggggcggttgatcgtttttgtgtgttgaaaatcaaaatggcgtcgagcgatgagcgtccaggagcgtatccggcacgtgacggatcagagaacttacctccgggagatccaaagacgatgaagacggtggtgatggataaaggagcggcgatgatgcaatcgttgaaaccgatcaaacagatgagtctccatttgtgttctttcgcttgttatggtcacgatcctagccgtcagattgaagtcaacttctatgttcatcgactcaaccaagactttcttcaatgtgctgtttacgattgcgactcctctaaaccccatctcatcgggatcgagtatattgtgtcggagaggttatttgagagtcttgatccggaggagcaaaagctttggcactctcatgactatgagatccaaacaggcc

SEQ ID NO: 119593 - DNA, 1967 bp, Arabidopsis thaliana
atgatactccagctctctacgactcactattgggaaagctggcacgcctgcaggtaccggtccggaattcccgggtcgacccacgcgtccggaatgatgagaaggagcttatgggtaaacctctaatgaagcgtgttatgcagacttggctccctgcaagtactgcactacttgagatgatgatctttcatttgccatctccccacactgcccagaggtaccgtgttgagaatctgtatgaaggtcctcttgatgatcagtatgcaaatgccatcaggaactgtgaccccaatggacctctcatgctctacgtatccaagatgattccagcctctgacaagggtagattctttgccttcggtcgtgtctttgctggtaaggtttctactggtatgaaggtcagaatcatgggtcccaactatatccctggtgagaagaaggatctgtacactaagagtgttcagaggactgtcatttggatgggtaagaggcaagagacagtggaggatgtcccttgtggtaacactgttgctatggttgggctggatcagttcatcaccaagaatgctacattgactaatgagaaggaagttgatgctcaccccattcgtgctatgaagttttctgtgtctcctgttgttcgtgttgctgttcagtgtaaggttgcgtctgaccttcccaagttggttgagggtctcaagaggttggccaagtctgatcctatggttgtgtgtacaatggaggaatcaggtgagcacattgttgctggtgcaggagaactccatcttgagatttgtcttaaggatcttcaggatgatttcatgggtggtgctgaaattatcaagtcagaccctgtggtctccttccgtgagacagtttgtgatagatctactcgcacagttatgagtaagtctcctaacaagcataaccgtctgtacatggaagcaagacccatggaggaaggtctagctgaggctattgatgatggacgtattggcccaagggatgaccctaagatcagatccaagatcttggctgaggagtttggatgggacaaggatcttgcaaagaagatctgggcttttggacctgaaaccacagggcctaacatggttgtcgatatgtgtaagggagttcagtaccttaacgaaatcaaggattcagttgttgctggtttccagtgggcgtccaaggaaggtcctcttgctgaagagaacatgagaggtatctgttttgaggtatgtgatgtggtgcttcactctgatgccatccacagaggaggtggtcaggttatccccacagccagaagggtcatatacgcttcccagatcacagctaagcccagacttttggagccggtttacatggttgagatccaggcaccagagggagctcttggaggaatctacagtgtgctgaatcagaagcgtggacacgtgttcgaggagatgcagaggccaggaactcccttgtacaacatcaaggcatacctgcctgttgtggagtctttcggattctcaagtcagcttagggcagcaacctcaggacaggcattcccacagtgtgtgtttgatcattgggaaatgatgtcttctgaccctcttgagccaggtactcaggcttcagttttggtggctgatatcaggaagaggaagggattgaaggaagcgatgactccactatctgagttcgaagacaagctttaagcttcaccaagactcgtactagcctttttcccaatggttgctactctctctatcttaattttgtcttgttttattaatactcttatggtatgacggattgtgaagacttttctctcgccatcccctgaatgttttttacttttttcctagttgagaactttgttattgtgttcgcaaatatcttggttttgattcaaaaaaaaaaaaaaagggcggccgctctagaggatccaagcgtacgtacgcgtgcaaacgaagtca

SEQ ID NO: 119594 - DNA, 1005 bp, Arabidopsis thaliana
  unsure (1)..(1005): unsure at all n locations
agctagacgcctgcctccttgcacctcttttctttctctcgttctcatctttctctctaagagattttgtaggtgacaatcaaaagtttgacaaaatggtgaagtttacagctgatgagcttcgaaggattatggactacaaacacaacatccgtaatatgtctgttattgctcatgtcgaccacgggaaatccactcttactgattctttggttgctgctgctggtatcattgcccaagaggttgctggtgatgttcgtatgactgataccagagctgatgaggctgaacgtggtatcactatcaagtccactggtatttctctctactacgagatgactgatgaatccttgaagagtttcactggagccagagacggaaacgagtacctcatcaatcttattgattcacctgggcacgttgacttttcttctgaggttactgctgctctccgtattactgatggtgctcttgtggtggtcgactgcattgagggtgtgtgtgttcagactgagactgttctacgtcaggctcttggtgagaggattcgacctgtcttgactgtcaacaagatggacaggtgtttccttgagcttcaggttgatggtgaggaggcttaccagactttctcgagggttattgagaacgctaatgtcatcatggctacatacgaggatcctctccttggtgatgttcaggtttacccagagaagggaactgtggcgttttctgctggtctccatggatgggcgtttacactgaccaacttcgccaagatgtatgcttccaagttcggtgttgttgaatctaagatgatggagaggctctggggtgagaatttctttgaccctgccaccaggaagtggagtggcaaaaacactggttccccgacctgcaagcgtgggtttgttcagttctgctatgaacccatcaagcaaattattgcatgtatcccgaaggacaagtttgncnattttggnagttggngtnaataaaattttaaag

SEQ ID NO: 119595 - DNA, 777 bp, Arabidopsis thaliana
  unsure (1)..(777): unsure at all n locations
gngnattantgggcccccntncnccccnaggnggggcagttccccccccangggtaaatccgcncnaaccccagnaaacccnagctttnggcccggttnccatgnttnaancaggcnccaggggngcccttggggggatctccagtgtctaaaccaganccnggccccgttttcgaggagatccaaggccaggaacccccttgtacaacattcaaggcatacctgccctgtttgtggagtcttncggattctcaagtcagcttagggcagcaacctcaggacaggcattcccacagtgtgtgtttgatcattgggaaatgatgtcttctgaccctcttgagccaggtactcaggcttcagttttggtggctgatatcaggaagaggaagggattgaaggaagcgatgactcccctatctgagttcgaagacaagctttaagcttcaccaagactcgtactagcctttttcccaatggttgctactctctctatcttaattttgtcttgttttattaatactcttatggtatgacggattgtgaagacttttctctcgccatcccctgaatgttttttacttttttcctagttgagaactttgttattgtgttcgcaaatatcttggttttgattctgtcttgctctttttttttttttnnnnnnnnnnnnnnnnnnnnnnnnnnnnnnnnnnnnnnnnnnnnnnnnnnnnnnnnnnnnnnnnnnnnnnnnnnnnnnnnnnnnnnnnnnnnnnnnnnnnnnnnnnnnnnnnnnnnnnn

SEQ ID NO: 119596 - DNA, 1027 bp, Arabidopsis thaliana
cccacgcgtccgccagactttctcgagggttattgagaacgctaatgtcatcatggctacatacgaggatcctctccttggtgatgttcaggtttacccagagaagggaactgtggcgttttctgctggtctccatggatgggcgtttacactgaccaacttcgccaagatgtatgcttccaagttcggtgttgttgaatctaagatgatggagaggctctggggtgagaatttctttgaccctgccaccaggaagtggagtggcaaaaacactggttccccgacctgcaagcgtgggtttgttcagttctgctatgaacccatcaagcaaattattgctacttgcatgaatgaccagaaggataagttgtggcctatgttggcgaagcttggtgtctcaatgaagaatgatgagaaggagcttatgggtaaacctctaatgaagcgtgttatgcagacttggctccctgcaagtactgcactacttgagatgatgatctttcatttgccatctccccacactggcccagaggtaccgtgttgagaatctgtatgaaaggtcctccttgatgatcagtatgcaaatgccatcaggaactgtgaccccaatggacctctcatgctctacgtatccaagatgattccagcctctgacaagggtagattctttgccttcggtcgtgtctttgctggtaaggtttctactggtatgaaggtcagaatcatgggtcccaactatatccctggtgagaagaaggatctgtacactaagagtgttcagaggactgtcatttggatgggtaagaggcaagagacagtggaggatgtcccttgtggtaacactgttgctatggttgggctggatcaggtcatcaccaagaatgctacattgactaatgagaaggaagttgatgctcaccccattcgtgctatgaagttttatgtgacatctgttgtttgtttttaattatttttatgtttacattattttttacaattttttttttatttataattttattttatt

SEQ ID NO: 119597 - DNA, 586 bp, Arabidopsis thaliana
cgggtggaccacgcgtccgttcacttataaaaattcaataattgaacctcctctctctctctctcttctctcccttcttcttctccgatttcgactttgaatcatttcttcgagagaggtagcgagaaagggatcgccttttctcactctctgcggattctcaattttgggcaagaaggcaagaacagtttttatcgcaattgagtcttgaagaccacaaggatttgatcacattggtgcttctgcctgtttatctgagtttgaggacaagaacttctggggcgtttataatttgccatggctagtaatgagaatctaccacccaatgttatcaagcagcttgccaaggagctgaagagtcttgacgaatcccctccagatggcatcaaggttgtggtaaatgacgaggatttctcacaaatatgtgctgatattgaaggaccagttggtactccttatgagaacggacttttccgtatgaagttggccttgtcacatgattttccacattcgcctcccaaaggctacttcatgacaaagatttttcatcctaatgttgcttctaatggagagatatgtgttacac

SEQ ID NO: 119598 - DNA, 898 bp, Arabidopsis thaliana
tctgcagtaccggtccggaattcccgggtcgacccacgcgtccggaagaaaaggacgagtagattgatttcttagacgacggagaaatgcgagtgatgagatcattgcgcggtaattccggtgctggattggttttccggccggcgaggttaaattctcttcggagcgtctttaccggttgccgtgctgtgattttgccccgctttggtggtccggaggtttttgagctccgggagaatgttccggtgccgaatctgaatccaaatgaggttcttgtcaaggcgaaagctgtctccgttaatcctcttgattgcagaatacgagctggatatggacgttctgtattccaaccgcatctacctattatagttggacgtgatgtcagtggtgaagttgcggcaattgggacttcagtaaagtcacttaaagtaggccaagaagttttttggtgcgttgcatcccacggcgttaagaggtacttttactgcctttggaattctttcggaagacgaacttacggaaaagccatcatcaatttcacatgtgggagcaagtgccattccttttgcagctttgactgcttggcgtgctttgaagagtaatgcaaggataactgacgctgagaatggagaagcaggggaagcgcgtaagcgtaagcatgatgatagcagtgatagccctgctcctgtaacaaccaagaaatcttaaaccaaagaagttgaaggagaagaggctgaagagaaggtgaagtcttctaagaagaagaagaaggataaggaagaggagaaagaagaggaagccgggtctgagaagaaggaaaagaagaagaagaaagataagaaggaggaggttatagaagaggtagcttcaccaaagtctgagaagaagatgaaaaaga

SEQ ID NO: 119599 - DNA, 939 bp, Arabidopsis thaliana
  unsure (1)..(939): unsure at all n locations
nnnnnnnnnnnnnnnnnnnnnnnnnnnnnnnnnnnnnnnnnnnnnnnnnnnnnnnnnnnnnnnnnnnnnnnccacgcgtccgggaagaagaagaagcggtagagagaaaaccgatgctcacagcgtttgcaagtcacgcgcgttctcacgttttcgcgtttgttaccgtcccaacaatcacgcgccgcctccgtataaatatcttacgccaatcacctctctcctcttctcttctcctaaacgaaaccttctctaatcgacccaattctgtttctcgtcgttgttattgttcgagctctgcgataatgggttcttcttcggtgtttggcgagcaattacagtatcctgcgactcggcgtgatgattccgtcgtcgatgactatcacggcgtcaagatcggagatccgtaccgttggttagaggatcctgatgctgaagaagtgaaggagtttgtgcagagccaagtgaaattgacagattctgtacttgaaaagtgtgaaacaaaggagaagctccgtcagaatataacgaaacttattgatcatcctcgttacgattcaccattcaggcaaggggataagtacttttacttccataacactggtctacaggctcaaagtgtgctttatatgcaggataatctggatgctgagccagaggttttgcttgatccgaacactcttagtgatgatggaacagtggccttaaacaccttttctgtcagcgaggatgctaagtacttggcctatggtcttagttcaagtggtagcgactgggtgacgattaagctgatgaaaatcgaggataagaaagtggagcctgatactttatcatgggttaagtttaccggcattacatggacgcacgacagtaaaggatttttctatggtcgctacccagctcccaaagaaggagaggatattgatgctggcactgaga

SEQ ID NO: 119600 - DNA, 469 bp, Arabidopsis thaliana
cactctctcaaaaatcaccaaaccaaactcttcactctctccaacaatggccaagaagatgagttctctcatcatcatcttcaacattctccttgtcctcacaactcaaacccacgcgcacaacgtcacgcgcctcctagcaaaccacccatcattctcttccttcagccatttcctaacacaaacacacctcgccgacgaaatcaaccggagaagaaccataaccgtttgcgccgtcgataacgccgccatgtcagcattaacctcaaaaggctacacaatctcaactctcaaaaacattctctccctccacgtccttttagattacttcggaaccaaaaaactccaccagatccgtgacggctctgctctcgccgctactctgtttcaagccaccggagctgctcctggaacctcaggattcgttaacataacggatctgagaggtggtaaagttgggtttggtcct

SEQ ID NO: 119601 - DNA, 434 bp, Arabidopsis thaliana
agaaagagagggaagaaactatggaaagatttatgtacaaatcaacggtgttcccaatttgctgtctgttgtttgccttgttcgatcgcggtaatgctctctatggatcttcgtcgcctgtgcttcaactcactccttctaatttcaagtctaaggttcttaattcaaatggagtcgttttggtagagttctttgcgccatggtgcggtcattgtcaatctctaacaccaacttgggagaaagttgccagtactttgaaaggtattgctactgtggcagccattgatgctgacgctcacaagtctgtctctcaggattatggtgtgaggggtttcccaaccattaaagtattcgttcccgggaagcctccaattgattaccaaggagcaagggatgccaaatccatttctcaatttgctatcaagcagataaag

SEQ ID NO: 119602 - DNA, 773 bp, Arabidopsis thaliana
  unsure (1)..(773): unsure at all n locations
aatctagatagctccgtaaaaaagaaagaaaaaaaacgttctctcgtttctttctattattcaaaatattttcaccaactaaaaaaagatacatcgaaacaaatctctctaatcatatctaagttataacttttctttataaacaataaacaatagctttgatttgaagcaagaggagcaacaatggagatcaccactatcatattcctcatcatatcctctctcaccttctccatcttccttaaactcatcttcttcttctcaactcacaaactcccaccgggaccacctcgttttccggtcatcggaaacatcatctggcttaagaaaaacaacttctccgatttccaaggcgttctccgtgacttagcctcccgtcacggaccaatcataacactccacgtaggctccaaaccttccatctgggtcacagacagatcactcgctcaccaagcccttgtccaaaacggtgccgttttctccgaccgttctctcgctctccctaccaccaaagtcatcaccagcaaccaacacgacatccactcctccggctatggctctctctggagaaccctccgccgcaacctcacctccgaaattctccagccctcgcgcgtgaaagcacacgngccgtcgaggaaatggtctctcgagattctcgtggatctnttcgagacagagcagagagagaaaggncatatntccgacgntttagatcattttacgtcacgctatgttttatttgttggctctgatgtntttcggagagaaac

SEQ ID NO: 119603 - DNA, 584 bp, Arabidopsis thaliana
  unsure (1)..(584): unsure at all n locations
aggaaaaaaggataatagtattaaaaaacgaaaccccaattttacgtttccacatcaaagtgaaatagagaacttcattctctttttttttcatttcatgcctattggcgttccaaaagtaccttttcgaagtcctggagaaggagatacatcttgggttgacatatacaaccgactttatcgagaaagattattttttttaggccaagaggttgataccgaaatctcgaatcaacttattagtcttatgatatatctcagtatagaaaaggataccaaagatctttatttgtttataaactctcctggtggatgggtaatatctggaatggctatttatgatactatgcaatttgtgcgacccgatgtacagacaatatgcatgggattggccgcttcaatagcatcctttatcctagtcggaggagcaattacccaacgtataggattccctcacggtttgggccaatnagttttttantttcgggggaaaaaatcctttgccttcgccctttnaaanttggatnggtnggaaanaangngtgggcctnggntnaaattgnattttttgggtnaaaaaatgc

SEQ ID NO: 119604 - DNA, 675 bp, Arabidopsis thaliana
acgactcactatagggtttgctggtacgcctgcaggtaccggtccggaattcccgggttgtttcgctcaaaaagattgattgaattatcaaaaatttgtaacgcgaagcgcaaaaaataaagtggaattaaatgcagggagtatttagattgatattagattatcaaaatttttttatggtttacgtgatcggactaataaaatgaagtatccaggctccgtttagcaaaaacccaattgataattaatatataatatttttataattactacttctattatatgcaaaattatgataaaaactctataaaaaaaattgaaacagggcgatctaaaactgttgctcaaatcaaatacaaataatatataatataattcaaaatttgttgactatttgacagaagacaagtgaaagaactgaattgaaaaaaaagaaggagtagtaaaaaaagacgcggtatttggttcatttgtcctatatgtgcaaatcaaaatcgggcaaatttttccttttacttgggggtagagcattaacccctattttatactttaggaaagaggggaaggttcctttcacatagaaattttttataattttaacaaaaatatcaaaatatggtggtggggtgggtgttttctatataaaaaaccctttcctccttggggggcgggggc

SEQ ID NO: 119605 - DNA, 1547 bp, Arabidopsis thaliana
  unsure (1)..(1547): unsure at all n locations
atagtattaaaaaacgaaaccccaattttacgtttccacatcaaagtgaaatagagaacttcattctctttttttttcatttcatgcctattggcgttccaaaagtaccttttcgaagtcctggagaaggagatacatcttgggttgacatatagtgcgacttgtcagatatatcgggctatatgggatttccccattttctccctcgatcgagatatcctctgtttcgctcaaaaagattgattgaattatcaaaaatttgtaacgcgaagcgcaaaaaataaagtggaattaaatgcagggagtatttagattgatattagattatcaaaatttttttatggtttacgtgatcggactaataaaatgaagtatccaggctccgtttagcaaaaacccaattgataattaatatataatatttttataattactacttctattatatgcaaaattatgataaaaactctataaaaaaaattgaaacagggcgatctaaaactgttgctcaaatcaaatacaaataatatataatataattcaaaatttgttgactatttgacagaagacaagtgaaagaactgaattgaaaaaaaagaaggagtagtaaaaaaagacgcggtatttggttcatttgtcctatatgtgcaaatcaaaatcgggcaaatttttccttttactcggggtagagcataaacctaaaaaatggaataaaaaaaggaagaagcccgttcaggaacaagaaaaaaccatcgccatttcaactgaatctcgatgaaaaaaaaaaatatcaatgaatcaatcatttttttagaggattttaatatctaataaaaggcgccaaaactcaaaatttcttttacttttggggcaagcccttccgttataagttagaaagaaaaaccctctatgaaaaaagggtaggttggaatcaacacattgattttttcacaatttttattgaaccgtatgcaccaaaaggtgcctgtacggctcctaaggaataaaaaattatcctaatcaaccgactttatcgagaaagattattttttttaggccaagaggttgataccgaaatcccgaatcaacttattagtcttatgatatatcccagtatagaaaggatcccaaggaccttnattggttaataacncncctggtggatgggtaatatctggaatggctatttatgatactatgcaatttgtgcgacccgatgtacagacaatatgcatgggattggccgcttcaatagcatcctttatcctagtcggaggagcaattaccaaacgtatagcattccctcacgcttggcgccaatgagtttttttattttcgagaaaaaaatactatgccttcgccatttgaaatatgaattagttaagtaataatagcatggcacttcgaattcaatatgaaattttttagattaaaaaaaaattcgattatatattgaaagagtagtatgagataaggaagaggtttttcaaatgatatcttacctattcgggcacatttcagcgtcacaaactttgttttcacaccgt

SEQ ID NO: 119606 - DNA, 843 bp, Arabidopsis thaliana
ggcgtgctttttttacatttcaaagttctctaagctttggccgttcgcagtaccggtccggaattcccgacacaatcgaaacgaagaatcatttgaagaagaagaagatcgtgagaagcttaatgggttggatcccgtgttctgggaaatcgagtgggaggaataagacaaggaggaacggtgaccacaaactcgacaggaagtcttctgattgttctgtgtctacttcagagaaatctagggccaagtcgtccttgagtgaatccaaaagtaaaggctctgatcacattgtggcacaaacgtttacattctctgagttagctactgccactagaaacttcagaaaagaatgtcttataggagaaggaggatttggtagagtttacaaaggatacttggccagcactagccagacagcggctatcaagcaacttgatcataatggtttacaaggaaacagggagttcctcgtcgaggttctcatgttgagtcttcttcatcacccgaatcttgttaacttaataggatattgtgctgatggagatcaaaggcttctagtctacgagtacatgcccctaggttcacttgaagatcatttgcacgacatttcacctggtgagcagccacttgactggaacaccagaatgaaaatagctgccggtgctgcaaaaagttttaagtatctgcatgacaaaaccatgcctccagtgatctatcgagatttgaaatgctcaaatattttgctcgatgatgattacttttcaaaactattcgacttcgggtgggcttaaacttggccccaattggggaacaaagtttcatgtgttcccactccgggtttat

SEQ ID NO: 119607 - DNA, 355 bp, Arabidopsis thaliana
tgagccggcgaaatctcctttctcatccctaaaattgtcgggtccatcttgcctcctccgattatccaaggtcacaattcgtcttctccttcttcagattcctctctaaaccctagctctgagcatggcaacaactcttcttcttctctctctcctcttccctcctctcctccttcccggatctcttcttccaccggaactcgattctccggacactctgaatcctctcacaatttctccggtggctctagggaaccgagtgttgcagctgaggagggacatagccgtggatcttccaaagagatgacacaaaatggagcagggaaggagagtttttccccacctaatgcagata

SEQ ID NO: 119608 - DNA, 761 bp, Arabidopsis thaliana
aatacgactcactttagggaaagccggtacgcctgcaggtaccggtccggaattcccgggttgttctccagtttcaatcaaactcaatttcttctcaacgaaccctaatttccaacaaatcggattcagtttcttcttcggagactaatcgaatcgcaatggctaagagttccttcaagatctctaaccctctcgaggcaaggatgagtgaatcttctcgaatcagagagaagtaccctgacagaattcccgtgattgtggagaaggctggacaaagtgatgttcctgacattgacaagaagaagtatcttgtaccagctgatctaacagtgggacaatttgtatacgtggttcgtaaaagaatcaagcttggagctgagaaagctatttttgtctttgttaagaacacattgcctccaactgctgcattgatgtctgcgatctatgaagaacacaaagatgaggatgggttcctctacatgacttacagtggagagaacacttttggatctcttaccgttgcttgaataaaaatcgatctttggatgactttgatgtacatacataaatcaggaagataaagatgtacattgcttccttcttttctctggcttttaactttgctttggatgtttggatatctttccctttgggtttattaatcgtcagaaacttctcctaaaaaaaaaaaaaaagggcggccgctctagaggatccaagcttacgtacgcgtgcaggcgacgtcataactcttctatagt

SEQ ID NO: 119609 - DNA, 930 bp, Arabidopsis thaliana
  unsure (1)..(930): unsure at all n locations
atgnnnnnnnnnnnnnnnnnnnnnnnnnnnnnnnnnnnnnnnnnnnnnnnnnnnncccacgcgtccgcccacgcgtccgcccacgcgtccgcggacgcgtgggaatcaaaattcatttttttttcctctgatcatcatcgaaccctagtttcgtcttttgggtacgtttgatttcgcctctccactttgtcaatttcgagtttttgtggtttgggtttttttcccgatttagcctaacagataaagtttcgagttttgtttctcttaatcatcgtagatactaaccgaatcatcatggagaagaactccttcaagctttctaatcctctggagatgagaatggctgagtctactcgtatcagagcgaaataccctggaagagttcccgtgattgtggaaaaagctggacagagtgatgttcctgacattgacaagaagaagtatcttgtaccagctgatctaaccattggccaatttgtgtacgttgtgaggaaaagaatcaagcttggagctgaaaaagccatctttgtctttgtcaagaacacattaccaccaactgcggcattgatgtctgcaatctacgaagaacacaaagacgaagacgggtttctctacatgacatacagtggagagaacacatttggtggatctttctactgctaattacctcagcttctacgtctgatcctcttgatgattgtacattctcgtcgaccttaataatgtcattttactttcttggtttaaccttttgagctctcttactatctcttgcatttgaagatggtatttgaaacaagattctaatttgactctctagtttctttgttttaaaaaaaaaaaaaaagnnnnnnnnnnnnnnnnnnnnnnnnnnnnnnnnnnnnnnnnnnnnnnnnnnnnnnnnnnnnnnnnnnnnnnnnnnnnnnnnnn

SEQ ID NO: 119610 - DNA, 622 bp, Arabidopsis thaliana
  unsure (1)..(622): unsure at all n locations
tctacgactttctatagggaacgctggtacgcctgcaggtaccggtccggaattcccgggtcgacccacgcgtccgcatatttcgaaatcgtcacactttgttgcgtgtcgtcttctctctctcataattcttgagtttcacgtctcaagatttgatcacttctgccaattttccagattgatctctctaattatggcttccatgagtttcgccttgaatcgcttctctggactctcctctaaaaccaccttatcagctgacttcgatccatcctctcgccggagttttctaccgccgactagagttggacttaagatctcttccgccgccgaatcggagcctgatctcagtgtcactgtaaatggcctgaaaatgcccaatcctttcgtgatcgggtcgggtccaccgggtaccaactacaccgtcatgaagagagcctttgatgaaggttggggggccgtcatcgccaaaaccgtatctttagatgcatccaaagttatcaacgtgacacctagatatgctcggctacgaaccggatccaatggctcagccaaaacagatgtaattggggggcagaacatagactttttaatgaacccctttnaacatnttaaggggggc

SEQ ID NO: 119611 - DNA, 564 bp, Arabidopsis thaliana
  unsure (1)..(564): unsure at all n locations
nnnnnnnnnnnnnnnnnnnnnnnnnnnnnnnnnnnnnnnnnnnnnnnnnnnnnnnnnnnnnnnnnnnnnnnnnnnnnnnnnnnnccacgcgtccgcggacgcgtgggcggacgcgtgggcggacgcgtgggcgcaacgtcctctctattacttccaactccattctcatctcgattaacccctcttcctcacttgtcctctcagaccaatcttgcttccgcgtccctcctgggattttccttcacaaacagagattgatctttgtgtgtggcattcacatgacgagagggtggtactgacaagaatggcgagaatctacaatagtcggttgcctcgagaagtcaaggaagctttacaagctatagcatcagagtgggaagatgtgattgattcacaggctctgcgtgttattcctttaagaggtgcagtgacaactgaggtgtctcagatcaaatggcccactagggaaaaaggtccttctggctaggttatgggtaggattcatggtgaacgtgtggagattgtctttgatcgcgaggatgagagcaggacattcgagttcat

SEQ ID NO: 119612 - DNA, 426 bp, Arabidopsis thaliana
attatgttctttctactgtcgccgtaaaggatattcaaaagcggtagaggcggcgatggcggatcttttaccacctcttacggcggcacaagtcgatgctaagactaaagtcgatgagaaagtcgattactcgaacctcccttctcctgttccctatgaggaactccaccgtgaagctctcatgtctttaaagtcggacaattttgagggtttacgcttcgactttaccagggcgttgaatcagaagttttctctcagtcatagtgtaatgatggggccaaccgaagttcctgctcagtcacctgaaactactatcaaaattccaacagcccattatgagtttggtgccaattattatgacccaaagttgctgctcatcggaagggtaatgactgatggtagactaaatgcgagactgaaagcaga

SEQ ID NO: 119613 - DNA, 556 bp, Arabidopsis thaliana
  unsure (1)..(556): unsure at all n locations
cgcgtcaggttattctcatctccaatttcactctctcagtctcagatctgagagaactccaccggatcagattcatcgccgccaccgttcacggcaccaatcatcatcagaacaaatcttatttcgcatggtccaatttccgatttctcatcggagaaatccctaattcaatcccgtttcatcgttataaccaatcggagaaatcaccgctcaaactttgttgctagggatttgagtgagtgagagaggaagatggagcagctaaagacaattggaagagagctagcgatgggatcacaaggaggatttggtcagtcgaaagagtttctcgatctggtcaaatcaatcggagaagcacgatctaaagctgaagaagatcggatcgttctaagcgaggtcggtatactaaaacgaagattattagagccagatattccccagagggagatgaaagagtccttatcgnnncggttacatngagatncnaggcacgangcttctttnggtanattttcncgngantgcccccggggaaacttttttcncaangnanngg

SEQ ID NO: 119614 - DNA, 1005 bp, Arabidopsis thaliana
ttaggtcacactttggagggctatgacgtcgcctgcacgcgtacgtaagctcggaaagcagataaaaaaaaaatggctcaagcagtgacttcgatggctggcttacgtggagcatctcaggctgtccttgaaggaagtttacagatcaacggctcaaaccgtttgaacatctcaagagtctcggttgggtctcagagaaccggacttgtgatcagggctcagcagaacgtgtcagtaccagaaagtagtcgccggtcagtgattggactcgtggcggctggtttagccggtggttcattcgttaaagctgttttcgccgaagctattccgatcaaagttggtggtcctccacttccttccggtggcctacctggaacagataactcagaccaagcaagagacttttcattggcattgaaagatagattttacatacaaccattgtcaccaacagaagctgcagctagagccaaagattctgctaaagagatcatcaacgttaagtcatttatcgacaaaaaagcttggccctatgttcagaacgatctccgtttaagagcatcgtacctccgttacgatctcaacaccgttatctccgctaagcctaaggaagagaagcaaagccttaaagatctcaccgcaaagcttttccaaaccattgacaacttggactatgcggcgagatcaaagagtagcccagatgctgagaagtattactcagaaactgtctcgagtttgaacaatgttcttgccaagctcggttaatgaagaaagacttgcgttgtaatctgttgatgtcgatgttattataattactgctatccaagtactttgtctttctccttctcttcttgtctgatcaaatcggttatctctaatttcagtttcaagttttcccccataaaaaaaaaaaaaaaaaaaaaaaaaaaaaaaaaaaaaagggcggccgctatagaggatccaagcttacgtacgcgtgcatggtacgtcatagtaatctatagt

SEQ ID NO: 119615 - DNA, 802 bp, Arabidopsis thaliana
  unsure (1)..(802): unsure at all n locations
tgatctnnnnnnnnnnnnnnnnnnnnnnnnnnnnnnnnnnnnnnnnnnnnnnnnnnnnnnnnnnnnnnnnnnnnnnnnnnnccacgcgtccgtgcggctgcgagaaacgacagaagggtacggctgcgataagacgacagaagggtacggctgcgagaagacgacagaaggggaaagcagataaaaaaaatggctcaagcagtgacttcgatggctggcttacgtggagcatctcaggctgtccttgaaggaagtttacagatcaacggctcaaaccgtttgaacatctcaagagtctcggttgggtctcagagaaccggacttgtgatcagggctcagcagaacgtgtcagtaccagaaagtagtcgccggtcagtgattggactcgtggcggctggtttagccggtggttcattcgttaaagctgttttcgccgaagctattccgatcaaagttggtggtcctccactttccttccggtggcctacctggaacagataactcagaccaagcaagagacttttcattggcattgaaagatagattttacatacaaccattgtcaccaacagaagctgcagcttggagccaaagattttgctaaaggggtnatnaacggtnaggccattttttcggcaaaaaaggtttgnccntttnttaagaccggtttccgtttaaaggnattgtnccnccgttanggtttaanaccgttatttcngtaagctttggngggnggaaaccttaaggtttcccgaaaggtttccancnttgnanttggntttggggggnaaaggtncccatt

SEQ ID NO: 119616 - DNA, 659 bp, Arabidopsis thaliana
  unsure (1)..(659): unsure at all n locations
cgggatttccgggttggccccacccgtccgattcggtaaaagcggtttcggccaaactttttccgtccaaggtggggggccctccacttccttccgggggcctaccgggaccagttacctaaacccaggcaggagacttttaatgggcattggaaggatagattttacatacaaccatggtacaccaacagaagctgcagcttggagccaaagattctgctaaggagaccatcaacgttaagtcatttttcgcacaaaaaagctgggccctatgttcagaacgacctccgtttaagagcatcgtacctccgttacgatctcaacaccgttatctccgctaagcctaaggaggagaagcaaagccttaaggatctcaccgcaaagcttttccaaaccattgacaacttggactatgcggcgagatcaaagagtagcccagatgctgagaagtattactcagaaactgtctcgagtttgaacaatgttcttgccaagctcggttaatgangnaagncttgcggtgtaatctgttgntgtcgntgttattataattactgctatccagnatttggcttcnccggcnctcttgnctntcaatcggtacnntanttcagttaaggtttaccatntttggtggtttngnaaaatntttnttnntc

SEQ ID NO: 119617 - DNA, 632 bp, Arabidopsis thaliana
  unsure (1)..(632): unsure at all n locations
atcatcaacgttaagtcatttatcgacaaaaaagcttggccctatgttcagaacgatctccgtttaagagcatcgtacctccgttacgatctcaacaccgttatctccgctaagcctaaggaagagaagcaaacccttaaagatctccccgcaaagcttttccaacccattgacaacttggactatgcggcgagatcaaagagtagcccagatgctgagaagtattactcagaaactgtctcgagtttgaacaatgttcttgcccaagctcggttaatgaagaaagacttgcgttgtaatctgttgatgtcgatgttattataattactgctatccaagtactttgtctttctccttctcttcttgtctgatcaaatcggttatctctaatttcagtttcaagttttaaccaatatattggctggctctttagcaaaacattatatattcgtcctcgagctgaccactttgtaagttcatgttctgattctgggccnnnnnnnnnnnnnnnnnnnnnnnnnnnnnnnnnnnnnnnnnnnnnnnnnnnnnnnnnnnnnnnnnnnnnnnnnnnnnnnnnnnnnnnnnnnnnnnnnnnnnnnnnnnnnnnnnnnnnnnnnnnnnnnnnnnnnnnn

SEQ ID NO: 119618 - DNA, 501 bp, Arabidopsis thaliana
cgatttgatagtggttctaaaagttttaggaggtgtactaacaaagcagaacattttcgtatcgatgctgatgggttaccatctgttggacagaaattatatccagatgagccgtattgtagtatctatgatgaggtaactaacaaaacaaggcacatgaagcgtaaaggtaccgaccctgtcatagttgactttgtctctgtcgacatgaaaagcaagaaacatcctcaaagggcgaatatatcgtttccggcatgccagaaaccccataatcggtgacaagttcagcagtagacatgggcaaaagggtgtttgttctcaattgtggcctgatattgacatgccatttaatggagttactggaatgcgtccagatctcatcattaacccgcatgctttcccatcaagaatgacaattgctatgcttttggaatctattgctgctaagggaggtagtttgcatggaaagtttgtagatgcaacaccgtttcgtgatgcagt

SEQ ID NO: 119619 - DNA, 478 bp, Arabidopsis thaliana
agaacaaatgctatatctctgtaacttcagacacaagaaaaccaaaacactaaagatgagaacacttgaagcttttgctctgtccctgtttcttgtcttcgtagtaaaatgggtcaattctgactctagttcttctcctagtaaagatcaatttctgagttgcatgtcgacacattctgattccagcttcataaaccctaaaagcttcatccacaaaccagattcaagagtctacaccgatttctcgcagtctttaatatcacaaaactacagatttctgaccttgaatttcacaagccagaagccgattctgatcgttacaccaagaactgatactgaaatccagagatcattactctgtagcaggaaacttggggtgaaagtaagaaccaaaagcggtggtcatgactatgaaggcctttcttatctctcattacactcgcctttcatcatactcgatctcgttaatgttcgatcg

SEQ ID NO: 119620 - DNA, 415 bp, Arabidopsis thaliana
gtcgtttaaagtctgatccttttcatttttctttagtgtgtgaaaagagaaatacagttatggcggagatctcgggaaacggtggtgatgctagagacggagctgtggtggtcaatctcaaggaagaagacgaacaacaacaacaacaacaagctattcataaacccttgaagaaacaagactctctcctctctatctctgtccctttcttacaaaagttgatggcggaggttttgggaacatacttcttgatattcgccggttgtgccgcggtggctgtaaacacacaacatgacaaagccgtgactcttccagggatcgccatcgtttggggacttaccgtcatggtccttgtttactctctcggtcacatctccggtgctcatttcaatccggccgtcacaatcgcattcgc

SEQ ID NO: 119621 - DNA, 496 bp, Arabidopsis thaliana
ccacgcgtcaggtcattttgaaagctgagttttttttgtgaagcgagcgagcgtgagaaggtgtgacggggaagagaatggcgaaggaagcggtcaagtatgtatgggaaggagcaattcctctgcagattcatctccacaaatccgacgtcgcttctcaccctgctcctcctcctgctcttgtgttagcaccaagaataggatatttgcctctgttgattcctcttataaagccttatttcaaggattcacttcctcctggtgaagattcaatttggtttgattacaaaggatttcctctaaaatggtatataccaacaggtgttcttttcgatctcctttgtgcagaacccgaaagaccatggaatctcacgatacactttagaggatatccttgcaacatactgataccatgtgaaggagaagattctgtaaaatggaactttgttaattctttgaaagaggcacaatatatcatcaatggaaattgcaagaa

SEQ ID NO: 119622 - DNA, 543 bp, Arabidopsis thaliana
gacccaaacgtaagactcaccagcacctctatttctttctcactctccaagtctcctctgtgaaagctgaaagctcatcttcttccacgtgatttgtcttcccgatcaccaaacctttccggtgatgactctcccttgcgttcgacgccatcttccttggagttctcttcaatcaaccggtaaatcttccactgattttgaagaagattcttccatgttcgatctggttcggctccagagatcgagagttgaattgcctcgaaacagctctagtttcaccagagacgcgcgaccgatagaaataaagagactccaagctgcgtgtaccggagacgaatggcgggaaaattgacttgagcgcgattttctgtgtggatccaaaatgaagaaagaggtgtctcagcagaagttactgtacagatggaagaggaaggtatacgccacgttgatgttcgctttctgctttgggactttcgtatttatacaagctcgtttcgcatctatacaagctcgtttcaatcgaatctctgcgtctctcgattc

SEQ ID NO: 119623 - DNA, 1176 bp, Arabidopsis thaliana
  unsure (1)..(1176): unsure at all n locations
atgttttaggtgcactatagaagagctatgacgtcgcatgcacgcgtacgtaagctcggaattcggctcgagaaacaatgacggacacttgtcagcggctgaactaaaggcgcttatcattgggatcagctttgaggatatagattttgacaaggatgatgctgtgggaaaagttctccaagattttgataagactcttgatgagcaagttgatcaagaagagtttgtccgtggaattaagcaatggcttatccaggcaatgggaggtgctccatctggtcctgaagctggccctcgaacaatgaaattccttgacaatttccatgtgcaaacaaagagagagcatgctttgttgggagataacgagaatggtgagaatgatgaggaaggcggtgaggttgcagacccaaaatggatcaccattaaagcagctctgctgctactgttaggagctgccattgcagctgcatttgctgatcctttagtcgacactgttaacaacttctccgcagccacagggattccgtctttcttcatttccttcatcgctttgcctttggccaccaattcaagtgaagccgtgtctgccatcatcttcgcatcccgcaaaaagatcagaaccgcctctttaactttctccgagctatgtggtggagtgacaatgaacaacattctgtgtctctcggtgttcttagcaatcgtctacgttcgaggactgacatggaacttctcatcagaagtgttggtgattctcatcgtttgtctggtgatgggcggtttcgcgagtttccgcacaacttatcctctttggacatgtttcatagcttacttgctttacccattctccttgggtctggtctatattcttgattactggtttggctggtcgtagatatcactctctgttcaaagagtttgttctaatgagtgagtgtcttcgcgcgtggtttcgtttcttctctacatatatatatatatatggattctcgagtgtaaaaacttaaattctgagatttgtgtattggaaacagagtcttattgaagctaatacagtaatatctttcttgtttcttctgtctgaaagagggtaaacacgnctagggcaaccgctctagaggatcccagcttccgtacgcgnnnnnnnnnnnnnnnnnnnnnnnnnnnnnnnnnnnnnnn

SEQ ID NO: 119624 - DNA, 806 bp, Arabidopsis thaliana
  unsure (1)..(806): unsure at all n locations
atgatactgccnnnnnnnnnnnnnnnnnnnnnnnnnnnnnnnnnnnnnnnnnnnnnnnnnnnnnnnnnnnnnnnnnnnnnnnccacgggtccgcggacgcgtgggtgccattgcagctgcatttgctgatcctttagtcgacactgttaacaacttctccgcagccacagggattccgtctttcttcatttccttcatcgctttgcctttggccaccaattcaagtgaagccgtgtctgccatcatcttcgcatcccgcaaaaagatcagaaccgcctctttaactttctccgagctatgtggtggagtgacaatgaacaacattctgtgtctctcggtgttcttagcaatcgtctacgttcgaggactgacatggaacttctcatcagaagtgttggtgattctcatcgtttgtctggtgatgggcggtttcgcgagtttccgcacaacttatcctctttggacatgtttcatagcttacttgctttacccattctccttgggtctggtctatattcttgattactggtttggctggtcgtagatatcactctctgttcaaagagtttgttctaatgagtgagtgtcttcgcgcgtggtttcgtttcttctctacatatatatatatatatatatatggattcgagagtgtaaaaacttaaattctgagatttgtcagtgattattaatgtattggaaacagagtcttattgaaaaaaaaaaaaaaaaaagggcggccgctctagaggatccaagcttacgtacgcgtggccatgcgacgtcatagctctctataagtggcacct

SEQ ID NO: 119625 - DNA, 1418 bp, Arabidopsis thaliana
  unsure (1)..(1418): unsure at all n locations
ccctctcttccgcggacgcgtggggtatatgtgtgtgtgtatatatatacatactcatccacaaaaactcgactgattgatttctccatgaacaacgtcctcctttgatttcacctttttttgttgtcttcttctttcgaaatcaatcatgagattcagatctctcatctctctcctcttccttctcttcttcacttcatctgcttacgctcgattcgtctccctaaacccatcttcaacgagtctaatctccgatggaatcgacggtggttcaaatctcgccggttccggatcggttatcaagtcggttgtttcggctccggctgaggaaaaggaggaagcttgtgagcagacatacgggtttatgccgtgtactaagaccgctcttggaaacgtgtttctgattttggtttatggatttctcatgtttacggctgcgacgtatctctctgctggaagtgagcttcttcttgagatccttggacctggaattgtcggtggtttgtttcttccgatgcttggtgctcttcctgacgctatgcttatcatggtgtctggactatctggagatgcagcaactgctcaaagccaagtctctgtgggaatgggtttgcttgctggttccactgttatgcttctcactgttatctggggaacttgtactgtggttggcaagtgtgatcttcgtgattcaattgctgtaaacaaccaagacaccaaaggctttcacctaaaagattctggtgtaactgttgatatttggaccagctatgctgcaagaataatggctatatcagttattccgttcgtcattgtccagcttccgcagatgttgggctcaacctctggaagacaattgtccgtgttgattgctctaatcctttcagttcttatgttgatctcttactgcgtatatcaggtattccaaccatggatccaaaggagacggcttgcttttgcaaaacacaagcatgttatatcaggaatactaaggcacttgaaacaacatgctctgggaaggcttcttgatgatgaaggtcagcctgatgaacatgtcattcgaaagttgtttttgacaattgatgcaaacaatgacggacacttgtcagcggctgaactaaaggcgcttatcattgggatcagctttgaggatatagattttgacaaggatgatgctgtgggaaaagttctccaagattttgataagactcttgatgagcaagttgatcaagaagagtttgtccgtgggattaagcaatggcttattcaggcaatggggaggtgctccatctggtcctnaagcttggcccccggacaatgaaattccttgacaatttccattgtgcaaccaaagggggggcattccttttttgggggctancngnattgtttggattttttggnngcggttgggttnt

SEQ ID NO: 119626 - DNA, 428 bp, Arabidopsis thaliana
atattaagaactttcgttgcttttctaaggcaaaacaaaacagactttttctcttcttcttctttttggggctacgacaatctgaatttgatcccaaatcaaaactttcttcttcttcgtcttcctctaatcaaaactgtctcctaccaaaggtctttcctttctccagccagatatgtgaggaaaccaagcttctcgtacaacttcatcacctacttccttttgacgttttcaaatcttgagagagatgggtatatatctaagtactccaaaaacagacaagttctcagaagatggcgaaaatcataaactcagatatggtttatcctctatgcaaggttggcgtgcgtccatggaagatgctcatgcttgcaatacttgatctcgatgataacacttccttcttggggggctatgatggtcatgaa

SEQ ID NO: 119627 - DNA, 481 bp, Arabidopsis thaliana
cacaacaacaacaactaagaaatggcacgatatgaattcttccgccaaatattcattgtcttgtctggagtttctccgttggtcggagctttcactgtgatcacctccgactcgacggccccatctgctctgatcgacggcccacaaactggattcacgatgaccaatgacggcgctcgcacggagcctgacgagcaagacgccgtctacgacattatgcgtgcgaccggcaacgactgggctgccgcgattccagacgtttgccgagggagatggcacgggatcgagtgtatgccggaccaggataacgtctaccacgtggtctctctgtcgttcggagcgctctcagacgacacggcgtttccgacttgtgatccacaacgctcttacgtctctgagtccctcacgaggctcaaacacctcaaagccttgttcttctaccgatgtttaggccgcgccccacagcgcataccggcgtttc

SEQ ID NO: 119628 - DNA, 493 bp, Arabidopsis thaliana
  unsure (1)..(493): unsure at all n locations
cccacgcgtccgcccacgcgtcccgaaattagggcttccgtgtttcgcagtgctctccttcaatccccagcttgacaatgcctcgctatgatgatcgctatgggaacactcgtctttacgttggccgattatcatcgagaactaggacccgagaccttgaacgtctttttagcagatacggaagagtgcgagatgtggatatgaagcgagattatgctttcgttgaatttggtgatccccgtgatgctgatgatgcaagacattacctggacggacgagactttgatggaagtcgcatcactgtggagttttcacgaggggcacctcgtggttctcgggattttgatagcagaggcccaccacctggagctggtcgctgttttaactgtggtgtagatggtcaatttgggctccttnacttgcacaataggggggctttgaaagaacaaanttttacccnttntnggggngagggggcanattttggggaact

SEQ ID NO: 119629 - DNA, 519 bp, Arabidopsis thaliana
  unsure (1)..(519): unsure at all n locations
ggaaattagggcttccgtgtttcgcagtgctctccttcaatccccagcttgacaatgcctcgctatgatgatcgctatgggaacactcgtctttacgttggccgattatcatcgagaactaggacccgagaccttgaacgtctttttagcagatacggaaggtctctgggattttgcctaacctggaggtgtttgatgagtgggtggacttggtggaaattctcgccaagtgtttaggggacagggcgccttggcgattctgtttgtagaattttttaatgtgttttgatggaaatggagactcagtctcaaaaatggtgtttagaagtaccttaaagtaatgatggccttacttttctgccaacaatttcttccgcagagtgcgagatgtggatatgaaggcgagatatgcttccgttgaatttggggatcccccctaattcttatgattcaagacattcctggccggcnggactttnatggagncgatnnctntgggttnacgggggaccngggttg

SEQ ID NO: 119630 - DNA, 548 bp, Arabidopsis thaliana
  unsure (1)..(548): unsure at all n locations
annnnnnnnnnnnnnnnnnnnnnnnnnnnnnnnnnnnnnnnnnnnnnnnnnnnnnnnnnnnnnnnnnnnnnnnnnnnnnccacgcgtgcgggtcttcccctttccttccgaaattagggcttccgtgtttcgcagtgctctccttcaatccccagcttgacaatgcctcgctatgatgatcgctatgggaacactcgtctttacgttggccgattatcatcgagaactaggacccgagaccttgaacgtctttttagcagatacggaagagtgcgagatgtggatatgaagcgagattatgctttcgttgtaagtaaaatctccttttaacctgagctttcgatttcttgaaaaagtcatgtagtacgttttttagtcggaaccaatgtataatgtgggaaaacacaccatgcatgtggtctcttttgtcctcacattttcgaaatcaggaatttggtgatccccgtgatgctgatgatgcaagacattacctggacggacgagactttgatggaagtcgcatcactgtggagttttcacgaggggca

SEQ ID NO: 119631 - DNA, 588 bp, Arabidopsis thaliana
  unsure (1)..(588): unsure at all n locations
cggacgcgtgggcggacgcgtgggcggacgcgtgggtggctctgagctactctttattgcttaggccttagtgtgtgtgtgtgaatcttctcagcgaaagccaagttcttttctttgttggtgtttctgggtttattgcgacaatgggagctgagcattttagcctggtgaagttcaatagaggtttctttgtgtgtttatgggtgatgctctcgctatcttgcgcagcagcgagctatggctcttcaaggcaaaagtttgaggtgaagaagcatttgaataggctcaacaaacctcctgttaagactattcagagtccagatggagatataatcgactgtattcctatttcaaagcagccagcttttgaccaccccttcctcaaagaccacaagattcagatgaggcctagttaccacccagaagggctttttgatgacaataaggtatttgctgaaccaaaggggaaagaaacttaatttccctcagttttggnnccggattggaaatttcttanggaccnttccctttggggggcaaagggggttatttttttnggaantttcntaaaaantttgcaanagggna

SEQ ID NO: 119632 - DNA, 441 bp, Arabidopsis thaliana
gcgatcaaaacgttttaaaacatgggaagtatcgtggagccatgggcagcaatcgccgagaacggaaacgcaaacgtgaccgcgaaaggctcgagcagggagctgcgacatgggagaacagcacacaacatgtcttcatcgtcgctaaggaagaaatcagacctgagattggttcagaaagttccatgcaaaactctcaagaacattctctctaatcttcaagaagtcattcttggtactaagcttactctcttatttctcgccatccctctcgccattcttgccaattcttacaactacggtcgtccgttgatatttggactgagcttgatagggctgacacctctagctgagcgagttagctttttgacagagcaactagctttctacactggtccaacagtgggcggtttgttgaacgcgacttgtggaaacgcgaca

SEQ ID NO: 119633 - DNA, 541 bp, Arabidopsis thaliana
tacgactcactatttggagagctggcacgcctgcaggtaccggtccggaattcccgggtcgacccacgcgtccgatatattcacttgatcatcatatctctacaagcataaatcccgtgtttgataactattttttgtcagtagaaaattaatgatttgtgtttttcggagtccggtgcatttctgacacgtagttatccgttaccagatattcgtcgagaaaggtaaagaaagactgctctaaaatatttttatttttgtgaaaatatgtgacagccgttgatatttggactgagcttgatagggctgacacctctagctgagcgagttagctttttgacagagtaagttattatcgtcccacaaattttctatagggataactacgagatatttcatagtattaccattttattcttttcgacataaatggtgttgggttaagtttggtttagtttaggtactagtataaagtaattgacatttccaagctgttgactgaatgatcatcacctttaagattcttttgaaatttcgaaac

SEQ ID NO: 119634 - DNA, 388 bp, Arabidopsis thaliana
ccggaccggaatggtcggctcgaccatgcgtgcatggaaatctgaaagaaatacacgctcccatagtcttcaattttcacgatctccgaatttcacgacgtttgatacttggtttctttgcacattcacgcgacgaagatgaggctgttgaaggttgctacgtgtaacttgaaccaatgggccatggatttcgagagcaacatgaagaacatcaaggcttcgatcgctgaggcaaaggctgctggtgctgttatcaggcttggacccgagctcgaggtcactggctatggttgcgaggatcacttcttggaactcgacactgtcactcatgcgtgggagtgtttgaaggaattgctgcttggtgattggacggatgatattttgtgca

SEQ ID NO: 119635 - DNA, 394 bp, Arabidopsis thaliana
accacgcgtccgctatagcattggaaaagaaagaaagagagagaacaaagcttcttcatcaatggagaagcaaggatgtgagatcgaagctttagatattgattacaacatctttgtaaggaagattaatgttaatccctttggaatctttaggcggaaaccgcggccggaagctgaccagccggtaaagacagaggaagagtcattgaagctagaggatgaaaccggtaacaaagtcaagcatgtactaaaaggagtgacttgcagagccaaaccatgggagattcttgctattgttggcccaagtggtgcagggaagtcgtctttgcttgaaattctagctgctagactcatccctcaaaccgggtcggtttatgtcaacaagagaccggtg

SEQ ID NO: 119636 - DNA, 902 bp, Arabidopsis thaliana
ccgggccccccctttgaacgcccgtggagactggcccttctgcaggtaccggaccggaattcccgggtcgacccacgcgtccgccgttcttctcgtagcttgaaataagattcatcagaagagtaaataaacatcaaaatccaacaaaccaaactagaaaaatgtcagtagttttactctcttctacttctgcaacaatcaccaaatcccaatccaaaaagattccctttttatctcccaccacaaaattcccattaaaggtctcaatttctccatcaagatcgaaacttttcaacaaccctttacgcgtggcggcgccgccgtctatacccacttcggattcggcggaggagaagcggatcgaagaagaatacggtcggtgataaggaagaagaagggtctgagttcaagtggagagatcattggtatccagtttctttggttgaggatttggatccgaatgtgccaaccccgttccagctcttgggtcgagaccttggcctctggttcgatcggaatgatcagaaatgggctgcctttgatgatctctgccctcaccggctcgctcctttatctgaaggaaggttggatgagaatggacacttgcagtgttcctatcatgggtgggccattcagagggtgggggatcctgccaccttagatttcctcgagggctgcttaccttcaagggtccccggaaaggctcgcggggcctgtgttaaaaatcccccccgagagaagaccttggttggcttaatttaagaggttgttccccaccaaatgggcgttggttcttcaaaaagggggccttcccttccttcttggtgggcgcgggcccctggataggaaaaacataggggtgttggggggattatgggaggcgcccaaactttccaaatttg

SEQ ID NO: 119637 - DNA, 588 bp, Arabidopsis thaliana
ggatttggttccgaatgtgccaaccccgttccagctcttgggtcgagaccttgtactctggtttgatcggaatgatcagaaatgggcagcctttgatgatctctgccctcaccggctcgctcctttatctgaaggaaggttggatgagaatggacacttgcaatgttcgtatcatggatggtcatttggtgggtgtggatcttgcactaggattcctcaggctgctacttcaggtcctgaagctcgtgctgttaaatccccgagagcttgtgctattaagttcccgacaatggtgtctcaaggtcttctctttgtgtggcctgatgaaaatggttgggatagagccaattcaattgaacccccctaggttgccggatgcatttcgataaaccggaattttcgacggtgacaattcaaagggatctttttctatggataatgataactctcattggaaaatgtatctgatccttcccatatagattttgctcatcacaagggtacaggaggaagagacagagccaaaccattgccgttcaaggtggagtcaagtgggccttggggtttccaaagtgcgaatgatgacag

SEQ ID NO: 119638 - DNA, 425 bp, Arabidopsis thaliana
gaagaaacaaagcataaccccccagagtttgtgtgagagtttctcccaacaagatcaaacttcgtactctacgagaactactattatccaaaacgcgaaatagagagacagagatttcataaatttcttactttttaaccccaaagttcttttccagacagcgttttcctctgtcctttgctctttgtgggttaactccttcttccggtttggatatcccgagctagtaaagaagggatccagtagcagaagctgaagctaataaacccaatcatagagaaagctctctgaacaaaagacattttctgggtttgttttaattaaaaagaaatggccgattcgaccaaagtaaggctagttcgttgcccaaaatgcgagaatctcttatcagagcctggaatatttccctttttccagtgcggtgg

SEQ ID NO: 119639 - DNA, 1379 bp, Arabidopsis thaliana
aaaaattcgtcgggccccttaggaacagctaccccaatttcaaatttttattcgtttttgcctttactaacttatggtcagatctctttaattaaatattttcaacttgataacttaatttatatttttcaaaaaattaactcttatgtaatcgatgaaaacggaataattttaaatctcgacccatatagtaacgttgttttgaatccattcaaattgaattggtattttcttcatcaaaattatcatcataattattgtgaggaaacgtccacaataattagtcttggacaatttttttgtgaaaatgtatgtatagctaaaaaagaaccgcacctaaaatcgggtcaagttttaattgttcaaagggattccgcagtaataagatccgctaagccctatttggctactccgggagcaaaagttcatgggcattacagcgaaattctttacgaaggggatacattagttacatttatatatgaaaaatcgagatccggtgatataacccaaggtcttccaaaagtagaacaagttttagaagtccgctcgattgattcaatatcgttgaacttagaaaagcggattaagggttggaacaagtgtataacaagaattcttggaattccttggggattcttgattggtgctgagttaactatagtgcaaagtcgtatttctttggttaataagattcaaaaggtttatcgatcccagggggtgcagattcataataggcatatcgaaattattgtacgtcaaataacatcaaaagttttggtttccgaagagggaatgtctaatgtttttttacctggagaacttattggattattacgagcagaacgaacggggcgtgctttagaagaagcaatctgttatcgagccgttttattaggaataactcgagcatctttgaatactcaaagttttatatccgaagcaagttttcaagaaactgctcgagttttagcaaaagctgctcttcggggtcgtatcgattggttgaaaggcctgaaagaaaatgttgttctagggggggtgatccccgccgggaccggattcaacaaaggattggtgcattgttcacggcaacataccaacattattttggaaaaaaaaacaaagaatttagctttattcgagcgagatatgagagatattttattctaccacagggaattttgtgactcttctatttcaaatctgacttttctaggatttaatgatttctaatagcggactatttaaaatttagtttttgttgtttgctgtagtcatttgctttcgtaatttgttaacactaataaagataataatcaatacaaaataatggcttggttcatgcataaatggcatccccggtacaagagaaggtt

SEQ ID NO: 119640 - DNA, 526 bp, Arabidopsis thaliana
ctctctctctctctctctctctctctctctctctctctattctctgtacatttccagcgctaaaaatggaagaggcccaagtgagagaaagatggtgaaaggcgaggagatataggggagagagaatcccattcccatattcagagcacaaacaaaaaagcttcaatttttggggacaaagtttttatcttttcgttgtttggaatttgggggaggaagaaggaaaggtgtaaggatagggtcgtgcgtgtcaacgagaggtgctgctggacgtgaagcctcctcctccgcatcggcgaggaggcttccgtcgcagcaccacctcagcggtagccttagctcttctggctacggcggagaaccgtcggatcaatctgatatcggcggtgcgaagatgaaagggcttttcaagtctaagccacgcactccttgctgaccctgttcggacaaacccgcgatctccttctcttctccgatcgatctacctctttgcctgacctccgagattccaaacgcgacgaaaaga

SEQ ID NO: 119641 - DNA, 590 bp, Arabidopsis thaliana
cgcgtccggggcattgccacagtatcgagtgtcactttctcaatcaaaaggttttctctctcttctcttttttcctctcctgcgcgaaaacaagacgaagagagagagagagagactcagacacacacagacacagagtttaggtttgctttgtaaatctgtctctgcacttatcatagtttcgtttctcttttgagaaagaaaaacccaaacttgccatgttttagatctggtcctttttaagctccaaaagattgttgctttttctcttgcttaagtttttgattccttcttcttcttcggaaagtctgtacctcgcaagagtttgattgtccttgtgttgcgatttccatgtttagtatctgcatttgatagccttcgatgctgcatgcaattcccaagactctttctgattgctacaacgccgtgatttctctctgccatttccttcgatttgatttctgggttctcttcttctcgtctctcttctgcatgtttcgccactctaccttagaaaaaaggttactttcgcctccgatttaggctcgatttgatgaattcgtcgtcgtgtggctatttatcaaattgag

SEQ ID NO: 119642 - DNA, 415 bp, Arabidopsis thaliana
gaacttcaacaacaaggaatttgttgagcccaccaaaattcaacgatgggttgttgtcaatttctctgctcgctgtaatgtacgtcaagttgttgatgatctgataaaaattggaggatcaaaaggaattgaaattgcttctccctttcaagtgtttgaggagggtaatcaattccgccgtgctcctcctatgattcgtgttgagaacatgtttaaggacatccaatcgaaactccctggtgtcccacaattcatactatgtgtgctccctgacaaaaagaacagtgatctctatggtccatggaagaaaaaaaacttaactgaatttggcattgttactcaatgcatggctccaacgcggcaacctaatgatcagtatcttactaacttacttctgaagattaatgcaaaactt

SEQ ID NO: 119643 - DNA, 626 bp, Arabidopsis thaliana
aaaaaatatcacaaatcccatgaaaaatcacagagcttagaactctccacactctcaaactccgacgacttgactttaagatcatccctgaggagatcggtacttagcaatgggaggaaaatcagagccagcgaaatcggaatccatggcgacgaagccagatctactcaacactagtttcttctcattcaaatccctaaaattgaagacgaaacaacaagagctcttactccgtatctcgatccttggtctcgtctacatcttagctttcatagctcgtctcttcagtgttctccgctacgaatcaatgatccacgaattcgatccgtatttcaactaccgtacgactcttttcctcacagagaaaggcttctacgagttttggaactggttcgattccgagagttggtatcctctaggtcgaatcatcggcggtactctttatcccggtcttatggtcacagctgcgttaatctactggacattgcgatttctccgattcttcgttcatatccgtgaggtttgtgtgttaaccgcaccgttttttcgcgtcgaatacgactctcgttgcgtagttctttggtaaagagctttgggatacaggagctggtcttgttgctgctgtt

SEQ ID NO: 119644 - DNA, 575 bp, Arabidopsis thaliana
accacgcgtccgattagatagatagatagattattttcaccatcaacatcaccatcaccgccactatcacaccataacccaccactcttcttcttcttcttcttcttctctctctttctctgtatctagaaacagagagtttttgattctctctgttttcaaatctgttccactaagctctcttgctttcgggaagattctgtttcactgctgcattttggatttttccgatggatcgtaagagttggccatggaagaagaaatcctctgagaaatcagctactgtcacagaagttgttgatcaggaaaatgggaagaagccgagttatatccagatctcatttgatcaatacacgaatctaaatggtttaaaagatgaagtcaagagctacgaagaaaaagttacaaagcttgaggatcagatcaaagatttggatttgaagctatcaacagctaatgcagatattgtagcaaaggaggttttagtcaaacaacactccaaagttgctgaagaagctgtcacaggttgggaaaaagctgaagcagaagcatcagctttgaaaacacatctcgaa

SEQ ID NO: 119645 - DNA, 1080 bp, Arabidopsis thaliana
  unsure (1)..(1080): unsure at all n locations
nnnnnnnnnnnnnnnnnnnnnnnnnnnnnnnnnnnnnnnnnnnnnnnnnnnnnnnnnnnnnnnnnnnnnnnnnnnnnccacgcgtccgcccacgcgtccgcccacgcgtgcgtacggctgtgagaagacgacagaaggggacccatatctcacgcttaattacagtattgccactcattaaaaccgtaccatcttaaccaaagcgataacccgtaccaccggttcagctatggaggatttattggaggagaggctaactcggactgactctgtcgggaataaacgagtcagagacgggttagacctcgactcgccggacgtgaagcggttaagagatgatttgttcgatgactcggggcttgacccagtgagtcaagatcttgactcggtgatgaagagtttcgagaatgagttatcgacaacgacggcggcgctaagctccggtgaaactcagccggatcttggataccttttcgaagcttctgatgacgagctgggtttgccaccgccgcttacgccaccgcaaacgcttcttcctccgtcctgtgaggaaacggtgacggaattggtaccagccttcgtcggattcatcaaacgttggagagttaagtgggtttgaggatcatgttacggagttcggaccttgcgatcttggtgatgatgggcttttcgaatatttcgatgggtgtttagattccggcgatttgttttcatggcggccggagtttttaccggcggagtaacaacataccggacctttttaaaaaagcgggctacgaacggtgacgttttgttaagcgttttgcctcgctttttcttttttcttttttttccctctattattggataataggtattaggatctatatattttgttaagttattaggattagaaaaatcaaaatgtttttagtaggagtaagtggtttagattagtttgtaagaacttttttctcttcaggaactgttaatctttaatcgcccaaaaaaaaaaaaaaaaaaaaaaaaaaaaaaagcggccgctctagaggatccaagcttacgtacgcgtgcatgcggcgtcatagtctagctatagtg

SEQ ID NO: 119646 - DNA, 783 bp, Arabidopsis thaliana
  unsure (1)..(783): unsure at all n locations
gatacgtcnnnnnnnnnnnnnnnnnnnnnnnnnnnnnnnnnnnnnnnnnnnnnnnnnnnnnnnnnnnnnnnnnnnnnnccacgcgtccgcaaatttctaactaaagcattcatagtctctcgaaagcctcttttcagaaccgaagctctttactttcgtccaccgggaaatatgccagtcgacgtagcctcaccggccggaaaaaccgtctgcgtcaccggagctggtggatacatcgcttcttggattgttaagatacttctcgagagaggttacacagtcaaaggaaccgtacggaatccagatgatccgaagaacacacatttgagagaactagaaggaggaaaggagagactgattctgtgcaaagcagatcttcaggactacgaggctcttaaggcggcgattgatggttgcgacggcgtctttcacacggcttctcctgtcaccgacgatccggaacaaatggtggagccggccgtgaatggagccaagtttgtaattaatgctgcggctgaggccaaggtcaagcgcgtggtcatcacctcctccattggtgccgtctacatggacccgaaccgtgaccctgaggctgccgttgacgaaagttgtcggagtgatcttgacttctgcaaaaacacctatatttggtattggtacagcaagatggtggcggtacaagcggtgtgggagacagcataggagataggaggtgacctggtggggttgaatccggagctggttctgggcccgcggttcatgcaacgatcaacgccggtgttt

SEQ ID NO: 119647 - DNA, 396 bp, Arabidopsis thaliana
catcgccgacacttcaagaaaaattaaagaaaagaaagtaaactctttcaccaaaaaaaataaaggaaatttattgttccatctttctgataatcggatcttacagagagagagctccatggatcgccgcatctatggtggctccgccgtcattcatctctttctcttcttctccgtcctaatcttctccgccgcatctgcattatccaagaaccagtctccttcttccgggtcgggtcagatcaactccaactctgtcctcgtagctcttcttgactctcgttacactgagctagctgagctcgtcgagaaagctcttctccttcagacacttgaagacgctgttggtcgtcacaatattaccatttttgctcctcgcaatgaagctcttgagcg

SEQ ID NO: 119648 - DNA, 494 bp, Arabidopsis thaliana
cagagatagaagaaacagattatccttttgacatggctaaggaatctgaagcagttaacgataaattaaaaggcttgcctcgtggaatcatacagtctagatcagatcttgaattaaagcctctctggtctagaggtagtctgaggtcaaagggtgtggaaatgactaaccgtaacttgttggcaatacccgtaggacttaagcaaaagggtaacgtcgacgctcttgtaaagaagtttcttcccgcgaatttcacgattgttcttttccattatgatggaaatatggataaatggtgggatctggagtggagttcaaaagccatacatatagttgcacaaaaccagactaaatggtggtttgcaaaacgattcctccatccggatgttgtatccatttatgattatatttttctttgggacgaggatcttggagtagagaatttcaatccagagagatatttgaagatagttaaatcagtgggactggagata

SEQ ID NO: 119649 - DNA, 390 bp, Arabidopsis thaliana
agtgagaatccaaaaacgtcttatggtttagctctcaaatttctccttcgattccatcttcctccggcttcaagtcgccggatcttcttgatttccgattcacttggctttcctcttctcttccttttaacacacgacgacgcttcatagttttttgttgtgattcaggaagaggtatgtaattcaggattttccggtgattttggtgggaacgtttggagaaatttcgagcttagtagtattcgtaggaaagttttcttcttttatgatttgtagtttttgtggattaatggttgaaggtgagaaatggggcttcgatggatttgaaaagattttgtatcttcgtggaaatgagatcgttggagattgcagcaagtcatctcattcgta

SEQ ID NO: 119650 - DNA, 623 bp, Arabidopsis thaliana
gagagaaagttaaagctttcttctgtgcatgtggtgagagaagaagaaatagaaaagttcggattttgatctgtgtggttggattgttgcaagaactaaaccagacccacctttcaaaactttgtccctaacgaacaacattaatcattcattctcctgtgtgagctcttcctcttcttctgtttaaggttctttctccttcttcttttgagggggtttaaagcttcagtggacgaaaagagtttgttttttgggtgacaatgggaggagtggtgcatcttagcacggcgaagttagctagaggtttcttagtgtgtttatgtctttggggttttttctcgctatcatacgccgcaaggtccggcgtatcaaagcagaagtttgaagtgaagaaacatttgaacaggctgaacaaacctgctgtcaaaagcattcagagttcagatggtgatgtgattgactgtgttccaatctcaaagcaaccagcttttgatcatccgttcctcaaagatcacaagattcagatgaagcctaattaccaccctgaaggactctttgatgacaacaaagtgtctgctcctaaatcaaatgagaaagaagggcatattcctcagttgtggcat

SEQ ID NO: 119651 - DNA, 517 bp, Arabidopsis thaliana
aaatcgccagaagtgacgaaattgaaaatctcagatttctcttaatcggcgacggagtaacgaaacaaggagaagaagaagaagaagaaaatgacgactcgaatcgctcctggtgttggagctaatcttctcggccaacactccgctgagaggaaccaagacgccactgtttacgtcggtggtctcgatgctcagctttctgaagaattgctttgggaattgttcgttcaagctggacctgttgttaatgtctatgtaccgaaagatagagtgacaaatcttcatcagaactatggattcattgaatatcgtagtgaggaagatgctgattatgcgattaaggttcttaacatgattaagctccacgggaagcctatacgggttaacaaggcatctcaagataagaagagcctggatgttggtgctaaccttttcattggaaaccttgaccctgatgtggatgagaagctattgtttgatactttcagtgcatttggtgtgattgcttctaatccta

SEQ ID NO: 119652 - DNA, 494 bp, Arabidopsis thaliana
cctgcgctgcaggagttcgggacgaggaagatcaaacacgtcttcttttctctctctctctttgtcgcctaaaattccagaatcactctgctttttacccttttaatcaatgatttttccttttagtagcaatcgttggtgattcgaaaaaccaaacttttctcggactaggattctagggttttagtgatcatctgaatattcatggcaaaccctaagctcactagggttctaagcacaagggatcgcgtgcaagacacgctttccgctcaccgcaacgaactcgttgctcttctctccaggtatgtggatcaggggaaagggattcttcaaccacataacttaattgacgaactcgaatctgttatcggagacgatgaaacaaagaagagtctctctgatggtccttttggagagatccttaaatcagcaatggaagctatagttgtaccaccttttgttgcgttagccgttagaccaagacctggtgtttg

SEQ ID NO: 119653 - DNA, 995 bp, Arabidopsis thaliana
taacggcgtcagacgccgtgaaaaggccgagagtggtgacgagcgagagaacaacgacgtcgttttcaaacgaggttcacggcgacggcgccgtcgatgtcctactcctacgctcatcctttcactcaaaagattagctgcgcgatgactcgaaactccacagatttcgattgctccgttggtaaagacgatcacatctggtgcgccggcgaacgaaccaacggatctgttcatagccgattcagaccaatcggtgacggcggcgtagcgctcgcgaacaatccagtttccggtaaaccttcaagctctgctgattactctttctttccctcggagttaccggctcggccggggaatgaagtcacgatctccggcgattcgaggaagaaagtagctaacttggaagataacgatgcggttagatcggggagggtgttatacgacatcgggtcgaaatcgatttcttctgtggctttgattattcaagggatggctgatgaaactctagaatcagctaaagagtatctaaggaacttgattgattcaccggagaagaaggagaagctggtgaatcttcagaaccagattgataaaaggtctgatcttagtaaggagacgttatcgaaatgtgttaaagatcagcttgatatcttggtagctgtaagaacagggcttaagtatttcctctctggtaagatcagaatccctatgaacgaattggtagagagctttctcttcttgagatgtaggaatgtgaattgtaagagtctcttgcctggtgatgattgtgaatgcaagatctgttccaacaacaaaggcttttgtagctcttgtatgtgtcctgtttgtttgagatttgattcagctagcaatacttgtagttgggttggttgtgatgtgtgttcgcattggtgtcatgctgcttgtgggattcagaagaatttgatcaaaccgggacatagtttgaaaggtcagagaggtactactgagatgat

SEQ ID NO: 119654 - DNA, 655 bp, Arabidopsis thaliana
tacgactcactttagggaaagctgctacgcctgcaggtaccggtccggaattcccgggtcgacccacgcgtccgtgaatctgtagtttcgtcagaaattgatgataatccatatcagacacagagccatccagtagagcaccacaaagatgaagatgatgtttcatctggttcagccagttttcaacaactagatagtcatgatcaagaagtctcacatgtaaaggatagacctgctgttgtaattccaaaccatttgctaattcacacagaagaatgcgcgcaattaagttttggaagctttggaggttttggatcaaggcctttgagcaacagcgtagaagcgacttctgatgtagctccacaaatcgaacattcagatgcaagaaatactgagttctatggagatgaacatctgggaagtacaaccaatggaaatatggtccacacacctgctactggaaattatgatgattctttagaaacgaggcgagaggtgttgaagcaagaaaactctgagggcgctcaggagcaccagtacacatttacccagtctgagcaagggtatgcgtatgaaaatgctaagcagcagcagatgaattctgcatatgatgcctcacacacaaattcacagaatcagatgcataatcttgatt

SEQ ID NO: 119655 - DNA, 502 bp, Arabidopsis thaliana
cgcctgcaggtaccggtccgcctttcccgggtcgtccaccccgtccgcggacgcgtgggcttttttttttcctccttggtagaaaaaagttctgaaatttgcacattcttggctctttttttcttcacaccgaaatcttctccctatttctccgacgtccttcttcttccttcttcggtcaactccgaccggttctccacggagactctcgtctcccattttttttttttgtacggctactttgatcgatcgccattgctgaatttcaaagccttctctgtgtcattttttctgtaactggaagtgtgagcttccatcaattgagagttgaaagttgactcttaattaaaacctgagagagagagagagattcttctttttatttaatagagcaagatctgggttttagtcagattattaagtcgagatcatcgggggccaccttaaaaccaaaaatccgggcttttcgaggggtgattaatgccaacagatgcgtggggag

SEQ ID NO: 119656 - DNA, 553 bp, Arabidopsis thaliana
gaaagacgacattaaaagaaaaaagataaaaaacagacgagataatggagagatctacgctcaaacgaacatcgagttttccagatattgaggctgttcaggggtgttcgactttgaatttgctgccaaaagccggatctagatctacgctcaaacgaacatcgagtattcctgattttgagcctgttaagtctctgcgttcgactttgattctgcagccaaaagccggatctccattgctgatgctgattgcagaagagtatggttgtcgtatttacaacccagaagatggtagggtttacgagccgaagagtgacttttcagggtatcgattcctgggaagctcaggtaagtggtttctggtggtagattctcgaatgaaactctatattatagatgtatttagcgagaagaggatcgatcttccaccactagaatcatttaagggtagccattttaagatttggcgtgaaggagaggagaatgtcaagcatatggtaatggatgatgaggatccattttgtgatgaatttcctcatgctgccgaagatct

SEQ ID NO: 119657 - DNA, 1177 bp, Arabidopsis thaliana
  unsure (1)..(1177): unsure at all n locations
atgatctccagctacaatacgactcatttagggaaagctcgtacgcctgcaggtaccggtccggaattcccgggtcgacccacgcgtccgcggacgcgtgggcggacgcgtgggctaaaacactgaagcagacattagcgttgagaaaaaaaaaaaagtaagaacgagagagagaaagccatgtctgcgaaaacaatcctatcatcagtagttttggtggttctcgtcgccgcatcagcagcggctaatatcggattcgatgagtcaaacccgatccgaatggtctccgatggtctccgggaggtagaagaatctgtttcccagatcttaggtcaatctcgtcacgttctctctttcgctcgcttcactcaccgatatggtaaaaagtatcagaacgtggaggagatgaagcttcgattctcgattttcaaggagaatcttgatttgatcagatccaccaacaagaaaggcttatcttacaaactcggtgttaatcaatttgctgatttgacatggcaagagtttcaaaggaccaagcttggtgctgctcagaactgctctgccactttaaagggcagccacaaggtcacagaagcagctcttcctgaaacaaaagactggagagaagatggtatcgttagtccggtcaaagatcagggaggttgtggatcttgctggacattcagcacaactggagctcttgaggcagcttaccatcaggcatttggaaaaggaatatctttgtccgagcaacagcttgtggattgtcctggtactttcaataactttggttgtcatggtggacttccttctcaagcctttgaatacattaaatcacaacggtgggctcgacacggaggaggcttatccttacaccggaaaagacggtggctgcaaattttcagcggaaaacatcggtgtacaagtccagtgactctgtcaacattaccctgggtgcagaagatgaactgaagcacgcggtcgggttggtaaggccagtaagttttggcggttttgggttgtacatggaattcaagggtttttttagagcacgggnggtttttccttggcaattccatggtgggaacactcccaattgggtgtaaacccatgcaggttttaagttggttttggggttaggcggcggcccgtccngnttttaagnccnatggggggg

SEQ ID NO: 119658 - DNA, 1480 bp, Arabidopsis thaliana
  unsure (1)..(1480): unsure at all n locations
cgactcactatttggaaagctggaccgcctgcaggtaccggtccggaattcccgggtcgacccacgcgtccgcccacgcgtccgcatgtctgtgaaactaaacctatcttcctcaatcctattgattctctttgcggcggcggcgagtaaagagatcggattcgatgaatctaatccaatcaaaatggtctccgacaatctccatgagcttgaagacaccgtcgtccagatcctaggacagtcccgtcatgttctatccttttctcgcttcactcacaggtatgggaagaagtatcagagtgtggaggagatgaagttaagattctctgtttttaaggagaatcttgatttaatcagatccactaataagaaaggcttatcctataaactctctcttaatcagtttgctgacttgacatggcaagagtttcaaagatacaagcttggagctgctcaaaactgttctgctactttaaagggtagccacaagatcactgaagctacagttccagacacaaaagattggggggaagatggtatttttagccctttgaaagaccagggccattttgggtctttttggacatttagcacaactggagctcttgaggcagcttaccatcaggcatttggaaaaggaatttctctctctgagcaacagcttgtggattgtcctggagctttcaataactatggttgcaatggtggccttccttctcaagcctttgaatacatcaaatccaacggtggcctcgacacagagaaagcttatccttataccggtaaagatgaaacctgcaaattttcagctgaaaacgttggtgtacaagtcctcaactcagtcaacattactctgggtgctgaagatgaactgaagcatgcggttggattggtacggccagtaagcatagcatttgaggttatacactcgttccggctttacaagagtggagtttacactgatagtcactgtggaagtactccaatggatgtgaaccacgcggttttggccgttggttatggagttgaagacggtgtaccatattggcttattaagaactcatggggagcggattggggcgacaaaggttacttcaagatggagatggggaagaacatgtgtggtattgctacatgtgcatcataccccgttgtggcttgagatgatcagcgaatgtggttggtcaattatcaaattacgaaatgttcacgtatttattggattaagacattacgtaaaagttgggacttgggaatgcatatggtttatgcttgttgtaacataaaaaggtctgttaatatgtacaaaataaagccaaaactatagacgacaaatttataatattttcatgttaaatttatgcacataaattgatttaaaaaaaaaaaaaaaagnnnnnnnnnnnnnnnnnnnnnnnnnnnnnnnnnnnnnnnnnnnnnnnnnnnnnnnnnnnnnnnnnnntcctaannnnnnnnnnnn

SEQ ID NO: 119659 - DNA, 615 bp, Arabidopsis thaliana
  unsure (1)..(615): unsure at all n locations
agcctgggaccggcccaaaccggtcctggtccttaaaggggagcccccaaaaccatggaacctccggtcccaaacccaaagaatgggaaaaaaaatggattggtaggccctggggaaaaaccaggaccattttttttttgggggaacattaaccacaccgggagctctggaagcggctacccatcagccttttggaaaaggaatatcttggcccgaccacagctggggaatgggcctgggcctttcaatacctttggtggcaatgggggactcccttctaaagcctttgaatacattaaatacaccgggggcctcgacccggaggaggcttatccttacaccgaaaaagacggtgcctgcaaattttcagcggaaaacgtcggggtacaggtccgcagactcagtcaacattactctgggngctgaagatgaactgaagcatgcggttngattggtacgggcnantaagcatagcattttagggttatacactcgttccgggtttttacaaanaggtggnggtttacactgatagtcacctttggaaggtacctccaaatggntnttgaaaccncggcgggtttttggncccttgggttattgngggtttaaaga

SEQ ID NO: 119660 - DNA, 433 bp, Arabidopsis thaliana
cgataacgtttccgtctgtatctctctcttccgtcttctactcttcttcttcttcttcttcttccactcacaatctatcgagctaaaacactgaagcagacattagcgttgagaaaaaaaaaaaagtaagaacgagagagagaaagccatgtctgcgaaaacaatcctatcatcagtagttttggtggttctcgtcgccgcatcagcagcggctaatatcggattcgatgagtcaaacccgatccgaatggtctccgatggtctccgggaggtagaagaatctgtttcccagatcttaggtcaatctcgtcacgttctctctttcgctcgcttcactcaccgatatggtaaaaaagttatcagaaccgtggaggagatgaagcttcgattctcgattttcaaggagaatcttgatttgatcagatccaccaac

SEQ ID NO: 119661 - DNA, 558 bp, Arabidopsis thaliana
atcgagaggcttctcacctctccgtacgattcatatctcttacgttcctgaagaagagatcggtggattcgacgggatgatgaaattctccgcgtcatcggagtttaaggatttgaatttgggatttgctatggatgaagggcaagctaatcctggcgatgaatttagggttttttacgctgatcgagttccatggcattttgttattaaagctgaggggattccaggtcatggtgctaagctttatgataattcagctatggagaatttgatgaagagtgttgagttgatttctaggtttagagagacgcagtttgattttgttaaagctggtaaagctgcgaattcggaggtaacccctgtgaatccaggttatcctaaagctggaacccctactactactggggttgtgatgaatatgcagccttcagaagcagaagctggggatgatttaaggttgcctccaatggcagatcctgatgttttgaagaaaagaattgctgaagaatgggctccttctattaggaacatgacctactcgatacaagagaaaggaaa

SEQ ID NO: 119662 - DNA, 419 bp, Arabidopsis thaliana
aagagggaggcgttgcaaactcaataaagctcaaaactttccgccgtcgttttcgtcgtcggagaatacaacaaaagacctaaagcagatcaaagtaattgtagttgacggagatggagaaagtaaagattgaagaaattcagtccaccgctaagaaacaacggattgctactcacacccatatcaaaggccttggcctcgagccaactggtatccctataaaattggcagctggatttgttggtcaacttgaggctagagaggcagctggtcttgtagttgacatgattaagcagaagaaaatggcgggcaaggctcttttgcttgctggacctcctggaactgggaaaacagctttggctcttggaatctctcaagagctgggaagcaaggttccattctgtccaatggttggatct

SEQ ID NO: 119663 - DNA, 349 bp, Arabidopsis thaliana
ataagagtagactagagtcttcttggttgtgatattcttttccaatttcgtaattttagaaaagctgtacaagatggcgagtgtgtcgtggcgggctgtggctgtagctatggtggtggtgttgctgtcattgcagtggtttgcaaaagggtacccggaagaagatttggtggtgaggctgccaggtcaaccaactgttgggttcaaacaatacgcaggttatgtcgatgtcgatgtgaaagctggtcggagtctgttctattactatgtggaggctgtgaaacaacctgactcaaagccattgaccctttggctcaatggaggtccaggttgttcttcaattggtgga

SEQ ID NO: 119664 - DNA, 594 bp, Arabidopsis thaliana
  unsure (1)..(594): unsure at all n locations
atataacaataacaggtacaaatattaaattgaggtacccattttatgacaactttcaataacttaccctctatttttgtgcctttagtaggcctagtctttccggcaagtgcaatggcttctttatttcttcatattcaaaaaaataagattttttagatcggctgagaccgaatcatatcacctttttttttttattttaaaaacttcgattcgataagacccatttggtagaatgttgtataacacatagattcctacaaacataaataaaaaaaactcttatgcatgtgtaaacgtaaaaaaatttgcgctcttttgaaaaatggatcatcgtcgggccgatgtctgaaattccagtcaatctatttatttgtatgtatataacctataggggatcatataaaggaaggagatgttatttttttagatataaacaattctatgaattactcctaaggtaaaggttcacaacaaaatagtttatattataagagttaccttgaaaacaaaaaaaaagggggcggccagnggccagctcgnccngggatnggggcagccncnagggnccaatcatccggnggngttaagggc

SEQ ID NO: 119665 - DNA, 471 bp, Arabidopsis thaliana
gccgaagctgaaacccgaatatgctcgagcggctcgagtgaattttttctagtgatcttctttttgattgagaacatgagtgatcaagaaggagactgggatttttacctcagaatcctaagcaacagcgcgcgggattctacggatcctgcttctgatccatctatactacaatcagtgaagaagctgcatgggttctgtaaaatggagaaatcagatgatcttgtggctagaatttatccacaattcaataaagtcttccatcgttcggttgcttcactatctcagtccgagtcaggggcgtccaaaggccttctcttgctagccattcttcagttttttcttgattttggggatatggttctgcacgattctgacccaagtttgaggacattcttccgctcatgtcttagccgtgagttctcagatgccgctgtggcagaggcaacttgtgaatttcttgttgtgaac

SEQ ID NO: 119666 - DNA, 408 bp, Arabidopsis thaliana
aagagctatgacgtcgcatgcacgcgtacgtaagcttggatcctctagagcggccgccctctctttctttctttgcaaaaaaatttctagtcaaaaactcatgatacaaaggctttactatatgtacaagactagtaattgttcgcttgtaaaaatcgttctgagttttgtccttcaatggcggtaaattttcaaaacttgttgtattcgttcccggcaaagaggacaggtccttagttgcaaggagcatggtgtgcagcagcacatatgaccacacctacaagtccaaaccaaacaaaaagaggaatcaaaagatgccatgtttgatcagtgagagggttttcaagagcttttagaagaaaagcggtcttatacttactcaacaaaagcggtgttatacttctggtc

SEQ ID NO: 119667 - DNA, 767 bp, Arabidopsis thaliana
  unsure (1)..(767): unsure at all n locations
aaaatttgtggcgaaaagctaataaatagattcaaaggagaaatagaaagagacagaaagcgagggacaaaaaaaaatcgattgataattttttcggcagagtcgaaaaaattttgatatattaaaatccgtaattccttaaaaagcctcctcctcttcgtcttcgtcttcttctcctccccagtttcgcatcattctcttcgataaccgccacatcctctgaaaccctaatcgggagaatcgccgccttctccagaaaatatctatttctataccttgttcctttgatttccagattctgatgaaaccggatcggatctttctctagatccgttctaggtttatcgatttctttctatcaatctctcgcatccggatgctttttgcaagttcttgaagcggattcatcataaatcgacagagaaatgtcgcaggctccgaatccagaagaagaagacgacacgattgaaatccgcgaggtctggaaccataaccttgaacaagagatggctctgattgaacaatccatcgacgatttcccttacgtagccatggacacagagttcccaggaatcgtttgcaagacagtaacggcgaatccaaacccaaacccatactctatacactacgaatacaactacgataccttgaaggcgancgtgaatatgctcaagttgattcagctcggtctcaccttatcagatgagaaaggaaacttaccaacctgtggaaccaacaagcaatgcatctggcaattcaatttcaga

SEQ ID NO: 119668 - DNA, 484 bp, Arabidopsis thaliana
aaacccgggccgaccgtcggcgctctctttttttttcttctctctttcttttcacctctcgccggatcccggcgatcttataggaggcaaatctatcagtatcgttattctaggatctctaacaaacaatgaatcgccaccacgatcccaatcctttcgatgaggacgaagaaatcgtcaatcctttttcgaaaggtggtggaagggttcctgctgcatctaggccagttgaatatggtcaaagccttgatgctactgttgatattccattggataatatgaatgactcttcacagaaacagagaaagcttgctgactgggaagctgagctcaggaagaaagaaatggatataaagcgaagagaggaagctattgctaaatttggtgtgcagatagatgataaaaactggccaccgtttttcccaatcatacaccatgacattgctaaagagatacaagttcatgcacaaaagctgcagtatct

SEQ ID NO: 119669 - DNA, 635 bp, Arabidopsis thaliana
  unsure (1)..(635): unsure at all n locations
nnnnnnnnnnnnnnnctaatacgactcactatagggtacgctggtacgcctgcaggtaccggtccggactacccgggtcggcccacccgtccgtctgcttccttcttatcattcactcacgacactaaccatgaccaaattctccgagccaatcagagactcccacgtggcagttctcgcgtttttccccgttggcgctcatgccggtcctctcttagccgtcactcgccgtctcgccgccgcttctccctccaccatcttttctttcttcaacaccgcaagatcaaacgcgtcgttgttctcctctgatcatcccgagaacatcaaggtccacgacgtctctgacggtgttccggagggaaccatgctcgggaatccactggagatggtcgagctgtttctcgaagcggctccacgtattttccggagcgaaatcgcggcggcagagatagaagttggaaagaaagtgacatgcatgctaacagatgccttcttctggttcgcagcggacatagcggctgagctgaacccgacttgggttgccttctggggccggcgggaaactaatttttttgtcatntttacactgntttatnagagaaccatnggtntaaagntgtagntgnggnaattgc

SEQ ID NO: 119670 - DNA, 459 bp, Arabidopsis thaliana
agtaattataattctttcttacaaaaaaataaaaagatatatataaatcttttgcactctctctttgcttgttggtggtgcatatgtagtaagtaggttaagcttaaagaactgatcggagaatcacaaccatggctaaatgtcacgcggaataatatcggatctctcattcttgaccgtgctccttccacttcttcttcttctacttccggctaccatttccgtctctggagcaccttctctagatccacattccgtagaaagatcgtcgacgccgttagttgcggcggtagctcacgttaccgtcacgagctccgggaagaggacgatgaaggaagttacgtgacggtgacggcgaagtcaacagttgcatcatcgaaagatgcgaaagctaatacgatcggcgcggcgttgaacggcgtagtgttcgaggagacatccaagaaatcggagaagctt

SEQ ID NO: 119671 - DNA, 410 bp, Arabidopsis thaliana
cgcgtccgaagtctttgactcagactcccaccgcgtaattccgagctaggtttccatttctccggcgaatcggacctctctctcgctctctcttccaatttccccttttttcgtttcccagcgatgatttgcaagtagcttccgctaataatcgcaactctctgacggatgctatggcaatgggacttattcgtcttctttctatagcttttacacttgttctactttcaatccttcctcttcatctctctctcgctgatgagataacatctattgaatctgtacctgaccttcagaagctaatgtatgttgctgttgatgggtttccttgtgtacgtcttctcaatctgtctggagagattggatgttcaaatcctggaataaataaagtggtggctccaatcataaaa

SEQ ID NO: 119672 - DNA, 462 bp, Arabidopsis thaliana
tcgatccggacttggaatcggggggaaatgtttaccgggtccgcggatttgtcgtccaggagtggaaatcgtcgagaaaaatctatcgggtccgaggaatcgtcgaccaggacgaggaatcgtcgaccgggtccgaggatttgtcgaccaggggttgaaatcgtcgaccaggtccgagacttcatcgaccgggtccgaggattcgtcgaccaggagtggaaatcgtcgagaaaaatctatcgggtccgaggaatcgtcgaccaggacgaggaatcgtcgaccgggtccgaggatttgtcgaccaggtccgagacttcatcgaccgggtccgaggattcgtcgaccaggtccgagacttcatcgaccgggtccaagtatttgattttattttggaaccggtgtctcctcagacatttcaatgtatgctggtgccaagagggaaaagggctataaagctatata

SEQ ID NO: 119673 - DNA, 481 bp, Arabidopsis thaliana
cgcctgcatgtaccggtccggaattcccggttcgacccacgcgtacacccacgcgtccgcccacgcgtccgcgagaagacgacagaagggtcgaccaggacggcggatccctcgaccaggacgatgaatggtcgttgaaaatctatcgggttcgaggaatggtcgaccaggggttgaaatcgtcgacctcctcctgtgactgcgtcgaccgtgtccgaggagtggtcgaggatttgtcgaccaggagttgaaatcgtcgaccgggaccgagaattcgtcgaccaggacggcggaatgctcgaccaggacgatgaatgggcgatgaaaatctatcgggatagaggaatggtcgaccagaagttggaatcgtcgaccgggtccgagaattcgtcgaccaggacgaggagtggtcgaggatttgtcgaccaggagttgaaatcgtccaccgggtccgagaattcgtcgaccaggaccgggggac

SEQ ID NO: 119674 - DNA, 658 bp, Arabidopsis thaliana
gaaaagtcaaacacttggtgatatgaacacaaacgttcaatatgacaaacccatgccaagtaaagagaaaatgaaaactggtgattgttgcggaaatcgtccaggattcctcgaccaggacttgaaatcgtcgaggggaaaataatcggttccgaggaatcgtcgatccggacttggaatcgtcgagaaaagtttaccgggtccgaggaatcgtcgatccggacttggaatcgtcgagaatccttcaccgggtccgaggattttgccgaccaggggttgaaatcgtcgaccaggtccgagacttcatcgaccgggtccgacgattcgtcgaccaggagtggaaatcgtcgagaaaaatctatcgggtccgaggaatcgtcgaccaggacgacgcaatcgtcgaccgggtccgaggatttgtcgaccaggggttgaaatcgtcgaccaggtccgagacttcatcgaccgggtccgaggattcgtcgaccaggtccgagacttcatcgaccgggtccaagtatttgatttttttttggaaccggtgtctcctcagacatttcaatgtatgttggtgccaagagggaaaagggctataaagctatataggggtgggtgtgtgtagcgggaattttgcccgcaccgcgcgcgcgaataagag

SEQ ID NO: 119675 - DNA, 1594 bp, Arabidopsis thaliana
  unsure (1)..(1594): unsure at all n locations
tgccgtaccggtccggaattcccgggtcgacccacgcgtccgaagataccagtttcaagagagcctaaaaacttgggttttgcttctttatcactaaaggagtttctgtttccagttattactcaactctctgttgagaagtggttggagttaacacccagtaaaggtagtcaaacagatacgaaacccataagcctgcgagtcgctgtctcgtttactccaccagtacgcagtccatcagtcttacacatggttcaatcaagaccatcgtgcaaaggctcttgcttctttccaatcattggaaagtccccgtcttgctaaaagttcaacacacattgttgatgaaacccaaacagaggtgatcacacttcaaattaggaactccgctgatggaggaatacttaaagatgatcagagacaagttatgggtgtgacagactctggtgaaactcgcgtgcttgcggtttatactggtagtttctggtctttgctggactcgaaatggtcacttaagcaaataaacgcctccactgcagataatccgctctttgagattttgggccctcgagtggtgaaaattttctcggggagaaagctggattatgaaccaaaacactgcgcaaaccttagaagtgatctagatttcatgactcttgtggaattttccaagcaacatccatatggatgttgcttggaaaaactgtgggattggttgatatgagatttggttccattgaggcgaaagagaattggttgcttttacccggaatcgtatctgctttcatactccatactgttctgaagaaaggaggttctgaaggcttcaatgtcacaaccaaagatataaaagaggaaagcaaacagactaaacttgttgctgcgacagaaaataatgtgaatgcaaactctacgaatgtggagacccaaactgctattacagcccctaaaaaaggcagcggttgcggcggtggctgtagtggtgaatgcggaaacatggtgaaagcagctaatgctagcggttgcggcagtagttgtagtggagaatgcggagacatggtgaaatcagcagcaaatgctagcggctgcggtagtggttgtagcggtgaatgtggaaatatggtgaaagcagctaacgctagtggtggtggttatggggctagatgcaaagcagctaaagctagcggttgcgggggtggttccggtggtggctgcggcggtggttgcggagacatggtgaaatcagtaaatgctagcggctgtggcggtggttgtaacggtgaatgcggaaacatggtgaaagcagcataatctggtagttgtggtggtgacctagtagagaatgcgaaaatgtggtgaacagtaaggtgcaaatggaggcggttgcggtgaggacgccatcatgtggcttaatatcaaaactgtaaattacaaataaagttgtactttgttgtttgtttatgcaatgaatggtttgtttctgttaaaaaaaaaaaaaaaaaaaaaaaaagggcggccgctctagaggatccaagcttacgtacgcgtgcatgcgacgtcatagtcttctatagtgtnnnnnnnnnnnnnnnnnnnn

SEQ ID NO: 119676 - DNA, 667 bp, Arabidopsis thaliana
  unsure (1)..(667): unsure at all n locations
ggtggctgtagtggtgaatcggaaaccatggtgaaagcagctaatgctagcggttcgngcagtagttgtagtggagaatgcggagacatggtgaaatcagcagcaaatgctagcggctgcggtagtggttgtagcggtgaatgtggaaatatggtgaaagcagctaacgctagtggtggtggttatggggctagatgcaaagcagctaaagctagcggttgcgggggtggttgcggtggtggctgcggcggtggttgcggagacatggtgaaatcagtaaatgctagcggctgtggcggtggttgtaacggtgaatgcggaaacatggtgaaagcagcataatctggtagttgtggtggtgacctagtagagaatgcgaaaatgtggtgaacagtaaggtgcaaatggaggcggttgcggtgaggacgccatcatgtggcttaatatcaaaactgtaaattacaaataaagttgtactttgttgtttgtttatgcaatgaatggtttgtttctgttaattgccaaagactgtgaggatctgatccgaatgccaatttggcatgagctagaaagtaccacacataaaaaaaaaaaaaaagnnnnnnnnnnnnnnnnnnnnnnnnnnnnnnnnnnnnnnnnnnnnnnnnnnnnnnnnnnnnnnnnnnnn

SEQ ID NO: 119677 - DNA, 555 bp, Arabidopsis thaliana
tacgactcacttagggaaagctggtacgcctgcaggtaccggtccggaattcccgggtcgactcacctgatcggataaaattctcggcgaagaagtgaagtttccggcgatcagaggtgatatggataaggagaaggatcatgaagtggagtggcttgaagctcagaagatagaaataagcgttgacttattagctgcagcgaaacaacaccttttgttccttgaaactgttgataggaatcgatggctctacgatggtcctgcgcttgaaaaagccatctacaggtacaatgcttgttggcttcctttgcttgttaaatactctgagtcatcatcggttagtgaagggtctttggtccctcctcttgattgtgaatggatttggcattgtcacaggcttaatccggtgaggtataattctgactgtgagcaattttacgggagagttctcgacaattctggagttctttcttctgttgatgggaactgcaaattgaaaactgaagatttgtggaaaagattgtaccctgatgaaccttatgagcttgacttgga

SEQ ID NO: 119678 - DNA, 1235 bp, Arabidopsis thaliana
  unsure (1)..(1235): unsure at all n locations
gctctctacgactcactatagggaaagctggcacgcctgcaggtaccggtccggaattcccgggtcgacccacgcgtccgaattctgactgtgagcaattttacgggagagttctcgacaattctggagttctttcttctgttgatgggaactgcaaattgaaaactgaagatttgtggaaaagattgtaccctgatgaaccttatgagcttgacttggataacatagacttagaggacatctctgagaaatcttcagctcttgagaaatgcaccaaatatgatcttgtttcagctgttaagaggcagagcccattttactaccaggtttcgaggtcccatgtaaacagtgacatttttctacaagaagctgttgctagatataaggggtttctctatctgataaagatgaacagagaaaggtctttaaaaaggttttgtgttccgacttacgatgttgaccttatctggcacacacatcagctgcacccagtttcttactgtgatgatatggtgaagctcattggtaaagtgttggagcatgatgacacagattctgaccgaggcaaaggtaagaagctcgataccggtttttctaagactactgcacaatgggaagagacattcggtacaaggtactggaaagccggtgcaatgcatagaggcaagacacctgtacctgtcacaaattctccttatgcttctgatgttttggtcaaagacccaactgcaaaagacgatttccagaatttaatccaattcccagaggtggaagttgttgaggttctcttggagattatcggggttagaaacttaccagatggacataagggaaaggtctcggttatgttcagtaaaactcagccggattctcttttcaatgctgaacgtagactgaccattttatccgaggttggggaaaagcaagtagctactttccagtgtgaacctacaggagagcttgttttcaaacttatttcctgttcaccgtctaagataccagttgtcaggacagcctaaaaacttgggttttgcttctttatcactaaaggagtttctgtttccagttattactcaactctctgttgagaagtggttggggttaanacccngtaaaggtggcaaacagttcggaacccntnagcctncgggtcgtgtctcgnttctccncagtnggggccatnagncttnacanggtcaanaaggccntngggaaaggttttgttntttcaatga

SEQ ID NO: 119679 - DNA, 584 bp, Arabidopsis thaliana
  unsure (1)..(584): unsure at all n locations
tcaancccgttccccgtgcttattgtaatccgaaccttgtgaaccccctatcctcccgttccgccattagttttatggagaatccggaaccatggtgaatccaccaccaaatgcttaccgcctccggtagtggttgtaccggtgaatgtggaaatatggtgaaaagcccctaaccgctagtggtggtggttatgggcctagatgcaaagccagctaaagctagcggttgcgggggtggttgcggtggtggctgcggcggtggttgcggagacatggtgaaatcagtaaatgctagcggctgtggcggtggttgtaacggtgaatgcggaaacatggtgaaagcagcataatctggtagttgtggtggtgacctagtagagaatgcgaaaatgtggtgaacagtaaggtgcaaatggaggcggttgcggtgaggacgccatcatgtggcttaatatcaaaactgtaaattacaaataaagttgtactttgttgtttgtttatgcaatgaatggttcgtttctgttaaaaaaacaaattataatatatataattttaaaaaaattttatatatattcattatttat

SEQ ID NO: 119680 - DNA, 506 bp, Arabidopsis thaliana
aatggatgaagatgttgagcaggccagtttgatgtctttcagtgacaggcctacggcttttctcaacatgcgtagtaaaacctatagtccactgatattccggattattaggaaattaaatgtccgtgtcatttcgataattctgcttttctgcttcggagcaatcttttacatgggggcaagtacttctcccatcatcgtgttcgtcttcacagtatgcatcatcagcttccttttgtcaatatatctaaccaagtgggttttagcgaaagatgaaggacctccagagatggttgagatatcagatgctatacgtgatggagctgaaggttttttcagaacgcatatagcactatatccaagatggccattttgctagcttttgtgattctttgcatatatctattccgtagcttaactccccagcaagaggctgctggtttaggaagggcgatgtctgcttatattactgttgctgcatttcttttgggggctctatgctcagg

SEQ ID NO: 119681 - DNA, 561 bp, Arabidopsis thaliana
  unsure (1)..(561): unsure at all n locations
agaagcttctagcttctctttcaatggcgaaagactttgcctccaagagacacaatagtttccactggacaagaaaagtcggatcagacgaaaacgacgacgtttcttctcataaacctcttcctcatcacaacaacactaaaccttcttcttcttcatcttcatcttcctctaatgtaatcactcacaaaaaaaagcttcaatctttcgccgtttctggtctccgggtcagttatcgctactctaagcagagcacggccccgggtaaccaaaactccggggcttcggggtcacggggtcgtgggtacactttttgggtctcgtcgtggtcacgtgcatttttctatccagaaagatcctaattnttccacccggcgtttttaatcggactcgntactcccgattaagtggggttagtcaaagaaatggnttcaggnctcgttagaatcggttttgggtgtnntaagggggaaagggnggagnaggnggggnaaaacggnncttttcggnnggggggggggcaancgnggcggcgncgcggggggggtttnggnggttntt

SEQ ID NO: 119682 - DNA, 628 bp, Arabidopsis thaliana
gcctgcaggtaccggtccggaattcccgggttgacccacgcgtgcgaccacgcgtccgcccacgcgtccgtacggctgcgagaagacgacagaaggggaaaaataaaaaaaaaaacagagaaaaggagatatggaatcaatcggagtccttatgatgtgccccatgtcctcctacctcgagaacgagcttgagaagcgcttcaaccttcttcgcttctggacttctccggagaaatccgtcctcctagaaactcatcggaactccatccgcgccgtcgttgggaatgcttctgccggcgccgatgctcagctcatcagcgatctgcccaaccttgagattgtatccagcttcagcgtcgggctcgacaagatcgatttggggaaatgcaaagaaaaagggatccgcgtcaccaacacccccgacgttctcaccgaagacgtcgcagatctcgccatcgggcttatcctggctctccttcgacggctgtgtgagtgcgatcgctatgtaaggagcggaaaatggaagcaaggtgaatttcaactcactaccaagtttagtggaaaatcccgggggatcattggtctaggtagaattgggactgccatcgcaaagagggctgaagccttt

SEQ ID NO: 119683 - DNA, 600 bp, Arabidopsis thaliana
gatgttaaaacttattgttgattcttctctattcgtcgtcgacctattttcctcagccatggccgtcgggaaaaacaagagaatctctaagggtaggaagggaggaaagaagaaggctgttgatcctttctccaagaaagattggtatgatgttaaggctccttcaatcttcactcacaggaatgttggaaagacacttgtttccagaactcagggtaccaaaattgcctcagaaggcttgaaacacagagtttttgaggtttctcttgctgatcttcaaggtgatgaggataacgcttacaggaagatccgtctcagagctgaagatgtccagggcaggaacgttctgtgccaattctggggcatggacttcaccaccgataaacttaggtcattggttaagaagtggcagactttgattgaggctcatgttgatgttaaaaccaccgacagttacactctcaggctattctgtatcgccttcaccaagagacgtgctaaccaggtcaagaggacttgctacgctcaatccagccaaatccgtcagatccgcaggaagatgagggacatcatggttaaggaagcttcctcatgtgacct

SEQ ID NO: 119684 - DNA, 372 bp, Arabidopsis thaliana
aatggtcctaattccaataagtatattacactctcttacagattggaccgaaacactcatgtggggatgaaaaaataaactaagaatacaaaaagaagaaaataaaagaaaaaatcagagatcccgtcggagaaagaaagagagaagatagagagatacaagtaacggcttccactaatctttcgccttctacatttttgctgctccgtccaatttttgtgtcgataaaataagacagcttctttctcttgactttccaagttcactcaactttctctcactccttttttctctcgctctctatcctctacagagctcgcagcaactagcgcaagatgttggagaaggttgaaactttcgacatgaacagag

SEQ ID NO: 119685 - DNA, 526 bp, Arabidopsis thaliana
cagctctctacgactcactattgggaaagctggcacgcctgcaggtaccggtccggaattcccgggtcgagaaaaaagaaaagaaaaaagaacttgttttcctcttcagcaagacacataaatcgtaatccattttctctcaactttaggaatctcaaatctccgatttggaaatccggcgacaatggtgagagatattgaagatgagattagagacgagaagaatcctcgtcctcttgatgaagatgatatcgctctcctcaagacttatgggttagggccttactctgcacctatcaagaaagtggagaaagaaattaaggatctcgccaagaagatcaacgatctatgtggtatcaaggagtctgatactggtttagctcctcccagtcaatgggatcttgtatctgataagcaaatgatgcaagaagagcaacctctgcaggttgcgagatgcacaaagattataagtccaaacactgaagacgccaaatacgtcataaatgtcaaacaaattgctaagttt

SEQ ID NO: 119686 - DNA, 472 bp, Arabidopsis thaliana
  unsure (1)..(472): unsure at all n locations
aaaatgaagtttttgaatttcgctctcttcttagatcccgtttgttctctttctcactttggctgtttaagcaaaaaccatggcttctcgctgtgagctacttctgatctgcgtcttctctctcttaattgcttttgctcactccaagacattgaagcgagatgtgaaagctttgaatgaaatcaaagcctctttgggatggagagtggtgtattcatgggttggtgacgatccttgtggagatggagaccttccaccttggtctggtgtcacgtgttctacacaaggagactatagagttgtcacagaattagaagtttatgcggtttcgattgttggacctttccccattgcagtaacaaaccttctggatttgactagactggatctacataacaacaagttgactggtccanccctccnaaaattggcggttaaaangggtnaaggccttaacctnnggggggtaacc

SEQ ID NO: 119687 - DNA, 501 bp, Arabidopsis thaliana
gtttattcttcacaaagttaacatttttagactcaaaactcattcttttgcccttcctctgtttctcctctcttggggtttatcttagattctccaaaaaagtctctctctttccatggcttctcttctccatcttcttctcctttctctttctcttttagttcttgcttcagcttctccttctcctccagctgatgaaggttcatatattggagtaaacatagggactgatctttctgatatgccacatccaacacaagttgttgctctactaaaagctcaagaaatccgacatattcgattatacaacgctgatcccgggttgttgattgctctagcaaacactggtatcaaagttataatctccattcctaatgaccagcttcttggtataggtcaatccaattcaaccgcagcgaattgggttaaacgcaatgtcattgcacattatcctgcaacgacgataaccgcggtttctgttggctctgaggtgctaaccag

SEQ ID NO: 119688 - DNA, 642 bp, Arabidopsis thaliana
  unsure (1)..(642): unsure at all n locations
cccaagcgtcagcccacgcgtccgttcccttctttcccgatttcaagccctaaaattccgagacttctgtttctcgctttaacgacagtcgccgagtgagagatatagagagagaaagatgccggtgcacgatgagcaagagcatgaggtgtacggtggagagatcccagaagaggaagaaggtgagatggatacggaagagtacgaagaacacggcggagaagaaggtgccgccgccggagatgaggagcttgaacctggctctagctctagggacttggaggatatgaagaaacgaattaaggagattgaggaagaagctggagctttgcgtgaaatgcaagccaaggctgagaaagatatgggtgctagtcaagacccttcaggtggtgttagtgcggctgagaaggaagaagtggattcgcgttcaatatatgttggcaatgtggactatgcatgtactccagaggaagtccagcagcattttcaatcattgtgggacagtgaatagggtacaatttcttacagntaagtttggcaccctaaaggtttccgtatttcgatttttggagnaganctttccaaatcnttttttnaccgtnancctcatgncgcnataangttctcaagggctttttccgt

SEQ ID NO: 119689 - DNA, 776 bp, Arabidopsis thaliana
cggacgcgtgggcggacgcgtgggcggacgcgtgggcggacgcgtgggctttgcgtgaaatgcaagccaaggctgagaaagatatgggtgctagtcaagacccttcaggtggtgtgagtgcggctgagaaggaagaagtggattcgcgttcaatatatgttggcaatgtggactatgcatgtactccagaggaagtccagcagcattttcaatcatgtgggacagtgaatagggttacaattctgacagataagtttggtcaacctaaaggttttgcgtatgtcgaatttgtggaagtagaagctgttcagaattcgcttattttgaacgagtcagaactacatggtcgtcagataaaggtatctgcaaagaggactaatgtacctggaatgaggcaatttcgaggaagagggcgtccctttagaccgatgaggggattcatgccaggagttccattttatcctccatatgcttatgggagagttcccaggttcagacggccctatgcgctacagaccgtactgattaggcaaatttggtgttaaaaaaagtagcagctgccttctccgtttttcggggaaagcttatcatcatcaacacggttcatcggacgctgcagttgtttcgattaacagagatgagttgaagaattgtatggcagaagagagaggggaattatattctagattttctgtacaatatttgatgacaagtgcaacattttgatgagttcctttgtttttattatcttcaaacaaaagtaacgatttcacaat

SEQ ID NO: 119690 - DNA, 654 bp, Arabidopsis thaliana
  unsure (1)..(654): unsure at all n locations
nnnnnnnnnnnnnnnnngccaagtcacttaccgcaggatggtttcttcttcttcttcttcgcttcctccccgcgtccgtgaattcagatattttttttaaaattttttgagaggaagaaatggagatttcgcagagagtgaaagctagattagccgttctcaccgcgcatttggcggtgtctgataccgtcggattggaacaggtgttgccggcgatcgcgccatggtgtacatcggctcacattaccgctgcacctcatggatcactcaaaggaaacttgacgatcgtcgatgagcgtacggggaagaaatatcaggtccctgtctcagagcatggtaccgttaaagccgttgatctcaagaagataacgacggggaaggatgataaggggctgaagttgtacgatcctggttacttgaacacggctccggttcgatcttcgatttgttacatcgacggagatgaaggaatcttacgttatcggggatacccaattgaagagttggctgagagcagtacttttattgaggttgcttatctcctcatgtatggaaatctgccttctcaaagtcagctagctgtttgggggtcaacttnttctaanattcagctntncccaaggngttttggnannannagccatcncatatggt

SEQ ID NO: 119691 - DNA, 419 bp, Arabidopsis thaliana
cttggtttcttattcgcttccctttcttgaattgtgatctttttgaggtgacaaatggagatttcggagagagctagagctcgattagccgttctcaatgcgcacttgacagtatctgagccgaatcaggtgttgccagcgatcgaaccatggtgcacatcggctcacataaccgctgcaccgcatggatcgcttaaaggaaatttgaagatcgtcgatgagcgtacggggaatgaatatcaggtcccagtctcagagcatggtaccgttaaaaccgttgatctcaagaagataacgacagggaaggatgacaaggggcttaacttatacgatcctggttacttaaacacggcttctgttcgatcttcgatttcttacattgatggagatgagggaatcctacgttttcggggataccc

SEQ ID NO: 119692 - DNA, 781 bp, Arabidopsis thaliana
  unsure (1)..(781): unsure at all n locations
nnnnnnnnnnnnnnnnnnnnnnnnnnnnnnnnnnnnnnnnnnnnnnnnnnnaaacatttcttctgtccacgcctcctctttttgccctaatcttctagggttcttcttcttttcatgaatcttagtcttcgatctcttcaaatcttcgtctttcttcttcaaatcttcttcgaattatgtctggaatcttcagatttagtggtgatgaagattgtttacttgggggatcgatgtatctatcaccagggagctgtcccggtgtatattacccagcgcgtaagaggttacgtgttgctgcgacgtcgttttacagcggttttgaggagaagcaaacttcaatcgatgtattgcctgaagagtgtttatttgagattctaagacgtttaccttctggacaagagaggagtgcttgcgcttgtgtttccaagcattggcttaatcttttgagtagtatcagtaggagtgaagtgaatgagtcatcagtcaagaatgtggaaggaagggtgaaggggtttttggcctagggagtttggaagggggaagaaagccgaccggatttnaagggttggccggccaatttccgggttgggancgcccaaacccgtgggtggggttgggggaacctccaaaatnccgtgggantggggtttaanagnaangggnctaangttggccttgggccngttncccatgggtgcccacccccaaggngtgtnccttatgaacctnccccccgaaanaaattggggtnccnaaccccggcaccccnantaaaactngc

SEQ ID NO: 119693 - DNA, 1025 bp, Arabidopsis thaliana
  unsure (1)..(1025): unsure at all n locations
tcttcaaatcttcgtctttcttcttcaaatcttcttcgaattatgtctggaatcttcagatttagtggtgatgaagattgtttacttgggggatcgatgtatctatcaccagggagctgtcccggtgtatatnacccagcgcgtaanaggttacgtgttgctgcgacgtcgttttacagcggttttaaggagaagcaaacttcaatcgatgtattgcctgaagagtgtttatttnagattctaagacgtttaccttctggacaagagaggagtgcttgcccttgtntttccaagcattggcttaatcttttgagtagtatcagtaggagtgaagtgaatgagtcatcagttcaagatgtggaggagggtgaagggttttttgtcctaggcagtttggaggggaagaaggcgacgggatttgaggttggcggcggttgcggttgggccgccgagtcgtggtgggttggggaagcttcagattcgtgggagtgggtttgagagtaaggtgactgatgttggtcttggtgctgttgctcatggttgtccatctcttaggattgtttctttatggaacttgcctgctgttagtgatttgggtttgtctgagatcgcacggtcatgcccgatgattgaaaaacttgacctttcacggtgtcctggaataactgacagtggattggttgctattgctgagaactgtgtgaatctgagtgatctgacgattgattcttgctctggtgttgggaatgagggtttaagggctattgcaagacgttgtgtcaatctgagatctatctctatcaggagctgcccacgtattggtgatcaaggtgttgccttcctcttggctcaagctggttcttacttgacgaaagtgaaactccagatgctgaacgtatctggtttgtctcttgctgttattggtcactacggagcagctgttactgatcttgtgctttatggacttcaaggggtgaatgagaaaggcttctgggttatgggaaatgcaaaaaggttgaagaaac

SEQ ID NO: 119694 - DNA, 997 bp, Arabidopsis thaliana
cccacgcgtccgcaccaccaacaacaacaactccactaaaaaattcatagctctacaagagtcacctcatagagaagtgaagagacagagatagttgtgacagagagattcatggcggaagcttgcggagtgagaaggatgaagctgggaagccaaggccttgaggtatctgcgcaaggccttggttgcatgggcctctccgctttctacggtgctcccaagccggaaaatgaagccatcgctctcatccaccacgctattcactccggcgttactctccttgacacctccgatatctacggccctgagaccaatgaagttctcctcggaaaggctctcaaggatggggtgagagaaaaagtggaacttgcgaccaaatttggaatcagttatgcagaggggaaaagagaggtcagaggagatcctgaatatgtaagggctgcttgtgaggcaagtttaaagaggctagatattgcctgcatcgatctctattatcagcatcgtgtcgatactcgtgtccctatcgaaatcactatgggagaactgaagaagctggttgaagagggtaaaataaagtacattggtttgtctgaagcctctgcctcaactatcagaagagcacatgctgttcacccaattactgccgtgcagatagaatggtccttgtggacgagagatgtggaagaagaaatcattccgacctgcagggaacttgggattgggattgttgcttacagtcctctaggacgaggttttcttcgcatctggacccaagctttttgagaacctagaaaaggatgacttcagaaaggctctaccaagattccaagaggaaaacttagaccacaacaagattgtttatgaaaaagtttgtgcaatatcggagaagaaagggtgcactcctggacaactagccctggcatgggttcatcaccagggagatgacgtttgccctatcccaggaaccactaagatcgagaacctcaaacagaacatt

SEQ ID NO: 119695 - DNA, 534 bp, Arabidopsis thaliana
  unsure (1)..(534): unsure at all n locations
gccnnnnnnnnnnnnnnnnnnnnnnnnnnnnnnnnnnnnnnnnnnnnnnnnnnnnnnnnnnnnnnnnnnnnnnnccacgcgtgcgctcgaccactccaattcaaaactcgccattgatacacgagagatagagagagagatttgtgtgagagaaatccatggcggaatcttgcagagtgaggaggataaagctaggaagtcaaggcctagaggtatcggcgcaaggccttggttgcatgggactcaccggtcattacggtgcttccaagccggaaactgaagccatcgctctcatccaccacgctattcactccggtgttactttccttgacacttctgacatgtatggtcctgaaaccaatgaaattctcctcggaaaggctcttaaggatggtgtgagggagaaagtggagcttgcgaccaaatttggaatcagttatgcagagggaaacagagagattaagggagatcctgcttatgttagagctgcctgtgaggcttagttaaagagactagatgttacctgcattgatc

SEQ ID NO: 119696 - DNA, 511 bp, Arabidopsis thaliana
  unsure (1)..(511): unsure at all n locations
nnnnnnnnnnnnnnnnnnnnnnnnnnnnnnnnnnnnnnnnnnnnnnnnnnnnnnnnnnnnnnnnnnntacccacgcgtgcgcgggcgcgtgggtgaatttatcttcaccatcacaccaatccaactccatttaaattcacagctctataagagtcacctagacaagtcaagagagagagatagttctgacttctgacagagactcatggcggaagcttgcggagtgagaaggattaagctaggaagccaaggccttgaggtatcggcgcaagggcttggttgcatgggtctctctgctttctacgggactcccaagccggaaaccgaagctatcgctctcatccaccacgccattcactccggcgtcactttccttgacacctccgatatctacgggcctgagaccaacgagcttctcctcagcaaggctctcaaggatggggtgagagaaaaagtggaacttgcgaccaaatatggaatcaggtatgcagaggggaaagtanagtttaag

SEQ ID NO: 119697 - DNA, 764 bp, Arabidopsis thaliana
  unsure (1)..(764): unsure at all n locations
gggcactaatccgactcactttagggaaagctcgtacgcctgcaggtaccggtccggaattcccgggtcgacccacgcgtgttgtctcgatcgtgtaactgagaacgaaggatgcaagtagtttccaggagattagttcaacggcctctcgtcggaggagcttcgatctattcatcttcttctctcagatcgctctacggagtctctaatcacctgaatgggactgataattgtcgctattcgtcttccctcgctactaagggcgtgggacacctcgctcgcaagggtactggtgggagatcttccgtaagtggcattgtagctacagtatttggagccacaggatttctgggtcgttatcttgtgcagcagctagctaaaatgggatcacaagtgcttgttcctttccgaggctcagaggactctcctcgacatctcaagttgatgggagatttaggacaggtggtaccaatgaaatttgatccaagagatgaagactcgattaaggctgtcatggccaaggcttaatgtcgttatcaatctaatttggaagggggtccgggccaagaaatttcaatttttaagattcgatcaccataatttcctgaggaaactttcattttggtgccaaggacacgggggggttaattgggtttttcaaggttttttccactggggttttttgcaactncctcaaggatcttttgggaaaantctttttgnanttnttaccgcctccttggacccttttnncctaacctttt

SEQ ID NO: 119698 - DNA, 463 bp, Arabidopsis thaliana
gcaaatgcgcgaaacgtttttggaccaattctaatttctaaagtaacgcgataaatctaatgcattcccacgatttgtgtttgtccctctgacgaaaaatcctcggatctgttgcattctctccaaagcttgaatcagaagaaagcttttgaagatcagcctaaaagtgatctctcataactgcttaaaagattgttgaaactcgaagatgtctttggccgagataaacaagaatgaagtcgacattgttattggggctcttaatgctgaccttacacagtttttgaccagctggaggcctttcttctccggattccatctgattgttgtcaaagatcctgagctcaaggaggaactcaacataccagaaggctttgacgtagatgtctactctaagactgacatggaaaaggttgtgggcgcatccaattccaccatgttctctggctattcttgcagatat

SEQ ID NO: 119699 - DNA, 732 bp, Arabidopsis thaliana
  unsure (1)..(732): unsure at all n locations
nnnnnnnnnnnnnnnnnnnnnnnnnnnnnnnnnnnnnnnnnnnnnnnnnnnnnnnnnnnnnnnnnnnccacgcgtccgtacggctgcgagaagacgacagaagggtacggctgcgagaagacgacagaagggtacggctgcgagaagacgacagaagggtacggctgcgagaagacgacagaagggtacggctgcgagaagacgacagaagggtacggctgcgagaagacgacagaagggggcagcaaagccgacgttgaactttctcgccgccggagcgcgtgatctccactctctgtcatcgaatcactctaattgaagattccccgatggcgattgtctatgctgttgtagcgagaggtaccgtggtattagctgaattcagcgccgttacgggaaacacaggcgccgtggtgcgacggatcctcgagaagctttcaccggaaatctccgatgaaagactttgtttctctcaagatcgttatatcttccatattcttagatctgatggtcttacctttctctgtatggccaatgatacctttggaaggagggttccattttcgtatttggaagagattcatatgagattcatgaaaaactatggcaaagtggctcataatgctccagcttatgcaatgaatgatgaattctcaagggttttgcatcagcagatggcagttcttctctagtaatcctagtgttgatactctcaatcgtgttagaggagaa

SEQ ID NO: 119700 - DNA, 523 bp, Arabidopsis thaliana
  unsure (1)..(523): unsure at all n locations
nnnnnnnnnnnnnnnnnnnnnnnnnnnnnnnnnnnnnnnnnnnnnnnnnnnnnnnnnnnnnnnnnnnnnnnccacgcgtccgcccacgcgtccgtgcttccttaagacccaaaaatccaaacctaaccctaatcgacattttctccgatttctaaatcctcctccggtgaaaatgtctcaccttgatgatcttccttctactcccggaaagtacaaaaccgataaagttccaccgtacgggattctccaccaccaccgttacctccgtctctcaaaactcaccctttgggcttctctcttcctcgctctcttcctcttctacctcgttttatctcctcctccgtcaccatctcgccggaatctcaacgattcttcctccatttccgccgcgaaatacggcggctctcactgggagaaacaagtccgtaaatccgctcgtcctaggtctcacggcggtttaacggtattagtcaccggagcttccggattcgtcggtactcacgtctcgatcgcgttacgaaga

SEQ ID NO: 119701 - DNA, 595 bp, Arabidopsis thaliana
gtcacaccttcttcgcctgagaataccacctaacaatgaccaccgggcggggcctttctcgccctcttccgctttctagtcgccgccgtttctggtgacgtcatcaaacttccttcgcgaccttctaagttcttccgcccaactgaaaacgacgatgattctactaagtgggctgttctcgtcgccggatccagcggatactggaattatcgtcatcaggccgatgtttgtcatgcttatcagcttttgaagaaaggtggagtgaaagaggagaatattgtggtgtttatgtatgatgacattgcgaagaacgaggagaatccaagacctggagttattatcaatagtcctaatggagaggatgtctataatggagttcccaaggattacactggagatgaagttaatgttgataacttattagctgtgattcttggaaacaaaacggctcttaaaggaggaagtgggaaagttgtagatagcggtccaaacgatcatatctttatatactatagtgatcacggtggttcgggagtgctcgggatgccaacttctccaaacctatatgcaaatgatctcaatgatgtcttgaaga

SEQ ID NO: 119702 - DNA, 514 bp, Arabidopsis thaliana
  unsure (1)..(514): unsure at all n locations
nnnnnnnnnnnnnnnnnnnnnnnnnnnnnnnnnnnnnnnnnnnnnnnnnnnnnnnnnntatctctcagcttgagcccacccctccgcgaaagaactcaagctttccaacactataaatctataatacagcttttattctcaaattttgtttgtcttaccatcattaccaaaccatgcaagccgcaacgtcgtgtgatctcaagttccgatcaacagatccgacgtctaggaacaaatgtttctcccacgcgattccaaagcgcgtggctgttacgtgcggttataggtcggagtcgtttagcttccctaacggtgtctccgtgagtcgatctgattggcaaagctcatgtgccattttatctagtaaagttgcttctgttgaaaataccggtggtttagcggacaaaatcgccgccgttaatggtcacacgaacggctctgtgaatcttggtctcgtcgccgttgagtcaactaccggaaagttagctcctggtcacccgttgactattactga

SEQ ID NO: 119703 - DNA, 634 bp, Arabidopsis thaliana
  unsure (1)..(634): unsure at all n locations
ctttcatctttttcttcatatattattatattcgattttcagattctctgggaagacgatattagcaatcatggagcgtctaacatctcctcctcgtttgatgattgtctctgatcttgatcatactatggttgatcatcatgatcctgagaatctatctctgctgagattcaattcgttgtgggaacacgcttatcgccatgactctcttcttgtgttttctacgggaagatcaccgacattgtataaagaactcagaaaggagaaacctttgttgacccctgatattaccattatgtctgtaggaactgagattacttatggtaactctatggttcctgatcatggttgggttgaggctctgaacaataaatgggatttgggtattgtcaaacaagaagctagcaacttccctgagttaaagcttcaggcagaaactgagcagaggccacacaaggttagctttttattgttgaaaagnggaaggnncaggnaggttcctaagggnctatcacagngggtcctgaacgngggctggattcaaaaaatttccagtgggggtttgggtttgggnttttccccaaggtcccgaagggcaagggtttnattctcctgagacctngcttggggaccc

SEQ ID NO: 119704 - DNA, 529 bp, Arabidopsis thaliana
  unsure (1)..(529): unsure at all n locations
tcttcttcttcctcctctgtactctctctttctcacatnaacagagcctctctctctctctccttgcttcctttaatctctctgtttctcttcagtcgctgtgtatacccctttctctcctcctctgtccctctctctagcggcggactgatgcacatacctttgtattctccgccgtaactaacttacataatggggtgcatgttctctcacctcgccgccaaattcgccttcttcccaccctctcctcccacttaccacctcaccaaaacccccgacggcaaactctccgccgtatcctccgcttcctcctcctcctccacttttccctccgccggagacccatctctcgacgtcaaagtagtaaagacaagacgcggcaacaaagtcacagctttttaccttagaaaccctaacgcaagactcacacttctctactctcatggaaatgctgcagatttgggacaactcttcgatctctttgttcaactcaaagtcaatctccgagtcaatctcatggggtatgatt

SEQ ID NO: 119705 - DNA, 486 bp, Arabidopsis thaliana
caaagaacaaaaatgggtctggtaacaaaagctctcaaatatctcttactcctttctatttccttgactttcatctacaccaatgcagtttcatccgcttctccaatgactccaccgtcatcgccggctaagatgagcaggagacttgtggcagttgaaggcatggtttattgcaagtcatgcaagtattccggcgtcgatactctcttggaagcatctcctcttcaaggagcgaccgtaaagcttgcatgcaacaacacaaagagaggtgtgacaatggagacaaaaacagacaaaaacggatacttcttcatgctagccccaaaaaaactcaccacctacgctttccacacgtgccgggcttggcctacgaatcctggacccacgactgcaacgatgacatgcaccgtgccgtcaaagctcaacaatggaataaccggtgctatgcttaagccttctaagacaatcaacatcggtgaacacgac

SEQ ID NO: 119706 - DNA, 599 bp, Arabidopsis thaliana
  unsure (1)..(599): unsure at all n locations
tgatacttccnnnnnnnnnnnnnnnnnnnnnnnnnnnnnnnnnnnnnnnnnnnnnnnnnnnnnnnnnnnnnnnnnnnnnnnccacgcgtccgcggacgcgtgggatttgaccattttcatcttcaaacaatggcggtttcaaagcttacattggctgctacgagcggtaagagctgcaaaatactcttagggctgagattacttgccttctcagccacgttatctgcagctattgtaatgggactcaacaaagagacaaagacttttattgtgggcaaagttggaaatactccaattcaagctacttttactgctaagttcgaccacacaccagcttttgtgtttttcgtagtagctaatgcaatggtgagcttccacaacttgttgatgattgctcttcagatatttggagggaaaatggagttcactggttttcggcttctctcagtcgccattcttgacatgctaaatgtgactctaatttcggcggcagaaaacgcggcggcgttcaatggcgggaggtaggaaagaacgggggccaacaacggcggggttggggccaaaaacntgtngttggntttnnccnccttncngtntnt

SEQ ID NO: 119707 - DNA, 720 bp, Arabidopsis thaliana
ccaagctctccttctgactcacatctatggaaagctggtcacgcctgcagtgtaccggtccgcaattcacgggtcgacccacgcgtgcgcccatctgtgacgataactccgagaaatctattgagctcttcattagtattggtttggacgagaaaacagctcgtaataccatcaataataacaaggtcaccgccaatctcaccgccgttatccacgaggctgctgttactgatgggtgcgatcgaaatactggcaatctgttatactcggtcgctactaagttccctacaaatgctcttgtgcatcgccctacattgctcaagtacattgttaactctaagattaaaactccagcccaattggaagctgcatttgccttttttgccagtaccggtcctgaggactttaagctgaatgagtttgaagaggcatgtggtgttgggattgaagtttccccagaagatattgagaaagcagttaaaggaatctttgaagagaataagaaaacaatattggagcagcgctatcgaactaatgtgggtgaattatttggacatgtccggaaaagtttgccatgggccgatcctaagattgtaaagaaactcatagatgagaaaatgtatgagctgcttggtgagaaaaccgctgctgataatgaaaaacctacaaaaaagaaggagaagaaggagaagcctgccaaagtcgaggaaaagaaagctg

SEQ ID NO: 119708 - DNA, 674 bp, Arabidopsis thaliana
  unsure (1)..(674): unsure at all n locations
atgatatgccagctctatactgactcacttagggaaagctggtacgcctgcaggtaccggtccggaattcccgggtcgacccacgcgtccgcccaggtaatactcgtaagatttatcaacacaagcaaaaaagatggcccaaaagctagaagcaaagggtggtgagatgggagatgtatgggatgatggtgtttacgaaaatgttagaaaggtatatgtagggcaagcacaatacggtatagccttcgtcaagtttgagtatgtcaatggttctcaagtggttgttggagatgaacatggaaagaagacagagctaggagttgaagagtttgagattgatgcggatgactacatcgtatacgtggaaggttaccgtgagaaagttaacgatatgacgtcagaaatgatcacgtttctttctattaagacttttaaaggcaaaacctctcatcctatcgaaaaaagacctggggttaagtttgtgctacatggtggaaaaatcgttgggtttcacggacgttcaacagatgttttacactcccttggggcctatttttctttgtcatcccctttcaaattcctttgggaagtggattaaggtgggccaaaagggagaaggccccgggtctaggaccccctcggtggccagttgggaccaaggtttnnccttnttc

SEQ ID NO: 119709 - DNA, 762 bp, Arabidopsis thaliana
  unsure (1)..(762): unsure at all n locations
tgatttggttaaattatctatatttcttttttgataaaggatttggttaaatttttaattgcaggtaatactcgtaagatttatcaacacaagcaaaaaagatggcccaaaagctagaagcaaagggtggtgagatgggagatgtatgggatgatggtgtttacgaaaatgttagaaaggtatatgtagggcaagcacaatacggtatagccttcgtcaagtttgagtatgtcaatggttctcaagtggttgttggagatgaacatggaaagaagacagagctaggagttgaagagtttgagattgatgcggatgactacatcgtatacgtggaaggttaccgtgagaaagttaacgatatgacgtcagaaatgatcacgtttctttctattaagacttttaaaggcaaaacctctcatcctatcgaaaaaagacctggggttaagtttgtgctacatggtggaaaaatcgttgggtttcacggacgttcaacagatgttttacactcccttggggcctatgtttctttgtcatccactatcaaattgcttgggaagtggattaaggtggggcaaaaaggagaaggtccaggggctaagattctcacatggcatagctacaagtaggcaaccaagggtttactcccttttggtggcgggtttcacanccaaatnagncccttcgnnaaacacctttacggttttaacccttggngncccggnttttggnccattttttcctnccnnccggggggcgggtccc

SEQ ID NO: 119710 - DNA, 793 bp, Arabidopsis thaliana
cccccccttgatgtcgacgggattcattagcctggtcttcgtaagttccgccgaaaagaaccaaatccttcactactctgtctcagctttcgacctctctcttctcattcctttgcaacttctcacttctcgaattccttctcttcaaaatcagaaatggctcaagtggttgctaccaggtcaattcaaggctcgatgttatctcccaacggtggatctgtgtctacaagatccgagaagctattgaaaccagcgagttttgcagtgaaggttcttggcaacgaagcaaagagaagtggaagagtctctgtaagaagcagaagagtggttgatactactgtgagatccgctcgtgttgagactgaagtcattcctgtttctcctgaagatgtgcctaacagagaggagcagcttgagaggttgttggaaatgcagcagtttggtgatacatcggtagggatgtggtcgaagccgacagtgaggaggaagacaaagattgtttgcaccgtgtggtccgtcgaccaacacacgagaaatgatatggaaattggctgaagctgggatgaatgttgctaggatgaatatgtctcatggagatcatgcttcacataagaaggttattgatttggttaaagaatacaatgcacaaactaaagacaacactattgctatcatgcttgacaccaagggtccggaagttaggagtggagatttacctcagccaattatgttagatcctggtcaagagtttacctttacaattgagagaggagtcagcacaccaagttgtgtc

SEQ ID NO: 119711 - DNA, 649 bp, Arabidopsis thaliana
  unsure (1)..(649): unsure at all n locations
gtttctctgatgagagacaacgtaattcactaagcagcaaccctttgtttgcactccggggtttgggtggtacaatgcctgagatcgtgtctcctttagtagctgaaaactctcaagaacaagaagaaagtgtgttaatttcattggatattgaagaagacaagttgtttctcttacatttcatcataggaacttactttggacaagatttaagaaaacaacatcatcgtccaaagcaatcagcttttcagattcaagcgttgaagaatgttgtggtagatgagttaagtggctcacttatgaagagagctgagctagaacgtgtgtattatcacattattagaaatgttgatccgtctctagtcatgaagccgaaaaagttacgtgaatatttcaatgcgaaacgcaatgattcgaacagggattaccctcttttcgtggatctttttccgcgaaattgcaccctgaaacccatgttaggcataagnttaagtttatccggagcattgtgttcattaatgatccagatacttctttgtatgagagaagattgtgttgcgcggtttaagcggcttacggggattggatagctttncttttgagccttagtgttgatgtaaactaaaagtaccggcgttnttgcagctaa

SEQ ID NO: 119712 - DNA, 656 bp, Arabidopsis thaliana
  unsure (1)..(656): unsure at all n locations
tgaaaccagccaaccccggctattccaaggtgttcttcccatcctctgggaccaaccttgtgaggaggtccaagagttgctctgggaagttgctaagtagctcacagccttactgttctatagcttcgtctgctacttcttcttctctcaaacgccttaaatcaaaccatcatggagagaatactagggttttctctgcagggttcttcactttcagacccgaaaaccaaccagagatttgtagccaaaaacctatcaatctccgcggttccaagcctcttttaccggatccttcatttcctccaccgctccaagatcctcctaatccttcccctctcccaaatctccctatcgttcctcctcttccaaacttacctgttccaaagttacctgttccggacttacctcttcctctagttcctcctcttcttccaccagggcctcaggaaatcagcttccttgcataacaaggaaatctggtttcccttgaaaggcaaggaaaaccggacggaacttaaaaacccaatttttttcttttccggccaaacccggttaaacccggcaatnttttaatccggtccaaacccgggtaaattcctttttttccaaacccgtatttttcctcaaaacggtttttttttttnccaaggttttnt

SEQ ID NO: 119713 - DNA, 644 bp, Arabidopsis thaliana
  unsure (1)..(644): unsure at all n locations
gtcgataattatggagagaataacgaccttatggttttggtttagtcttatgattttcttaggaatctctatcaatggaggtttgtctcaaggacagcaacatgttatgaagaagacacgttcttctgcagttgtagtaggaactgtctactgtgacacttgttttaacggcgccttctcgaaatcacccaaccacttaatctcaggtgctttagttgcagtggaatgcattgacgagaactcgaaaccgagtttcagacaagaagtgaaaacagacaagcgcggcgaattcaaagtgaagctaccattctctgtgagcaaacatgtgaagaagatcaagagatgctctgtgaagttgctaagtagctcacagccttactgttctatagcttcgtctgctacttcttcttctctcaaacgccttaaatcaaaccatcatggagagaatactagggttttctctgcagggttctttcacttttcagaccccgaaaacccaaccagagattttgtagccaaaaaccttatcaattntncggnggttccaagcctttttnaccggatccttcatttctccacggttccaggtccnctaatcttcccctttccaaattcctttgtccnccttncaaattncntcnaag

SEQ ID NO: 119714 - DNA, 536 bp, Arabidopsis thaliana
tgatcctgccaagctacactacgactcactctagggaaagctcgtacgcctgcaggtaccggtccggaattcccgggtcgacccacgcgtccggaggaatctttacttgtcttgtgacccttacatggggattctcatgagagaaccaactccttccactctagcacttttggatgccttcatccccggaaagcctatagctggaattggagtgtctcaagtaatagattctgatgatccatcttttacgaaaggcaatatgatttggggaattgtgaactgggaggagtttagtactatcaacccggctgctatattcaaaatcgacgtcaatatcaatgttcctctcagctactatactggaatcctcggtatgataggtttaactgcttacgccgggtttttcgagatatgttcacctaagaaaggagacacagcgttccgtgtctgctgcttctggcgcggttggacagctcgtgggtcagtttgcaaagttgatgggctgctatgttgttggaagtgccggaagtaaacaa

SEQ ID NO: 119715 - DNA, 363 bp, Arabidopsis thaliana
gaagatatatagatctgaccaaagtaagaagggcttttactaagagtggaacagaggaatatggggaccaccgtgaaaaacaagcaagtgatactgagaaattatgtgaagggtatccctaaagaatctgacctaatgattatcacagcttcagaccccgtggaactcaaggttaagcccggatcagcggcggttatggtgaggaatctttacttgtcttgtgacccttacatggggattctcatgagagaaccaactccttccactctagcacttttggatgccttcatccccggaaaggtaacaactctccacacacatacatacatacacaaggccttaataagaaaatggtgctgattc

SEQ ID NO: 119716 - DNA, 578 bp, Arabidopsis thaliana
  unsure (1)..(578): unsure at all n locations
taaacnccaccgnctnanaatngcccnaaaccgctccccggcctcccctccnccnccgntnaccccncctcngaaccccgcaactgttttcaaaaccccaggccttgaagtgacgggcagtgttcccttagataatcaaacccatctgacctcataacagcgatgagattttctgctgcgaatttcagacaaacggatttcaaggcggaagcattgtaacggtcagcaagcgccaaaatatttgcaacggaatctactgatatatccttgcagagcactgactcgcacattagacttaatctaggcaacttgtatttatcagcggctcctagtagctttgcagctaatgtgtctgaggcagatggaccaacagatgaaccggaagatgatgatgactctgcatcttcaatgagagcatccttgtatatgtagtggagcaaagccttgaaaacctcggataggctccatgtcagtaacttcgatattacgatcttcttctcccgtaacatcgaggaactngctttcaaagacaggagatcgagcagccaatactaacctgtgagcacggaacttttcac

SEQ ID NO: 119717 - DNA, 415 bp, Arabidopsis thaliana
ccatccatcgactgggttgagggaactaaactgaatgagcaacttcccattgagagtcagcgattgaaggttctggatctcgcgaatacaggaatccagtgtagcctaaggcaactcttggagtatggctttttccatgctgaccctcatcctggtaatctcttggcaacacctgatggaaaacttgcctttctagactttggcatgatgagtgagacaccagaggaagctagatttgctatcataggccatgttgtccatttagtgaaccgagattatgaagccatggcacgagattactatgctctgaagttcttgtcccctgatgtggatgttactcctatcataccagctctcagagacttctttgacgatgcacttaattataccgtgagcgagctcaatttcaaaactt

SEQ ID NO: 119718 - DNA, 431 bp, Arabidopsis thaliana
gttggctttgttagttttgctaatgtcttggggaggcctccgacaagtgggtggggagagagtcctctggaatcagcagaacaaaattaaatggatcatgtttgagaaaatcactgggtcataaatttgtttcgatctcttcaaaagtgattttaaaaagggtcttacgtacagtccttgtagattcactaggttccctagttccttaggaatagttccagaaaattgattggcttcaagaactctgcaatcaaataaaaagacgaaagatttagttttcaaaaaggacaaaaagctttatatgtaatctcataagatcaacaaaataatgttaagaacatacaaaagggtgaggttaataaacttccccaatcctttgggaatgtctcctgataagcggtttgcacagacagagctacagagaaatattt

SEQ ID NO: 119719 - DNA, 170 bp, Arabidopsis thaliana
gagtataacagaattccatactcgatttcagagatacatatataattctgtggggagccgggttcgatgaaagtcgtatgtacggtttggagggagatctttcatatctttcgagatccaccctacaatatggggtcaaaaagccaaaataaaagatttgagcccttata

SEQ ID NO: 119720 - DNA, 605 bp, Arabidopsis thaliana
  unsure (1)..(605): unsure at all n locations
gcgcggcccgtagtatcgccggctcgtnnnnnnnnnnnnnnnnnnnnnnnnnnnnnnnnnnnnnnnnnnnnnggaatgcttggcacatactccaggggcccggctctatggatgctgttccttctatttgccagttggattgcttttgttatgtttgaggacacgcagcagggcctcacggtcttcacttcatatggtgcaactctttaccagatgtttattttgttcacaacatccaacaatcctgatgtctggattcctgcatacaagtcttctcgctggtcttcggtgttcttcgtgctctacgtgctaattggcgtctactttgtcacaaacttgattcttgccgttgtttatgacagtttcaaagaacagctcgcaaagcaagtatctggaatggatcaaatgaagagaagaatgttggagaaagcctttggtcttatagactcagacaaaaacggggagattgataagaaccaatgcattaagctctttgaacagttgactaattacaggacgttgccgaagatatcaaaagaagaattcggattgatatttgatgagcttgacgatactcgtgactttaagataaacaaggatgagtt

SEQ ID NO: 119721 - DNA, 836 bp, Arabidopsis thaliana
  unsure (1)..(836): unsure at all n locations
tgatctgccagctannnnnnnnnnnnnnnnnnnnnnnnnnnnnnnnnnnnnnnnnnnnnnnnnnnnnnnnnnnnnnnnnnnccacgcgtccggtcaatttcagaggctctgctgcttcctttgttgtgaagccacatagattagattgaggaatgatccaaactcatgtcatacacacatttgtaatctgctacacaaaatacttttaaaatcacacacactaatattttaactctccccactctttgccttgcccttggctctagaaccgaacgtgactctccagatagacttttggagtcacaacattgagtttgaagaggagggaagaagtgagctagggattggttcagagtgaacataaatggctctcaaggcattagactacgatactctgaatgaaaacgtcaagaagtgtcagtatgccgtaagaggtgaactttatctccgagcttctgagctgcagaaagaaggcaaaaagattattttcacaaacgttgggaaccctcatgctttaggacagaagccattgacatttcctcgccaggtggttgcgctttgccaagctccgtttctactagatgacccaaatgttggaatgctatttccagctgatgctattgcaagagctaaacattatctttccttgactttcaggcggtttaggtgcttacagtgattcaagaggccttccaggagttaggaaagaggttgctgggttcattcaacggcgtgatgggtatccaagtgccccagacctcatctttctccctgatggatttaaaggttgtgaaanctnnattgtttttcgggatgggtgggtttntncggncnag

SEQ ID NO: 119722 - DNA, 1117 bp, Arabidopsis thaliana
  unsure (1)..(1117): unsure at all n locations
ttggggcccactatagaagagctatgacgtcgcatgcacgcgtacgtaagctcggaattcggctcgaggccagtgtctaagcgaagctaacataagagagatattgaagttctgttataacgagaaactggttcttctgggagacgaggtttatcagcagaacatataccaggatgagcgtccctttatcagctccaagaaggttttgatggaaatgggttcgccgttcagcaaggaagttcagcttgtatcttttcacacagtctctaaaggatattggggtgaatgtggacagcgaggtggatactttgagatgaccaacctccctccaagggttgttgaggagatatacaaggttgcatcaattgccctcagccctaatgtctctgcgcaaatctttatgggtttgatggttaatcctccaaagcctggagacatttcatatgaccagttcgcccgtgaaagcaaggggattcttgaatctttgagaagaagagcaaggctcatgacagatggattcaacagctgcaaaaacgtcgtgtgcaatttcacagaaggtgcaatgtattcgtttcctcaaatacggttaccaacgggagctctccaagctgcaaaacaagctggaaaagtgccagacgttttctactgtctcaagctcttagaagccacaggaatctccacagtacctggctctggatttggacagaaagaaggtgtgttccatctgaggacaacaatcctgccagcagaagatgagatgccggagatcatggatagcttcaagaagttcaacgacgagttcatgactcagtatgataataactttggttattcgaaaatgtgattacttcttcttctgaacgactattgtgttctgctacactctttaaagctaaatctctgtagtacactctttctctttgccctattctataaaccatatctctctctttgtgtctctttttttttgggtgtaaactctctcttgtgtctctatttctattttcaattggaaactgattaagatcaaaaaaaaaaaaaaagnnnnnnnnnnnnnnnnnnnnnnnnnnnnnnnnnnnnnnnnnnnnnnnnnnnnnnnnnnnnnnnnnnnnnnnnn

SEQ ID NO: 119723 - DNA, 1071 bp, Arabidopsis thaliana
  unsure (1)..(1071): unsure at all n locations
ggcaaaaagattattttcacaaacgttgggaacctttatgctttatgacagaagccattgacatttcctcgccaggtggttgcgctttgccaagctccgtttctactagatgacccaaatgttggaatgctatttccagctgatgctattgcaagagctaaacattatctttccttgacttcaggcggtttaggtgcttacagtgattcaagaggccttccaggagttaggaaagaggttgctgagttcattcaacggcgtgatgggtatccaagtgacccagaactcatctttctcactgatggagctagcaaaggtgtgatgcaaatcttgaattgtgttatacgcggtaatggagatgggattctagttccggttccacagtatccactttactcagctaccatatcactgttaggtggtactcttgttccttactatcttgatgagtctgaaaactggggacttgatgttgctaaccttcgacaatccgttgctcaggctcgttctcaagggataacagtaagggcaatggtgatcattaaccctgggaacccaactggccagtgtctaagcgaagctaacataagagagatattgaagttctgttataacgagaaactggttcttctgggagacgaggtttatcagcagaacatataccaggatgagcggccctttatcagctccaagaaggttttgatggaaatgggttcgccgttcagcaaggaaagttcagcttgtatcttttcacacagtctctaaaggatattggggtgaatgtggacagcgaggtggttactttgagatgaccaacctccctccgagggttgttgaggagagggacggcgttgcatcaattgccctcagccctaatgtctctgcgcaaatctttctaagtcaaaggtcttaaagtaatgtggttttacttttctagaaatcatcgccttgttctgcgagtaattatttccctgtgcagatgggtttaatggttaatcctcccaagncttggggcntttcantatggccnnttcggccgtnaaaagcaaagggggttcttgaatctttttg

SEQ ID NO: 119724 - DNA, 643 bp, Arabidopsis thaliana
  unsure (1)..(643): unsure at all n locations
aactaagnttttagctnaaagaaatcccngtnccatacggccggaaattgattaggctttccncggggagaagttntcccacaccggnttncnccgttggagactcgcggacaatgtgtcgacgcgaccccggttgtgatattccctgtgggataatgtccttctccctgctgagctattcggaaaatctaaatctccatctccggcaccggcgcctgagccagttaccgcaccgacaccatctccagcggatgcaccttcacccaccgcagcttcaccaccggcacctccgacggacgagtcaccggaaagtgctccttcagactcgccaacaggttcagcgaacagtaagtccactaacgcagcggttggcgtgagcacaccgtcgttgttcaccgcattggtcacgatcgccgccatagccgtctccgtgtctctctgctcttaaaacctttcgtaattacgcaggctgccactccctttgtttatttttaatttaattatcttttcaatttttatttttgtggttatgtgttgttgagtttgaaaacatgggattagtgagtgaggttttatttaaatcgtttgttaatcacattttcattattgctttcagtgttgatctgatagtatcttgtttggg

SEQ ID NO: 119725 - DNA, 1008 bp, Arabidopsis thaliana
  unsure (1)..(1008): unsure at all n locations
acgcgcnnnnnnnnnnnnnnnnnnnnnnnnnnnnnnnnnnnnnnnnnnnnnnnnnnnnnnnnnnnnnncgggccgacccacgcgtccgcccacgcgtccgcggaaacgctcccggaaacctaggattcgtcaacatcaccgatcttaaaggaggcaaagtcggatttggctccgccgcttcaggttccaaactcgattcatcttacaccaaatccgttaaacaaatcccttacaacatctcaatcctcgagattgatgctccgatcatcgctcccggagttttaaccgctcctgctccttccgcctccttgtcaaacatcaccggattactcgaaaaagccggttgcaaaacctttgctaatttgcttgtctcaagtggagtactcaagacttacgaatccgccgttgaaaaaggcttgacggtttttgcaccgtccgatgaagcttttaaagctgaaggtgtaccagatctgacgaagctcacacaagctgaggtagtctcgctcttagagtatcacgccctcgctgagtataaacctaaaggctcattgaagactaacaagaacaatatctccacgttagccactaacggcgccggaaaattcgatctaacgacctctacctccggcgacgaagttattctccacaccggcgttgctccgtcgagactcgcggacactgtgctcgacgcgactccggttgtgatattcactgtggataatgtccttctccctgctgagctattcggaaaatctaaatctccatctccggcaccggcgcctgagccagttaccgcaccgacaccatctccagcggatgcaccttcacccaccgcagcttcaccaccggcacctccgacggacggagtcaccggaaagtggtccttcagactcgncaacaggttcagngaacagtaagtcaagttacggagngggtggnggtnaacaaaacgncgntggttcaccgattggcangatcgncgcatagccgnttccgngtttttntttt

SEQ ID NO: 119726 - DNA, 820 bp, Arabidopsis thaliana
  unsure (1)..(820): unsure at all n locations
cgggccggcccactgacacttgaaaaaactcaaaaccgtctcatcatggcggcgtcacagacattctcactcctcgccttcactttctccctcctcgcctttgcttccaccgtgagtagccacaacatcactcaaatcctcgctgattctccagattactcttccttcaacagctacctttctcagacgaagctcgccgacgagatcaacagccgcacgacgattacagttctcgtccttaacaatggcgcaatgtctgctctcgccggaaaacatccactctccgttattaaaagcgctttaagcctcctcgtcctcctcgattactacgatccacaaaaactccacaagatctccaaaggcacaactctctccaccacactttaccaaaccaccggaaacgctcccggaaacctaggattcgtcaacatcaccgatcttaaaggaggcaaagtcggatttggctccgccgcttcaggttccaaactcgattcatcttacaccaaatccgttaaacaaatcccttacaacatctcaatcctcgagattgatgctccgatcatcgctcccggagttttaaccgctcctgctccttccgcctccttgtcaaacatcaccggattactcggaaaagccggttgcaaaaccttttgctaattttgcttgtctcaagtggagtactcctgacttacggttccgccgtggaaaaagggtttacgggttttttgnacccgtccgntgaaggtttttaaagnttnanggtgttccanttttttcgggggttanaaaagntggggnnggcntgctttttnggntttaa

SEQ ID NO: 119727 - DNA, 618 bp, Arabidopsis thaliana
  unsure (1)..(618): unsure at all n locations
gcggtttgaatttatttggaagaatttagctgggacaacaaaaattaatgagttgaacagcgtangggttaaggggggtggcggatgcattatttcggataaggctggaactggtaagacacgtttgaccgtcgtttttcttcagtcatacttaaaacggtttccaaatagccatcctatggtcatagctcctgcaactctaatgcgtacttgggaagacgaagtcaggaaatggaacgtaaacattccattttataacatgaatagtctgcagttatcagggtatgaggatgctgaagctgtctcacgtttagagggaaataggcatcataattccatccgtatggttaagctagtttcgtggtggaagcagaaaagcattcttggaattagctaccctctgtatgagaagctcgcggcaaataagaacactgaaggaatgcaagtgtttaggaggatgttggcagaattgccggggttgctggtccttgacgagggccacaccccgagaaaccagagtagtctcatttggaaagtgcttactgaagtcagaacagaaaagcgtatctttctttcagggacactgttccagaataatttcaaggaactttctaacgt

SEQ ID NO: 119728 - DNA, 426 bp, Arabidopsis thaliana
gttaaagacttgtatcgaggaataacacactttttgtataatcattagtttcagtattcgtcctcttctttgattgatggagagacttcatctattattgatttgatatgtttatatgattagtaacgtatcttgttggttttaacattaagaattatttaatatcatgtaagaaagaccataaataatcgaattataaatcgattaatgatttttagtcgcgtaaagccgttagtgtaagcagtttatgatccaacaaatgaaaaatgtgttgtacgagcctgaaagaaacctgtgttggccgatgagcaggcccaataaaggcctaactaagttaaattgtcccgtctgcgatatgccaaatcgtctccttttcacgtatatgctgatcactatttgctgatagctaaaatcattacggaccta

SEQ ID NO: 119729 - DNA, 837 bp, Arabidopsis thaliana
agctgaaaagctgtattttactttttctttgttccatggaagctaataagcttgagcttttataagcatctacggcgaaataacttatgaatttgaatacattactggctgtttatcatctgcataatcgaaattcaacatcttaacagtcacaaacattctctttgaaaaaaacaggagcaaagatctttactcttccttcttcaccttcttcttggactttgctgatcgttctgaagagcctgaaaccgtacttgttgagctccgatgtttacctgaggaagactctgaattttttctttttggcgactttggagtctcggtgaagccagagaacatgctcttctctctgcttgctacgtgtgccgcttttatgccggctgctttgagtaaggttagatgatttcttagaggaattcgtcactgatccgacaagcttctgttgtgttctagccttcattttctgaagcaactcgtttggttcagggtaacgaactaatgcaactcgccgagtaatcttcccaacaatcattgattcttcagaaggtataatcaactctgcaccagcatcttgagaatgaaagctagcaagatcatactttgcaccatttgaatccttgaattctccaaataacccatctttgtctggctcaatcttaagagtgttctcttcgatttctggaaattggcctaaaggggcttggataagccaaaactcatcagaacgcgtcaaatcagtgtcatctagctgctctgcgccactgactatgaaatctccggaaactttgaaatcgaaatccatctctgctcaaatcagctctcgcgatttcacaaaac

SEQ ID NO: 119730 - DNA, 776 bp, Arabidopsis thaliana
agaaaattgatttgcatgccttcgcagtaccggtccggaattcccgggtcgacccacgcaaccaaatcctcggcggcgattgaagaaacctttccgatggatctgctcagggaagagattctgaagaaacgtaagagtctagctgaggaatctggtggtaagaagttcttcaagcggtctgagatcgagcagaagaaaatccagaagcttcgagaggaagaacgacgcgagcacgagcttaaggctcagcggagagccgccgccgccgcttccggtggagatggaaaatcatccggctctgctcctggttcttctaacgcagctacgtctgcgtcttccaaatcctctgcatcggacgctgctgctatcgccgattcaaaagccctaaccgacgaaaacctaattctcccgaggcaggaagtgattcgtcgtttgagattccttaagcagccgatgactctcttcggagaagatgatcaatcgcggctcgatcgactcaagtacgttttgaaggaaggattgttcgaggttgatagtgatatgactgaaggacagacgaatgatttcttgcgtgacatcgcagagcttaagaagaggcagaagagtggtatgatgggagataggaagaggaagagtagagatgagagaggaagagacgaaggtgatagaggtgaaacaagggaagatgaacttagtggtggtgaatcgagtgatgttgatgctgataaagatatgaaacgtttgaaagctaactttgaggatctatgcgatgagga

SEQ ID NO: 119731 - DNA, 390 bp, Arabidopsis thaliana
cgggggggaccaacccgtccgttctttttatctagaaatcgaggaagctatacaaggtttttctcaagcctgttcatatgatacctaataatatgctattaaaaaaaaggaattctaggacacccgtgtgaattcggacctctccgattcaaatcggaccatagttcctgacctaaaattctacgcaaatcaagatcgagaaaaggaagttttgcaatcattgactcaaactcattgtcgaatcccattcagcagaatatggaggtacttatggcggaacgggccaatctggtatttcacaataaagtgatagatggaactgctattaaacgacttattagccgattaatagatcacttcgggatggcatatacatcacacatcctagat

SEQ ID NO: 119732 - DNA, 672 bp, Arabidopsis thaliana
  unsure (1)..(672): unsure at all n locations
cctatttttataattattaatcaaaatcaaatgagcaaaaatggaaggcaacaaatttcttcttctcttcttcaagctcatcaatcaatggcgtcgtctctatctccaccggaagaagcttcgtatcaccaccgtcataccaaaaggtacacctcctccgcttcctccgcttcctccaccaccaacggaaccgtcgaatcatcggtttccgatttcgtcaaacgtcccaaaatctctcatccgaattacatatcaagttccgagatcgaatcagagttttctcatcacgatccagatttcgcaagaatcaacaacggtagttttggttgttgtccgtcatcaatcctagctttacaacgagattggcagctccggttccttcgtcaaccggatcgattctatttcgacgaactcaaaccaaaaatctccgattctagatctgtaatcaaacggttaataaacgccgagcatgacgatgaagtctcgatcgtcgataacgcaacaaccgcagctgcaatcgttttttaacaaaccggttggggtttttccgtgaaggtcggttcgataaagggggcggggtggttatgcttcattacggttttgggcttttaaggatttttttaagggtttttacggccggtggnaggaccggggaaagttcctttccggtta

SEQ ID NO: 119733 - DNA, 455 bp, Arabidopsis thaliana
ctcatcaatcaatggcgtcgtctctatcgccaccggaagaagcttcgtatcaccaccgtcataccaaaagatacaacacctcctcttcttcaaccaccaacggaatcatcgaatcatcggtttccgatttcgtcaaacgtcccaaaatctctcatccgaattacatatcaagttccgagatcgaatcagagttttctcatcacgatccagatttcgcaagaatcaacaacggtagttttggttgttgtccgtcatcaatcctagctttacaacgagattggcagctccggttccttcgtcaaccggatcgattctatttcgacgaactcaaaccaaaaatctccgattctagatctgtaatcaaacggttaataaacgccgagcatgacgatgaagtctcgatcggtcggataacgcaacaaccgtagcagcaatctgtctttaacaaaccgttt

SEQ ID NO: 119734 - DNA, 752 bp, Arabidopsis thaliana
acgcggcaaagagagagaaagatagagagagagagagagagagagagagaaagcggtggagtcgtgataagggagaagctctggatacagtctcttcccgtcgtcggagacggatgtttatgcctattggctcctgaggttagattaagcttcgtatttagtggattttcttcttttgagatatggaacaagattacatctgctcagggtgctaccagtatcgagttttttcattgcaagaagcactcgattggcggtttcttgtgcactcagatttccttatcggctctttcgtgaactgcacctagtggtcagaccttctgcgatctttacggaaggtgtgatgcaaatttctgattcagggctgatgtttgcaagttatcctaccttcacacagtcctagagtgtcatctaaatctgttccctgcactcaaaaactagttggtccttcttccatatcctgttcttatgagagcttgttgaagaaggatgaatcagttttttttcaagttatgacttttcttagctgtgtcttttcctcgagtctctgaaccccttgagtgaaatgttgtgagcataagtttcgtccagctacccagaacattactttttgttagtgcgtcttccaattctcagtatgttttgtctttttctcttagcgtctttcttttgccttgttggtcaacccattgatgttcaaacttcaaagtaaataagggtcagtctacccagcgggagaatcattgatcttg

SEQ ID NO: 119735 - DNA, 401 bp, Arabidopsis thaliana
aatttctcattgagaaactgttcaatataaaaataaaatataatcaaaaagtatgagagagagtagaattagtctctcaagtgagaaactttgagaaacccataagaacacttgtatatcaggtcaaatattattttattgttaaaatttaattatataactaatatttattaaaatactaatattttttttttttgagaaaccaagaaggtatctcagtgacggagatgtccttatatcataccaaacttcaacaaaaacaagtattggagtcgactgtgtgataggttcgtcctcatccaaagacatagcttgaaggactttttgatataattatgtgtttggtgtgtataggtgtggtgatgagtgcaaggatgcaagaaagcaaaaagggtatatta

SEQ ID NO: 119736 - DNA, 524 bp, Arabidopsis thaliana
  unsure (1)..(524): unsure at all n locations
gattttctaagacttgagtaatcttgttttccgaaattttctcaccaagctcgaacacaaagatcggccatggctacgctcttcaccgtcgctcgtccttcttcactcctctatgtttcctccataaatccaagcaagaccttctctccttctatctccctaaaacttaactctctctctttctcttttggttatcgtcccaagccactccggttttctaaaatccgatcttctctgccctcggaatctgaatcggaatccgacctagatgcgtctgcagttacagatgaatggggtgagaaacctggagatgcaaatgagcccgactctcagccagataatgtgaccgtgaatgtgattacggacgaatggggcgagaaatccggacccgaacttgaggaatccgggacccnntttatggaatcggatcctncaaggaacgnagacgagtggggaggagnaatttgtggagaaactntngccggcgntggaaaatagnaagttncggtgtttnacccnncctt

SEQ ID NO: 119737 - DNA, 1245 bp, Arabidopsis thaliana
  unsure (1)..(1245): unsure at all n locations
atgatatnnngccggccctatacgactttcttagggaaagctggtacgcctgcaggtaccggtccggaatttccgggtcgagccacgcgtccgcggacgcgtgggttcagctcttgaaaagttgaatttagagttagctaccaagtcagtgctcttgggaaacggattgacgccatcggcagctgatgttgctgtgttttcagctctgcattcttcagtgcttggcctctcagattcagacaaggagaaagtaccacatgtcataagatgggtgaattacatccagaataaagaagagttgtcgacattatttgcaccaatacctgtgaagctaccagaatttagcttcgaggtaccaaaacctgccattaaggtggaaacaaattctaattcaaaaaaagctgcagaaggtgtaaagcctgttgacaagccagatgtgcagccgcagctgggcacaaagaaaactgagccagaggaaccaaagaaaaatgcagcaaaagagaaggatgccaaaaaggaaaagaagaagcctgctgaaccagaaccagctaagaaagaggcagagcttagtgtcagtttgcttaacattcaggttggtctaattcgtaaagcatggaagcacccatcggcggatagtttgctggtggaagaaatagatgtcggggaggataaagtgagacaagtagttagtggcttagcaaagttctgcagtcctgaggatctaacgaaccgcctcgttgcactcatcacaaatgtcaaacctggaaagctaagagatgtaatgtcacaaggactggttctttgtgcttcaagtgaagatcactcggtggtagagccgttgctaccacctgctggtgctaaaccaggagagcgtgtttcattttcagggattgaaggaaagccagaagatgtactgaacccaaaaaagaagcaactagagaagataaccccgggtctctacactgatgaaaatggcgtagccacatacaaaggcatacaattcatgacctcggctggaccttgcacttccagcatccccaaggcgaccatcaagtagtaaactcagttgatacttctctcctctactctagcgtttttctttgatattcgcaaactcagttggaaaaagaaaagatgttctttttgtcacaattcgaattaatctaaaaactttcttcttaaaaaaaaaaaaaaaaggcggcccgctctaagggatccagccttacgtacgcgtgcatgcgacgt

SEQ ID NO: 119738 - DNA, 412 bp, Arabidopsis thaliana
cgaagaaattgcagtgtgttttcttacagcgaagagccccaaagagaagaacaaaatttcgaaaatagagaaagagaagaagttgacgatggattcaaaggcgaagcagatgattctttcagctctctgcaaacacttctctttggatcctgaaccttttgtgggcggagcgggtgaaagtgatatcaagacactttattctaatgtattgaaggcatctggaaaggaagtatctgcacaaaacaacgatgttttgaagtggctagattttgcggaaggtttctcttcagattcaatggattggttttcagctcttgtaatgttgaattttcagttagcttccaagtcagtgctcttgggtaacggatttgacgccatcggcagctgatgttgctgtgttttcagctctgca

SEQ ID NO: 119739 - DNA, 564 bp, Arabidopsis thaliana
aaaaatacccttggtactttattgacgatctcacaaagatgcaatctcagtgaattttaatttacttattcatcttttacagaatcgattccctacgagaatatctggagttcagtatgtctggaagcacaggagaacgttcttttgctgatattattaccagtattcgatactgggtcattcatagcattactataccttccctattcattgcgggctggttattcgtcagcaccggtttagcttacgatgtgttcgggagccctcgtccaaacgagtattttacagagagccgacaaggcattccattaataacaggccgttttgattctttggaacaactcgatgaatttagtagatctttttaggaggacccaatgactatagataggacctatccaatttttacagtgcgctggttggctgttcatggactagctgtacctaccgtttttttttgggggtcaatatcagcaatgcagttcatccaacgataaacctaattcaattatagagctatgacacaatcaaatccgaacgaacaaagtgttgaattaaatcgta

SEQ ID NO: 119740 - DNA, 442 bp, Arabidopsis thaliana
ctcagaaaaagctagatttaactaaagatggagcggtatcattatcagcaaaccaccttcaaaagctacgcctgtcattccagttaactactccacttggcaatgcgtttaagccacaccaggcatttttacatagctgaaacatgagtcacaggtcgagcatatctttctcgtgaaaacttctggaaagaagtctgatttagttctagattttcttggattggttgagaagctctactacctctctggtaaatatgagatacagctaaccattggagatgcttctatggagaactctttactgagtaatattggtcacattgaactagacctaccagagcgtccagagaaggcgactcgtcctcctctacagtctactgagccttactcaagatatgggccaaaagctgaaatatcacacatattcaggattcctgaaaag

SEQ ID NO: 119741 - DNA, 394 bp, Arabidopsis thaliana
gacacgacaacgatgccagtgatgctattccactaaactctactctaatttagtggggttgatcaaattagattcctaaatttcatcttggttgatgttggcatttacgatgaaatatttggaaatacaagtaagagtcggttatgattgagttttggtctagaaaagttagagttgaatgggtgtggtagtagccactatttatggtggataaatacttagtaaaatacaaaatacgggacagctttttgggtgccagaagttataaatacattggtggacagtttttattgtcatataatttcttttcttttttttggcaaaaaataatttctttttactttgactaaaatatgaggagaacattactatgttgaaatgagtggaaaatcaa

SEQ ID NO: 119742 - DNA, 486 bp, Arabidopsis thaliana
tatgacgtcgcatgcacgcgtacgtaagcttggatcctctagagcggccgccctttttttttttttttttttttttttttctggtagccaaaaactttttaatgcatgaactaaaacaagaaggaagtgagaaactacaaccacaaagacatactctattaatagcatgagaaagcaaaagttaatataaacatacaaatcctcaccaaggattagtttttttcacaacatgttgaagacaagttagttgtcttgtaatttaccctctggactctaagctagaaccaactaaagcctacccatactagtacccaaacaaagtaccattccccggtatagccctaaaacgatagatgccgataaccgaaggggtctctcgccaggcgcaaccaagacctcacaagaaggacagacttattatgcttccggagaccaaggaacacaaaagaaacgctattgaacactatacaccacttgtggaaactg

SEQ ID NO: 119743 - DNA, 396 bp, Arabidopsis thaliana
agactctactccaatcctctttgatgttcctcaaaacgtaactttcacaccattctcatcgcactccatatccactgatgctcctctcccaatcctcctccgagttcaagccaacgctcacaaaggagggtttctcggattcaccaaagaatcaccctctgatcgtctcacaaactccttgggaagattcgaagacagagagtttctcagtcttttccggttcaaaatgtggtggtcgacggcttggatcgggaaatccggttcggatcttcaagccgagactcagtgggtgatgctaaagattcctgagatcgattcctacgtggccatcataccaaccattgaaggagcttttagggcttcacttactcctggtgagaaaggtaatgtcttgat

SEQ ID NO: 119744 - DNA, 839 bp, Arabidopsis thaliana
  unsure (1)..(839): unsure at all n locations
agtcacattctataaatatacgacaagagacgacctttggggctcgagaagctctctccaaaaacaaacgaaaagaagcgacttttgcctcttttggtctctccccttctccggagagatctgctctctctatctatctctcaatctgtaagaagaagattcccacttcagtaaaagccctaactttacttgggaaagttcttcatctatcatccttcaatcgtcatcatccatggctgatcaacaaaccctagattcctctactcctcctcctactcaatccgatgatctatctcactcccactctacttcctctactacttcagcttcttcttcctcagatccatcactcttgaggtctctctccttaagtcgactcaacgccggagctcctgagttcgttcctggtcgaactactcctccgctgcctcaacctccgaggatgattatcccgcctcctccgccgcacggtatgcttcatatgtatcaccaccagcctcctttcaatactccagttcttggtcctgttccaatccagccacacttggttcctgttcaaaatcaccaccctcatcatcgctttcatcagcatcatcatcacaatcgtcatcagaatcaggaaatatgtncccggtgaggattaangggggagtntcagcagcgtggtggtgtcggtggtgagcaggaaccgggttttggnttnaaaggaggattntncggggggggtcatagtaaggggggattttagnncggncaaggtgctnaaaatgggggttttnttttnttggttnaaaanagggtttcctnaaggtttttccnaaanggtttnacaagggggg

SEQ ID NO: 119745 - DNA, 1186 bp, Arabidopsis thaliana
  unsure (1)..(1186): unsure at all n locations
cccaagcgtccgccctcctccaaacaaatttcaaaccctagcttctcgatttctctcctctgctctccaattccatcttcccatggcgatttcggctccagccgcttgttcttcctcctctagaattctctgttcctactcctctccttctccttctctctgtcccgccatttccacctctggtaaactcaaaaccctaactctctcttcctccttcctcccttcttactcattaaccaccacctccgcttctcaatccactcgtcgctccttcaccgtccgcgccgctcgtggaaagttcgagaggaagaagcctcatgtcaacatcggaaccatcggtcatgttgaccatgggaaaactactttaaccgcagctctaaccatggctctcgcttccattggttccagcgtcgctaaaaagtacgacgagattgacgctgcgccggaggagagagctcgtggtatcacaatcaacactgctactgttgagtacgagactgagaatcgtcactacgctcacgttgattgtcctggtcacgctgattacgttaagaatatgattaccggagctgcacagatggacggagctatcctcgttgtttccggcgccgatggtcctatgcctcagactaaagagcatatccttttggctaagcaggttggtgttcctgataatggttgtgtttctttaacaaaagaggatcaagtagatgatgccaagagtttgctagagctcgttgagcttgaaggttccgtgagcttctctcgtcttatgaatttaacggtgatgatattccgattatctctggttctgctcttttagccgttgagactcttactgagaatcctaaggttaagagaggtgatggcaaatgggtagataagatttgggaacgtatggatgctgttgatgattacatccctatccctcagaggccaaacctgaattgccattcttgttaagcttgttgagggatgtgttctctatcaactggaccgtggtaccggtggctacagggcgtgtcgagagcaggtccggttaaaggtaggagggcctgtagatttagtggggttgagggggcctaggggtacactgcacctggggtaaatntcaaaaggtcttattgggttncctggncattagggtttcttgggtcnaaggttatccangggntgttccnncnnc

SEQ ID NO: 119746 - DNA, 1007 bp, Arabidopsis thaliana
gagcttctctcgtcttatgaatttaacggtgatgatattccgattatctctggttctgctcttttagccgttgagactcttactgagaatcctaaggttaagagaggtgataacaaatgggtagataagatttatgaacttatggatgctgttgatgattacatccctatccctcagagacaaactgaattgccattcttgttagctgttgaggatgtgttctctatcactggacgtggtacggtggctacagggcgtgtcgagagaggtacggttaaggtaggagagactgtagatttagtgggtttgagggagactaggagttacactgtcactggggttgaaatgtttcagaagattcttgatgaggctttagctggtgacaatgtagggttgttgcttaggggtattcaaaaggctgatattcagagaggtatggttttagctaagccgggatcgattactccacataccaagtttgaagcaattatctatgtgttgaagaaagaggaaggtggaaggcattctccattctttgcagggtacaggcctcagttctacatgaggacgactgatgttacgggtaaagtgacgaagatcatgaacgacaaagatgaagagtcgaagatggttatgcccggtgatcgagtgaagattgttgttgagcttattgtgccggtggcttgtgaacaagggatgaggtttgctatcagagaaggaggaaagactgttggtgctggagttattgggacgatcctcgaatgattataaggttttagagagtttcatatagtgagcatctctacttgctttctttttgtttcactcttgattctcaaactctttgagtttttacctttttttatttatttttgtgccattttccataagaacttgaaatcaaaatgtcatatatttcttgattttctgatccttgtttttcatcttacaaaaaagggcggccgctttagaggatcccagcttaaggaagggtgcaagcgacgtca

SEQ ID NO: 119747 - DNA, 557 bp, Arabidopsis thaliana
  unsure (1)..(557): unsure at all n locations
atgannnnnnnnnnnnnnnnnnnnnnnnnnnnnnnnnnnnnnnnnnnnnnnnnnnnnnnnnnnnnnnnnnnnnnnnnnnnnccacgcgtccgattccatcttcccatggcgatttcggctccagccgcttgttcttcctcctctagaattctctgttcctactccccaaatcttctccttctctctgtcccgccatttccacctctggtaaactcaaaaccctaactctctcttcctccttcaccgtccgcgccgctcgtggaaagttcgagaggaagaagcctcatgtcaacatcggaaccatcggtcatgttgaccatgggaaaactactttaaccgcagctctaaccatggctctcgcttccattggttccagcgtcgctaaaaagtacgacgagattgacgctgcgccggaggagagagctcgtggtatcacaatcaacactgctactgttgagtacgagactgagaatcgtcactacgctcacgttgattgtcctggtcacgctgattacgctaagaatatgattaccggagctgcacagatggacggagct

SEQ ID NO: 119748 - DNA, 440 bp, Arabidopsis thaliana
cgatttctctcctctgctctccaattccatcttcccatggcgatttcggctccagccgctggttcttcctcctctagaatgctctgttcctactcctctccttctccttctctctgtcccgccatttccacctctggtaaactcaaaaccctaactctctcttcctccttcctcccttcttactcattaaccaccacctccgcttctcaatccactcgtcgctccttcaccgtccgcgccgctcgtcgaaagttcgagaggaagaagcctcatgtcaacatcggaaccatcggtcatgttgaccatgggaaaactactttaaccgcagctcgtggtatcacaatcaacactgctactgttgagtacgagactgagaatcgtcactacgctcacgttgattgtcctggtcacgctgattacgttaagaatatgattaccgg

SEQ ID NO: 119749 - DNA, 394 bp, Arabidopsis thaliana
gcaggtggtcgttacccgaccgacttaaattcatttctcgaatttcgtggagcattgcatgcaaatatttctcatcaaaaagaaaaaaaagaaaagaaacagttgacatttattttattaaaattctattcctagagtataattttatcgtcaatgtctttcataaccagcttgaaatttttggcacgccttagacttttagataatgcttccttttataaataaaatctatcaataacataaatacctaataaatattagtaaccttgaatatatacattaatacatatggaaatgtcatcaataaaaatactataaaaatagattcttaaatttattttgtatctaaaataatataaatacattaaactaatatgtattggttgatagtatc

SEQ ID NO: 119750 - DNA, 956 bp, Arabidopsis thaliana
agctctacacgactcactattgggaaagctggcacgcctgcaggtaccggtccggaattcccgggtcgacccacgcgtccgcgacactttcttctccaccaccaccatggatgatctctccaagcttctcttcttcctcctcctcactatctccattaccaccgcattacccgataaacccgggtcgggtcaaataaactcaaactccgtcctcgttgctcttcttgactcacactacacagaactagcagagctcgtcgaaaaagctcttcttctccaaaccttagaagaagctgttggtcaacacaacatcacaatctttgctcctcgtaacgatgccttagaaaaaaatcttgatcctgaattcaaatctttcttactccaaccgaaaaacctcaaatcattacaatctttattaatgtttcacattcttcccaaaagaatcacttctccacaattctcctccgccgtcgttagccaccgtactctctccaacgaccacctccatttcaccaacggaaaagtcaactccgctgaaataaccaaacccgatgatttaactcgtcccgatggagtcatccacggaatcgaacgtcttttaatcccacgttctgttcaagaagatttcaaccgccgtcgtagtctccgttcaatcgctgccgtattaccggaaggagcaccggaggttggatccaagaactcaccgtctcaagaaaaagccagcaccaattcccgccggagctccaccggttcttccggtttacgacgcaatgtcacctggtccgtcactagctccggctccggcaccaggaccgggtgggccacgccaccatttcaacggagaggctcaagttaaagattttatccacacgcttcttcattacggtggctacaatgaaatggcagatattctcgttaatctcacttctttagccaccgagatgggtcggctcgtg

SEQ ID NO: 119751 - DNA, 1452 bp, Arabidopsis thaliana
tactcctaaggtaaaggttcacaacaaaatagtttatattataagagttactttgaaaacaaaaaaaaggaaagtcatattttctcaattccaaaaaattgtataactggatctaatatatatgagttggcgatcagaatctatatggatagaatttataacggggtctcgaaaaacaagtaatttctgctgggcctttatcctatttttaggttcattaggattcttattggttggaacttccagttatcttggtagaaatgttatatcgttatttccgtcccagcaaatcattttttttccacaagggattgtgatgtctttctatgggatcgcaggtctctttattagttgctatttgtggtgcactattttgtggaatgtgggtagtggttatgatcttttcgaccgaaaagaaggaatagtgcgtatttttcgttggggatttcctggaaaaggtcgtcgcatctttttacgattctttatgaaagatattcagtccatcagaatagaagttaaagagggtgtttctgcccggcgtgtcctttatatggaaattcgaggtcaaggggctattcctttaattcgtactgatgagaattttactacacgagaaattgagcaaaaagctgctgaattggcttacttcttgcgtgtaccaattgaagtattttgaaatgaattaattaaatgctttggcagtaggaagaaaaaacgaaagaatttctttcttttttttttcaattgaatattcatctcttcttttatgctcggttttttgatatatttgatagaaaagaaaaggagtttatttgtctcgaaattagtattgatcgaaaaaggggggaataacatcccggaaaccccattttttcttgattcaagttggaagtgtattctgagtctgtttctgtattctttctagattcaaagcaaagactcagtattgaatcaacagcaaaagataaaatggattcataggctcactatattctattcgaattagaatagaaacacatgctcgatagaaatattagatctaatagaatcaacaaatgaggtaggttcattaacaactcacagattcaaaatggcaaaaaagaaagcattcattccttttttttattttctatctatagtctttttgccctggttgatctctctctgctgtaataaaagtttgaaaacttggattactaattggtggaatactagacaatgcgaaacttttttgaatgatattcaagaaaaaagttttctagaaaaattcatacaattagaggaactattccagctcgatgaaatgataaaggaatacccagaaaccaatttacaacaatttcgtctaggaatccacaaagaaacgatccaattcatcaagatacacaatgagtataatatccatacaatcttgcacttctagacaaatctaatatctttcgttattctaag

SEQ ID NO: 119752 - DNA, 519 bp, Arabidopsis thaliana
attaccagaaaaactaaagtgccctttctttcaagtacacatgcatacaagctagttcaaggccaagatcttctaatcatagaccttagacatttggtaaagaaaattgatacatacagattgtgaacatcatgtctccctcaagggactctttggtggacgctcttagtatgaaaggaggaacaggagaccatagttatgctactaattcacattatcagagaagtgttttctatgagatacaacctttggtcatagagaacgtaagagaaatgctactgaaaaatgggtttcctggttgcatcaaagtggcagacttgggttgttctactggacaaaacacggtgttggccatgtccgcaatcgcctacacgatcatggagtcataccaacaaacgagtaaaaacccaccagaaatcgattgttatttgaacgattcttccagagaacgatttcaataccaccttcaagttgtttcattctttccaagagaagctgaaaccggatgttaaaggaaag

SEQ ID NO: 119753 - DNA, 780 bp, Arabidopsis thaliana
  unsure (1)..(780): unsure at all n locations
ttggcaatngcgaccgggccttccctcgaggtcgacggtatcgataagcttgatatcgaattcgcggccgcggaaccttctggcgattgtgttaccagggttgatgggtctgaaagtgaagaagaaactgaagagatgatatttgggagttctgaagctgcaaaacagttcttagcagagttggaaaaggcttcttctggtatagaggcacattctgatgaagcaaacatttctaacaatatgtcagataggattgatggccagattgtcaccgattctgacgaggatgtagacacagaggatgaaggtgaggagaaaatgtttgatactgcagctttggctgcgcttttgaaggcagccactggtggtggaagttcagaaggtggcaattttaccataacatctcaggatggcacgaagcttttctctatggatcgacctgctggtttgagttcatcgttaaggcccttgaagcctgcagcagctccacgtgcaaaccgttccaacatcttttccaattctaatgtcacaatggcagatgagactgaaattaacttgggcgaggaagagaaacagaaatttgaaaagttgcaaagcctccgtgttgaagtttttgggggctttttgccaaaggttggggtcatttcgggcagaaagaatttcaattttggcagcggcaagggtttctttttaacccggtctttggcacctaactttgccttggggaagaacaaaagcctgggggccaagtttattttcaagttctttgggatggccttg

SEQ ID NO: 119754 - DNA, 1220 bp, Arabidopsis thaliana
  unsure (1)..(1220): unsure at all n locations
aggtctcnnnnnnnnnnnnnnnnnnnnnnnnnnnnnnnnnnnnnnnnnnnnnnnnnnnnnnnnnnnnnnnccacgcgtgcgccagattgtcaccgattctggccatcaatcctatctgacatattgttagaaaggattgatggccagattgtcaccgattctgacgaggatgtagacacagaggatgaaggtgaggagaaaatgtttgatactgcagctttggctgcgcttttgaaggcagccactggtggtggaagttcagaaggtggcaattttaccataacatctcaggatggcacgaagcttttctctatggatcgacctgctggtttgagttcatcgttaaggcccttgaagcctgcagcagctccacgtgcaaaccgttccaacatcttttccaattctaatgtcacaatggcagatgagactgagattaacttgagcgaggaagagaaacagaaattagaaaagttgcaaagcctccgtgtgaagtttttgcggcttttgcaaaggttgggtcattcggcagaagattcaattgcagcgcaggttctttaccgtcttgcactacttgctgggagacaaacagggcagttattcagtcttgatgctgcaaagaagaaggctgtggagtctgaggctgagggcaacgaagaattgatcttctccctaaacatactggtccttggaaaagccggggtgggaaaaagtgctactataaattccattttgggaaaccagattgcgtccattgatgcttttgggctctcaaccacttcggttagagaaatttctggaacggcgaatggtgtcaagattacctttattgatactccgggtttgaagtctgctgcgatggatcaaagtacaaatgcaaaaatgttgtcctctgtaaagaaggtaatgaagaagtgtccccctgatattgtactatatgtagatcgtcttgacacccagaccagggacttgaacaatttgcccttgctaaggacgattactgcttctcttggtacatccatatggaaaaacgctatagtgacattgacccatgcggcttctgcccctcctgatggcccatctggcaccccattgagctatgatgtgtttgtagcgcagtgctcacatattgtgcaacagtctataggacaggctgttggagatctacgcttgatgaatccaaggctgatgaatccagttttacttgttgagaatcacccctt

SEQ ID NO: 119755 - DNA, 417 bp, Arabidopsis thaliana
agaggattcaattcctgcagctgagtcacagtttgaggttcggaaagttgtcgaaggggacagtgctgaagaggatgaaaacaagctcccagtcgaagacattgtttcttctcgtgagtttagctttggaggcaaggaagtggaccaggaaccttctggcgaaggtgttaccagggttgatgggtctgaaagtgaagaagaaactgaagagatgatatttgggagttctgaagctgcaaaacagttcttagcagagttggaaaaggcttcttctggtatagaggcacattctgatgaagcaaacatttctaacaatatgtcagataggattgatggccagattgtcaccgattctgacgaggatgtagacacagaagatgaaggtgaggagaaaatgtttgatactgcagctttggc

SEQ ID NO: 119756 - DNA, 781 bp, Arabidopsis thaliana
taatacgactttctatagggaaacctggtccgcctgcaggtaccggtccggaatttccgggtcgacccacgcgtccgtccgctagggtttttcgcctctttctcaactctcttctcgaaaacctagcagtcgtctctttctcagttctccatgggaaagtctaaatccgccaccaaagttgttgcagagattaaggccactaagcctttgaagaaaggcaagagagagcctgaagatgatattgacaccaaagtgagtcttaagaagcagaagaaagacgtgattgctgctgtccagaaggaaaaagctgtgaagaaggttcctaagaaggttgagagctctgatgattcagattctgaatctgaggaagaggagaaggctaagaaagtcccagccaagaaggctgcttcaagcagtgatgagtcatctgatgactcttcttcagatgatgaacctgcacccaagaaggccgttgctgctactaacggaactgttgcaaagaagtctaaggatgactcatcatcatctgatgatgattcttcagacgaggaagttgctgtcaccaagaagcccgcagctgctgctaaaaatggctctgtaaaggccaagaaagagagttcgtctgaagatgattcatcttctgaagacgaacctgcgaagaaacctgctgctaagattgccaagccagctgctaaggattcttcatcctctgatgatgactcagatgaggattccgaggatgagaaacctgctaccaacaaggcagctcctgctgctgcca

SEQ ID NO: 119757 - DNA, 555 bp, Arabidopsis thaliana
ccggacccccccttgagggcgacgggatcgattagcttggtttcgaattcgggggccgcttaactttttttttggaaaccttaccggcggcttttttttaagtcttcattggaaaggcttaattccgccacccaaggtggtggcaaaaattaaggccattaagcctttggaggaagggcagaagaaagcctggagaatgatatttgccaccaaggggagtcttagaaggcaaaataaaggacgtgatggctgctgtccagaaggaaaaagcctgtgaagaaggttcctaggaaggtggaaagctctgatgattcagattctgaatctgaggaagaggagaaggctaagaaggtcccagccaagaaggctgcttcacgcagtgatgagtcatctgatgactcttcttcagatgatgaacctgcacccaagaaggccgttgctgctactaacggaactgttgcaaagaagtctaaggatgactcatcatcatctgatgatgattcttcagacgaggaagttgctgtcaccaagaagcccgcagctgctgctaaaaat

SEQ ID NO: 119758 - DNA, 1259 bp, Arabidopsis thaliana
  unsure (1)..(1259): unsure at all n locations
nnnnnnnnnnnnnnnnnnnnnnnnnnnnnnnnnnnnnnnnnnnnnnnnnnncccacgcgtccgctccttctggctctctctcttcctaagtttcctctctctttagaactgtagagagagaaaagcctccatttttctcaaggcaatctctctctctctgcctcatctcataaacccattacaccaaaacctcatcgtagagagagaaacacaccaaccattgttacactctaagagaagagaagagagaaggaaaaatggacggtgtatcaccaaagtttgtgttgccggagacattcgacggcgtgaggatggagatcacaggccaactaggcatgatctgggagcttgtaaaagcaccagtgattgtccctcttcttcaattagctgtttacatctgtttgcttatgtctgtcatgcttttatgtgagagggtttacatgggaatcgtcatcgtcctcgtcaaactcttctggaaaaaaccagacaaacgttacaagttcgagcccattcacgatgatgaagagcttggtagctccaatttccccgtcgtcctcgtacaaatccccatgttcaacgaacgagaggtttataagctatcaataggagcggcgtgtggactttcctggccgtccgatcgtctcgcgattcaagtgttagatgactctacagatcctactgttaagcaaatggtggaagtggagtgtcaaagatgggcaagtaaaggaatcaatattaggtatcaaataagagagaatagagttggttacaaagccggtgctttaaaggaaggactcaaacgtagttatgtcaagcattgcgagtatgttgtcatcttcgacgccgattttcagcccgaacctgattttcttcgccgtagcattcctttcctcatgcacaatcccaacattgccttggttcaggctcgatggcggttcgtaaattctgatgagtgcttattgacgagaatgcaagaaatgtcattggattaccatttcactgttgagcaagaagtgggttcatcaacacatgcttttttcggcttcaacggaaccgccggaatatggagaatagcggcgataaatgaagctggtgggtggaaagatcggaccaccgtggaagatatggatctcgccgtccgagcaagtcttcgcggctggaaatttctctacctcggtgaccttcaggtgaaaagtgagcttccaagtacttttagagccttccgttttcagcaacatanatggtcttgtggacctggc

SEQ ID NO: 119759 - DNA, 784 bp, Arabidopsis thaliana
  unsure (1)..(784): unsure at all n locations
nnnnnnnnnnnnnnnnnnnnnnnnnnnnnnnnnnnnnnnnnnnnnnnnnnnnnnnnnnnnnnnnnnnnnnnnnnnnnccacgcgtccggaagacgacagaagggtacggctgcgagaagacgacagaagggtacggctgcgagaagacgacagaagggtacggctgcgagaagacgacagaagggggaagccggaaaccttaaggttttatatctgggaaaaaactcgcatccgcttcaatgactaagggaacgggaagtttcggaaagagaagaaacaagagtcacacactctgtgtcagatgtggccgtcgcagtttccacatccagaagagtcgttgctctgcttgtgcttatcccgccgctcgcaagaggacttacaactggagtgtgaaggcaatccgtagaaagactactggaactggaaggatgaggtatcttcgcaatgtgcctcgcaggttcaagaccggtttcagagagggtaccgaagccaagccaaggaacaagggagttgcttcatcagcttaaacttgtttttgagcatcaagggagagagaattctgagtttgttgttcacaagattactactcttaagtgtctgattatgactatctttttgtgtggtctttgcgtttttaaagttttggacatggatggatttcaatttgcaagtcttttaattctctttattctaaaaaaaaaaaaagggggaccntttngggccnncgtttggncgggnannnnnnnnnnnnnnnnnnnnnnnnnnnnnnnnnnnnnnnnnnnnn

SEQ ID NO: 119760 - DNA, 651 bp, Arabidopsis thaliana
  unsure (1)..(651): unsure at all n locations
cccacgcgtccgcccacgcgtccgcccacgcgtccgcccacgcgtccggtatcctagggttttctttgcacactactcgctccaatgggaaagggaacagggagtttcggtaagaggaggaacaagagtcacacactctgtgtgagatgtggtcgtcgtagtttccacatccagaagagtcgttgctcggcttgtgcttacccagctgctcgcaagaggacttacaactggagtgtgaaggccatcaggaggaagactactggtaccggaaggatgaggtatctccgtaatgttcctcgtcggttcaagactggattcagagaaggtactgaagccaagccaaggagcaaggcatcagcttcatcagcttaaagagccagttcgagtagtctctccaggaaggactaaagcttagcattttttgcattcaactagttgaagattacttttcatgtggatctcatacattatgttatgtgggttttgtttcttttgttattcacttataaagttttgaacttggtttaaatatcatcttccctttgtaacctttaaaatnnnnnnnnnnnnnnnnnnnnnnnnnnnnnnnnnnnnnnnnnnnnnnnnnnnnnnnnnnnnnnnnnnnnnnnnnnnnnnnnnnnnnnnnnnnnn

SEQ ID NO: 119761 - DNA, 669 bp, Arabidopsis thaliana
  unsure (1)..(669): unsure at all n locations
nnnnnnnnnnnnnnnnnnnnnnnnnnnnnnnnnnnnnnnnnnnnnnnnnnnnnnnnnnnnnnnnnnnnnnnccacgcgtccgaaagatttctgtagagcaaactttgatcatcccctgcatctgcggcaatgggtaaaggaacagggagctttggtaagaggaggaacaagtcacacacgctctgtgtgagatgtggtcgccggagctttcacatccagaagagtcgttgctcggcatgtgcttatccagctgccagaaagaggacatataactggagtgtgaaggcaataagaagaaagacaacaggaactggtaggatgaggtatctccgtaatgtccctcgaaggttcaagacttgctttagagaaggtacgcaagccaccccaagaaacaaagctgcagcttcgtcttcctaggcattgttcagtttgcgttttgccatctctttcttgctatgtagcttttttttttaattcgtttgtttatcttttttgctcttgtacttcctttactgtgcaatcctatttctgatagtgtgatcactcatcaatgaaatgcatccgtgctattactgtttaaaaaaaaaaacaaagnnnnnnnnnnnnnnnnnnnnnnnnnnnnnnnnnnnnnnnnnnnnnnnnnnnnnnnnnnnnnnnnnnnnnnnnnnn

SEQ ID NO: 119762 - DNA, 471 bp, Arabidopsis thaliana
gccagcactatacgactcttatagggaaagctggtacgcctgcaggtaccggtccggaattcccgggtcgacccacgcgtccgtacggctgcgagaagacgacagaagggtacggctgcgagaagacgacagaagggtacggctgcgagaagacgacagaagggtacggctgcgagaagacgacagaagggtacggctgcgagaagacgacagaaggggtctgaagccgtgtcctagggttttctttgcacactactcgctccaatgggaaagggaacagggagtttcggtaagaggaggaacaagagtcacacactctgtgtgagatgtggtcgtcgtagtttccacatccagaagagtcgttgctcggcttgtgcttacccagctgctcgcaagaggacttacaactggagtgtgaaggccatcaggaggaagactactggtaccggaaggatgaggtatctccgtaat

SEQ ID NO: 119763 - DNA, 453 bp, Arabidopsis thaliana
ctctcatcttcttgctcctttctcttctctctcacgcgttgctgttgttgactcttatttctctctgggtttccttaaaccttccgctacaatcttctcctcttacatgcgagcttctccgattctcaggttttgatagcggcttaatactcgcaattatggatttcgcagccaagaaattcatcaacaaccccaacgatgttgtaactgagttcatagagggtctggtagaaacttatcctggactccagtatttggatggttttcctgaggttaaggtggtgctacgagctgatgtctcggctgcaaaatatgacaaggttgccgttatctcaggtggaggcagtgggcatgagccagcacatgctggatacgttggagaaggaatgctaacagctgctatttgtggagatgtctttgcctccccaccagttgattctatccttgctggaa

SEQ ID NO: 119764 - DNA, 578 bp, Arabidopsis thaliana
aaaaaaggcgcgaactcaaaaaagaaataaataaaaccataatcatagaaatagagaatcctttttttagttttgtctcgtcaaaacaaatacacaagtaaaagatcttttttattttattttaatagcctggcctggtcagtccccagccgggcctttttttgttaaaattaaaaagactcatccgatggatttttagataaaaaaagatttgaaattaaaaaaaaaagtggaattgaattcgcttttactaattttcttaagtcaactctagttttttctaaattttttcagatttttttattacacccccgattactttgttcgacaaaaggttaatttatatgcaataattgcattgtagcgggtatagtttagtggtaaaagtgtgattcgttcctttaatccctttaatagttaaagggtctctcggtttgattaatcttccgatcaaaaattttatttcttaaaaggatttagtcctttccctttcaatgaaagattcaaggaagattatagattctcgtaatttatatccaaagactctaatcaattgtaaatttggattatgaaattcc

SEQ ID NO: 119765 - DNA, 951 bp, Arabidopsis thaliana
  unsure (1)..(951): unsure at all n locations
aacaatgtactatattcataatattggataaatatgtcctatcaccttctataacactttcattaagcattattaagtattttaacgatacttaaaattaatctaatatcaccttaanctcaaggccaggcaagcnnnaanaattttttttccctttcataannnnnnnnnnnnnnnnnnnnnnnnnnnnnnnnnnnnnnnnnnnnnnnnnnnnnnnnnnnnnnnnnnnnnnnnnnnnnnnnnnnnnnnncggccgccatggctctcagcctttcaaggctttgcggagaagtttggagatattgggagctttgggtggtttcgctttgaaattggggattgaccagaagcagggcaacttagagaagaacatgaagaagagagcaatcgagctccggcggatcttcactcgtctcggacctacttttgttaaattgggtcaagggttgtccacccgacccgacctctgtccacccgattaccttgaagaacttgcagagcttcaggatgctttgccaaccttccctgatgcagaggcatttgcttgcattgagagagagttggatttgtcgctagagaccattttctcgtctgtatctcctgagccaatcgcagcagctagtcttggccaggtttacaaagctcagctgaggtattcaggtcaggttgttgctgtcaaagttcaacgccctgggatcgaagaagccattggccttgatttttaccttattagaggagttgggaaactcattaacaagtatgtagacttcatcactaccgatgtccttacccttatcgatgagttcgcctgcagagtttatcaggagctaaactatgtccaggaggcccaaaatgccagaaggtttaaaaaattgtatgcagattaagcagatgttcttgtgcctgatatattctgggattacacgagccgcaaggtgctaacaatggaat

SEQ ID NO: 119766 - DNA, 643 bp, Arabidopsis thaliana
  unsure (1)..(643): unsure at all n locations
nnnnnnnnnnnnnnnnnnnnnnnnnnnnnnnnnnnnnnnnnnnnnnnnnnnnnnnnnnnnnnnnnnnnnnnnnnnncctcgcccacgcgtccgcaggaaagagagactccgttgatggctaccaccaccgtcgtatgcggcggaggaggagatgttgagggttgcgatggcgagagaagcctggatctgttaccggcggctctcttggagactattatgacgaaactcgatgttgcgtctctctgctcgttggcttctacttgcaaaacacttaagagctgtgtcactcgtgttctcaccttcactcccaacttccacatcttcaatgtttcattgtcaatggaaactgttagaccattgttgtttccgaatcaacaactttctagtctcaagcttgattgtggaaggcttggtaattcagctattgatatattggtacgtccttctttgagggagatttctcttcacaattgtcgggatttcagcggagatctcatctccgaaattggtaggaaatgcaaggatttgaggctcctatgtttgggttcagtagcagagaaagttggtcgaagtattagccgttgtgctttggaggatttacttaatggttgctcccatttagaggtcttagcactcatgtttg

SEQ ID NO: 119767 - DNA, 719 bp, Arabidopsis thaliana
  unsure (1)..(719): unsure at all n locations
cagctctcnnnnnnnnnnnnnnnnnnnnnnnnnnnnnnnnnnnnnnnnnnnnnnnnnnnnnnnnnnnnnnnccacgcgtccgcggacgcgtgggcggacgcgtgggcttctgtctttgtcgtataagagcaagagagtggtttgattcaatttttaaaattctaaataaaactccaaccgtgaatccagccatgaaactctttttagaaaatccttttttataacaaataattcctctgcttcggcttcttcttcgtttatttcaccttttttggtttctttagctcagaaaaagcccattctttttttctattcttgtttattttaatcatactgtgcgtttctacaaagtttgttcctttcttcttcaactctctcactcacggtcacagactcacagagatctgtttctttcttttatttttgctttcactcttctcttccagtgagagagagtgagagaaaacaaaatggtgaagcttttgttagtagcgtttgttgtggctggtataatactgggaactcaagcaaatgaatatttagatttcaatgtgacagaaatagatcgcattgaggaattagagtttggattttccaaatatagctccaatttgaaccctttaatggttggtctcacccttatcagaggagctgattctggagctggtactttctctatgcttctgtcactagctagatctctacatgtctctctttct

SEQ ID NO: 119768 - DNA, 561 bp, Arabidopsis thaliana
gggccaggcccacgcgtccgtactgatattccccgtatcaactcataactgtccctcaacagttgcaatagtctttcggaatgctcctctctaatctcacaaaggcctctccgatctctcgctctctcagatctcctccatggatcccgcttcttcttcttcctcaaatcagcgcaaccgaatcgtctcttctggggaaagaccagtgatggctgataatggcgtccaacaggtttctcacgacgatggaaggaacattgtttcttcgtcttatagttcttccgtggttccttctcctgatcccgctccttattataacgttcttcaaacccctaccaatctctatcactacgattgggatatcgcaaattctggctatgcacaaggcatcaatacttgggatggatatccacgatatgctactactacccctgaagccatgcatgtgccaccggttgtctacaatgacaattcatctcttatgtaccaatatcctgggtatggatttaacccttatcctcctgtaatgctggagggacaatttcaggctccccagcttat

SEQ ID NO: 119769 - DNA, 359 bp, Arabidopsis thaliana
cggacgcgtgggtttatagacgtaattaaggaaacagattgggcaaaagatgtcccactaattaccatgtactataagtttattttctctctttttaggtctccatatcaattattaaaaagtgtgagccacacaattattaatttcaatttaattaacctttgtttgttatttcttttgattaagtttgcaacataaacataactaagaaaaaatcattttaaaatttattaattattcaatcaaattatatacatataatataaatattaaattttaatagattgtgaaataaattaaattgatgatggaaaaaagattcatgatcaaaatcaaaataaaattaataagtgtcagta

SEQ ID NO: 119770 - DNA, 948 bp, Arabidopsis thaliana
aaattttaaaatattcaataataataataaaacttattaaaattaagctagaatttgagaccaagttttatgtcaaagttcaaaaaacctaaacctacttttttcgcaacactccttaaaataaagtttctattaaactaaaagaataaggggaaggaagaaagcgaatcgatgtgctaattccccatcctcaaattagtccttcccaaggattgttgtctcaatgaataattgtaggagttaaatcttgatagaattaaaaaaactacaaaaaaaatccagaattttgtgatttctgggcttaaacaaaaggattcgcaaataaaagcgctaatgctacaaccaggccataaattgttaaagcttccataaaagccaaactaagcaataaagtacctcgtatttttccttctgcctcaggttgtctcgcgataccttcgacagcttgacccgcagctgtaccttgaccgactccaggtccaatagaagcaagcccaacagccaacccagcagcaataaccgaagcagcagaaaccagtggattcatgataagttcctcacaccaaaataaagaaatagttaatgatacaatcatccaatgacttaggacgtaattctaattaagtaatcgctaagattaatccagccaaaaaaaccaaaaactttaattgaaatatgaaataatataataaaattattgaatcataagaattactttgatagtagttcctatccgcgggatttttaaaaatccataatatatatacgacttttttatgccattttttttatgaaccattctttgaattcttcgttctttttttatcattttttcagccaattcacagataaaaaggaagcacttctaatcgaatccctatctaaatctaaatagaaattcccaaaaatagtagagcagattcagattatatagatctttaactcatt

SEQ ID NO: 119771 - DNA, 445 bp, Arabidopsis thaliana
  unsure (1)..(445): unsure at all n locations
ctngngtnaggcgtnnattctttttgggtttttcactttattttataaaggggaatttgaaagcgagacccgtttctttatttggtataactacttgagccggatgagaggaaactttcatgtccggttgtgaggggggagatcttatagtggaccctatcccaatttttcttttgctaggcccataactaaaaaacctactttcttacgattacgaggttcatttgaatatgaaattcaatcctggaaatacagcatcccacttttttttactactcaaggtttcgatatatttcgaaatcgagaaatttctactggggcgggtgctatccgagaacaattagccgatttagatttgcgaattattataggtgattcgttggtagaatgtcaacagttaggaaaagaagggcctacggggtatgactgggaagatcgatcaatt

SEQ ID NO: 119772 - DNA, 960 bp, Arabidopsis thaliana
ctggatcctaaaattaaaatagaagattgaggtgaatcataaatccaaaggaggtttcatggccaagggtaaagatgttcgagtaacaattattttggaatgtaccagttgtgttcgaaatgatattaagaaagaagccgcgggaatttccagatatattactcaaaagaatcggcataacacccctagtcgattggaattgagaaaattctgtccctattgttataaacatacaattcacggggaaatcaagaaatagatcaaattgagtgcttgtatgtcaacttttattttaagaacaggaataatgctagtatctatatattattacatatatataaatataaacaaataaatcaatagaaagaaatctaatccgatattcttaattctatatagaaattctatcctatatagaaatagaaatcgtttttattttgatccgatcaaaataggattttagagataaggaataaaaataaaaattatgaataaatctaagcgactttttactaaatccaagcgatcttttcgtaggcgtttgcccccgatccaatcgggggatcgaattgattatagaaacatgagtttaattagtcgatttattagtgaacaaggaaaaatattatctagacgggtgaatagagtgactttaaaacaacaacgattaatcactattgctataaaacaagctcgtattttatctttgttaccttttcttaataatcagaaacaatttgaaagaagtgagtcgactcctagaactactagtcttagaaccagaaaaaaatagacttatttttcaattgaataacaattccaatctgaaggaattaaaaaagagattaatgttttgttcaaaaaatccaatcaagaatgcggccgcgaattcgatatcaagcttatcgataccgtcgacccgggggaggggcagtgcaaatcaatggggggggggggggc

SEQ ID NO: 119773 - DNA, 850 bp, Arabidopsis thaliana
  unsure (1)..(850): unsure at all n locations
gatacttcagctctatacgactcattatagggaaaggtgggtccccttgcaggtcccggtccggatttcccgggttccgaccaaccgcgtccgtagcggggagaacaacagaagggcaggttgacaaaatcagatttccgtgagccggtgaacatcggaagcgatgagatggtgagcatgaatgagatggctgagatggttctcagctttgaggaaaagaagcttccaattcaccacattcctggcccggaaggtgttcgtggtcgtaactcagacaacaatctgatcaaagaaaagcttggttgggctcctaatatgagattgaaggaggggcttagaataacctacttctggataaagaaacagatcgagagagagaaagcaaagggaagcgatgtgtcgctttacgggtcatcaaaggtggttggaactcaagcaccggttcagctaggctcactccgcgcggctgatggaaaagagtgaagttcaccaaagtataagtcaagctcaaatatggccttttaagttcagctgctttctgtaggaaggctcagacttccactgataggtttgagatgtggggagatgggcttcagacccgttcttttacctttatcgatgagtgtgttgaaggtgtactcagatgcttggcctgcagagcctcaagatgcttatggtttggagaagcttgctacggaggagttgtgtaagcattacaacaaagattttggttccttctattctgctnnnnnnnnnnnnnnnnnnnnnnnnnnnnnnnnnnnnnnnnnnnnnnnnnnnnnnnnnnnnnnnnnnnnnnnnnnnnnnnnnnnnnnnnnnnnnnnnnnnnnnn

SEQ ID NO: 119774 - DNA, 959 bp, Arabidopsis thaliana
ccatacgactcaccttagagaaagcacccacgcctgcaggtaccggtccggaattcccgggtcgacccacgcgtccagccacgcgtccgtacggctgcgagaagaaacaaaagggggaggtggtggtggaggtagccgcggaaatggatccggctatggaaaggtggaagggagaaggctccagctgctttctgtaggaaggctcagacttccactgataggtttgagatgtggggagacgggcttcagacccgttcttttacctttatcgatgagtgtgttgaaggtgtactcaggttgacaaaatcagatttccgtgagccggtgaacatcggaagcgatgagatggtgagcatgaatgagatggctgagatggttctcagctttgaggaaaagaagcttccaattcaccacattcctggcccggaaggtgttcgtggtcgtaactcagacaacaatctgatcaaagaaaagcttggttgggctcctaatatgagattgaaggaggggcttagaataacctacttctggataaaggaacagatcgagaaagagaaagcaaagggaagcgatgtgtcgctttacgggtcatcaaaggtggttggaactcaagcaccggttcagctaggctcactccgcgcggctgatggaaaagagtgaagttcaccaaagtataagtcaagctcaaatatggccttttaagttcagcaaaatgtttagatatatttttaggtagcttcctattaaaaaagcaataataagtgttttggattttggttccttctcttctgctaatccttgtttatgtttagttgaaaaagtttgcttgcattgttaagtctgttatcatattattgtggtcctttcattcacagtatgtatgtttatcatcatagtcaagttgatgtcgtggtcctctcacggaccagtacaagtaagtggcttgtgttttttcttgc

SEQ ID NO: 119775 - DNA, 298 bp, Arabidopsis thaliana
cggagctctctatcgtcccgggtcggatcatgggttcgttaccgcatacaatctcacagtcaaagaagcttcgatttctcccaatcagccggaatttcatctccggtgagattccagcgagtctaagcgagcttcggggactcaaaacgcttgatctgagctataatcagctaaccgggtcgatccctccgtcaatcgggtccttaccggagctatccaatctgattctatgtcacaatcacttgaacggatcaattcctcaattcctctcacaatccttaacccgaatcgatctcaa

SEQ ID NO: 119776 - DNA, 378 bp, Arabidopsis thaliana
gaaacaagttgtggctcttgtaggttgctctggaaaagttgaggatggtaattctgttcgtccccagcctcaagttagttgtccggcgtcgatctctgtggttcctggacacgttgttactcctgatgtaagagaaactccaggaactgatcaatacaatactgtgcgggcagatggtaaccataacacaactaagactctggaggatgaaacaaatggtggttctgtttccataaacggttctgttcatgcaccaaacctgaatcaagaaagtcatttccttgatttccctagtcctacacctaagtcgagccctgaagacttggaagctcaagcggcggagactatccagtctctgtcttcatgtgttctggtcaa

SEQ ID NO: 119777 - DNA, 846 bp, Arabidopsis thaliana
ccagctctaatcgactcacttagggaaagctggtccgcctgcaggtaccggtccggaattcccgggtcgacccccgcgtccgcggacgcgtgggctctcatcaaaagcttttctccttgattttcgcattctttagagtcttaacgcaaagatgagacctcctctaactggaagtggtggtgggttcagtggtggaagagggcgtggtggatacagtggtggtagaggtgacggtggattcagtggtggtcgaggtggcggtggtagaggaggaggaagaggtttcagcgaccgtggtggtcgcggcagaggaagaggaccaccacgtggtggtgctcgcggcggcagaggaccagctggccgtggaggcatgaaaggaggaagcaaagtgattgtggaacctcacagacacgcaggagtgttcattgcaaagggtaaagaagatgcccttgttaccaagaatttggttcctggtgaagctgtctacaacgagaagagaatctctttttagaacgaagatggaaccaacgactgtattccagagtttggaatccctttcccgtccgaagttggctgctgctattcttggtggtgttgataacatctggattaaacctggtgctaaagttctataccttggtgctgcttctggaaccacagtctctcatgtgtctgatcttgttggccctgaggggtgtgtgtacgcggttgagttttcttatagaagtgggagagatttggtgaacatggtaaagaagagaaccaatgttattccattattgatgatgcttgtcccccagcttaatacagaatgctttgtagcatggttgatgttatcttttctgt

SEQ ID NO: 119778 - DNA, 1289 bp, Arabidopsis thaliana
taggaacaactatagaagattatgacgtcgcacgcacgcgtacgtaagctcggaattcggctcgagtctcaagagctctggtcttgccttgtcttgctcttggagaaacaacaagtgttcatcgtcgaaggtgatctcaacgatggaccactcttacgtaaactcttcgacgttgtccctttcactcacatccttcacttagccgctcaagccggagtacgttacgctatgaaaaaccctcaatcttacatcgcctccaacatcgccggattcgttaaccttcttgaagtggctaaagcagctaatccacaacctgcgattgtttgggcttcctctagctctgtttacggtctcaacactgagaatccattctctgaagaacaccgaacagaccaaccagcgagtctttacgcagcaaccaagaaagctggtgaagagatcgcacatacttacaaccacatctacggtctctccttaaccggactccggttctttacggtttacggtccatggggaagaccagacatggcttacttcttcttcactaaagacatcctccacggtaaatcaatcgacatttacagaactcaggacaatcaagaagtggcgcgtgacttcacctacatcgatgacatcgttaaaggttgtgtcggtgcgttagacacggctgagaaaagcaccggaagcggcggaaagaagcgaggacaagctcagctacgtgtttacaatctaggaaacacgtcccctggttccggttgggagattggtctcgatcttggaaggattgttagggacaaaagctaagaagcatcttatcaaaatgccaagaaacggtgacgtgccttacacgcatgctaatgtgagtttagcgtataaagatttcgggtacaaaccgacgacggatctcgcggcggggctgaggaagttcgtcaagtggtacgttggttattatgggattcagccgagggtaaaaaaggaaacttctcacgccgaagattccgcttaataattttctctctaccaccatctctctcatcatcacatgcttgtttatttttcttacaaaaaaaaaaaaaaatcatttacagggacagatttctggatttttctttatttaaaaaatgctccccaaaaaaaaaaaatcattaatggttttgtggtggtcccttttttaaggggatcaaagtgtgggaattaaatggttccaccggaaggtaataaaagccggcccccgattcggatatccagcctatgcgataccgtcgacccccaagggggggcccggtccc

SEQ ID NO: 119779 - DNA, 1506 bp, Arabidopsis thaliana
  unsure (1)..(1506): unsure at all n locations
nnnnnnnnnnnnnnnnnnnnnnnnnnnnnnnnnnnnnnnnnnnnnnnnnnnnnnnnnnnnnnnnnnnnnnnnnnnnnnnnnnnccacgcgtccgccgaccagcaaaatttctctcttcttctttataatcatcagatcgttccttcacttgattttcagggctcgaaatctctctcaaaaccctctcaaaaattccaaaacataatctcatttctcaagtttaacattttcgagcccctttagaacagtggagaaagatccacacagataaaaaaacgggtgagttttatatcaaatagacgaaaatgcccctgtcggcgacggcggatacaagcaagacggtgaagctggagaggtacaatagctacctccggaagattcacagcaccaaagttctcaacgcttcttctaaagttcttttccgagcaacgcttctcgtagctcttgtcctcgtcctcatcttcgccatcaactaccctccactctccgatagccgcgccgccgcagcacaccacctccaccgtcgtagcttcttatccaccggactcttctcctcctcctcttcttcctcctctatcggtggagccgcgtgggaaaagcgcgttagacaatcctcaacagccaaacgaccacacggtctctccgtcctagtcaccggagctgccggattcgtcggatcccactgctcacttgcgctgcgaaaacgtggcgatggagtcttaggattcgacaacttcaacgatttctatgacccatcactcaaaagagcaagacaagagctcttggagaaacaacaagtgttcatcgtcgaaggtgatctcaacgatggaccactcttacgtaaactcttcgacgttgtccctttcactcacatccttcacttagccgctcaagccggagtacgttacgctatgaaaaaccctcaatcttacatcgccttcaacatcgccggattcgttaaccttcttgaagtggctaaagcagctaatccacaacctgcgattgtttgggcttcctctagctctgtttacggtctcaacactgagaatccattctctgaagaacaaccgaacagaccaacctagcgagtcttttacgcagcaaccaagaaaagctggttgaggagatcgcacatacttacaaccacatctacggtctctccttaaccggactccggttctttacggtttacggtccatggggaagaccagacatggcttacttcttcttcactaaagncatcctccacggtaaatcaatcgncatttacaggactcaggncaaatcaagaagtggcgcgtgacttcacctacatcgntgncatcgttaaaggttgtgtcggtgcggttgacacggctgngnaaagcaccgnaagcggggggaagaaggnaggcaagtttagnttcgggtttcaatntngggaacaggttccttttccggttggnggntggttcgcctttgaggggttttnggcaaaantnnggggnttttttaatccagaangnn

SEQ ID NO: 119780 - DNA, 1015 bp, Arabidopsis thaliana
  unsure (1)..(1015): unsure at all n locations
gccggcacgccggcaggnaccggnccggcttttgaagnncgtccatcccgnccgcggacgcgngggcggacgcgggggcggttnacggnccanggggaagaccacacaaggcnnacnncntctttactaaagacatcctccacggcaaatcaatcgacattaacagatttcaggattctccctattggntgttgggccccaccnacatcgatgacatcgaaaaaggcccnngcggggcgtgagacaccgctcatttaaacaccggaagcggcggaaagaagcgaggacaagctcanctacgtgtttacaatctaggaaacacgcccccggttccgggtgggagattgggctcgatcttggaaggaatggtagggacaaaagctaagaagcatcttatcaaaaagccaagaaacggggacgggccttacacgcctgctaatgggagtttagcgtataaaaggttttcggggacaaaccgacgacgggtctcgcgggcggggctgaggaagttcgccaagtggtccgttggtttttatgggatcccgccgagggtaaaaaagggaacctctcccgccgaagatcccgcttaataattttctctctaccaccatctctctcatcatcacatgcttgtttatttttcttacaaaaaaaaaaaaaatcatttacagggacagatttctgtatttttctttatttaaaaattgctccccaaaaaaaaaaaatcataaatgtttttgtggtggtcctttttttagggggatcaaagtgtgggaattaaattgttacagctgtatgttataatagaaagatatatagaaatgaggagaggaaaaaaaagaagaaaggggtagaagaattgaaaatatatgtgggattgttatgtaataaatgaaataggttatgatcttgctggaaagtgtttagagccgatcttagccgttggatttttataatcaaggaatgaaacctgtgatccattattataaaaaaaaaaaaaaaaaaaaggccgggg

SEQ ID NO: 119781 - DNA, 906 bp, Arabidopsis thaliana
agtagatagaaggttttttttaatgagtccgcttttatgttagttcgtactatacaattcctttgtttgtgagaaaattttctcacaaaagaaaaggtggaggaaataaaaagagttagagaatggattactacctatgccaagatcgcgtataaatggaaattttattgataaaacctttacaattgtagccgatatcttattacgagtcattccgacaacttccggagaaaaagaggcatttacttattacagagatggtgcgatttgattatcattattttttttctcgccgattttgattggaatagaaagaaaaacgagtattgaaaaaaaatctacgcttttgaaggtgaagtttataatataaaaaaaacaatcccttctgtcatgtatccacgattaatgcagccttagatgcttcaattgtgaattatagtattgagcagagggtttttacctatggttcccgtattacagatcaatcctactacactaatacaatatacgaataggaggcataggggaagaagcactacgccgagaaatcaacaacacgaaaactttcttaaaaatgattccctttctttcttcttcttcgttgggattgggactaattaaaatggttggaacaataaacatccatctcgttcgtattttggatacccgtataaccattgaagactgttgaagtgactaattcctggaaacttaggggcgttgagaacaaagaaatttttagagtttccttttttatttttatctagcatgaacccacttggtagtaagaaaagatcttttgcaagaaggttggctagggatttcttgtaaacacattagcaccgcttagctcataccgacatcacatttttacatatattattttcattatgcacctaaaggagg

SEQ ID NO: 119782 - DNA, 419 bp, Arabidopsis thaliana
aaacaaaatgcaaaatattaagaaatctttatatgtttttttatctgtttatacattttatgccttttgaatttaatttgtaaattctactacgtctttttacaaaaaaaaaaatcacaaagattttttacatttaattatgttttactgtttaaattttttttatacgaaaacaatttcagaaaatttattcgtgcaattgtataattttgattactattttattggggtattataaagtttacgttgtcatttctggtatgtctgtaatcaatttacattcattttgtacgcatcaatttactatgtgtaaatacatttttaccattttattttcattgtatgttgaataacatgtaaatattaataatcagactattctcaacataaatgtattaatgtgcatgggtcataatctt

SEQ ID NO: 119783 - DNA, 963 bp, Arabidopsis thaliana
  unsure (1)..(963): unsure at all n locations
aaaaaaaaaaaggggnaattctatgggggctcccccccgactcnatagggggacagctggtacgcctgcaggtaccggtccggttttcccgggtcgacccacgcgtccggttttcttcttctcttcttctttgggtgttccttccaccaacggcagaaatcgatttggcttaaatctccccctcctttcgatctctctgatcgccgccgggaacattcaatttcccgggagttcaacaaaaaaaaaactctccgtttttatttttccccctttttcaccggtggaagtttccggagatggtgtcacccgaaaacgctaattggatttgtgacttgatcgatgctgattacggaagtttcacaatccaaggtcctggtttctcttggcctgttcagcaacctattggtgtttcttctaactccagtgctggagttgatggctcggctggaaactcagaagctagcaaagaacctggatccaaaaagagggggagatgtgaatcatcctctgccacctatcttaaaaagcttgtaaagaaaaaccccggccggcccaggttgaaataacaagtttatggaatgggggcgcattttggacgccgggaaatcctcccaaaaaaaacaagggtttttatttggtttatgtcttcccccagtggggaccacattatggggggaggcgccaaaagcctgaggcgccccttccaggttctcgggccaattctaatgaggttagacccggaaaaaccacccgcgaatgagaaaccggggcgagaacagaaaaaaaaatcggggctcacttgaacacttaagcccctcaaacatttttttccccccccacatgatccctcctgtttttttctcccgcgggccactcttgaaaaaataggcgcagatacttcccacgggtgcggtggggggatctctccttctaggaaatttggagaaagcgccgcccccgctt

SEQ ID NO: 119784 - DNA, 611 bp, Arabidopsis thaliana
  unsure (1)..(611): unsure at all n locations
tcttctttgggtgttccttccaccaacggcagaaatcgatttggcttaaatctccccctcctttcgatctctctgatcgccgccgggaacattcaatttcccgggagttcaacaaaaaaaaaactctccgtttttatttttccccctttttcaccggtggaagtttccggagatggtgtcacccgaaaacgctaattggatttgtgacttgatcgatgctgattacggaagtttcacaatccaaggtcctggtttctcttggcctgttcagcaacctattggtgtttcttctaactccagtgctggagttgatggctcggctggaaactcagaagctagcaaagaacctggatccaaaaagagggggagatgtgaatcatcctctgccactagctcgaaagcatgtagagagaagcagcgacgggacaggttgaatgacaagtttatggaattgggtgcaattttggagcctggaaatcctcccaaaacagacaaggctgctatcttggttgatgctgtccgcatggtgacacagctaccggggcgggcccaaagttaaggctcaatnaagnttaggcaaataaaggtaagcttgaaacggctcgggttgc

SEQ ID NO: 119785 - DNA, 793 bp, Arabidopsis thaliana
tctaactccagagctggagttgatggctcggctggaaactcggaagctagcaaagaacctggcatccaaaaagagggggagatgtgaatcatcctctgccactagctcgaaagcatgtagggagaagcagcgacgggacaggttgaatgacaagtttatggaattgggtgcaattttggagcctggaaatcctcccaaaacagacaaggctgctatcttggttgatgctgtccgcatggtgacacagctacggggcgaggcccagaagctgaaggactccaattcaagtcttcaggacaaaatcaaagagttaaagactgagaaaaacgagctgcgagatgagaaacagaggctgaagacagagaaagaaaagctggagcagcagctgaaagccatgaatgctcctcaaccaagttttttcccagccccacctatgatgcctactgcttttgcttcagcgcaaggccaagctcctgggaaacaagatggtgccaatcatcagttacccaggggttgccatgtggcagttcatgcctcctgcttcagtcgatacttctcaggttcaatgtccttcggtcctcctgtttgcttaatcaaggaaaatcatcaaccggtttgcttcttgcttccgcttaaaagaaaagtctccatttgttttgctctcctctctttctcggctttcttagtcttatccttttgctttgtcgtgttatcatcgtaactgttatctgttgaacaatgatatgacattgtaaactccaattgcttcgcgcaatgttatctattcacatgt

SEQ ID NO: 119786 - DNA, 1065 bp, Arabidopsis thaliana
  unsure (1)..(1065): unsure at all n locations
nnnnnnnnnnnnnnnnnnnnnnnnnnnnnnnnnnnnnnnnnnnnnnnnnnnnnnnnnnnnnnnnnnnnnnnnnctttgggttttttttttagtattactgcaaaatgcaaactaatccatttcttcttattttctcaaaggttcatatctacattgattgttattgactgaatcagctgagcagattaaacaaaaagctgaactatgagaatatttaattgtttcttcaggaatataaaggaaccccaaaagctctctttaatgtgcaatcaaatctatgagcttctgcaccagatactgctaattccaagatattggatatatcttcactttgcggatggaaccgatcaccagatacaaacgctgaaacgcaatccttgatcttaattgatgaccatccgggctctttgatcacgccttttgctttcatattctttcttacatttgcagcttcttccaagttccctgtgcttgaatatatattggctagtgttacaagtgcagttgcacaagtaggatccagctctagaatcctctcagccgcccttcttccacgttcagtgtctcctttcgccttacacgcattgagaagtgtggtccagactacatcgtccttcttccatggcatctcattgatcatctgctctgcaacacttggccggcctgctctacacagcagatcaaccatacatccatagtgttccttggttggtctgataatatacttctcttgcatcaagttgagatagtgaaaaccaaggtcatgatgtcctgaatgagtaaagggcgagagaatgctgatgaaagttacagagtcgggtctgagaccaaccttcagactcttctcaaacagatctatagctttttaggtctttccatgttctgcatatccattgatcaaagaagcaatatcatctctgtctatttctgcgaatactttgaagcttcttcgatacttccacattttgagtacaaaaaaaaaaaaaaaaagnnnnnnnnnnnnnnnnnnnnnnnnnnnnnnnnnnnnnnnnnnnnnnnnnnnnnnnnnnnnnnnnnnnnnnnnnt

SEQ ID NO: 119787 - DNA, 841 bp, Arabidopsis thaliana
  unsure (1)..(841): unsure at all n locations
nnnnnnnnnnnnnnnnnnnnnnnnnnnnnnnnnnnnnnnnnnnnnnnnnnnnnnnnnnnnnnnnnnnncaaaactctcccacgcgggctcccgatttctccaagcagccatggctccgaaatcgaaagaaaaatccaaaacatcgaattcacaaccacctccagcaatcgaagatctcttcacttccctccaccaacatatcaaggatactaaatatgaagaagccgtcaaggtcgctgatcaagttttgtcgattgtacctaccgatgaggatgcgatccgatgcaaagttgtggctctgataaaagacgataagttcgatgattatctaatcaaagacgttaagatcaatggtgctctctccgtcattaactcgttccagaagcttccaatcgatctaggttttcacaaggcgtattgcttataccgtgtaaacaagctagatgaggctttggtgtgtttaaaaggtctcgagagagatacagatactttggttttggaggctcagattttgtaccgtttggggaaagcagatgcgtgtgtggatgtgtatcagaaactgaccaagtcccagattgagacgttagaggtgaatttagtcgccgggttgatttcagctggaaaagcttctcaagtgcagaaaacattggagagtttgtagatcaaaccaactagtagttttgagttggcttataatactgcttgctctttgattgaaaacaataactatgctgatgctgaacaacttttgctcactgccaggagaattgggcaggaaaaccctcaatgatgacgacatctctttaaccgatgaagaaattgagatttgtgctggccccca

SEQ ID NO: 119788 - DNA, 512 bp, Arabidopsis thaliana
  unsure (1)..(512): unsure at all n locations
atttacatcatcacttgatttaaaacaagtaagtagataagtggagcataagaaaaccacctactactatgagacacaaaaagggagaaaaagaagaccacccaactacaaagtctacaatatctgaaatttccaagaaaaaatctaatattaccgaaaaacaaaagaaagatttacaaaacctaaatctattgactaatcaagaagaaaaagtcaataagaatattgaactctgtgatctcggtctctaagaatcccattgtacagagccatccggttcgctggcatggtagagattctacaccatagaaccggtctttccccggtttagtcactggcttcggtacgcttttccgggtcaattcccccctccgggacttcttccccggtacctttcggatctttcacattatccgcgaaccgcactttccttatcttcttccccggtttcctcgtcccctgagccagaaaccttaaattccngggaattttcaaaatccggcngggnattt

SEQ ID NO: 119789 - DNA, 662 bp, Arabidopsis thaliana
acctactaaaacatatggcaaggctctaatctcccactagagcatactatctaacagaattattatcactataagctaacaatcacttaccggcgatcacagagaacaaggtctccaccgtcgaagcaaataaagcaaacatcttcttccttgtcttccttccgcggcggcggtgggggtggacgaatatgcaacggcgtattagcctgtgcccttggaggcctcccccgatttccgtttattggggcagcttcatcaaaaactttaacctcgtgctcattggacataggcacagcaaccgccccagcaaccgtggaggcaggtacagagagagcaggaacttggttaacaccgatctcttcacattgatcaactctcataagatcgattcctctgacggaactctcttcgcgaccagccaaagaagccaactccggcacgccttgctggagttgcttctgttgattctccatgattagtgaagaatttgaaaaaattgtgagcagtacttgcagatcaactagtgaaatagaaaccctaatctgaggttctttggggattttggcgatgatgaatgatgatgatgatggagagaagtcatgggtgatgtgtttagaacgcgaagaaaagtgggaagaaaaaatcatatggacttttttttt

SEQ ID NO: 119790 - DNA, 695 bp, Arabidopsis thaliana
  unsure (1)..(695): unsure at all n locations
agcaaatctctaagacttgttctcattttgtttgttcaaaatccctttaaaaaaaaacacaatgcaggcttaaattatgtccgtttagtcgctctcttcacagtcctgacctctctcaactctcacaacattaccaaatacatcccataaaaaaacaattctttaaaaaaaaaaattttgatataaacagaaaaaacatttaatggaggctgcaaaagtttacacacaagatggcaccgtcgacctccaaggccgtcccgtcctcgcctccaagaccggtcgttggagagcttgctctttcctcctcggtatatgttttcgcaaacctcagataactattttcatctatagataacttgaaaaatataaaaacataaatctttatgtagtcttttgtgtctttatgtgtgtgtgtgcgagaagggtatgaagcgtttgagaggatggcgttttatggaatagcgtcgaacttagtgaattatttgactaaaagacttcacgaagatacgatctcttcggttagatatgtgaataattgggccggtgcggtttggatcactcccatagccggagcgtacatcgctgactcatacataggtcgcttctggacttttactgcctnctctctgatctacgtcctagtattaattctacagtctcttttatttcttatggttaaaatacgaattaaactc

SEQ ID NO: 119791 - DNA, 856 bp, Arabidopsis thaliana
  unsure (1)..(856): unsure at all n locations
tctaaagacttcacgaagatacgatctcttcggttcgaaatgtgaataattgggccggtgcggcttggatcactcccatagccggagcttacatcgctgactcatacatcgctcgctcctggactttgactgcctcctctctcatctacgccctggcgatgattctcttgacattggcggtaacaggaaaatccctaggaccgccatgcgaactcggggtatgcaacaaggcctcctcgttacaagtaacatttttctacatatccctctataccatagctattggagccggtggaacaaaacctaacatttccacatttggagcggaccaattcgacagttatagcattgaagaaaaaaagcaaaaggtttcattcttcaattggtggatgtttagctctttcttaggcgcgttgtttgcgacattggggctcgtctacatccaagagaatctcggatggggtttaggttatggcatccctaccgtaggactcttggtttctctcgttgtgttctatattggaacaccattttacaggcataaggttatcaaaacagacaatttggcgaaagatttggttcaagttcctatcgcggcattcaaaaaccgaaagcttcagtgtcctgatgaccacttggagctttatgagcttgactctcattattacaaaagcaatggtaagcatcaagttcatcacacgcccgtcttcaggttcttggataaagcggccattaagacaagttcaagagtgccatgtacggtgacaaangtggaagtggcaaagcgtgtgctaggacttatctttatatggcttggcactttgatcccaagcaccttgtgggcacaagtcaacac

SEQ ID NO: 119792 - DNA, 373 bp, Arabidopsis thaliana
  unsure (1)..(373): unsure at all n locations
atcttactgtctctctctctctctctctatctctctctctctctctctcttctctagtctaatctgggcaaaaatctctactctaggaagagaagtttcctccttcgactttcttctttctcaatatgaatcccggaaaatcgggaacctctagcgatttcagctaatctttacttacctttcctttagttctgacaagaagtagcaatacccttttggagattcgatcgtattcgctgttttttttttgtgttttagctgtcttcgtgtctctnctactttgtgtttgancatggngagatctgattctagngatttntacaactttcnntaagncttctncctgntaacaaaaagngcactcctttgacgg

SEQ ID NO: 119793 - DNA, 1231 bp, Arabidopsis thaliana
gccccccctcggtttcgacggtatacataagcttgatatcgaattcgcctctctctcgattggtatctctcgctccgtccttcctcagatctgatcgtccgccggttttcacgatgccgtcttcctcctccgccgccgtcctcgtgttccttcttctcgtttcccttctcactcctacgttcgcatccgattcagatcacaagtatcaagccgaggagcaggtcaccctatgggtaaacaaagttggcccatataacaatccacaagaaacatacaactattacagtcttccattttgccgcccatctggaaacaatgttcacaaatggggtggtcttggtgaagttctaggtggaaatgagctgattgacagtgagattgcgataaaattcatgaagaatgtcgagagaagtgtcatctgtccgcttgaactcgatgaagctaaggtcaagcattttaaagatgccattgaatctagctactggttcgaattttttatggatgatctacctttgtggggctttgtgggggggctgcatcctgccaaaaatagtgaaaacggcaagcatgttctttacacacataagaacattgttgtcaaatacaacaaagaccagatcattcatgttaatctcactcaagacaacccaaggccattggaagcagggaaaaaaatggacctgacgtattctgtgcaatggattccaacaaatgtcacatttgctcgccgctttgacgtatatctggattatccgttctttgaacaccagatccactggttctccatctttaactcgttcatgatggttattttcctcaccggtttggtctcaatgatattgatgaggactctcagaaatgattatgcgaagtatgctagagaagatgatgatcttgagagcttggaacgggatgtaagtgaagaatctggttggaaacttgtgcatggagatgtgttcaggccagcaagtagtctagttctgctctcagcggtagttggtacaggtgcacagttggcgttgctggttcttcttgtcatattaatggccatcgtgggaactctctacgttgggagaggagcaatcgtcacaactttcatagtgtgctatgctctgacttcttttgtctctggttatgtgagcggtggaatgtactcaagaagcgggggtaaacattggatcaagtgcatggtcctcacggcttctctcttcccctttttgtgcttcggaat

SEQ ID NO: 119794 - DNA, 494 bp, Arabidopsis thaliana
ctcgctctctgtcgtttggtatctctcgctccgtccttcctcagatctgatcgtccgccggttttcacgatgccgtcttcctcctccgccgccgtcctcgtgttccttcttctcgtttcccttctcactcctacgttcgcatccgattcagatcacaaggtaagactcggatctccagtcgttttttcttttcttttaatgcagctcgaaatcgagcactgtgtccgtagatccgtgatttgcatggtgtttgcgattgaattttttttcatggatctgttcgtttacggattgctaggatcctcgagcttctattcattgtgatttaggcgtatcttttcgttgcaagtctaggcgtattttgtctattcattgtgatttaggcttttcacaatctcgattttaataagaaattttgatgttggtttgagattctcgttgatttctgcacgtggtagcctgtttgatgttcaaatacttggatcaacactgag

SEQ ID NO: 119795 - DNA, 462 bp, Arabidopsis thaliana
atctgattcgatctaccagaaaaatttctctctcgctacgtttttctcatggcatcggatcaacgtgacactgatttctccgctgaatcaccagatctagaagaagacggcggcggtggcggtggcgggaagaggaggaggagaaactgaatccgacgaagatgttgttatacccgaaccaaacgaagccgaagacgacgatcacgatcccgatcccgatccagaatacgaagatctgaattctccgtcaatgatttccagagctccggcgacgaaatcatcctcaggaaccgtaaccgtcgctcttcccgctggatccgccgtacctgtagcttcaattccatcagattccgatcagaaatggcaccgtatgactgaaatcgttcatcagagaccaccgattgatgattcgcgacgtttattccagagactatggactgacgaagacgagatcgaacttct

SEQ ID NO: 119796 - DNA, 601 bp, Arabidopsis thaliana
ctcgggccgacccatgcgtccactctctgctctgctcccaaatgttatcgtcctccggaagctccctcttatggcggagccgtacacatgtgcctgcaccgccgcctcggtcttcgccaccgcttaaagctctctcctttcccttctcttccagtttatggtttattcacagaaccacaatttctcctctttcgtgttcagctgaaagttcctcggagattgccctggcgcagagccagcctgcccctgatttcaatccctggtcggagttcgctcaaaatgtgtctggcgaatgggacggtttcggagcagattttacatgcgaagggcaaccgctagaactacctgaatcagtggttccagaagcctttagagaatgggaagtgaaggtgttcgattggcagacgcagtgtcccactcgtgcccagcccagctcactatcctttctttacaagtccatcaaactcctccccaccgttggatgtgaagctgatgcagccacccgttacagcatcgaccagaggatcatcgggggaggcaaatcctctgcatcagccttttcgtattctgtcactggctcctatgtcgctgtgtggccttt

SEQ ID NO: 119797 - DNA, 488 bp, Arabidopsis thaliana
gaagaaacttcacatcagcatcagaatctctctttctctctctctccttcttcacaggcaaaaaaacaccaaaccatttttctttcttcattgtgccgacacttctttcccctctctctctctctctccaccgccatggattcctcctatggcgccacaaagttccttctcctcctcttcctcaccacctccattgcgaccgcattacccgataacaaaccagtaccgggtcaaataaactcaaactcagtcctcgtagctctcctggactctcactacacagagctagcagaactagtcgaaaaagctctccttctccagaccctcgaagaagcagttggtaaacacaacatcacaatcttcgcaccacgcaacgatgccttggaacgaaacttagacccactcttcaaatctttcttgctcgaaccaagaaacctcaaatctttacaatctttattaatgttccacattcttcctaaacgaatcac

SEQ ID NO: 119798 - DNA, 926 bp, Arabidopsis thaliana
  unsure (1)..(926): unsure at all n locations
gcacgacgctctgtacgtccccccccccgccttatcctcaaaggcggtcactgccatcggtgggnagttgaagcgatgtgagaccttcgtatacccacgtggaaggggatgcgggaagcaattattgcgtacgcagggtttcccagtttaacgtagtaacagacgagcagttaattaatttaggcgncacaatatgaaaactatgacgtcgcatgcacgcgtacgtaagctggatcctttacaccgcccgcccattttttttctttttattttatagacgagataaatgttcatatcataagagtaatattcagacgtcttcagttcatcaagcaatttcccagtgatagactaaccagtcacagaagaagttaaaaaagaggggtaaaactactcatcacctgtaaaaaacacgatatgtactgtccacacgttgtatcgacggcaagtgacgattctgagcttggctgaacaacctgtccattcttccaaatgtaccggcgtaaggagttgggacatcctgagaagacaaacacatcaccggagcatctaagtaatcatgaaagttctccgtttattgcagcccgtcaaactggctccgattaccatcccgttctctatacattccatccacagatcaaaacgctggtgtgtctcctatcacctgagtttccacattgtgtagagatcaaacggcttcaacgaccttatgtcgataacctctggatcataccctttgttcaccagcgtctttgcagcctgcattacatggtacctcatccttgaatacgtcatgtatcgtgatgtgttcacctgggtctgaccatttctgccggacgcgtgggtcgacccgggaattccggaccggtacctgcaggcgtaccagctttccctatagtgagtcagatagatgctggcagtatcat

SEQ ID NO: 119799 - DNA, 695 bp, Arabidopsis thaliana
  unsure (1)..(695): unsure at all n locations
cagagttttcatttcacaagcattttccatcgaagacaaacagtaacaaaaagtaaaaaagggtaaaacacaatcaccgtaaaaaaagcaattactggcaaagttgttcgacggcagtgacgatctgagctggctgaacaaccgtccattcttccaatgtaccggcgtaaggagttgggacatcctgagaagacaaacacatcaccggagcatctaaggcggccgcgaattcgcggccgcgccaaccatcagtcaacgccgagagatctgattccccaactgttggatggggaggtcctgttggatatgtataccaaaaggcttatctagagttcttctgctcaaaggagaaattagatgcagtggtggagaaatgcaaagctttgccatcgattacttacatggctgtgaaccaaaggagaacagtgggtatcgaacactgcccaagctgatgtgaatgctgtactcttggggggtttccccggctaagggaatcatttcacccaaccattgccggtcccgctagcttcaacgcctggaagggtgaaccatttgagacttggtcaagaacctgggctacctttgtacccagaagccggcccttccagaaacttcccccaggggggaaaaancccaccattttggaaacntttgggggaaacggtttcccnnngggngaaattcccgggggtttc

SEQ ID NO: 119800 - DNA, 885 bp, Arabidopsis thaliana
  unsure (1)..(885): unsure at all n locations
nnnnnnnnnnnnnnnnnnnnnnnnnnnnnnnnnnnnnnnnnnnnnnnnnnnnnnnnnnnnnnnnnnnnnnnnnnnnnnnnnnnnnnnnnnnnnngggatgggaatatggaagttattatctatagaaaatataaatgctcatatcataagagtaaaattcagagttttcatttcacaagcattttccatcgaagacaaacagtaacaaaaagtaaaaaagggtaaaacacaatcaccgtaaaaaaagcaattactggcaaagttgttcgacggcagtgacgatctgagctggctgaacaaccgtccattcttccaatgtaccggcgtaaggagttgggacatcctgagaagacaaacacatcaccggagcatctaagtaatcatgaaagttctcgtttattgcagccgtcaaactggctccgattcctcccgttctcatacattcctccacaatcaaaacccggtgtgtcttcttcaccgagtttccaattgtgtagagatcaaacgggcttcaccgaccttatgtcgataacctctggatcataccctttgttcaccagcgtctttgcagcctgcattacatggtacctcatccttgaatacgtcagtatcgtgatgtgttcaccgggtctgaccatttctgcttcttccagattacatatgtattcttcatccggaatactctccttgaggttatagagcagaacgtgttcaaacagaatcacaggattctcacttcttatcgccgctttcatcaatcctttagcgttgtaaggtgttgagcaagccaccatctcgatcccagggattgactggaagtaagactcaagaggctgggaatgttcggcttcgagctggcgtggggcgtgcgggaatccgaattcc

SEQ ID NO: 119801 - DNA, 713 bp, Arabidopsis thaliana
ttgattttcccccccaaacttggttggaaatgggggaaaggttcccttgtttgggattattggtattacccaaaaagggctttattctaaaagtttctttcttgctccaaagggaaaaaattaaaatccagtgggtggagaaaatgcaaagctttgccatcgatttacttacatgcctgtgacaaaaggaaaccagtgggtatcgaacactgcccaagctgatgtgaatgctgtaacttggggagttttcccggctaaggaaatcattcaaccaaccattgtcgatcccgctagcttcaacgtctggaaggatgaagcatttgagacttggtcaagaagctgggctaacttgtacccagaagccgacccttccagaaacttgctcgaggaggtgaagaacagctactatttggtaagcttggtggagaacgattacatcaatggtgacatattcgcggtgtttgctgatctttgagaaaatcaagagacaactacagtatatcggtttcctactgctttcaagatttgcttttgtactttctctaaaatattgggattttgttttttacatctgtctaccataacagtattgatgtgcaagtaatgttattgataaaaaggcatcagtttcactaaaaaaaaaaaaaaaagggcggccgctctagaggatccaagcttacgtacgcgtgcatgcgacgtcaaagctcttctat

SEQ ID NO: 119802 - DNA, 640 bp, Arabidopsis thaliana
  unsure (1)..(640): unsure at all n locations
nnnnnnnnnnnnnnnnnnntatacgactcatatagggaaagctggtacgcctgcaggtaccggtccggaattcccgtgtcgacccacgcgtccgaaacaccggtgagtccgatgtgaatgcagttacttggggagtgttcccagctaaggaggttattcaaccgacgatcgtggatccagccagtttcaaagtctggaaagacgaagcgtttgagatttggtcaagaagctgggctaacttgtacccagaagatgacccttctagaaagttgctcgaggaggtgaagaacagctactatttggtaagcttagtggacaacaattacatcaatggtgatatcttctctgtctttgcttgatctccgagaaaaccaccggcgaagaggaaacattcgatttcgagatttgttttgtaccttttaaagttatttttgattcgtaataaccttactttgatgaatcaacaaaaacatcagtttgattgcaatgaaaaaaatcgccttagcggtttgttctttccaaaaaaaaaaaaaaaaaaaaaaaaaaaaaaaaaaaaaaaaaaaaaaaaaaaaaaaaagggcggccgctctagaggatccaagcttacgtacgcgtgcatgcgacgtcaaagctcttctat

SEQ ID NO: 119803 - DNA, 1211 bp, Arabidopsis thaliana
  unsure (1)..(1211): unsure at all n locations
agctctctacgactcactatttggaaagctggcacgcctgcaggtaccggtccggaattcccgggtcgtcccacgcgtccgcgaggctgttaaagcctatggaattcactttgcaacagaaatgtgcaaaaagattttggcccatggaatcacttcccttcatctctacacattgaacgtggacaaatcagctattgggatattaatgaaccttggtctgattgatgagtcaaaaatttctcgttctctaccttggagacgccctgcaaatgttttccgtactaaggaagatgttcgcccaattttctgggcaaaccgtccaaagagctacatatctagaacaaagggctggaatgacttcccacatggacgttggggtgattcacacagtgcagcatacagtacactttcggattatcagtttgcgcgcccaaaaggacgtgacaagaagcttcagcaagaatgggtcgtcccactgaaaagcattgaagatgttcaagagaaattcaaagagctctgcattggaaacttaaaaagcagcccatggtctgaattagatggactccagccagagacaaagatcataaatgagcaactcggaaaaatcaactccaacggtttcctgaccattaatagccaaccatcagtcaatgcagccaaatccgattctccagctattggatggggtggtcctggtggttacgtctaccagaaagcttatctggagttcttctgttcaaaggataagttagacacacttgtggagaaatccaaagcttttccttctatcacctacatggccgtgaacaaatcagagaattgggtatcaaacaccggtgagtccgatgtgaatgcagttacttggggagtgttcccagctaaggaggttattcaaccgacggatcgtggatccagccagtttcaaagtctggaaagtcgaggcgtttgagattttggtcaagaaagctgggctaacttcgtacccagaaggttgacccttctagcaaagtttntcgaggagggtnaagnaccagctactattttggaaagcttaggtgggcaacaattnccatcaattgggtgntaancntncnctggcctttgctttatttccgngaaaanccacccgccgaggggggaacaattcggtttcgngggnttgttttgaccctttaaaagnattttttgttncgaananccaccttngtngc

SEQ ID NO: 119804 - DNA, 584 bp, Arabidopsis thaliana
  unsure (1)..(584): unsure at all n locations
ccaaacttgcctctccaccaccacttcctctacctatctaattccgaatctggatttggatttggatctcatttcgattcaacgatgaaggtggttgataagatcaaatccgtgacggagcaaggccaaacagctttctccttcgagtttttcccaccgaagacagaagatggcgtcgagaatctctttgaacgaatggatcgattggtctcttatggacctaccttctgcgatatcacttggggtgctggtggatccacagctgatctcactctcgagattgcttctaggatgcagaatgttatctgcgtcgagactatgatgcatctcacttgtaccaacatgccgattgagaagattgatcacgcgcttgagacgattagatctaatggaattcagaatgtgcttgctcttagaggagatcctcctcatgggcaagataagtttgttcagggtgaaggtggttttgcttgtgctttggacctggggaatcacattcggagcaagtatggcggattaccttggtacactgtgctggtaactgagncancggtgtatgacngntgnctgcaacccgaactaca

SEQ ID NO: 119805 - DNA, 1457 bp, Arabidopsis thaliana
  unsure (1)..(1457): unsure at all n locations
nnnnnnnnnnnnnnnnnnnnnnnnnnnnnnnnnnnnnnnnnnnnnnnnnnnnnnnnnnnnnnnnnnnnnnnccacgcgtccgaacattttggaatctctctgtttactataaagcagtgagtagaagaacctgaaagaactcgcctttgtctctcattcttcttctccatttcgaaaagaagatgaaggtgatagataagatccagtcattagccgacgaaggcaaaacagcgttttccttcgaattcttcccaccaaagacagaagatggagtcgacaatctctttgagagaatggatcgaatggttgcttatggtccaacgttttgcgatatcacttggggagctggtggatctaccgcagatctaacgcttgatatagcttcgaggatgcaaaacgttgtttgtgttgagagtatgatgcatcttacgtgtactaacatgcctgttgagaagattgatcatgctcttgagactattagatctaatgggattcagaatgtgcttgctcttagaggtgatcctcctcatggtcaagataagtttgttcaggttgaaggtggttttgattgtgctttggatcttgttaatcacattcgtagcaagtatggtgattactttggtaatcactgttgctggttatcctgaggctcatccggatgttattgaagctgatggacttgctactcctgaatcttatcagagtgatcttgcttacttgaagaaaaaggttgatgctggagcagatttgattgtgactcagcttttctatgatactgatatattcctcaagtttgtgaatgattgtcggcaaatcgggattaattgtcccattgttcctggaattatgcctatttccaactacaaggggttcttgcgtatggctggtttctgtaagaccaagatacccgctgagctcactgctgccttagagcctattaaggataatgacgaggctgttaaagcctatggaattcactttgcaacagaaatgtgcaaaaagattttggcccatggaatcacttcccttcatctctacacattgaacgtggacaaatcagctattgggatattaatgaaccttggtctgattgatgagtcaaaaatttctcgttctctaccttggagacgccctgcaaatgttttccgtactaaggaagatgttcgcccaattttctgggcaaaccgtccaaagagctacatatctagaacaaagggctggaatgacttcccacatggacgttggggtgattcacacagtgcagcatacagtacactttcggattatcagtttgcgcgcccaaaaggacgtgacaagaagcttcagcaaggatgggcgtcccctgaaagcattnaggtntcaagggnattcaaagggtttcattggactttaaagngccntggcttaatnggtggcncngcnggcaaggcctantgnactggaatcacncangtcct

SEQ ID NO: 119806 - DNA, 509 bp, Arabidopsis thaliana
  unsure (1)..(509): unsure at all n locations
ctgggcaaaccgtccaaagagctacatttctagaaccaagggctgggaagacttcccacaaggccggtggggtgattcacgcagnctntcatatggtgcactctcggatcatcagttctcacgtccgcgagcacgtgacaagaagcttcaacaagaatgggttgtcccactgaaaagtgttgaagatattcaggagaaattcaaggagctctgccttggaaaccttaaaagcagtccctggtctgaattagatggactccagccagagacaaggataataaacgagcaactggtaaaagtcaaactccaaaggcttcttgaccatcaatagccaaccatccagtcaacgccggaggggtctggattcccccactgttgggtgggggaggtcctcgttgggtattgttttcccaaaagggttatctaggggtcttttggccctaaagggggaatttgattcccttggggggggattgcaaacttttgccaccgttattaaagggtgtgaa

SEQ ID NO: 119807 - DNA, 802 bp, Arabidopsis thaliana
  unsure (1)..(802): unsure at all n locations
nnnnnnnnnnnnnnnnnnnnnnnnnnnnnnnnnnnnnnnnnnnnnnnnnnnnnnnnnnnnnnnnnnnnnnnnnnnnnnnnnnnccacgcgtccgcggacgcgtccgcccacgcgtccggggtcacagtttcacagacacgcggctcctcgatggttgtcttccgccgacagccgccgcgtgtatgtccttcccatacggaatctgccacgttgcgtttgtataatctgcctgactagggctttagcagtgtataagagacgagacgagacgcgattcaccggagagtcaaagaggcaaggaggagaaagccaatggcacatgccacgtttacatcggaagggcagaatatggagtcgtttcgactcttgagtggccacaaaatcccagccgttggactcggcacgtggcgatctgggtctcaagccgcccacgccgttgtcactgcaatcgtcgagggtggctataggcacatagatacagcttgggagtatggtgatcagagagaggtcggtcaaggaataaagagggcgatgcacgctggccttgaaaggagggacctctttgtgacctcgaagctttggtgcactgagttatctcctgagagagtgcgtcctgctctgcaaaacacccttaaagagcttcaattagagtaccttgatctctacttgattcactggcctttccggctaagagaaggagccagtaagccaccaaaggcaggggacgttcttgactttgacatggaaggagtttggagagaaatggagaatctttccaaggacagtctcgtcaggaatatcg

SEQ ID NO: 119808 - DNA, 862 bp, Arabidopsis thaliana
  unsure (1)..(862): unsure at all n locations
nnnnnnnnnnnnnnnnnnnnnnnnnnnnnnnnnnnnnnnnnnnnnnnnnnnnnnnnnnnnnnnnnnnnnnnnnnnnnnnnnnnnnccacgcgtccgcccacgcgtccgggagactaactgtctcttttctatgtactgttgccaactacgagtatgggttttactggcacttctaccaggatgggaaaatcgaagctgaagtaaaacttactggtatcctcagtttaggagctctgcagcctggtgaaactcgaaagtacggtactactattgctcctgggttgtatgcaccagtccatcaacatttctttatcgctcgcatggatatgtctgttgactgtaaacctgctgaagcttttaatcaggtagttgaggtaaatgttagagttgacgagcgaggtgagaacaatgtccacaacaatgcgttttatgcggaagagaagttacttaaatctgaggcagtggcgatgcgtgactgtgaccctctctctgctcgccattggattgtaaggaacacaaggactgtaaacaggacgggccaattaacgggatacaaacttgttcctggttcaaattgtttgccattagctcgacccgaggcgaagtttctaagaagagccgctttcctgaaagcataatctctgggttacccgttacgccccagacgaaaaagtttcctggaaggaaaaattcccaaaccaaaacccacgggctggtgaaagtcttgccacatgggttgaaacaanaatcgctccctttggaanaatcctgaagttcgttccttttggttccttnttttgggattccccccatnttccctaaaactttgaaaaattgggcnggtttttgcccccttccnaan

SEQ ID NO: 119809 - DNA, 1118 bp, Arabidopsis thaliana
  unsure (1)..(1118): unsure at all n locations
atcttcagacggccgccggcgagaggccgctagatattcgccggcatctatacgactcatatagggaaagctggtacgcctgcaggtaccggtccggaattcccgggtcgacccacgcgtccgcccaggcgtccgcggacgcgtggggaacgtttagcaatgcaatctgttagatctcttttctcgaaagagatactagatgttatagcaaccagcacagctgatttgggtcctcttagccttgattcttttaagaaaaacaatttgtctgcatcatggcggggaaccggagtagacccctcctttagacattctgagaatccagcaactcctgatgtcaaatctaataacctgaatgaaaaacgtgacagcatttcaaaagatagtatccatcagaaagttgagacacctacaaagattcacagaaggcaactaagagagaaaaggcgtgagatgcgggcaaatgagttagttcagcacaatgatgacacgatctttgaaactcgaaaatgctgccattggaacgctctaagtctgttgattctgcagtccttggtaaatacagtatttggagaagagaaaatgagaatgacaactctgattcaaatatacgcttgatgcgggatcaagtaataatggctagagtctatagtgggattgcaaaattgaaaaacaagaacgatttgttacaagaactccaggcccgacttaaggacagccaacgggttttgggggaagcaacatctgatgctgatcttcctcggagtgcgcatgagaaactcagagccatgggtcaagtcttggctaaagctaagatgcagttatatgactgcaagctggttactggaaagctgagagcaatgcttcagactgccgacggacaagtgaggagcttaaagaagcagagtactttttctggctcagttagcagcaaaaaccctttccaaatcctttccatttgcctatcaattgcgcttgcctttcggttactattttcttttcccggggaaaagaaaattcccccggggtgaaaccntggnaaccctaattttnttcatnatnccncttttccgcaatgtatttntnatccgagtnttacnaaccctantgattccaag

SEQ ID NO: 119810 - DNA, 1324 bp, Arabidopsis thaliana
  unsure (1)..(1324): unsure at all n locations
ggaaagtgaagatgagaaacctgcctagataagtctgacactaaggcctctaaaaaatcgagtagtgatgagtcaagcgagtctgaggaagatgagagtgaagacgaggaggaaacccctaagaaaaagagctctgatgtagaaatggttgatgctgagaaatcaagtgctaaacagccaaagacaccatccactcctgctgctggaggatcaaagacactctttgctgccaatctctcttttaacattgaaagagcagatgttgagaatttcttcaaagaagctggtgaagttgttgatgttagattctctaccaacagagacgatggttctttcaggggatttggccatgttgagttcgcatcttctgaagaagcacagaaggcgcttgaattccatggtaggcccttgctcggtcgtgagattcgtcttgatattgctcaggagagaggtgagagaggcgagagacccgcattcactccacatagcggcaacttcagaagtggtggtgatggtggtgatgaaaagaagattttcgttaagggatttgacgcttcactttctgaggatgatatcaagaacactttgagggaacatttcagttcatgtggagagatcaaaaatgtatctgttccaattgaccgtgacactggtaactccaaaggaattgcttaccttgagttttcagaaggcaaagagaaggcgttggaactaaatggaagtgatatgggaggaggattctatcttgtagtcgatgagcctagaccgagaggagatagcagtggtggtggtggatttggaaggggcaatggtcgtttcggtagtggtggtggcagaggaagagatggaggtcgtggtcgttttggtagtggtggtggcagaggaagagatggaggtcgtggtcgttttggtagtggtggtggcaggggaagtgatcgtggtcgtggaagacctagttttactccccaaggtaagaagactaccttcggtgacgagtagaagcgtctgtagaagaaaagtctcttcttatgttgttaacttatgatacttcgcatccttttattgtttcgtttcttttttgttctagttaagtttctgtcagaaccttaaatttttgtctgaatgttaagttaagctcaattttgagtgctttgggtgttcaatcattgttatcttcgtctatcattacttcccccccctaggtttgggccatatgaataggtagacannnnnnnnnnnnnnnnnnnnnnnnnnnnnnnnnnnnnnnnnnnnnnnnnnnnnnnnnnnnnnnnnnnnnnnnnnnnnnnnnnnnnnnnnnnnnnnn

SEQ ID NO: 119811 - DNA, 727 bp, Arabidopsis thaliana
ttgggaaaccgccccggaaattccggggaagacccagcgtccgagctcgatgttgcagcgggaaaaggggaacctgccgcggtgatgtctaatgatggtttcaaaaacgtcatttcaatggacgaatatgcctcttactttgacaacattgatcccttggcgccatataagaaattgatgttcaggcaggatggtcacaaggagcttagatcaagagaagatgttctatcccaaagagttcaggcagcattaatagttagtgatccagttgattggagccgagacatccaggttctttgtgacattttacggactggaggacttcccttgggaaagaaattgggcctcaaccctcatttgtacaatttgccattgacggttttaagcctaccagaccttgagtttcctactgaacgtcttggcatgggagcttttagaatcgcgttagaatcaatcttcaacagaattcatgaaaaacctctagagtacacatcatttggcaaaccaaatccatttgtgttcaaaaacgcagaagatgttctgaaagaattcgctacatccccttattcttcaaaccaaggaagtcaccacttcaagacactatatatgaccggggacaaccctaaaatcgacatcagaggcgcacgacaggggtttggactcctttctctcaaactagaggtgggcatcttgccataaaacattcctctaatcttaacttaaacca

SEQ ID NO: 119812 - DNA, 460 bp, Arabidopsis thaliana
gagaaaaatgaatcatcttctaatcttagcgagaaactcgctgcggcggcggaattttaatctccgaccaccgtctcgttccttcagtagcaccatctcaccggaatcgaatcgctcgtcttttggcatagcattcgatatcgatggagttattcttcttggttcctctcccgttggtggctctcctagcgctctccgacgtctctacgatgattccggtgctttgaagatacctttcttattcttgactaatggaggtggcttgcctgaatctaaacgggcttctgagatgagtcatttattaggtgttcaagtttctccattgcaggtgatacaagcacattcaccctttcggaagctagtaaataggtttgaaaatgagcttgttgttgcagctggaaaaggggaacctgccgcggtgatgtctaattatggtttcaaaaacgtcatttcaatggac

SEQ ID NO: 119813 - DNA, 604 bp, Arabidopsis thaliana
  unsure (1)..(604): unsure at all n locations
aaaacccnnantncaaaaaaaccntaaantggggaacttcccaactnntaaatntttaccgcccggaccgaaacaccattcccaagccctttaaagttttcccgaactcagccttccactttaacggcggcccctttctaaagctttacatcaccaccgtataactccacctccaaattccgggacccggttcaaatcccggaaagaatctgagccggagttttcggaagatcgggttaggatttcgtcagagttagctggtttggagaagataggaggaaggagaccgtgaatggatttgaagagagatcggaagaagctagcgataggagaatcgatctcggagtcagattcggtggctccgaggatctgatcgagttggagaaggagcgactcagactgagtggctaacgagttgaatcgtttagaaacggaacgacatcgtattaacgttttgacgtcaccgactctgttcaaaatgtcgatgaccacaggatctggaatcgcatcaaaagcgtccatgattctctttcgattttaccaaaatacccttttgaaaccttcgggactaattagagagttctgtctcactttgtgtttccgc

SEQ ID NO: 119814 - DNA, 1255 bp, Arabidopsis thaliana
  unsure (1)..(1255): unsure at all n locations
ttccgttgannnnnnnnnnnnnnnnnnnnnnnnnnnnnnnnnnnnnnnnnnnnnnnnnnnnnnnnnnnnnnnnnctttttttttttttttttttttatattagaggaataattcggatttgatgtcatttgacccaaaagtcgtacgccaatagtacagttggctttgtacgatgcgtatgtatatacattaaaaagggccaaacaaacggaagcccaaaaaaagcccactaggccttagaaagaattcatctctaacacatttctcctacgcttaagcaacgccgtaacagcttctccgtacatacaatcgtcgccatctccggcgaacgcctccgtcaccagctcaacatcgttatcatcggaagccacaccagtcggccttacgaccaccagcgtcgctgcttcgagacaaatcccgctcttcagcatcagcgacggcgcgtgtctcatactcatcctcacgctaggtaccacagttcgttcccccacgcgctctgattctttattatccccacgcacctccgtctctctgtattctttcatccccgccgcgtccatcaccaccgtaccttcaccatcactgtcacgcacaatcaatttctccatctccttgtgatctttcaccaaatctctcatcaagtaatgacgcgtggaagccgccatcaacgcgctgatcgtccacaccacgcgcgtcttcaatccacaaacaaactccgaatctgactcaacaacaccgtcgacgacggcggcagcttccgtagctgctgaagtattaaccgtcgcggaacggaaagcgacgatgacgcagctcttgagagttttcccgaactcagccttccacttaacggcggcgcctttctcaagcttgacatcaccaccgtataactccacctccagattccggatccgttcaaatccggagagaatctgagccggagttttcggagatcgggtcaggatttcgtcagagttagctggtttggagaagataggaggaaggagaccgtgaatggatttgaagagagatcggaagaagctagcgataggagaatcgatctcggagtcagattcggtggctccgaggatctgatcgagttggagaaggagcgactcagactgagtggctaacgagttgaatcgtttagaaacggaacgacatcgtattaacgttttgacgtcaccgactccggacgcgtgggtcgacccgggaattccggaccggtacctgcaggcgtaccagccaaccctatagt

SEQ ID NO: 119815 - DNA, 780 bp, Arabidopsis thaliana
  unsure (1)..(780): unsure at all n locations
gcgggtcgacgcaagcgtctatacatgacgtcctgttaggctgccaaagacgacagaagggggtggctgcgtcagtaaaacgtattcttaaaagcaaccattggtgtgattgactctataagagaattcgtcagcgtgaagcaatctccaatctaatcgcagcatatcttctccgattcctattcgtctctgcaattgaatcttccggtaggcgaagatggcgacgtctgcgaggatttgttgcggaggaggaagtgcatgcgccgttcgttgtgatcgtcgcacgttaaatttgaattctcgatcgtcatgtgttgttccagtgacgaatcgacggaatatgtgtgcgatcgggaagatttcgatgtcgatggaggatttgtcaccaccgtctgcggcggtgaagattgaaaggatcggtggaaggaaacgcggtggatctgttgtgtcgagggagaagctagatgtgtggttgaaagattcggtggttgagatcgtgaagaatcttagagagtcgccgttattgatgcatttatacgccggggggctaattggtggtttaccgccgccggcaacgaatccaaaggcggaggattggccagagatggaaggaaagtggggtagaggagaagagaggacgccggaaggagttatattggtggagaagctcgcagacggtgacatagcagatnatgatgatcacnatggtggcgcgtttngggaagntacaagcccgtnggggnttgtgcgcccangnaagaggatcggatacttgggccc

SEQ ID NO: 119816 - DNA, 519 bp, Arabidopsis thaliana
aagacgcgtgggcgcgatttctaccatctctaaatctcaaccgtccgatcaaacaacttacacaacttccgtgctggagaaataaaaaaattaggtatttaataattcatcattgccattggattgtgtgtggctgcgtcagtaaaacgtattcttaaaagcaaccattggtgtgattgactctataagagaattcgtcagcgtgaagcaatctccaatctaatcgcagcatatcttctccgattcctattcgtctctgcaattgaatcttccggtaggcgaagatggcgacgtctgcgaggatttgttgcggaggaggaagtgcatgcgccgttcgttgtgatcgtcgcacgttaaatttgaattctcgatcgtcatgtgttgttccagtgacgaatcgacggaatatgtgtgcgatcgggaagatttcgatgtcgatggaggatttgtcaccaccgtctgcggcggtgaagattgaaaggatcggtggaaggaaacgcggtggatctgttgtgtcga

SEQ ID NO: 119817 - DNA, 666 bp, Arabidopsis thaliana
ccgcgcccccctttgattgcatggccgtctgcggtaccggtccggaattcccgggtcgacccacgcgtccgctctcattcaaacccaaataggaaacaaatacacaaaagtataataaaaagtctttctctcatctttcgccacgtagacatggacgtcgaacatcacaaatccggccacatcagtagaccaacggtggatattccaccgaggaagcttctttcctccgccaagtctccgtcgtcagtttcaagtccccttcgcgactataaagaacagaaagactattgttacgactctgactctgaggatccttacgccggagaccatttccggatgtacgaattcaagatccgacggtgcacgcgtagccgtagccatgactggaccgactgtcctttctctcatcccggtgaaaaggctcgtcgccgtgaccctcgccggtttcactacaccggagaagtatgccctgagtttagccgtcacggtgatggtagccgtggtgatgaatgcggtttcgctcacggtgttttcgagtgttggcttcatccgagtcgttaccgtacggaagcttgtaaagacggtaagcattgtaagaggaaagtttgtttctttgctcattctccacgtcagctgagagttcttccaccgtccccggagaatcat

SEQ ID NO: 119818 - DNA, 466 bp, Arabidopsis thaliana
gtaccgattcgcaggtccaccctagccgtccggttaccaactttttcaaccactgcctcctctgtgatggattccattcccggctaagggatcgcagatctcagatttcagatctctcagttcaactttctcattcatcacagatcatagtgtacgaaagatggcggctatggcggcgaagcttcatatatcgacgaaatcggatcagagcaatgtgcgattgcctagactgatcaacctgtcgcgtgatccaaccgctagagtcttgtttccacgaaacggatcagtttcttcgctccacaccaacttctcttctccaaatataatggttccatgcgccggaggtggtggtggtggaagcatcggtaatcacggcggtggaagtggaagcggaggaagtggtggtggttatggaggttcagaagaagaagaatcgtctccatggggaccattagggttatttatc

SEQ ID NO: 119819 - DNA, 1472 bp, Arabidopsis thaliana
  unsure (1)..(1472): unsure at all n locations
tnnnnnnnnnnnnnnnnnnnnnnnnnnnnnnnnnnnnnnnnnnnnnnnnnnnnnnnnnnnnnnnnnnnnnnnnnnnnnnnnnnnnnnnnnnnnnnnncggccgcaaaaaagctaagttttttgttatgtccttctttcttatttgatcagtttgttcttgtttcacgattttaacctgagattttttatatattttctccagatctgctatccgcagtcatctgttcataggaaaagatctggctttacttttagagattatctcagatccagccttttacccaattgaagacgttgaatcaatgagactccccgtcaccgtcaaagccactaagccgtcgtttctcgtcatttggatccgatactcctccgccgcgtcgtcgccgacagtctccttgaatccaagtggacgattacagcaaactctcgcaggatctgtggaagtgaaaggaaaatctctgcactccggtaagttctcgacggtgaagctaaatccggagatcgccggagctggtaggttcttcgagtttcgatccagattcatccctgcgtcgattgaatttgctcaggaatcgcctctttgcacgacgctgttgaaagatgagctcaaaatccgaaccgttgagcatttgttatcagctcttgaggcgaagggagttgataattgcaggattcaaatcgagagcgaaagttccgatgatcgagaagtcgagctaaagaatgggtcgatgcgatacaaggagttggcataaacgcggctcaaaaccatgatggtgaaagtgtagagaagatggtcgcacatgtgaacaagcctgtgtatgtttgcaagaacgatacttttgttgctgcatttccggctctagagactcggatcacttgtggtatcgacttcccacaggtgcctgctataggctgccaatggttttcttggagacctatccatgagtcttcttttgcaaaggatatcgcatcatcaagaaccttctgtgtctatgaagaggtggagcgtatgcgtgaagcagggctcattaaaggaggttctctggataacgccatagtttgtagcgctgagcatggatggatgaatcctcctctgcggtttgatgatgaagcatgtcgacataagattcttgacctaatcggtgacctctcccttgtttcacggggcggaaatggaggactccccgtggctcacatagtcgcatataaggcgggtcatgcactgcacactgacttagcacgtcaccttaccatggactgaagagtatgtgctcgttgtcaaccatatcccgcaaaagccttgatcgtttctgtttctttttggattcgttatccaaagatggtaccaatgtgggatttttgtttgttcaatggaagatcattactcttgtgcggccgcgaattcgatatcaagcttatcgataccgtcgacctcgaggggagggccagtgcatttcaatgggggggcgggg

SEQ ID NO: 119820 - DNA, 655 bp, Arabidopsis thaliana
  unsure (1)..(655): unsure at all n locations
tatacaagagccttgacggcgcatacacgcgtacgtaagctcggatcccggcgcctgcttttccaaaggatatcgcatcatcaagaaccttcttgtgtctatgaagaggtggagcgtatgcgtgaagcagggctcattaaaggaggttctctggatactgccatcgtttgtagcgccgagcatggatggatgaatcctcctctgcggtttgatgatgaagcatgtcgacataagatccttgacctaatcggtgacctctccctcgtttcacggggcggaaatggaggactccccgtggctcacatagtcgcatttaagggcgggtcatgcactgcacactgacttagcacgtcaccttaccatcgactgaagagtatgtgctcgttgtcaaccatatcccgcagaagccttgatcgtttctgtttctttttggatttcgttatcccaagatggtaccaatgtgggatttttgtttgttcgttggaagatcattactcttgtgaattcagtaataattgtaacattaaactattttaggtactaatcatagggacattttaaccgatcaaactgttcccaaaccnnnnnnnnnnnnnnnnnnnnnnnnnnnnnnnnnnnnnnnnnnnnnnnnnnnnnnnnnnnnnnnnnnnnnnnn

SEQ ID NO: 119821 - DNA, 908 bp, Arabidopsis thaliana
  unsure (1)..(908): unsure at all n locations
atgatactgccnnnnnnnnnnnnnnnnnnnnnnnnnnnnnnnnnnnnnnnnnnnnnnnnnnnnnnnnnntgtctctcaccaaccacgaaaactctcaatctctctctctctctctccatcgagaaacactaaactgctataatcattacctctcttcgatttctcaaaccctatctggctctctacccatatgcttcagatccgcattaaaaaagctaagttttttgttatgtccttctttcttatttgatcagtttgttcttgtttcacgattttaacctgagattttttatatattttctccagatctgctatccgcagtcatctgttcataggaaaagatctggctttacttttagagattatctcagatccagccttttacccaattgaagtgtgcaaaagtaagtacccccccacctctgttcctcacggtttttctgcaaaggacccaccctccttgaacttcagcgtccatcacaatgtccccatcatcatcaaacctgtacaagccagtggcgatcctaacattgtagaagttgatagcatttttgcaagtggagggagcacttgtgtttctccacgtattgctgtcttgattaaagcggttgtcaactctgtaaagtccctctacttcaataggtatggtaaatgagtttgattctgggaataggttgtggttgttataaagaatgctccactcagcagcgttgagccagcgctgtgttgatgtttgaagcacagctgctacatctgtcaaaaatagcaaccaaacatatgagatttatatatatattataagcaactgttttattctgaaaaaaaaaaaaaaagcnnnnnnnnnnnnnnnnnnnnnnnnnnnnnnnnnnnnnnnnnnnnnnnnnnnnnnnnnnnnnnnnnnnnnnnnn

SEQ ID NO: 119822 - DNA, 674 bp, Arabidopsis thaliana
ctcaatctctctctcttctctctctctctctctctctctctccatcgagaaacactaaactgctataatcattacctctcttcgatttctcaaaccctatctggctctctacccatatgcttcagatccgcattaaaaaagctaagttttttgttatgtccttctttcttatttgatcagtttgttcttgtttcacgattttaacctgagattttttatatattttctccagatctgctatccgcagtcatctgttcataggaaaagatctggctttacttttagagattatctcagatccagccttttacccaattgaaggcaagttcacatactctgttttttttgtcttggttttaatttctcggttttttacatgtaacagatgttttaagcatgattttttgtttaaacagtttgtttttcctacccttaaaacttctctgaattaatatcccatttatatgaccactctaatgtcttcttatacgactacgcaagtgttgcatattcttgaccttttcacacttcatttgcattttagtctaacaatataaatccgcaaatatcttgtgtttatacttattgaaattagtcttccgacatatataatctaggatctatttggattatttgggccatcagtctcattcgtttcattaacatctgagtct

SEQ ID NO: 119823 - DNA, 365 bp, Arabidopsis thaliana
  unsure (1)..(365): unsure at all n locations
ctttnntttntgncctactnatggncctggccnggactnccngggcancccacagagccgnatctgctatccgcagtcatctgttcataggaaaagatctggctttacttttagagattatctcagatccagccttttacccaattgaaggtaggtccatatgctgaagatttatcgcaggagcgaccactacgggagccgccattggagattctctgtgagagagagagagagaaatagtttgagaatcaatcttctgtattttattgtgtagatcaagttatttagtatatgctagtacttatggttaaaatagactattattaaaattcaaaagtaataaagccaacgagtacactaaactc

SEQ ID NO: 119824 - DNA, 808 bp, Arabidopsis thaliana
  unsure (1)..(808): unsure at all n locations
caaaaacgtccgcccacgcgtccgcccacgcgtccgctctgtctctcaccaaaataaaaaactcaatctctctctctctctctctccatcgagaaacactaaactgctataatcattacctctcttcgatttctcaaaccctatctggctctctacccatatgcttcagatccgcattaagaaagatctgctatccgcagtcatctgttcataggaaaagatctggctttacttttagagattatctcagatccagccttttacccaattgaagtgtgcaaaagtaagtacccccccacctctgttcctcacggtttttctgcaaaggacccaccctccttgaacttcagcgtccatcacaatgtccccatcatcatcaaacctgtacaagccagtggcgatcctaacattgtagaagttgatagcatttttgcaagtggagggagcacttgtgtttctccacgtattgctgtcttgattaaagcggttgtcaactctgtaaagtccctctacttcaataggtaggtccatatgctgaagatttatcgcaggagcgaccactacgggagccgccattggagattctctgtgagagagagagagagaaatagtttgagaatcaatcttctgtattttattgtgtagatcaagttatttagtatatgctagtacttatggttaaaatagactattattaaaattcaaaagtaataaagccaacgagtaccctaaaaaaaaaaaaaaaaaaaaaaaaanaaagggcggccgctctagaggatccaagcttacgtacgcgtgcatgcgacgt

SEQ ID NO: 119825 - DNA, 730 bp, Arabidopsis thaliana
  unsure (1)..(730): unsure at all n locations
aaaaatagcaaccaaacatatgagatttatatatatattataagcaactgttttattctgaaatttttaaatcttgccttaattgtacaaattccatagatctaggagactattctaagattccatagatctgtaacactgtgctacgatttctacactgttctaagattccatagatctgtaacactgtactacgatttctacactgttctaagattccatagatcataactttcctaagtttcctacactgttcccaattccataggttgtagcctccgatttcccaaattcacagatctactctaattttaaatacattcctccaattcccaaactccaccaatgttccttgatactttcaattccaatttctttattaccccaaattcgctacccctatatcttgcttctgagaatataatcgttttttattaccttcatttccttcaggtaggtccatatgctgaagatttatcgcaggagcgaccactacgggagccgccattggagattctctgtgagagagagagagagaaatagtttgagaatcaatcttctgtattttattgtgtagatcaagttatttagtatatgctagtacttatggttaaaatagactattattaaaattcaaaagtaataaagccaacgcggccgcnnnnnnnnnnnnnnnnnnnnnnnnnnnnnnnnnnnnnnnnnnnnnnnnnnnnnnnnnnnnnnnnnnnnn

SEQ ID NO: 119826 - DNA, 588 bp, Arabidopsis thaliana
  unsure (1)..(588): unsure at all n locations
ggatagtatagtgaagtaaataatgtagctatgactttacctttagcatttacctgtagcatcttaaaaatatgaattaaaaatgatttagctaatttgggcttatgtttataagcatagaagtttatactacaagtncgtttagattttnccagtatcaactcaaacatagttttnactcaagcatagtttttactcaagcatagtttttacccacactaaaacccacatgtagtgtgcaaaagtaagtacccccccacctctgttcctcacggtttttctgcaaaggacccaccctccttgaacttcagcgtccatcacaatgtccccatcatcatcaaacctgtacaagccagtggcgttcctaacattgtaggaggttgatagcatttttgcaagtggggggagcacttgtgtttctccacggattgctgccttgattaaagcggttgtcaacnctgtaaagtccctctacttcaataggnatggtaaatgagtttgattctgggaataggttgtgggttgtnataaaagantgntccncctnagcaagcgttnnggcaaccccttntgttngntgttttaagg

SEQ ID NO: 119827 - DNA, 425 bp, Arabidopsis thaliana
  unsure (1)..(425): unsure at all n locations
ctcaatctctctctctctctctccatcgagaaacactaaacgtgctataatcattacctctcttcgatttctcaaaccctatctggctctctacccatatgcttcagatccgcattaaaaaagctaagttttttgttatgtccttctttcttatttgatcagtttgttcttgtttcacgattttaacctgagattttttatatattttctccagatctgctatccgcagtcatctgttcataggaaaagatcgggctttacttttagagattatctcagatccagccttttacccaattgaaggtaggtccatatggctgaagatttatcgcaggagcgaccacatacgggagccgccattgggagattccctgtgagagagagagagagaaatagtttgagaacaatcncctgaatttaantgg

SEQ ID NO: 119828 - DNA, 706 bp, Arabidopsis thaliana
  unsure (1)..(706): unsure at all n locations
atgannnngcgagacctaatacgacttatatagggaacgctggtacgcctgcaggtaccggtccggaattcccgggtcgacgccacgcgtccggtttgttattcggagaagaagaagaagaagaactgaagaagcatattcgacggtcaccaccaaacctcttccgtcggattttcactctccgtttatcgaacatctgagatctctctccacttccgtcaccgaagatgcattccagtcatcttcttctcgaggagccgatcaggatggcttcaatcctcgagccttccaaatctagtttcttcccggcattgactaagatcgtcggaactctaggtcctaaatcccgatccgtcgaggctctctccggctgtctcaaagccggcatgtctgtggctcgatttgatttctcgtggggagatgctgattatcaccaggagacacttgataatttgaaagttgctgtgaggagcactaagaagctttgtgctgttatgcttgatactgttggacctgagctacaagttattaacaaatctgagaaagctattactttgaaagctgatggccttgtaactttgacaccgagtcaagatcaagaagcttcttctgaagttcttcccattaatttcaatggacttgccaaggcagtgaagaaaggagacaccatcttcgttgggcatacctattcactggtagtgaacaa

SEQ ID NO: 119829 - DNA, 381 bp, Arabidopsis thaliana
gtaaaaccttaacataaatgagggattttgccattttagcaattccatgtatttttatcagtgaaagcgataagagtttgtgatgaatgggggattttgctaaaggagtaaaagaatagttagttagtagttgaggaaatgtcaagaaaggacgacaaaaatgaagaaacacatgctttggtctctttgatattaaatgagaagagagaacataaattgaagtgtgagtgagagaggtggtcatctttgggagtttaagggtttttttagccttgaagtgatttacttaagagttcctctactcacatgcttttgtctttcattcttgaataagtacacttcacctttttcttactttagagcgtccatttacatttaatt

SEQ ID NO: 119830 - DNA, 395 bp, Arabidopsis thaliana
gggccggcccacgcgtccgatttaagtggatcacctggtgaaacagtgccttcggtttcagaggaacgattgtcgggagacgcaaaagactgggctactttgaggatccaaaagttagagatttccgatgatgcaatgaaatctccgtgccttagtgataaggaaagtgtctctcctttgaatggtaagcatcattcttttaatcagatgagaaatggagaagttttaaatggaaacggggtggggaaacaacaagagaattcctggcatactggttccagaagagttaaagatatacatattaatgagaatgagaatgagcatgttggttatgaagacctgccattcgcaggagcagtaccttggccaccggaggacatgcatctccactactc

SEQ ID NO: 119831 - DNA, 494 bp, Arabidopsis thaliana
cttattcacacatctaattaactttaagtaccaaaaatggcgggctacaacctcgaagctatcgaagcggcacctttgaaagacgatctggatattgtgatcccaaccatcagaagcctcgactttctagagcaatggagaccatttttgcaccattaccacctgatcattgtccaagatggagacccttccatcaagatccgagttcccgagggttatgactacgagctctacaaccgtaatgatatcaacaggatccttggtccaagagctaattgtatctcctacaaagatggtggttgtcgctgctttggcttcatggtttctaaaaagaagtatatctacaccattgatgatgattgctttgtggcaaaggatccaagtgggaaagacatcaatgtgatagctcagcacataaagaaccttgaaacaccttcaacaccacactacttcaacactctctatgaccctcttagagatggaactgatttcgt

SEQ ID NO: 119832 - DNA, 481 bp, Arabidopsis thaliana
cggacgcgtgggcgcatatctcctgtatcatcactcttttacttccggcgatctctctccgacggccaatggacgccgtcctttactctgttccactctccttcactcccctacgcgaatcatcctctccttcctcgccgtatcttcttctgccgaggtttctctccgttcagccatgtcacaaattcaccttctctcgaagcttcccttccaaatcccggattccctcagcttcttccgccgccggttccacgttgatgacgaattcctcttcgccaagaagtggagtgtacactgttggtgagttcatgacaaagaaagaggacttgcacgtggtgaaacctacgactactgtggatgaagctctggaactccttgtggagaatagaatcactggatttcctgtaattgacgaagactggaaatcggttgggcttgtttcagattatgacttgttggctttgactccatatctggtagt

SEQ ID NO: 119833 - DNA, 538 bp, Arabidopsis thaliana
agagtacaggaccaacaaaattacattctctttgcctttgcctatcgcttaattctgcttttattaccagagaaagcaagaatatataagaatcagaaattgggtgaagaagaatggtcttgattactaagatgtctctctctttctacatcattcatcttctcattttctccttgatttccacttgtgttgtctccaaccaggccgaggataatcttcttcaaggcctaaacagctaccgaactgctcaaagagttcctccatttgccaagaatgagaaggctgattgtgtggctgatgagatcgccgacaagctcgaagatcagccatgcacaaaccacaccacagcgagcacggttactcctggctcggtacctccacggctgacgaactaccaggacattctctctgaatgcaaaatcgacccaaacactacccgtgacggattgatcctacctgtctggatccctaaccggatcccgactttggctttaactaattacacccaaactggttatgcctcggatttaatgattca

SEQ ID NO: 119834 - DNA, 455 bp, Arabidopsis thaliana
gacatctctctgcttctcttcttcttcttcttcttcagctttgagatctattctatcttcaaagatggccaccgatgagccttctcaaactcgctggagctttctggactttaaaacgttttatgatgccaagtttgggaggaagaagctgcctgaagacgatgtatcaaacaaggaccaaccatgaagatggatcatccaacggtaataacggtgatgtcaacaacaactcttccccagtcaccaatcaggatggtaacacagccttggccaatggcaacgtgattcgcgagaagccgaaaaagtccatgtttcccccgtttgagtctgcggaaactcgtactctcgctgagagtttgagtagggatatcatccgtgggaatccaaatatcaagtgggaaagcatcaaaggtttggagaacgctaaaaagttgctcaaagaagctgtggtgatg

SEQ ID NO: 119835 - DNA, 494 bp, Arabidopsis thaliana
tttcgagagagctgttgttgttcaactctcgccatccatcagacatctctctgcttctcttcttcttcttcttcttcagctttgagatctattctatcttcaaagatggccaccgatgagccttctcaaactcgctggagctttctgtttgggaggaagaagctgcctgaagaagatgtatcaaacaaggaccaaccagaagatggatcatccaacggtaataacggtgatgtcaacaacaactcttccccagtcaccaatcaggatggtaacacagccttggccaatggcaatgtgattcgcgagaagccgaaaaagtccatgtttcccccgtttgagtctgcggaaactcgtactctcgctgagagtttgagtagggatatcatccgtgggaatccaaatatcaagtgggaaagcatcaaaggtttggagaacgctaaaaagttgctcaaagaagctgtggtgatgcctataaatacccacgtacttaatgg

SEQ ID NO: 119836 - DNA, 361 bp, Arabidopsis thaliana
  unsure (1)..(361): unsure at all n locations
gtaaaaaacaagaagacgcttacactagacttccaaaaatcaaaacttgagggtttcagagcaaactctgtcttcttcaagccgagagcgaaaaccctaagctcaattccgattttgcaactatgagtcgttcaggtcagcctccggatcttaagaagtaagcccttgttcttatttctctctttctgtttctatatcttcgtgtttctgatttaatttttgtgcttaatctgttgtttgtttttgtttcgttcgatgcaggtacatggataagaagctccaaagtaagttcaatatcttcatcttcttttatcgatagttagggaacttcagttntgtataacacattagctgagatgtg

SEQ ID NO: 119837 - DNA, 525 bp, Arabidopsis thaliana
aacccacgcgtccgcccacgcgtccgctttagggtttcagagcaaactctgtcttcttcaagccgagagcgaaaaccctaagctcaattccgattttgcaactatgagtcgttcaggtcagcctccggatcttaagaagtacatggataagaagctccaaatcaagcttaatgctaaccgaatggttactggaactcttcgtgggtttgatcagttcatgaatcttgttgtggataacactgttgaggtgaacggtaacgacaaaaccgacatcgggatggtggtgattagaggaaacagcattgtcactgttgaagctcttgaaccagtgggcagatcttcttagctcgttatattcattggttatgatctttttgtactaagcactagctatgagaaatcttggtggtagattcgcagttaccgatgaattgattctgtaagaagtctacatgaatactcttttcttgtacttaaaagattgcaattgacccccacccgatgaattgtaattggctttgtact

SEQ ID NO: 119838 - DNA, 351 bp, Arabidopsis thaliana
cgctctggagactggaatcaatcgagtaaagtgttcgtagctgagaaaaaccctaagctctcgtttttcgtcttctccgattctgcaagtatgagtcgatcaggtcagcctccagatctcaagaagtacatggacaagaaactccaaattaagcttaatgccaacagaatggttgttggaactctccgtggctttgatcagttcatgaatcttgttgtggataacactgttgaagtcaatggtgatgacaaaactgacattgggatggtggtgataagaggaaacagcattgttactgttgaagctctcgaaccagttggaagatcttagcttatgacttttcacccccaa

SEQ ID NO: 119839 - DNA, 956 bp, Arabidopsis thaliana
  unsure (1)..(956): unsure at all n locations
cgttagcaagtaccgctccggaattcccgggtcgacccacgcgtccgggaatggttggcagatccaactgtaggaaacaatgctattatcaggttgattgctggtactatattcatgcatgaggaagactataatgaggctctgaagcacactcattctggaggaaccatggatctgcatgctttgaatgtccagatattcataaagatgcacagatcagattttgcggagaaacaactgagagtgatgcaacagattgatgaagaccacacactcactcagctcgcgagcgcgtggttgaatctggcagtaggtggttccaagatacaggaagcttatctaatcttccaggatttctctgagaagtacccaatgacaagcttgatcttgaacggcaaagcagtttgctgcatgcatatgggtaattttgaagaagctgagactctactacttgaagcactcaacaaggatgctaaagacccagaaactcttgcaaacctcgttgtatgcagtcttcacgtcgggaaatcatcttctcgctacctaaaccagctgaaactttcacatccagaacacgtccttgtgaagcgagcagcatcagctgaagataacttcgagagagcacttcaatctttcgcctgaagtacctcaaagtccatggaatcaatttgccttatgatctaccagaagaacatcatattattaccgaccctatcttgaaattatcatagataaacagttttttccattggatatgttgcattttactttgatttctcactgaagcttttgttttcattgagtttcgaatccaacagaactacagattttgttccttggccgcgaattcttcatgccccggactgcgtggatctgtactacagcaattccgcgaccggtacctagcaggcgtaccagctttccctaatagtgagtcgtatgagagctgnnnnnnn

SEQ ID NO: 119840 - DNA, 646 bp, Arabidopsis thaliana
  unsure (1)..(646): unsure at all n locations
tctctacgactcactatttggaaagctggtccgcctgcaggtaccggtccggaattcccgggtcgacccacgcgtccgcccacgcgtccggttttctttattttggagttagacacggatctgtgagatctagaagaagaagaagaagaagaagctaagacaatggcatccatggcaggaccagatcatctcttcaatttgagaaaccatttctacttgggtgcttatcaagctgcgatcaacaacagcgagatccctaatctttcgcaggaagatatcgtcgagcgagactgtctcgtccatcgcgcttacatcgctctcggaagttaccagcttgtcatcagtgagatcgatgaagccgctgctactcctctacaggcagtgaaactccttgctatgtatctatcgagtcctgaaaacaaggaatcaaccatttcgagcttgagggaatggttggcagatccaactgtaggaaacaatgctattatcaggttgattgctggtactatattcatgcatgaggaagactataatgaggctctgaagcacactcattctggaggaaccatggatctgcatgctttgaatgtccagatattataaaggtgccagancagattttcggggaanacctggggggtgngtc

SEQ ID NO: 119841 - DNA, 1492 bp, Arabidopsis thaliana
  unsure (1)..(1492): unsure at all n locations
nnnnnnnnnnnnnnnnnnnnctgccgtaccggtccggaattcccgggtcgacccacgcgtccgcttattttctcggcaacgaagcaaaaagggtaatttttgtcggttgaattcacaagctagttttctcgatctctctctggatctatagctgatctgcattgcggcttgtagctggtatttgttccatagttgtaagctatggtgacaatcaggagtggttcaatcgtgattttggttctgctggctgtatcatttctggccttggttgccaatggagaggacaaaacgattaaagtgaagaaagtgaggggaaataaggtgtgcacgcaaggatgggaatgcagctggtggtctaaatactgctgtaaccagacgatatcagattactttcaggtttatcagtttgagcaactcttttccaaaaggaacactcccattgctcatgctgttggtttctgggactaccagtctttcattactgctgctgccctctttgagcctcttggttttggtaccactggaggaaagctcatgggacagaaagaaatggctgcctttctcggtcatgtagccagcaaaacgtcctgtggctatggagttgcaacaggagggcctttagcttggggtctgtgctacaacagggaaatgagcccaatgcaatcctactgtgacgagtcctggaaattcaagtacccctgcagccctggagctgaatactacggacgcggtgccttacccatttactggaacttcaactacggagcagctggggaagccctgaaagctgatctcttgaaccaccctgagtacattgagcaaaacgcgacaacttgcattccaagctgcaatctggagatggatgactccaatcaagagagctcagccctcagctcacgacatctttgtcggaaactggaaacctacaaagaacgacactttgtccaagcgtggcccgacttttggcagcaccatgaacgtcctctacggagagtacacatgtggtcaaggttccattgatccaatgaacaacataatctcacactacttatacttccttgacctcatgggtattggaagagaagacgcgggaccaaacgatgagctcagctgcgcagaacagaaacctttcaacccttcaactgtaccttcctcttcctcttcgtaagtcttatgatatatcgccgttgctctcaagtctctcttgcttaatgttacgtaataagtgaaattgcttgtggtaaaaaaagaagaagtgtgtttttgtccctctagaacttataatgcaaacaacattacattttatatttttctgtatgtaaaaccatatttaattattgtattggaagaatgtgtgtaaaatagagaaagagcaaggaaacataaatgtggtttgcgaatgaaaaaaacaaaaaaaggacaggccgctctagaggatccaagcttacgtacgcgtgcatgcgacgtcaaagtcttnctataggtcacctaa

SEQ ID NO: 119842 - DNA, 752 bp, Arabidopsis thaliana
  unsure (1)..(752): unsure at all n locations
cccgggcnnngggaaccttgaaatttgtttnttgaccccccttngganatgaccanacccgacatttcatcccacctnccaatngggagggggttgcccccaatcaagagagctcagccntcagctnccngacatctttgtcggaaactggaaacccgcggaagagcgacactttgtccaagcgtggcncgacttttggcagcaccatgaacgtcctctacggagagaacacatgtgnccaaggttccattgatccaatgaacaacataatctcacactacttatacttccttgacctcatgggtattggaagagaagacgcggggcccaacgatgagctcagctgcgcagaacagaaacctttcaacccttccactggaccttcctcttcctcttcgtaagtcttatgatatatcgccggtgctctccagtctctcttgcttaatgttacgtaataagtgaaattgcttgtggtaaaaaaagaagaagtgtgtttttgtccctctaggaacttataatgccaaccacctttcctttttatatttttctggatggaaaaccctattttattattgtattggaagaatgtgtgttaaatagagaaagagccagggaaccataaagtgggttgcgaaagaaaattggttccaatcggttggtaaaaaattggtccccagggtttttaaaaaaaaaaaaaaaaaaaaaagggcggccggctctaaggaatccaggctacggtaggggggcatgcg

SEQ ID NO: 119843 - DNA, 636 bp, Arabidopsis thaliana
  unsure (1)..(636): unsure at all n locations
tgatcttcagctctctacgactcactatttggaaagctggcacgcctgcaggtaccggtccggaattcccgggtcgacccacgcgtcggcaaaaagggtaatttttgtcggttgaattcacaagctagttttctcgatctctctctggatctatagctgatctgcattgcggcttgtagctggtatttgttccatagttgtaagctatggtgacaatcaggagtggttcaatcgtgattttggttctgctggctgtatcatttctggccttggttgccaatggagaggacaaaacgattaaagtgaagaaagtgaggggaaataaggtgtgcacgcaaggatgggaatgcagctggtggtctaaatactgctgtaaccagacgatatcagattactttcaggtttatcagtttgagcaactcttttccaaaaggaacactcccattgctcatgctgttgggttctgggactaccagtctttcattactgctgctgccctctttgagcctcttggtttggtaccactggaggaaagcccatgggccagaaagaaatggttcccttttggccttttgccccaaacggccttggcatggggtcacagggggccttanttnggttttaaaaggatgcctt

SEQ ID NO: 119844 - DNA, 480 bp, Arabidopsis thaliana
  unsure (1)..(480): unsure at all n locations
ttccccgnnctgaaatcccgggcgagacccacgcgtccgtaaaacacaagccacaaaaccttatgttgggaataaattatggttatgaactgggatagtttcattctgttggacggcaaatagttatcattcattttttgtatcattcagtctttaatggttccaggtaagttgcaaaagaagtaaccaatattcgtgtattctctagagatttttgacggcaaaatagtatcattcattttctttaaagactacaatttgattagatattaatagattaaatggagtagtagtttttttttcaaagatgattttaactaaagattattcttttcattttgattgttttatttgtatagctcaaaactttgtatataaaacatccttcttgattagtaaatttcgcatttcaacaaaaatggaataatgttgtgcgacgattaaatggaatagttaaaatgattaaagaaatgacactcg

SEQ ID NO: 119845 - DNA, 1376 bp, Arabidopsis thaliana
  unsure (1)..(1376): unsure at all n locations
cagctctctacgactcactatttggaaagctggcacgcctgcaggtaccggtccggaattcccgggtctacccacgcgtgcgcggacgcgtgggcggacgcgtgggtgagctgatgcttgtaaaagtgaatgcacatccagaatccagggcagagatcatgtggctagttgacacattcagagcaagagttgtagatatagcggaacatgcattgactatcgaggtaactggagatcctggaaaaatgattgctgtagaaagaaatttgaaaaagtttcagatcagagagattgtaaggacaggaaagatagcactgagaagggaaaagatgggtgcaactgctccattttggcgattttcagcagcatcctatccagatctcaaggagcaagcgcctgttagtgttcttcgaagtagcaaaaaaggagccattgtccctcaaaaggaaacatcagcagggggagatgtttatcccgttgagccattttttgaccccaaggtacatcgtattctcgacgctcactggggacttctcactgacgaagatacgagtggactacggtcgcatactctatcattgcttgtaaatgatattccaggagttcttaatattgtgactggtgttttcgctcgaaggggatacaatatccagagcttggccgtaggacatgctgaaaccaagggcatttcacgcattacaacagttatacctgcaacagatgaatcggtcagcaaattggtgcagcaactttacaaactcgtagatgtgcatgaggtccatgatcttactcatttgccattttctgaaagagaactgatgctgattaagattgccgtgaacgctgctgctagaagagatgtcctggacattgctagtattttcagggctaaagctgttgacgtatctgatcacacaattactttgcagcttactggggatctagacaagatggttgcactgcaaaggttattggagccctatggtatatgtgaggttgcaagaaccggtcgtgtggcattggctcgtgaatcgggagtggactccaagtaccttcgtggatactcctttcctttaacaggctaaaccgttgcagagtgcatccatcgaacatcataaacttttgaaggtaaaagtttcattacacagtctatgagccaactcaaagacagacagagagactgcgtagatatatgtttgtgactttgtttatgaaacaattagctgattttggcttcatttcgattcttttctttttgagataagaaaagttgttaggattattactaaaaaaaaaacaaaagaagnnnnnnnnnnnnnnnnnnnnnnnnnnnnnnnnnnnnnnnnnnnnnnnnnnnnnnnnnnnnnnnnnnnnnn

SEQ ID NO: 119846 - DNA, 437 bp, Arabidopsis thaliana
  unsure (1)..(437): unsure at all n locations
tatagggaaagctggtacgcctgcaggtaccggtccggaattccgggtggcccacgcgtccgaaaactatctttctccttctcattcctttttctctcactctcctccattaaagctctgcactttctcaaagagaatgttcatgggtaagatgggtcttttgggaattgctctgttttgttttgctgcaatggtgtgctctgttcatggctatgacgctggatgggtcaatgctcatgctaccttctatggtggaagtgatgcttcaggaaccatgggtggagcttgtgggctccgggaacctctacagtcaaggttacgggaccaacacggcggcgttgagcactgctctgttcaacaacggtcttagctgcggngcttgttttgagatcaagtgtcaaagcgacggcgcgtggtgtttacctggtgctatcatt

SEQ ID NO: 119847 - DNA, 520 bp, Arabidopsis thaliana
cgaatcccggtcgaccacgcgtccggtgtcttctctccctctgtgtctgtgtttagatctctcttctctctgctggctttccaaaaatcgtcttctccttctccacctttcattatctttcttctcttaccaaaaccctttaaatacaaaaaaaaactaaaacacataaaaaaaatattgaattctcctttttcccgacaatctgagtttctcaggcagagaagacagagattttcaccgtaagggcaaaaaacgaaaaactctgtctctctgtttctgtttcgtccttccttggctttgatttcttacactaaaagagacatctttaaagaatctcacattgttccctattgcttgtctcacaagagaatccttgatctagggttcttgcttccctcccctgtttttttctttaaattcctcctctgttttctatttgttctcgtcggagtaagaagagatggagctaggagatacgacgtcggtgattccagactcgttcatgggatacagagacgac

SEQ ID NO: 119848 - DNA, 504 bp, Arabidopsis thaliana
  unsure (1)..(504): unsure at all n locations
tcttcttccatggtcattgaaattcaaacacacgcaagcatcagagaagaggactgattcgcgacttcgattatgaggccgaacattgttaccgaggctggggttcaaactcgagttggacagtggtggaatgccatacctttcctcacgtcatcggtggtggtagtttgtggggtcatttacctgatatgcctcttaactggatatgacactttttatgaagtatgcttcttaccctcggcaatcatatcgaggttccaagtttataggttttatacagccattattttccatggatcactgcttcatgttctgttcaacatgatggcattggttcctatgggctctgagctggagagaatcatgggatctgtccgtttgctttacctaacagttttctggcacggccaatgccgtattgatcncctntagnatccttggngggnntaatccntctncccatntggcantcatgaatgattngcnntggtttnggatntgtta

SEQ ID NO: 119849 - DNA, 368 bp, Arabidopsis thaliana
aaaatattctgacaccttttttcagattgactacaaaaatcccatgcaagtaaaacccttactgtggcagataatattcgaatttgtggtctgacaaagcttcaatatgcacactctattggttttttctatctggatttcttgcaatcatactataaccttagacgaaatcaacagggggagtttcattccattttatttcttcattcgattacgtgttctaccatttcctacctactagaacagtggcgagattgagatttgattagcactaatactaaccattgtggaatcactcaaaaacagagacttgttcattccagctacaagccgcgaccacgttaagtaaaacggggtggtatgacaca

SEQ ID NO: 119850 - DNA, 372 bp, Arabidopsis thaliana
gccgttagtcatattgagtgttagttgttccatttagccgagctctcttggtagcaagggttcgatgccatgtctcttccaatgtggttaaatgtgtaattgtataaagttaattcatttttgttacttatatttaaaaaatagatatagaattgttattcataactcaccgtagacaaactaaaaatttagaaagccaaattggaatattcaaattttagcattttaatattcatttggttgaggaggaagagccaccaaccaaaccattgagtctgatcatcttgatattattggaatttatgtttgtttaatatgatctttttaatttcatttaaattaatattattgtttattataattaatgaaaat

SEQ ID NO: 119851 - DNA, 322 bp, Arabidopsis thaliana
  unsure (1)..(322): unsure at all n locations
caaactcgtttgctcttttcatcattactaaatcataagcggctctcaagttctttagggtttcgagttttctcaatctcctacctgattaaggttaatttcttatcttggatcaataacaagagaattctaactccggattgtaatcaatattcctctacataaaaagcgtgaatgagattatgatggaatcgaaagctggtaataagaagtcaagcagcaatagttccttatgttacgaagcaccccttggttacagcattgaagacgttcgtcctttcggtgggntcaagnaattcaaatcttctgtctacgccaactg

SEQ ID NO: 119852 - DNA, 528 bp, Arabidopsis thaliana
  unsure (1)..(528): unsure at all n locations
tcagcatgtccttcccttgtttggctggcncaggagagggntctctccnccagaggccgagggaagtgaagaggcactttgcagccctgaggagtccagaagngcacccncncctgagaaagattgcaagccgtcaagagggtcgcagtcttgattcacacattgaggaccaatttgcaagtggacgtttgttggcttgtatctcttcaaggcctggccagtgcgggcgtgctgatggatacatcttggaaggtaaagagttggagttctacatgaagaagatccagaagaagaagggcaagggtgctgcttagagtctcttcttatctgccttgagcttttgtcttacaacatgttttgagttttcagtttcaattgtctgagaaactatgtttttggattagcttgtggtatttctttgaaactcccattatggtacaatgtttttgtcttggattttctttataattttaatcgataatttcactcaagttttatgcagtcaatattaagattgttctgttggtg

SEQ ID NO: 119853 - DNA, 641 bp, Arabidopsis thaliana
  unsure (1)..(641): unsure at all n locations
gaactttctgcaacattacactagagcagctaaactttattggagaaaccctaatcggcgacaatgggtatttctcgtgactctatccacaagaggcgtgccactggaggcaagcagaagcaatggaggaagaagcgaaagtatgagatgggaaggcagccagccaacaccaagctctcaagcaacaagacggtcagaagaataagagttcgtggtggaaatgttaagtggcgtgcgttgaggctcgatactggtaactactcgtggggaagtgaagcaactacccgcaagaccagagtccttgatgtggtctacaatgcctccaacaatgagcttgtacgtactaagacacttgtcaagagtgctattgttcaggttgatgctgctccgttcaagcagtggtacctctcgcactatggtgttgagcttgggcgcaagaagaagagtgcttcttccaccaagaaaggccggagaggaaggttaagaggcaactttttcagctccttagggggtcaagaagggcaaccccctccttggaaagttttaacccgtaaaggggtcgaagttttgtttacncttttggccattttaaatggcgtttttgtttanntttnagcctgccatcgggnctttganattgc

SEQ ID NO: 119854 - DNA, 585 bp, Arabidopsis thaliana
  unsure (1)..(585): unsure at all n locations
ggtggaaatgttaagtggcgtgcgttgaggctcgatactggtaactactcgtggggaagtgaagcaactacccgcaagaccagagtccttgatgtggtctacaatgcctccaacaatgagcttgtacgtactaagacacttgtcaagagtgctattgttcaggttgatgctgctccgttcaagcagtggtacctctcgcactatggtgttgagcttgggcgcaagaagaagagtgcttcttccaccaagaaggacggagaggaaggtgaagaggcagctgttgcagctccctgaggaggtcaagaagagcaacccacctcctgaggaagattgcaagcccgtcaaggagggtcgcaagtcttgattctacacattttggggcccaattttgcaantgggcgtttgttggcttgatcccttcaaaggctggccattccgggcgttntgaanggntacaccttgggaaggnaaanagttgggtctacatgangaagtccaganaagaaggnaanggngtccttaaagcnctctaaccgcctgagctttgctaaanagttggttcgtcatggcggaanaanttnggtt

SEQ ID NO: 119855 - DNA, 363 bp, Arabidopsis thaliana
aggcactgatgttgcaatcaaaaggatcaatgatcgatgttttgctggcgaaccatctgagcaagaacgaatgatcgatgacttttggaatgaggcacagaacctagctggcttgcaccatcctaacgtcgttgctttttatggggttgtgctggattcacctggaggttctgtggcaacagttacagagtatatggtcaatggttctttacgaaatgcgttgcagaagaatgttaggaattttgataggtgcaagcgtcaactgatcgcgatggacattgcttttgggatggagtatttgcatggaaagaagatagtacactttgatcttaaaagtgacaacctgctcgtcaatctcaagga

SEQ ID NO: 119856 - DNA, 869 bp, Arabidopsis thaliana
  unsure (1)..(869): unsure at all n locations
nnnnnnnnnnnnnnnnnnnnnnnnnnnnnnnnnnnnnnnnnnncaacaactctcaagacctgtacaccacgcgtccgctacttcatcactcatcaccagcttcgcatcttcttctccggcttgatcttctctcgtttctagatctccgacgatcggaatatcaaatccgatcgattaattctgtcaatcacacaaaaaccgaaaaccaaaaaaaaaccatggcgtttgagaagatcaaggtggcaaatcccatcgtcgagatggatggtgatgaaatgaccagggttatttggaagtctatcaaggataagcttattactccttttgtggagttggatatcaagtacttcgaccttggtcttcctcaccgtgatgctacggatgacaaagttactattgaaagtgctgaagctactaagaagtacaatgtggcgatcaagtgtgccaccatcactccagatgaaggccgtgtcacggaatttggcttgaagcagatgtggagaagtccaaatgggaccatcaggaatatcctgaatggacctggtttaaaaacccattttttggaaaattgtccaagctttgccaaggttggaaaaccctatttggttggaagcttcctttgggatcataccggcccctgttctgtatcagggacaggaatcctgctttcccttggggaaagaagggaaccgaacccgatctttatctttccggggaaggggggtccttgaaatgccaaactgagagccccccccttttttgtcgataagaacctcttataaaaaaggcccttccctttccaaaaacccttcttaaaaaagaaggaagtaaaagactttcaaaaaatatagccctcggagaaaaatagc

SEQ ID NO: 119857 - DNA, 761 bp, Arabidopsis thaliana
  unsure (1)..(761): unsure at all n locations
tggccgtctgcagtaccggtccggaattcccgggtcgacccacgcgtccgcaagaagtctatgaagccagctggaagtcgaagtatgatgctgctggaatctggtatgaacaccgtctcattgatgatatggtggcctacgctcttaagagtgagggaggctatgtttgggcatgcaaaaactatgatggtgatgtccaaagtgatttcttggcacaaggattcgggtcacttggattgatgacatctgttctggtctgcccagatggaaagacgattgaagctgaagcggcccatggaactgtcacccgtcacttcagggttcatcagaaaggtggtgagaccagcacaaacagcatagcctctatttttgcttggactcgtggacttgcacacagggctaagttagatgacaacgcaaaactcttggatttcactgagaagctggaagccgcttgtgttgggacagtggagtcagggaaaatgaccaaagatcttgcactcatcattcacggctcaaagctttcgagggacacgtacctgaacacagaggagttcatcgatgcagtcgctgctgagctcaaagaaagactcaatgcttaagaaactgaagaaattgggtaaaattcgaacgtctcagttcctaagtgtcttatcctggtttgtggggttggttgggttggggggnntaacttttttgggnggggtttnnaccgttgttcccctctaaanttccaanntttgnntttccntttttaaccg

SEQ ID NO: 119858 - DNA, 789 bp, Arabidopsis thaliana
  unsure (1)..(789): unsure at all n locations
tgacctttcgttgnnnnnnnnnnnnnnnnnnnnnnnnnnnnnnnnnnnnnnnnnnnnnnnnnnnnnnnnnnnnnnntcaccacgcgtccggcttttctcttcctcccccggcttgatcttctctcgtttctagatctccgacgatcggaatatcaaatccgatcgattaattctgtcaatcacacaaaaaccgaaaaccaaaaaaaaaccatggcgtttgagaagatcaaggtggcaaatcccatcgtcgagatggatggtgatgaaatgaccagggttatttggaagtctatcaaggataagcttattactccttttgtggagttggatatcaagtacttcgaccttggtcttcctcaccgtgatgctacggatgacaaagttactattgaaagtgctgaagctactaagaagtacaatgtggcgatcaagtgtgccaccatcactccagatgaaggccgtgtcacggaatttggcttgaagcagatgtggagaagtccaaatgggaccatcaggaatatcctgaatggaactgtatttagagagccaattatctgcaaaaatgttcccaagcttgtcccaggctggacaaagcccatctgcattgggaggcatgcttttggtgatcagtaccgtgccactgatgctgtgatccagggaccaggaaaactgactatgaccctttgagggaaaagatggggaaaacggaaaacccgcagtcttttccatttaactgggtgaaaagtgggggttgcttttggccaatgttccacccccttggtggaagtc

SEQ ID NO: 119859 - DNA, 655 bp, Arabidopsis thaliana
  unsure (1)..(655): unsure at all n locations
nnnnnnnnnnnnnnnnnnnnnnnnnnnnnnnnnnnnnnnnnnnnnnnnnnnnnnnnnnnnnnnnnnnnnnnnnnnnnnnnnnnccacgcgtccgcccacgcgtgcgcccacgcgtccgagcatcttcttctccggcttgatcttctctcggttctagatctccgacgatcggaatatccaatccgatcgattaattctgtcaatcacacaaaaaccgaaaaccaaaaaaaaaccatggcgtttgagaagatcaaggtggcaaatcccatcgtcgagatggatggtgatgaaatgaccagggttatttggaagtctatcaaggataagcttattactccttttgtggagttgggtatcaagtacttcgaccttggtcttcctcaccgtgatgctacggatgacaaagttactattgaaagtgctgaagctacttaagaagtacaatgttggcggtcaagtgtgccaccatcactccagatgaaggccgtgtcacggaactttggcttgaagcagatgtggggaggccaaatgggccctcaggatatcctnattggancttttttngngggccattatttgnaaaanttcccaagtttncccgggtngcaaagccctttnaatngaggnaanttttgggntcattccnggccnctgc

SEQ ID NO: 119860 - DNA, 1659 bp, Arabidopsis thaliana
  unsure (1)..(1659): unsure at all n locations
cgtccgctttctctttcgtttctagggatctccgacgtattcgtgaatatcaaatnctcgatcgattgaattgctgtcaattcacaccaaaaagccgaaaacctaaaaaaaaacctatggtgtttggagaagggatcaaggtggcanaatcccatctgtcgagatggatggntgatgaaatgacccagggttattntggaagtctatcaaggataagcttattactccttttgtggagttggttcgcaagtacttcgtccttggtcttcctcaccgtgatgctacggatgacaaagttactattgaaagtgctgaagctactaagaagtacaatgtggcgatcaagtgtgccaccatcactccagatgaaggccgtgtcacggaatttggcttgaagcagatgtggagaagtccaaatgggaccatcaggaatatcctgaatggaactgtatttagagagccaattatctgcaaaaatgttcccaagcttgtcccaggctggacaaagcccatctgcattggaaggcatgcttttggtgatcagtaccgtgccactgatgctgtaatcaagggaccaggaaaactgactatgacctttgagggaaaagatgggaaaactgaaaccgaagtctttacatttactggtgaaggtggtgttgctatggcaatgtacaacactgatgagtccatccgtgcttttgctgatgcatcgatgaacactgcttatgagaaaaagtggccactttaccttagcacaaagaataccattcttaagaaatacgatggcagattcaaagacatcttccaagaagtctatgaagccagctggaagtcgaagtatgatgctgctggaatctggtatgaacaccgtctcattgatgatatggtggcctacgctcttaagagtgagggaggctatgtttgggcatgcaaaaactatgatggtgatgtccaaagtgatttcttggcacaaggattcgggtcacttggattgatgacatctgttctggtctgcccagatggaaagacgattgaagctgaagcggcccatggaactgtcacccgtcacttcagggttcatcagaaaggtggtgagaccagcacaaacagcatagcctctatttttgcttggactcgtggacttgcacacagggctaagttagatgacaacgcaaaactcttggatttcactgagaagctggaagccgcttgtgttgggacagtggagtcagggaaaatgaccaaagatcttgcactcatcattcacggctcaaagctttcgagggacacgtacctgaacacagaggagttcatcgatgcagtcgctgctgagctcaaagaaagactcaatgcttaagaaactgaagaaattgggtaaaattcgaacgtctcagttcctaagtgtcttatctggttggtggggttggttgggatcgggaggaataaacttttgtggagaggagtgttgagaacgatttgtttcctctcttataatatttccaaaatattgcgacatttttccatttttattcagatctcgaattttatgtttgattgattggttatcacatcttctttttnttggttgnnnnnnnnnnnnnnnnnnnnnnnnnnnnnnnnnnnnnnnnnnnnnnnnnnnnnnnnnnnnnnnnnnnnnnn

SEQ ID NO: 119861 - DNA, 687 bp, Arabidopsis thaliana
  unsure (1)..(687): unsure at all n locations
tatacgactcacttagggaaagctggtacgcctgcaggtaccggtccggaattcccgggtcgacccacgcgtccgcgagaccaaatatctgttggacaagcttgttgtgctgaagcttaatggaggtttgggaaccacaatgggatgcactggtccaaaatcggttattgaagttcgtgatggtttgacatttcttgacctgattgttatccagattgagaatctcaacaacaagtataactgcaaggttcctttggttcttatgaactcattcaatacacatgatgacacacaaaagattgtggaaaaatacaccaagtcaaatgttgatattcacacttttaatcagagcaagtatcctcgtgttgttgctgatgagtttgtgccgtggccaagcaaaggaaagactgacaaggatggatggtatcctcccggtcacggtgatgtattcccatctctcatgaacagtggcaagcttgatgcgttcttatcacagggtaaggagtatgtgttcatcgcccactcaggcaaacttgggcgcaatcgttgactttaaaatcttgaagcacctgttcccggacaaaaatgggtcctgtttggggggttcacccaaacactttggctgttttaaagggggggccttttttttttttcggggggaaagnccccttttnggggtttnccagg

SEQ ID NO: 119862 - DNA, 589 bp, Arabidopsis thaliana
  unsure (1)..(589): unsure at all n locations
cgcccgcaggaccgnaacnanntnnggaggcgacccacgcgtgctctcaatctttctctcctgcgttttaatttctctcggattgaaatcatccatggctgccaccgcaaccgagaagctccctcagctcaaatccgccgtcgatggacttactgagatgagcgagaatgagaagagtggattcatcaacctcgtttcacgttacctcagtggtgaagcccagcacattgaatggagcaagatccagacacctactgatgaaattgttgttccttatgataaaatggctaacgtctctgaagatgcttccgagaccaaatatctgttggacaagcttgttgtgctgaagcttaatggaggtttgggaaccacaatgggatgcactggtccaaaatcggttattgaagttcgtgatggtttgacatttcttgacctgattgttatccagattgagaatctcaacaacaagtataactgcaaggttcctttggttcttatgaactcattcaatacacatgatgacacacaaaagattgtggaaaaatacaccaagtcaaatgttgatattcacacttttaatcagagcaag

SEQ ID NO: 119863 - DNA, 431 bp, Arabidopsis thaliana
gaaaaatgaagaagaagttaattaattttagatctccactacacttttaacaattacatacactcaaaatcttagcggcattttttctaaaggtttcccaaagaaggagagctcactttatctttcgtctctcttcttaggtctagggttctggtggagaagattgtggttgtttcttagggttttctgagagaaagcatgttgttaactacgggaagaaaggagaaactctctgtttctaaaggttctgaaattgaaatctcgtctcaagagtatgagtatggtagtggaaatgtctggtattgtgtcattctcgaagaaaatctagctaaatcgaagcggaagaagctctctgtccgtcacttggatcctctgctcaagtatgattattctcctccgttaatcaaaaccaccgtgcatcgtttcatgcg

SEQ ID NO: 119864 - DNA, 372 bp, Arabidopsis thaliana
ccgggcgaccacgcgtgcgtccatttgaattatcatgtcatgcgtgtctcttgcggttggtccaagagccgacgtggacaaaacggcgtcatccagtgagaagggacggtggtcggggatgacggcgataggaggtggcagtggaggtttgatggggtcgttaagggttatagagctacagctagtcgcgttcatactagttttctcagcaagcggtctcgtaccaatacttgacatgctttttccagcgtttgcgtctatctatataatcgccctctcgcgtttagctttcccttctcacggcgtttccaccgcttcccccgaagtcttccgcggcagcaaactcttcaagttgtacgtgattttcgggac

SEQ ID NO: 119865 - DNA, 1215 bp, Arabidopsis thaliana
acgtcctatagacagcctgacgtcgcatgcacgcgtacgtaagcttggatcctctagagcggccgccctttttttttttttttttttttttttttccattaaaaaggcaatatcattcaatagtggattaataatggactgtccatcttagaataaaacctttacttactctaaatgtcatcgactcattgaaacacttggttcttacaaaaaagtaatcttgcccaatttctcgtttggttcgaatcttgaaaaaacacccttgaatattcctctcagtttagcaaagcagatgtcatcaaagtttccttgccgatctggcatgatactcatgtttcaggaggttggctcttaacagcatcgccctgacatctctatcgaattcgtttcccatctgaagtacctttgggaaagttgcattcctctgatccgcgtgtcttgcatagaggattttgttgggtgaatcaatccttgcctgaatctggttgtctgtgatcaaggcttcaagttcttcctctagaccagagacgctagtcttgaatgcatcggccatccggctcaaatcaacagagacaaatggcattgtgtactggatcagtgccttcttccttatctgatcatatagtgtgtcaacgtgatcatgaagatggatgtccagcagcagattcgatttgagacttgcaagatattccaggcaggaagcatagcggcttgaatagaaatcgttgataagttccctcacatcaggcactagctccaagaaattccggaagttgatattgtcaatgactttttgcttcaattctgatcgatcaaagcttgccagggcacagagtccaccataggtggcaatatcttgaggagcaatgacttcattataggaatttccaagttctgggttaacatctaagaacttacgagcagctagcttgtacttcttcaactccaaatgagccaatccagatgcacatcgcagttttgcattaaccataggttcaagggtttcaggattctgctctgccttgttcacatagcttgtaacatgagtaaactgacccatttcgatgctgacaagaatcgcattcatacacatgtgaatgatgtgctttgtcgtagtgcagtagtcgcgtgttcggatatagttcttgaaagcatctccgagcataccacatgcgtaatagaaatctccaaagtcattgtaacccattctgatgc

SEQ ID NO: 119866 - DNA, 863 bp, Arabidopsis thaliana
  unsure (1)..(863): unsure at all n locations
tttnaaaaaatttttccccgnaaaaaaaccncnnnccnaaaaatttagggccccaaaacttttaaaactttaacgcccgtcgatcaccggtccacataagctcgagaaatcgtcgtttctcatcgcgtaaaacgtactgtagaacataactctagtccgactcgagacagcgacgaatctcaatgacgatcgcttgaatcctcctttccctttcgattcatacgggaccttgatcgtgtcttttccggcgaaagcttcgacgatcattgatccggcgcaagcgttgctagcatctccgacagagaaggataggacgtaggtttttccagggatagtgcggacaacttgtgcgacggcgctttctttcccggcgacgagttcgacggcgcgacggccttgaggaacggagaaatgatcggaatctatgtatttgacagctttaagagactcgaccatccaaccaggtaacggagagtgatcgtcgatggagtttggtggaatcaaaacaccagatgatatgtttggtaaaacccaaggaccttcttcgaatcctccgttctttagaatgttcttattggtgggacgaggagggaaaagggctcgcatagcaacaccatcaatgagaggtccacaagcaggatcttcctcaacacctggattatgtatcactatatctgcatagtcactttgggccttaaaagcccacgaatacaaatcccaacctgagctactatacactgtttgtatcggcatcactgcatggtgaggagccacgcgaccgcgaannnnnnnnnnnnnnnnnnnnnnnnnnnnnnnnnnnnnnnnnnnnnnnnnnnnnnnnnnnnnnnnnnnnnnnnnnnnnn

SEQ ID NO: 119867 - DNA, 678 bp, Arabidopsis thaliana
tgcagtaccgctccggaattcccgggtcgacccacgcgtccgctcatgttgagagatacttctggacaatggttaaccagccagaattcaagaaggtgttgggtgatgccaaacaaaccgaagctgtccctccagttcctactaagaaagctccacagcctgctaagcccaaggaggagcccaagaaggcagcccctgtagcagaggcaccaaagcctgctgaagaggaagaggcaccaaagcccaaagccaagaaccctcttgacttgctaccaccaagccctatggttctagatgattggaagaggctttactcaaacaccaaatctaacttccgcgaggttgctattaaaggattctgggacatgtatgacccagagggatactcactatggttctgtgactacaagtacaacgatgagaacatggtgtcatttgtcacgctcaacaaggttagggtgggttccttcagcgtatggacttggcacgtaaatacctcctttggaaagatgcttatttgtgggtcagagggtcctttctaaggtgaagggtttatgggctttttccgtgggaccaaaaaatcccccaagttcataaatgggattgaggttgtactaaccatggcagccttgtaccaagttggcactaaaagggtttgaatattctttccgaatggga

SEQ ID NO: 119868 - DNA, 810 bp, Arabidopsis thaliana
ctccctggtcctcacaacaccctatactgagtcataataacagaaggggatgactggaagaggccttacccaaacaaaaccaaatccgtgaggttgctatcaaaggattctgggacatgtatgacccggaggggtactcactatggttctgtgactataagtacaacgatgagaacatggtctcctttgttacactcaacaaggtaggagggttccttcagcgtatggacttggcacgtaaatactcctttggaaagatgcttatttgcgggtcagagggtcctttcaaggtgaagggtttatggcttttccgtggaccagagatccccaagttcataatggatgaggtgtacgacatggagctgtacgagtggactaaggttgatatctccgatgaagcacagaaggagcgtgttagccagatgattgaagacgctgagccatttgaaggcgaggctcttttggacgccaaatgctttaagtgaaaaggctctttgtatctccgtagaggtttactctgttactcgtgttttgataccttctagagagtccttaccaccttttgaatcgtactcgggtttaagaactagttgcttctcaatgttattttgacagaatattggtcttaaataccttacaacctccaggtaatggttttaatttggtttttaataacccaacttctgggttgtaccatcttttccggcccccaaatccttccagcccggggaatccccaagtttaaaaccgccgccccccccgtgaagctccagcttttgttccccttagtgagggttatttcgagctgaa

SEQ ID NO: 119869 - DNA, 1133 bp, Arabidopsis thaliana
  unsure (1)..(1133): unsure at all n locations
aaacccctggaagcttttcggcagggcntcagggaggtnngnctcccgnggccaggcccccnagtcaaaangggntgggnntccccatgggctttacgagtggcctagggttggtccctccgatgaaccacaggagggcccgtgttagccagatggttgaagccgctgagcccatttgaaggcgaggctcttttgggccgccaaatgcttttaagtgaaaaggctctttgtatctccgtagaggtttactctggttactcgtgttttgatgccttctagagagtccttaccaccttttgaatcgtactcgggtttaagaactagttgcttctcaatgttattttgacagaatattgttcttaaatacattacagcttctagtgttcatttttttttgcaggatgttttgtatttgtccactcagtgaggaagaaacattcttaaatcacaagatcataaaatttcacggttcgatatgattgaccagagtaatttcttttttctttgtcaaataacattaagctttaaaacaacaacaaaaacagtgggccactgggcctaaaagcccaatttctcactagacgcgagaaacccacagtgactgtcatcattcattgtcccgtgaatcaactcgtcgccgcaagctcacggcctccgagcactgagaagcttaacgtcgtcgatcaccggtccacataagctcgagaaatcgtcgtttctcatcgcgtaaaacgtactgtagaacataactctagtccgactcgagacagcgacgaatctcaatgacgatcgcttgaatcctcctttccctttcgattcatacgggaccttgatcgtgtcttttccggcgaaagcttcgacgatcattgatccggcgcaagcgttgctagcatctccgacagagaaggataggacgtaggtttttccaggggtagtgcggacaacttgtgcgacggggctttctttcccggcgacgagttcgacggcgcgacggcctttaggaccggggaatgttcggaatctatgaattgaaccttaaggggcggcatcaccaggaacgggatgtcgccaggggttggcgacntgggnaccnggatccggcggactgagggacagttcccaaagggcgatag

SEQ ID NO: 119870 - DNA, 1378 bp, Arabidopsis thaliana
  unsure (1)..(1378): unsure at all n locations
nnnnnnnnnnnnnnnnnnnnnnnnnnnnnnnnnnnnnnnnnnnnnnnnnnnnnnnnnnnnnncacgcgtccggctattccacgcctcaactttttgcttcttctctctcgatttgctctcacggaagattcttcagaatatctgatccgatatcagaagccccaagttcgcttgaattccgtctgagcaatggctttggtcttgcacacgtacaagggaaacaaaagtgctgagaaggcactcattgcagcagagtacgttggtgtgcagatcgatgtgccctctgactttcagatgggtgtcactaacaaaacccctgcgttcctcaagatgaaccctattggaaaggttcctgtacttgagactcccgagggttcagtatttgaaagcaacgcaattgcccgttatgtaagccgattgaatggtgacaactctttgaacggatcctccctgatcgaatatgcacaaattgagcaatggattgatttctcttcattggagatctatgcaagtatcttgaggtggttcggcccaagaatgggctttatgccatacagtgctccggctgaagaaggtgcgatctctacgttgaagagagcacttgatgctctgaacacacatctcacgtctaacacttaccttgtcggacactctattacccttgctgatatcatcactgtctgcaacttgaacttgggatttgctactgtcatgaccaagaaatttacctctgaatttcctcatgttgagaggtacttctggactgtggttaaccaaccaaacttcactaaagtgttgggtgatgtcaaacagactgaagctgtccctcctattgcttccaagaaagctgcccagcctgcaaagcccaaagaagagcctaagaaaaaggaagccccagtagcagaggcacctaagcttgctgaagaggaggaggcaccaaagcccaaagccaagaaccctcttgacttgctaccaccaagccctatggttctagatgattggaagaggctttactcgaacaccaaatccaacttccgtgaggttgctatcaaaggattctgggacatgtatgacccggagggtactcactatggttctgtgactataagtacaacgatgagaacatggtctcctttgttacactcaacaaggtaggagggttccttcagcgtatggacttggcacgtaaatactcctttggaaagatgcttatttncgggtcanagggtcctttcaaaggtgaagggttttatggcttttccgtggaccagagatccccaagttcataattggatgagggtntacgnnaattggngctgtacggntttggctaagggttnanatctnccgctgaagnannannaggnncnttttancc

SEQ ID NO: 119871 - DNA, 870 bp, Arabidopsis thaliana
ctggagctccaccgcgggtggcgggccgctctagaactagtggatcccccgggctgcaggatttcgcgggcgcctccgtttgagcaatggcgttggtcatgcacacatacaagggaaacaaaggtgccaataaggcacttattgctgcagagtatgcgggtgtgaagatcgaggagtccgcagactttcagatgggcgtcactaacaagtcacctgagttccttaagatgaaccctattggaaaggttcctgtgcttgagactcctgaaggtcccatatttgagagcaatgccattgcccgatatgtgagccgtaagaatggtgacaactctttgaatggatcctcccttattgaatacgctcacattgagcaatggatcgatttctcctcattggagattgatgctaacatgttgaagtggtttgctccaagaatgggctatgctcccttctctgccccagctgaggaagcggcaatttctgcattgaagagaggacttgaggctctgaacacacatctcgcctccaacactttccttgttggacactctgtcacccttgctgatattgtcacaatctgcatcttgaacttgggatttgccaccgtgatgaccaagaaatttacctctgcattccctcatgttgagagatacttctcggacaatggttaaccagccagaattcaagaagggtgtttgggtgatgcccaaacaaacccgaggctgtccctccagtttccctactaagaaacgctcccacagcccttgcttaggcccaagggggcggcccaagaaggcagtcccctgttgcaggggcaccaaagcctgctggggggggggaagcaccaaatcctaaagccaagaatcctct

SEQ ID NO: 119872 - DNA, 547 bp, Arabidopsis thaliana
  unsure (1)..(547): unsure at all n locations
gtatttctcgccgccgcttttgtatcttcttctctctcgctttgctctctcggaattgtttttgcagaaagtctctcatctgaactcagaaaatctccgagttcgtatatcttctccgtttgagcaatggcgttggtcatgcacacatacaagggaaacaaaggtgccaataaggcacttattgctgcagagtatgcgggtgtgaagatcgaggagtccgcagactttcagatgggcgtcactaacaagtcacctgagttccttaagatgaaccctattggaaaggttcctgtgcttgagactcctgaaggtcccatatttgagagcaatgccattgcccgatatgtgagccgtaagaatggtgacaactctttgaatggatcctcccttattgaatacgctcacattgagcaatggatcgatttctcctcattggagattgatgctaacatgttgaagtggtttctcccagaattgggctattgncccttntttnncccagcttngggaggggnaattnntnnattnagngggggctttngggnnt

SEQ ID NO: 119873 - DNA, 453 bp, Arabidopsis thaliana
  unsure (1)..(453): unsure at all n locations
cagggncaccaaaaacgggtaaaaaaggggcccgntatgtacaatggcattctagcaaccttctttcaccccaacaaccaaaaaaatttatggataggttgtgtggttccttccttttcaaaaaaacctcgattttctcggggatgattctttcttcgnagacctcagcttcataacaagacttccttcgccggatctactaaatcctgtggtggtttccgtttaaagagagaagaacaacaaacaaaacaaacctgaattaaccaaaatccagattaaaatcaattctcatcagctttcgccatgattgagagtcgactaggacgtggctgataagcagctcgtcttttcagatgatgcgaagaaggtcgaattaaagtagtcaaagctcttctcacccactctccttcaacaccaccaattctcaccagcgaattagtcatcgcagatcga

SEQ ID NO: 119874 - DNA, 612 bp, Arabidopsis thaliana
  unsure (1)..(612): unsure at all n locations
tgtatgagtggactaaggttgatatctcagatgaagcccagaaggagcgtgttagccagatgattgaagacgcagagccatttgaaggtgaggctctcttggacgccaagtgcttcaagtgagaagagagaatggtttggtacttccatttacaggttttgcagctggggctttacatatctttctatctgtctgtctcacataggggttttgctctgtgacgtgtcgcatagactgtttttttcttttctaatcgagtgtcaaggacaagtctttttagttctttgttaatgtttcgcctccgtccagaattgtttactataccagttttcgaaatcctgaccggccagtctaccctggcaataggcaatacatggtctggtttatttgttttacggtaattttgccttgattgattttctttgacgcgtttcggtcaacttatagacattggtctttgagttgaacatttagcggccgnnnnnnnnnnnnnnnnnnnnnnnnnnnnnnnnnnnnnnnnnnnnnnnnnnnnnnnnnnnnnnnnnnnnnnnnnnnnnnnnnnnnnnnnnnnnnnnnnacgagagtgcaaatcaaagggtcgtgccctgtagt

SEQ ID NO: 119875 - DNA, 382 bp, Arabidopsis thaliana
aggcacaggaaaggagcatgtagcccagatgattcgaagacgctgagccatttgcaaggcgaggctcttttggacgccaaatgctttaagtgaaaaggctctttgtatctccgtagaggtttactctgttactcgtgttttgataccatctagagagtccttaccaccttttgaatcgtactcgggtttaagaactagttgcttctcaatgttattttgacagaatattgttcttaaatacattacaacttctagttattgttttaattttgttttttattatccaaactcgtgtgtgtgacattctctgtttaaattagttgcttggaagatgcaaagaatctcgtttaatggggcatactgaatttcattttaaagttgt

SEQ ID NO: 119876 - DNA, 552 bp, Arabidopsis thaliana
  unsure (1)..(552): unsure at all n locations
cccacgcaaccgatctctctctctctctttctcttccatctgacctgttgatgtgagtttgcagatattcaaacaactcaatcctcattccctttgtttcgcctctctggatttcgaagagctgagagattagggtttctcgattttcgagattagagtctaatccccaccaccagcatagctgatatcctggaggagagaatgacggattcgggtctaatgatgccggcggagattgctggaattctaaccacggcgattacgagttggtgggatgatgttaatgagtcaactcagtggcaagatgggatctttttcgctctttgtggtgcttatgctcttgtttccgccgttgctcttgttcaactgataaggatccaaatgagagtgcctgagtatggttggactactcagaaggtgtttcatcttatgaactttgtcgtcaatggagttcgtgcgggtcctgtttggatttcacaatgnaagnatttcttngttcaacccaagggtnttttcttgggacctatttgnacttccnnggccttcttttgt

SEQ ID NO: 119877 - DNA, 499 bp, Arabidopsis thaliana
cccacgcgtccgtcaaacatggcttctcactcgtcgactctcctctcttctcctactttcgctcctttctcctctcatcgtcttcattattctcccaatccctctactctcagattctcccgtccaatcagaaataaacctaatctcgccttgcgatgttcagtctcaattgagaaagaagttcccgaaactgaacgaccctttactttccttagggattctgatgacgtcactccatcttcttcttcttcttccgtcagggctcgtttcgagactatgattagggctgctcaagacagtgtttgtgatgcaattgaagctatagaaggcggtcctaagtttaaagaagatgtttggtctcgacctggtggtggcggtggaatcagtcgtgtgttgcaggacgggaatgtctttgagaaagctggtgttaatgtctctgtggtttatggtgttatgcctcctgaagcttatagagctgcaaagggctcagcttctgatc

SEQ ID NO: 119878 - DNA, 457 bp, Arabidopsis thaliana
cggacgcgtgggcggacgcgtgggcggacttatatcgttgccagagagagtttgacggcggagagatatggcggcgttgatggagtcagtcgtcggccgagctctaaaattctcatcgacggcgaatttcaggtcaatccgacgcggcgaaacaccaacactctgtatcaaatcattctccaccattatgtcaccaccgtcaaaagccatcgtctacgaagaacacggctctcccgattccgtcaccagattggtgaatctcccgccggtggaagtgaaagaaaacgacgtttgtgttaaaatgatcgccgctccgatcaacccctccgatatcaatcgaattgaaggtgtgtatccggtgaggccaccggtaccagcggttggtggttatgaaggtgttggtgaagtttatgcagttggctccaatgttaatggtttttctcctggtgattgggtc

SEQ ID NO: 119879 - DNA, 1039 bp, Arabidopsis thaliana
  unsure (1)..(1039): unsure at all n locations
nnnnnnnnnnnnnnnnnnnnnnnnnnnnnnnnnnnnnnnnnnnnnnnnnnnnnnnnnnnnnnnnnnnnnnnnggagccacgcgtgcgctgactgtctctctcctctaatcttttttatccgctagggttttgaagcaaggtttctcgcgattttctcgatatctctcgcccatggcgaaaccaagtcgtggccgtcgttccccctccgtgtctggctcgtcatctcgttccagttccagatctcgttcgggttcgagcccctccaggtctatttcccgctcacgctcccgttctagatcgctctcttcatcttcatctccttcgcgaagcgtcagttctgggagtcgcagtcctccacgtcgtggaaaaagtcctgctggacctgctaggcgaggtcgctctcctcctcctccaccatctaaaggagcatcttcaccttccaagaaagctgttcaagaatctcttgttctccatgttgattctcttagcaggaatgtgaatgaagcccatctcaaagaaatctttggcaactttggtgaagttatacatgtcgaaattgcgatggatcgagctgttaatcttccaagaggacatggttatgttgagttcaaggcaagagctgatgctgagaaagctcagctctacatggatggtgcccaaattgatggaaaggttgttaaagcaacgttcacactaccacctcgtcagaaagtatcttcaccccctaaacctgtctcagctgcaccaaaaagagatgctccaaaatctgataatgctgctgctgacgctgagaaagatggtggtcccaggcgcccaagagagacatctcctcaacggaaaacagggctttctccgagaaggcgatcacctctacctaggagaggcttatcacctagaaggcgatcacctgattctccccatcgccggaggccgggctctcctatccgccgtcgcggtgatacaccttctagacgtaggccagcatcaccatctagaggccgttctccatcttctcccccttcaagacgatatagaatct

SEQ ID NO: 119880 - DNA, 1537 bp, Arabidopsis thaliana
  unsure (1)..(1537): unsure at all n locations
ccaattcccgggtcgtccatctttctaatttatctttccatttccgagccgttgagaattttttctgagagataatttaacaaatttcttcttcttcttctgtttctgaaccaccaaatctgcctttctcaattagctatgggcgtcgctgttctaaatccccaggattgcttgaaagatccattctctcacatgaaacaacatcgtaatcctagcgcatgtcccaacaggcagaagaagacggtctccaacaaccgtacacgccggagtcctcctcgtagtcaatcctccagatcttcttctcctcctgtagcgccgccgcttcctcctcctcgtgcggctgtctctgctttcgttccaaagggaacccttaagaagagtcttagcaataccgttgccgttagccaggtgagaatccttaagcgcggcgaagaaatccccaaggagacttcagatctggttgtggaaatgtcagatctgggatctactcgtcggattggaccagatccgggtttgattccgggtcagatccgtttatctggccgcaaatcgaaatcagcaccgttttacgccggtcctgtgaccatgacctcgccgcctcctagcgatgtcccgcttccagctttcttcacgaagaaggcaacaaatgatctcatcaggatccttcgcctagacatcgcctgacggtgtctgtcaccgatcatttttgattttttaaaaatctccgatgatccaaatggttaccaaagtgttacatttccgtattaccgatcgtccgattccgcctgaaaaccggagatctgcaacaaaatataatctccagacgatgatgaatctagaagatgaagaaacacacatcttcgttatgaaccgtttcgaatcttcccttattttttcaaggggcaagatcgaaatatcttcttaacaggtcttagtttctcttcttagggtttagtgtttgtgtaggagtatttgtgtatagactttttactagttttcgtatctttctctgtatcttcgggtttttaatttctgcttaatcgtcaggttctctgggtaaatcataggttggcttttgtcatttcgtctgtgtcttaagtggattagttggtcgtaagacaagttatagagatgtgtttacgggtaaagatgaagcttaggttttgatgtaatcttcttcggtttttcaattctctgtatttctctatctttttagtttatcaagtttaagttttatttggggtttcttcttcgtttgggtatctttctgtttttccttaaggttcttcgtttgtttccgtgtcgtctaggttaagtcaaagtaaagagatgtaattactggttagatgaatcttaaggtttccatgtaaccgtttgtactacaattctctgtacttctctatctttaatattatcgaaaataaagttttaatctttggcgtttaaaaaaaaaaaaaaaaagnnnnnnnnnnnnnnnnnnnnnnnnnnnnnnnnnnnnnnnnnnnnnnnnnnnnnnnnnnnnnnnnnnngtacctaa

SEQ ID NO: 119881 - DNA, 621 bp, Arabidopsis thaliana
gactagttctagtaagtctctcgagtttggtacgagtactcggatgagcaatggtaaagagatagaagtgattaatttggatgatgatcaagaagtggtaaagtccagcaatgatccaggaagaaagcaagaagctgctccatatttgggcatcgatgccgtcccagacttcaatgaaggactcatgatggtagagtatctggattcctttactccaataacccagggacccagtagtgtcccacagaataacaacacagttagccttcaagaccgagagggagctattggaaatgaccaagtaccaaataatacagtcgatgattcgattcttcatgtcactccggaggaattcccattgacattctttgcaagctttgggaccaacctccagctcgaggctacgggaaggcctttctgattctctttttttttgttatgtttcttcagtctgtgtaatgagtgtgtagtagcccaatttcgtttgtttccgtgtcgtctaggttaagtcaaagtaaagagatgtaattactggttagatgaatcttaaggtttccatgtaaccgtttgtactacaattctctgtacttctctatctttaatattatcgaatttaagttt

SEQ ID NO: 119882 - DNA, 628 bp, Arabidopsis thaliana
  unsure (1)..(628): unsure at all n locations
aacccctattcaggcaacgaaactctacngctagtccccctaggttaggttgggtagggnnatgggaaagcctttacnagttccgaacttccctaaactcgggtttttaatttctgcttaatcgtcaggttctctgggtaaatcataggtgggcttttgtcatttcgtctgtgtcttaagtggattagttggtcgtaagacaagttatagagatgtgtttacgggtaaagatgaagcttaggttttgatgtaatcttcttcggtttttcaattctctgtatttctctatctttttagtttatcaagtttaagttttatttggggtttcttcttcgtttgggtatctttctgtttttccttaaggttcttcgtttgtttccgtgtcgtctaggttaagtcaaagtaaagagatgtaattactggttagatgaatcttaaggtttccatgtaaccgtttgtactacaattctctgtacttctctatctttaatattatcgaatttaagtttaaaaaaaaaaaaaaaaaaagccaaaaaaaaaaacacaaagnnnnnnnnnnnnnnnnnnnnnnnnnnnnnnnnnnnnnnnnnnnnnnnnnnnnnnnnnnnnnnnnncacaataattcatg

SEQ ID NO: 119883 - DNA, 429 bp, Arabidopsis thaliana
tttcaatttccttctctccttaacaaaaatctcttcttggcaagaaacaaacacaaatgaggaatgggcatgctaaccggagatcaccgggtccaatcacgtcggcagcaactcaacgccggctaaaaccggagccagaaccgacggtgaagaaattcatcaagattattctcctctcaacaatcatagaaaaaatgatgaaagttccggctagatttgtgaggtttggtcctaaactcactgacaacgtgactctccagactcctgttggtttcaagagatcaattcggattaaaagaatcggtgatgaggtttggttcgagaaaggttggagtgagtttgcagaggctcactctttaagtgatggtcactttctgttttttcattacgaaggggattcttgttttcgtgttgtgatctttgatgtgt

SEQ ID NO: 119884 - DNA, 789 bp, Arabidopsis thaliana
ctttgttcaccatctttctctttctgtttaaaaatccaaatcttttaagaataaaatattgaaatgaaaagaagaataaacttaatttttcattatttcaaccgaattcaaaaaaaatctatttgcttttttaatttgtgtgatgcgggtaagtaaggtagaaccgcagattctaagagttttaataaaaaaatctatatttatttatttatatataaatatagatttctattcaaactaatatggaattcattttcattctgaccgaacctttacgcgtgggtaagcgattccattcatagagaaagaaaaggtatagattattatatactgactgaactatgactattcatgattccatcattgaatcaattacacaaactagaggaatgttatggtaaaacttcgtttaaaacgatgtggtagaaagcaacgtacgacttgaattgaaggacattatctgctgtggatttttgcatccgccacttttatttttatattaggaatataggtgctcttggctcgacattttgtattctattttacaagagtcctacacttttttgtaatataaaaaagagtacaggatggagctcgaggagaatagaaagtttttagtcctttcgcaggagtaaggatctagggttagtgcgaattaataagttggaacaacttcgtaagtctttttatattgaaaaaagtcctttcaagcaattttacaatggaaaaggaaattttcttaaaattgtaaaattctttgaatcaaaagtctatcatgcgtgaatcaag

SEQ ID NO: 119885 - DNA, 844 bp, Arabidopsis thaliana
gccacaatttcaaatgcttttaaggttctttcagtttcaacgtttataggagcaatattttgctttgctgctttctgtttcaagagcatgtatgcatttttagctctttttgctgttggtgaacttcttgtctttgccacacagggtcctgtgaatttcatagttctccattgtgtcaaaccaagtctgagaccacttgcaatggcgatgtctactgtctctatccatatctttggagatgtaccttcctcaccactcgttggagttcttcaggactacgtgaacaattggagagtgacttctcttgttcttacattcgttctctttccagctgctgcaatttggtccatagggattttcctgaatagtgtggatcgatataacgaagattccgagcctgatgcagtaaccagagaatcaaccgctgcgcctcttctccaggaagcatgagacaaaaaaactcaaaaggtcactgtgagaattttatggtttattctcagttctttatctactttcttgtacaaatagaattgtggctgaaacataaacaaatgtcaaattaccttcatttgtgtattcttgtttcactgtttgcaaaattatgaaaggaccatccctatttctctacagaaaaaataacttaatagtccattacgacatgaatctcgggtctttgagatcataccgggaaatgtttttcaacatcatcattcacaagatagagcttaaggtgcatccaaagaaatcgcaacaatcttccaatctagctctccttcatcaatcatagccaaaagcagctaaaggcttaacctttagaacgtcaccaatctcaacaacatcaact

SEQ ID NO: 119886 - DNA, 790 bp, Arabidopsis thaliana
gggatgaagtacgtggcaaattttggaagaggctctctctcttctctcacctctatctttcagagagagagtccaaattttccgatcttaatcggatttcaatccggcggtcatgccggttttagcttgtttatagtttatgtttcagtttgttacttctcttttgctttccgatttagatcaaaactctcacatatgattctgaaacttaattttattgtctgatgagtttttgatctagattcggataataaattccttcttaatccggtttgttcctgattaagtcggattgtgtgtttttgttcttccttctccagagagtataactttgatcccgattgcaaccggcagatctcctttgattctccatctgctcaacccctctcttcaagctggagtaatttcttcgtcgttatgcttcttatgaagtagaccttcttaggtctcaaggcggagcttcctcttggagtcagaattgagaagtttgaagattgaagatcttcctgaggttattcatggtgggagtgaaggattttgatcggacctgcaacggatagatctgtggaaggttgaggtggtggaactacgaagcccggcggcggagctgcgtcaaatcgtggatttttccggcaccgtctgcgacaaaccgctccttcttgcgtgttggacacctggcggcacgtggcaccattttctcttaattttagcttaattagctaggttaagcagtaattactctaatcatggttgtaaatgggggagaatgggcttgtaatccactctatgt

SEQ ID NO: 119887 - DNA, 539 bp, Arabidopsis thaliana
aaaatctgctctttgccctaaaaacggcaaaaagatcccacctttcaatcaacccggattattcccctgtttcggcagcggttgtatgaaccaaccgacgctgaaccacggaaaaaccgagcttcagagagatggtcaaaccatgaagggatggttcaatggtacgtacgagcaaggggcagattttggaaatgggttggatgggataagttattacgaggttgtgtgggagaagagagtaggcgttggtggttgggtatttaaacataagcttaagacttcagctaagtacccatggcttatgctttaccttagagctgatgccactaaaggattctctggtggataccattatgacactagaggaatgctcaaaacacttccggagtcaccctacctttaagtgagactaacactaaatgtaaaacatggatgcggagccaagagtcaattctattcttttgacattggaagctgttgtaaaaacaacggtatgccctgcgactgtgactgtactaccgacgtaactcgttacttgg

SEQ ID NO: 119888 - DNA, 849 bp, Arabidopsis thaliana
acccacgcgtccgcttttgctggagctggaacccgaatctgatcctgtgtggcattatctaaatgttcagaatcatagaatccacggcttgcttgagaaatgtacatatgatcatgaagcaagggtggaaattttgcgtaacgacactcatgagaaagccatctcagatgcaaagtggcaacaaattcaacaaaatggcgtttcatattcagataccgcctcttctaatgaaaataatgcagttcaagttgacctacaatcagtggaattccccagcgaagagattgatattttgaagggaagatacatcaaaagattgactgctgtgcttgtgcatcatatccctgtgttttggaaaacagctatatctattttcagtggaaaatttgccaagtcctcccaagttactgatacttcagccaataaagctgaggagaaggtcacagaggcaagatattcaactcattctttggaagaagttgctgggatgatacgcaagactatttctgtctatgaagcaaaggtgaacagcacattttgtgattttgatgaatcatgcattctccgcccatttatgagtgatgccatcaacgaagtatcaaaagcatgccaagcttttgaagccaaagagtcaacgccccacagtgctgtcgttgcactgagaaaaatccaggcggaaatcactaagatttatatccaaaggctttgctcttggatgagggcctccacggaaggaatatcacaagaggagacgtggatcccggtttctattcttgaaaggaatagagctccatatgccatctcttacttgcctcttgcattccgttcagttattgtctctggcatgga

SEQ ID NO: 119889 - DNA, 509 bp, Arabidopsis thaliana
gtcaaattgttcaaagcatcaaataagtaaataaaaactcttttatggtcacctttttcactatcctctctttgtgtttcaaatcgtgggaacaaattatcacaatggaggcttctaaagaagctcatcaccttccaaactacatgaaagacgacaacgttaatcaagaaaccaagaacttgatcacttctctaccttcagacaaagatttcatgggttatggtctctacaactacaaaggttgttggtactatccaaacacactccaagccgttcttgacgtccaaaaacacttcaagccacgagatactgatataatcctcgcttctttgcccaaaggtggaaccacttggctcaaatccctaattttcgctgttgtacatagagaaaagtaccgcggaacccctcaaacacatcctttttgcactctttacaaaaccctcatgaccttgtccatttcttgaggttgagttatacgctaatagcaatcggatctcgcaagatcttct

SEQ ID NO: 119890 - DNA, 677 bp, Arabidopsis thaliana
atttagtcgtagcgaacaaatctatcccactcattggatttcaatttcataaattttaggttgtaaaattcgggtttggagaaaattgggggtaaatctagggttctgggaaaattagggttctgggaaaattagggttcatccatgctgtcgagttttagggtcaagtaaatgacggatccattaggatccgttttatatcttatgctctctcgtctcaatatatatatttaaaaatctcagcctttgggcttcgttagtgttggtttgctttcagaatttaacttagttacggtaaaagcaatgcttagcgttatacgagtgcatctaccgtcggagattcctattgttggctgcgaacttacaccttacgtacttctccggcggcctgataagaccccctccaccgatgatgtgcctgagtcagccccgcttgaaggtcacttcttaaagtacagatggtttcgagtacagagtgataagaaagttgcgatttgtagtgtgcatccatccgagacggcaacattgcagtgtctgggatgtctaaagtctaaagttcctgttgccaaaagctaccattgctctactaagtgcttttcggatgcgtggcaacatcaccgtgtgttgcatgagcgtgctgccagtgctgctacagaaggaaatgatgaagaagagtt

SEQ ID NO: 119891 - DNA, 714 bp, Arabidopsis thaliana
  unsure (1)..(714): unsure at all n locations
cggaancgnncccaanncggcatttccctttggggtgccnttccnttccttggcccntccnngtncagccnttggccccaggcctggccccaccnccattggtagacagttcttgaggatccaccctcccctggattgaagaatgttgatcttccccggttcgctcccttggattcgggcaaaggttcagtgcccattgacctcttcaaggatactgctcccaatgtggttgcccagttcatgaaattctgtcaagatgggtatttcaaaggtttcttattcagtcgagttgtaaagcattttgtgattcaagccggtgactctgcggagttcgatgctgtcaaagattgggcactcgacagaaagaacattgataccagtttgaaacatgaagaattcatggtgggaactcctaaagctaaaaacgagcaaggaggattcgagttcttcattgtgtctgctcagatcaaagatctgaacgagaaattgactgtctttggtcgagtttctaaaggacaagacgttgttcaggagatcgaagaggttgagacagatgatcagtatcaaccaaagtcgccaatagagatcatgtccgtcactttgcttcaagacatgtaaaagcttttttacttcttgtctctctctcttgtatgaaactcaaggcggccgccttgtcgatatcaagcttagtgataccgtcgacgtctagggggg

SEQ ID NO: 119892 - DNA, 674 bp, Arabidopsis thaliana
  unsure (1)..(674): unsure at all n locations
ttnnnnnnnnnnnnnnnnnnnnnnncggacgcgtgggcaaggaagaagaagaagaagaccaaagagagtaagtaatggcgaagatcaaacctcaagcattgttgcagcaaagcaagaagaagaaaggaccgtctcggataagcataaccaacatcgtcatttacactttggctgtgcttttgcttgtctttgttctcttctctgcttacagacgttggactcacagatctgagatcccaacgcacaatggtagatcagttcttgaggatgcagccttccctggaatgaagaatgttgatcttccgcggtttgctaccttagatacgggcaaaggttcagtgaccattgaactcttcaaggatactgctcccaatgtggttgaccagttcatgaaattctgtcaagatgggtatttcaaaggtttcttattcagtcgagttgtaaagcattttgtgattcaagccggtgactctgcggagttcgatgctgtcatagattgggcactcgacagaagaacattgtaccagttgaaacagaagattcaggngggaancnaaagcaaaaacggcaagggggtcggtcttcatggggcgcccaatnaaattgaacgggaatgcngcttggcggttcaaaggnaaacgtttcaggatcaaagtaanatgcngtcacaattc

SEQ ID NO: 119893 - DNA, 619 bp, Arabidopsis thaliana
  unsure (1)..(619): unsure at all n locations
aaaagctgttgtcaagagaagaaggaagagaggagataaaaagccaaacaaatggcgttcaatatcataacacctggtcgtgtttattcagccacgtctctcactttcgtttccaccattaaagctgctttcgttaaacctcctttggcctctccgtctcgtcgtaacctccttcgtttctcatcatctcctttgtcatttccgtcgctccgtcgaggtttccacggtggtcgtattgtggcaatgggttcttctgctcctgaatcggtcaataagccggaagaagagtggcgtgcgattctttctcctgaacaatttaggattctcagacagaaaggcactgaatatccaggaactggagaatacaacaaagtattcgacgatggcatctattgttgtgcaggatgtggaactcctctctacaaatccaccaccaaattcgactctggttgtggctggccacttttctttaatgggctccccggggctttaacccgacccctttnctaccaattngggtcgggttgggtcaaatttgctnttttgggggcaatttggcacggtttaaagggagggttccnctcttcccttnggnntttnaaaaattttttagtaacng

SEQ ID NO: 119894 - DNA, 931 bp, Arabidopsis thaliana
  unsure (1)..(931): unsure at all n locations
nnnnnnnnnnnnnnnnnnnnnnnnnnnnnnnnnnnnnnnnnnnnnnnnnnnnnnnnnnnnnnnnnnnnnnnccacgcgtgcgggaagagaggagataaaaagccaaacaaatgggcgttcaatatcataacacctcggtcgtgtttattcagccacgtctctcaccttcgtttccaccattaaagctgctttcgttaaacctcctttggcctctccgtctcgtcgtaaccgccgtcggttctcatcatctcctttgtcatttccggcgctccgtcgaggtttccacggtggtcgtattgtggcaatgggttcttctgctcctgaatcggtcaataagccggaagaagagtggcgtgcgattctttctcctgaacaatttaggattctcagacagaaaggcactgaatatccaggaactggagaatacaacaaagtattcgacgatggcatctattgttgtgcaggatgtggaactcctctctacaaatccaccaccaaattcgactctggttgtggctggccagctttctttgatggactccccggagctataacccgaacccctgttccagatgggagacgaatcgagatcccatgtgctgcttgtggaggacatcttggtcacgtttttaaaggagaaggtttccctactcctaccgatgagcgacactgtgtaaacagtatctctctcaagttcacaccagagaatccgaccctgtaataatatgatcacagaaaaaaagacgtgataatataggtgtgttgtgtgatgcttctgtctctctctcgtactgtgtttttgtcttttttctgtgagactaatgtttacttttgatggttaataataaggtcgttgaataaaaaaaaaaaaaaaaggccgcccgctctagaggatccaagcttacgtacgcgtgcatgcggcgtcatagct

SEQ ID NO: 119895 - DNA, 482 bp, Arabidopsis thaliana
  unsure (1)..(482): unsure at all n locations
caagcagatgaaggaagagaggagataaaaagccaaacaaatggcgttcaatatcataacacctggtcgtgtttattcagccacgtctctcaccttcgtttccaccattaaagcagctttcgttaaaccttcttttgcctctcggtctcatcgtaacctccttcgtttctcatcatctcctttgtcatttccgtcgctccgtcgaggttttcacggtggtcgtattgtgtcaatgggttcttctgctcctgaatcggtcaataagccggaagaagagtggcgtacggttctttctcctggacaatttagggattctcaggccaggaaaggcacctgnatattccagggactgggggatttcaaccaaagtntttgggcggcggggatnttctttttttttcaaggatttggggcncccccttttcaaatccccccccaatttnacccctggtttggntggccaatttntttannggctnccc

SEQ ID NO: 119896 - DNA, 449 bp, Arabidopsis thaliana
ataattgcaaatccagtatcaatttaaaattatgaaaaaagatttataagcgacaaatacaaaagaaaaacggtgctaaaaatcagggagaaacaagaacctgatcggtttgttaccaaatgttacaaaagaagaagcagctggcaagcgcgggaaacttacttaccgttgaagagaagtgtttattcttctttacgtggttttggtcttgaaggttttgcaggaacaacgtaactgaggagaatcaatccaacaggtatgatcgttccaatgtaatatacgcttccgtaggcggtgagtgtttcgtgcaagcttaacacctgagacattgcgattgaaaacaaggttaaaaaaggcgttaagagtgattctatcaatgtgacgagagaggaaagagttggtaattaccatgaaaccgacggctgagtagttgagaaccaaaacggtgt

SEQ ID NO: 119897 - DNA, 850 bp, Arabidopsis thaliana
  unsure (1)..(850): unsure at all n locations
tctatgcgactcactatagggaaagctggtacgcctgcaggtaccggtccggaattcccggtcccttttttacgggagctgtagatttgagtagtgtaagcgtcgatgaagaaggttacatcgtctaagattccggccaaggatgattgggtggctgtagcgataactgacgacgatttggtcgttgagcttcttttacggctgaagcatgccggaacggtagtgtcggataatccggcggtgattctccctccgttgcggtggggaatccgtcaacgacggtctcgttcctcaagatttggtggcggcggcggcgttctcgtttccttgaagaaagatgtcgattccgttagagccagtccgaagactcctctctcgtggagcggcggatctggaagtggtggcggctctgcttctccttccgccgatggattcgaggataacagtcgccaagctagctgctctacatctacaggatctggatctaaggtttttcccacaaacgaaatcaccagttgtttctccaagagattgaagaagaggaagtcatcttttgagcttaaaaatgaagagaacttgaagttgaaggagagacttgaccttgaaaaggagattgcaagtctccgagcaacattcgatgaacaaaaccttagganccaaaagctgaagaggattaagcttgacttaaactcaggccgtntcacaaancaaggaancntgttgattttgattcggaaaatcancaactcgggggggttacaagggttccaaaatttttgnaaanccgggtgcnntggaaantncanggggggnttttttggggcccccccggtttttnaaaatgggggnc

SEQ ID NO: 119898 - DNA, 442 bp, Arabidopsis thaliana
ttcttctccttctctctcccttcgtcattatctctcttctgtaacttctctttctttccctctctctctttcgctgcttctcttctgtatctgattcccttttttacgggagctgtagatttgagtagtgtaagcgtcgatgaagaaggttacatcgtctaagattccggccaaggatgattgggtggctgtagcgataactgacgacgatttggtcgttgagcttcttttacggctgaagcatgccggaacggtagtgtcggataatccggcggtgattctccctccgttgcggtggggaatccgtcaacgacggtctcgttcctcaagatttggtggcggcggcggcgttctcgtttccttgaagaaagatgtcgattccgttagagccagtcccgaagactccctctctcggtggcagcggcggatctggaagtggtgg

SEQ ID NO: 119899 - DNA, 655 bp, Arabidopsis thaliana
  unsure (1)..(655): unsure at all n locations
nnnnnnnnnnnnnnnnnnnnnnnnnnnnnnnnnnnnnnnnnnnnnnnnnnnnnnnnnnnnnnnnnnnnnnnnncccacgcgatccacgcgtccgagctaaaatactgtgttctttgtttcttccatcgaaatcgaaaaaagctaagatctttgcgttttgaaacgatggcggaagaacataagcatgatgaatctgtgatcgctcctgagccagctgttgaggttgtggagagagaatcgttgatggataagatatcggagaagatccatcacggtggtgattcttcttcgtcttcttcatcttctgatgatgaagacgagaagaagaagactaagaagccctcttctccttcgtcttctatgaaatcgaaagtttaccgcttgttcggacgagagcagcctgttcataaggttctcggcggtggaaagccggctgatatattcatgtggaagaacaagaagatgtctggtggtgtacttggtggtgctacagctgcttgggttgtgtttgaatttgatggagtaccatcttctcactctgctttgccacgtgatgatttttgggctcgccgcttgtcctggtttttttgttgggcttaattncnactantgttccaataaaaaaaagtccccctccaaaanantccntaaagtt

SEQ ID NO: 119900 - DNA, 1155 bp, Arabidopsis thaliana
  unsure (1)..(1155): unsure at all n locations
ggtgattcatcttcgtcttcttcatcttctgatgatgaagacgagaagaagaagactaagaagccctcttctccttcgtcttctatgaaatccaaagtttaccgcttgttcggacgacagcagcctgttcataaggttctcggcggtggaaagccggctgatatattcatgtggaagaacaagaagatgtctggtggtgtacttggtggtgctacagctgcttgggttgtgtttgaattgatggagtaccatcttctcactctgctttgccacgtgatgattgttgttctcgctgtgctgtttttgtggtctaatgccactatgttcattaacaagtcccctccaaagattcctgaagttcatatccctgaagaacctattcttcagcttgcgtctgggctcagaatcgagatcaaccgtggattctcttctctccgtgaaattgcatcaggaagggatctcaagaaattcctcattgctattgccgggttatgggttctctcaatcttgggcggttgcttcaacttcttgacattggcatacatagctcttgtgttgctcttcacggttcctcttgcctacgacaagtatgaagacaaagtcgacccattaggtgagaaagcaatgatcgagctcaagaagcagtatgcagtgttggatgagaaggtgttgagcaagatcccacttgggccgttgaagaacaagaagaaagattaggggtttacacaaggttgtccgtggctagcaaaacgggtgttgtgaaatggtatcgaagtaatgtgttttgggcgtttttttaggtggctctttcggttatgtgaatgaacttggaattttcctgactggtttgttctgttgtttatgtcattgttgatcagcgtcgagggataaaagtagtgatatttcttctctctctaagcctctatataactaagaatttcaagatatttgaattttgcaatctcgtggttaatgttgttctttctctatattctcctctttcattacatttgtaaaatggaatcaatgtcccgaattgataagttgtacgaagcttatacgtttaaaaaaaaaaaaaaagnnnnnnnnnnnnnnnnnnnnnnnnnnnnnnnnnnnnnnnnnnnnnnnnnnnnnnnnnnnnnnnnnnnnnnnnnn

SEQ ID NO: 119901 - DNA, 837 bp, Arabidopsis thaliana
  unsure (1)..(837): unsure at all n locations
atccactcactttagggaaagctgctacgcctgcaggtaccggtccggaattcccgggtcnacccacgcgtccgtgaaaaggaagctccttccgatatgcagtgcaaggacaagtttctgcttcaaggtgtgatagctagtcctggtgtcacagccaaggaagttactcctgagatgtttagcaaagaggctggacatcgagttgaggaaactaaactgagagttacttatgttgctccaccacgaccaccatcaccggttcacgaaggatctgaagagggttcttcacccagggcttctgtctcagataatggacatggttctgaattttcgtttgagagatttatcgtggacaacaaggctggacatcaagaaaacacatctgaggcgagggcactcattaccaagctaaccgaagaaaaacagtctgccattcaactgaacaacagacttcaaagagaactggatcagttaaggcgtgaaagcaaaaagagccaaagtggtggtatcccattcatgtacgttcttttggtcggactcatcggtctaattttgggaatccataatgaaaggacattaaccccccccccttgaatttattccctccacccgcccccgaaaggaaaaaaaaaaagaccttttacttctttccagtgggccatttttttctcttctgtattggccaatttccccttaaaaaggtgtcttagaaaatttgtgtttggtaacccagtttgctatgtttttttcaacttttgtaatccaaatgactttgcgttgccgcccgcgaattcgatatcaagctttccgatcccgtcgccctcgagggggggcccg

SEQ ID NO: 119902 - DNA, 1103 bp, Arabidopsis thaliana
  unsure (1)..(1103): unsure at all n locations
nnnnnnnnnnnnnnnnnnnnnnnnnnnnnnnnnnnnnnnnnnnnnnnnnnnnnnnnnnaatctctcccgatcgacgactgctctctctctgaaccggagacggtgtcacgggacgaatctaatcgccgggaaaccgttttttttttctctcggaaaatcgatttgaatctccggcgatctgatcgggatgagtaacatcgatctgattgggatgagtaaccgcgatctgatcgggatgagtaacagcgagcttctcaccgtcgagcctctcgatcttcaattcccttttgaattgaagaagcagatctcttgctctctctatttgacgaacaagaccgacaataatgttgcctttaaggttaagacgacgaatccgaaaaagtattgtgttaggcctaatactggagttgttctcccgaggtctacttgcgaagttcttgtgaccatgcaagctcaaaaggaagctccttccgatatgcagtgcaaggacaagtttctgcttcaaggtgtgatagctagtcctggtgtcacagccaaggaagttactcctgagatgtttagcaaagaggcagggcatcgagttgaagagactaaattgagagttgtctatgttgctccaccacgaccaccatcaccggttcgagaaggatctgaagagggctcttcaccgagggcttctgtctctgataatgggaatgcttctgattttactgctgctccaagatttagcgcagacagggttgatgctcaggataattcatctgaggcaagagctctggtcacaaaactcaccgaggaaaagaactctgcggttcaactgaacaacaggcttcaacaagaattggaccagttgaggcgcgaaagcaagagaagttagagtggtggaatccctttcatgtacggtcttctggtcggcctaatcggtttaaatcctggggttcattatgaagaggacatgatcagatcccttcaacaaaatactccaaaggcttaaggtgcttaaaaagcattgaaagggaagaatnaaattttgttngggggcaanttnttttttcctttncgcgnnttgacctttggtaaatntacttaggcggtggggttna

SEQ ID NO: 119903 - DNA, 703 bp, Arabidopsis thaliana
  unsure (1)..(703): unsure at all n locations
agaaacnaactgnggtccttttttnccncncanccccannacgggtcccnaggncctaaaagggncnttccccagggcttttccnnaaaaanggncaanggtctgaaatttccgtttnaaaatttaccgnggacaanaaaggctgganatcaagaaaacacaatctgaggcgagggcactcattaccaagcttacccgaggaaaaacagtctgccattcaactgaacaacagacttcaaagagaactggatcagttaaggcgtgaaagcaaaaagagccaaagtggtggtatcccattcatgtacgttcttttggtcggactcatcggtctaattttgggatacattatgaagaggacataaaccacccaccttgaaattaatccctcacccgccacgaaggaaaaaaaaaagacttttaactcttttcagtcggacatttttttctcttctgtatttgtcaatttcgccttaaaaaggtgtcctagaagatttgtgtttcgtaactcagtttgctatgtttttttcaacttttgtaatccaaatgactttgcgttggttctttctccactaattctcttatatttcttaacttcattttccatcaaaaaaaaaaaaaaaaaaaaaaaagggcggccgctctagaggatccaagcttacggacgcggtccatgcgacgtcatagctttctatagtgtcaccta

SEQ ID NO: 119904 - DNA, 374 bp, Arabidopsis thaliana
cacgttgatcttgttgtttactctctctctctcctccatcggcgacgaccaccggagatcagcgtcaccgtaccaagacatcatttaccttcttttagatttgttgttttttaatcagttgaatcggaataaaatatcgcatcagagatgagtaacgagcttctcaccatcgatcctgtcgaccttcaattcccttttgaattgaagaagcagatctcttgttctctctatttgggtaacaagaccgataattatgtcgccttcaaggttaatttcaatttttgaattggatatatattcttttgtgtatatcgtaatgttttcaagggtcaattattttttaaaggttaagacgacgaatccaaagaagtact

SEQ ID NO: 119905 - DNA, 937 bp, Arabidopsis thaliana
  unsure (1)..(937): unsure at all n locations
aacggacgcgtgggctcttttaagtctctgtttcataaataaaactaataaagaagaagaagaaaacagagcaattaaagtccttaaatcttcttcttctccaattcaatggctcttccgttgccattgatcttccttatcttctctcatttgttcgtttctggagttagatcaacgagcttcattatggtgaacaaatgcgaatacacagtctggcctggacttttatcaaacgccggagttccaccacttccgacgaccggattcgttctccaaaaaggcgaagaacgaacaatcagcgctccaacttcatggggaggaagattctgggggagaactcaatgttccaccgacaccgacggaaaattcacttgtctcaccggagattgcggatctggtaccctcgaatgctccggatccggagcaacaccaccagcaacactagcggaattcacactagacggatctaacggactcgatttctacgacgttagcttcgtcgacggttacaacgtcccgatgctagtggctccacaaggaggctcgggtttaaactgtagcagcaccggatgcgttgtagatctgaacggttcgtgtccgtcggagcttaaagttacgagtttagacggcagaggtaaacaatccatgggatgtaaaagcgcgtgtaaagcttttcgtacgccggagtattgttgcagcggcgcccacggtacacctgacacgtgtaaaccgtcgtcgtactcgttgatgtttaaaactgcgtgtccacgtgctttacagctacggttacggtggtcagagtagtaccttcaacatgtgctgaatctccctaattacgggtatcacggttttgccctacttcctaaccaccaggggattnttccctttaaacccttttataacttttaacaancttncctntnngggagtttttnaa

SEQ ID NO: 119906 - DNA, 975 bp, Arabidopsis thaliana
  unsure (1)..(975): unsure at all n locations
gccagctctatacgactctcttagggaaagctggtacgcctgcaggtaccggtccggaattcccgggtcgacccacgcgtccggagactacactgctccatcatcttctccttctggggatttttttttggaaaaatcgttctgttaccttttttttgcccattactcaaaccctaaccctaattttctgaaatcgcagagagagagagagagaggtttcttcgaattctttcatcatcaattcgctaactttgtttttttggggttaaatcgattaatcgttattttattagatactgtcgatcggagctaatcgactctctcttaacaaaccctaattttttggtcctctctcatggcttccgccacttccaataaccctgcttcttcttctatgtctcctcgtcgtatcagcgggaatcacggcagccccaccgcttccgtagcacaatcacctcgccgtccttctcggcaggtttcttctccgtggactcaaatcgtccgcggcgaatcagagccgatcgccgccgccgccgctgtagccggtccttcctctcctcaatccacggctccgatcgagccgattgcttctgtatccgttgctgctccaactgctgctgttttgacggtggaggcggcggctggtgatgagaaatcggcagcatctggtggtcaggacaatgctggaaagataccagtttggaaaaggccgtctaatggggcttctgaggttggacctgtcatggggagcttcttcgtggcctgctctttctgagaccaccaaagctccttccaacaagtcttcttctgattcgttaaaaagtctcggggatgtaccatcatcattgggagcatcatcatctggccccggtactcagggaattgcanatgcttctgttcctgacccaagcaagctggccgggcaaccctatccaactccaaacactcgcgccagagatatttaaacaacgcaat

SEQ ID NO: 119907 - DNA, 688 bp, Arabidopsis thaliana
acaaagcccttaaagataggaagatactttgtcatagctttgctatttctcaaaaaaaaatgagggacgacagagaaagaggagagggtgatttgtcatggcctttgatcggagagaaaagtagtgtcaaggaagaagtgaagaagcagctatggctttcaggcccactcatcgccgtgagtcttcttcagttttgtctacaagttatctccgtcatgttcgttggccatcttggctctcttcctctctccgccgcatccatcgccacctctttcgcctccgtcaccggtttcagcttcctcatgggaacagcaagtgcgttagatacgctttgtggccaagcgtacggagcaaagaagtacggaatgttaggaatacaaatgcaaagagctatgtttgttcttacactagcttctattcctctctccatcatttgggctaacacagagcaccttctcgtcttctttggacaaaacaaatccattgctacactcgctggctcctacgcaaaattcatgatcccaagcatcttcgcctacggtcttcttcaatgctttaacaggttcttgcaggcccaaaacaatgtgttctctgtggttttctgctctggagtaacaacttctctacatgtcctcctttgttgggtctttggttttcaaatctggttaagggtttcaaggagctgctc

SEQ ID NO: 119908 - DNA, 517 bp, Arabidopsis thaliana
cgactcactttagggaaagctcgtacgcctgcaggtaccggtccggaattcccgggtcgacccacgcgtccgtcttctccccaaaaacctccaaagtttcaatctttacttctctctttttctccaagttatcttcttttctaggaagagatatgtgcggtgcaaagagcaacctttgctcatctaaaaccctaacagaagtcgaattcatgaggcagaaatcagaagacggagcttccgccacgtgtctcctcgaattcgccgcctgtgatgatctttcatcgtttaagagagagatcgaagagaatccatcggtggagattgatgagtcagggttttggtattgcagacgggtcgggtctaagaagatgggttttgaagaaagaacaccacttatggttgctgctatgtatggaagcatggaagtgttgaattacataattgccacaggaagatccgatgtgaacagagtttgcagtgacgagaaagtcactgctcttcactgtgcagtttctgg

SEQ ID NO: 119909 - DNA, 510 bp, Arabidopsis thaliana
acgactcactataggaaagctggtacgcctgcaggtaccggtccggaattcccgggtcgacccacgcgtgcgggacatcattaacatttacctaccaaagcctcaaggagaccagatgagaatccgacccagcgcgggccctcggagcttaggccatggcgctttccatggcttcggctcagcctgctgatttcgcgcttaaggagacaagccccgcatcttcggttggttggaaggaaggtcgttggtgggccgtggtattccacaaggacaaaaccgctacgagtccttaggatcttgtccgagagaatgtatttcctttatgtccgcgtggtcaaagctcgtgagcttcctatattggatataacaggaagtgttgatccattcgtcgaggtgagagtgggggaactacaaaggaatcacaagacattttgagaagagacaacatccggaatggaaccaagtgtttgcattcgcgaaagagcgaatgcaagcctcggtgttggaagt

SEQ ID NO: 119910 - DNA, 976 bp, Arabidopsis thaliana
  unsure (1)..(976): unsure at all n locations
nnnnnnnnaggactatcgactactatagggacaagctcgcacgcctgcaggtaccggtccggatcccccgggccgacccacgcgtccgaaaaacacaactcaaacgattcacgggtttcacttggaatcgtttggttttctcatttccgaaatataaaaagatggccaaagcgccaccgtcaatctctcttctcctcctcctctgcgccgccgtattcctcaccatccccgccgtgatctccgccatcggtgttaactacggaactctcggaaacctcccaccaccgactcaggtggctaactttatcaagacacaaacttcgattgatagcgtcaagatcttcgatgtgaatcccgatatcctacgtgccttcgctggaactggtatctccgtcgttgtcaccgttcctaacggtgatattccggcgttggctaacggaagacaagctcgtcggtgggtttcggttaacattttgccgtttcatcctcagacgaagattaagtatatctcagtcggaaatgagattctgctcaccggagataataacatgatcaataatctcttaccggcgatgaggaatcttaacaacgctttggttcgtgctggtgtcagagatgttaaggttacaaccgcacactcacttaacatcatagcctatgacctgaccggtgcaccaagcagcggtagattcaggccgggttgggacaaaggcatattggctccaatcctagcttaccatcgccgaaccaagtctcctttcatggttaacccgtacccttactttggttttnaccccaaaaacgtcaacttcgcaattttccgaacaccgtacaaggcagtccgtgaccngttcacccgncacgtntacaacaacatgtttnatgcactnatgggctnggcatanttagccatgnaaggttttgggtanggtgntgtaacattgtngttggggnttggttggcatttgttttaagg

SEQ ID NO: 119911 - DNA, 938 bp, Arabidopsis thaliana
catcattatctctttttctaaatctctccaatggcgtctcttcgtagcctttcgatttggttcttcttcttcttcgtcttcgtcttcttaatcaatccctccatttctattcgaacttccttcatcaagcttcccggaagcgacggatctcgctactgcgacagctggagattagccgccgagaccaataacgtcggaacttgggatctgattccgtcaatctgcgtggattccgtcgccgagtatcttaacggagaccagtttttatccgattacagtgtcatcgtcgattatgctctcgcgtttgcgaaatcggttgaaatttccggcgacggcaaggacgtgtggatcttcgatatcgacgagacgcttctcacgaatattgactactacaaggctcatggttacgggtctgaaccgtatgacgataataaatttagtgagtgggtggaacaaggaacagctccagcttttgatgcgagcttgagactgtacaatgctctcaagaaacttggtttcactatcattttgctaaccggtcgggacgagcatcaaaggacttccaccgagacaaatctccgggatgccggttattccggttgggaacgtctcctcttgagaggtccaaatgatcaagggaagtcagctacaaattacaaatccgagcagcgatcgaaactgattgaggaaggtttcaaaatccgtggcaatagcggtgatcaatggagtgacttgcaaggttttgccgtggctgatcgttctttcaaagtcccaaatcccatgtactacattccttgatcactattcatttctgattttatgtattgagtaacaaccacttatgtgttttagacgttaatattacctttgctcctatattacattgatctttagtataaacattaactaatactttcatataaagtataattataatt

SEQ ID NO: 119912 - DNA, 460 bp, Arabidopsis thaliana
ttcgttttctcttaaatacttaattcttttttttcccaaacagtttctctgaaactaagaaactctaacagagaatccggatgcttttctctgattcttctactctttcctaatttaccgattttctcgggaatccaaaatcccgtttctctttttctcgagttaaaaaactttcgatctgaagtcaattcagattcttcttggaagctcaaagaagaagaagagagaagagagagagactagtgatttggtttagttcgttggatcagaaaggtctctgctttgatctttgtagtacacgtggcgaaaagggtcggaatttggagttgtgttgatgatgttccaagtctcagatttcttgtattaacattctcttgcctttctccaatgtctttgtcttgattctcagaaaaagatcttcagatccggttactctgaggggaaagagacgaatagtttt

SEQ ID NO: 119913 - DNA, 542 bp, Arabidopsis thaliana
  unsure (1)..(542): unsure at all n locations
cacacgcgtccgcccacgcgtccgctaaatttcgttgtacagagaagaagcaaaagagagaaacatctgacccggaatctgacctgaaaacccggaagaatcgaaaaatggggaaagatggtctgagcgacgatcaggtctcgtcgatgaaggaagccttcatgctcttcgacaccgatggcgacggcaaaatcgcaccgtcagagctcgggatcctcatgcgatctctcggcggaaacccgacccaagcccagctgaaatccataatcgcatccgagaatctctcttcaccgtttgatttcaacagattcctcgatctcatggcgaaacatctgaagacggaacctttcgatcgccagctccgtgacgcattcaaagtgctcgataaggaaggtaccgggttcgttgctgtggcggatctgaggcatattctgaccagtatcggagagaagctggagcctaatgagttcgatgagtggtcaaaggaggtggatttttggtnccgatggnaaaatnccgganttaagntttttttttttttt

SEQ ID NO: 119914 - DNA, 842 bp, Arabidopsis thaliana
  unsure (1)..(842): unsure at all n locations
nnnnnnnnnnnnnnnnnnnnnnnnnnnnnnnnnnnnnnnnnnnnnnnnnnnnnnnnnnnnnnnnnnnnnnnnnnnnnnnnnnnnccacgcgtccgatttgagggcgcttctcagttgagggaggagcttagacagatgagtgctccagatcaggaggctgagcggaatgacaaagaaaaattgttgaagctcaagactctaggaaatattcgtttgattggtgagcttttgaagcagaagatggtcccagaaaagattgttcatcacattgttcaggagcttctgggggccgatgagaaagtttgtccagccgaggaaaatgtcgaagctatttgtcatttcttcaaaactattggcaaacaacttgacggaaacgtgaagtcaaaacggattaatgatgtatatttcaaacgcctacaggctctgtcaaagaatcctcagttggaactgcgtctgagattcatggttcagaatatcatcgacatgcgctccaatggctgggttccaaggcgggaagagatgaaagcaagaactataaccgaaatacatactgaggcagagaagaatcttggtctccgaccaggtgccactgcaaatatgagaaggggtatggtttctagtggtgggcctgtgagccctggccctgtctaccctggtgggcgacctggtgcgggtggcttgatgcctggtatgcctgggacgcgaaggatgcctgggatgcccggagtggacaatgataactgggaggtaccccggacaagatcaatgtttagacgcgatgggccaggacctctacattctccagcagtgagcaagtcggtctcaatgaacacgaggctttt

SEQ ID NO: 119915 - DNA, 782 bp, Arabidopsis thaliana
  unsure (1)..(782): unsure at all n locations
atgatcctnnnnnnnnnnnnnnnnnnnnnnnnnnnnnnnactctagggttagttggtacgcctgcaggtaccggtccggaattccacgcgtgcgcacaattctatccaaaatcaacccaaaaaaagaaagaaatatgtgggatgaaactgtagccggacctaaaccggagcatggccttggccgcctccgcaataagatcaccacccaaccccttgacatcaaaggtgtaggagaagggagcagtagtaaaactgtggcggcggtggccgggagtcctggaactccgacgacgccaggttcggcgcgtaaggaaaacgtgtggagaagtgtgtttcatccaggaagtaacatcgccactagaggaatgggcacaaacctcttcgacaagccttctcacccaaactctcccaccgtctacgattggctatacagcgacgacactaggagcaagcaccgttgagccgagagggtagagtgacatgagaatgatgtaaaataattatgttctttacgccacgtgtttatgttctgtttcgtctattttggctatatgtgcaatcttttatttgcttcatgtcgtttgtgtttgttagtgaccgttgatttccaccatctgggttagtttttagcttttaacggtggcgatgcgtcttcagtgtcttgtaatatttttactgttcggtaatattacaattagcttctcaaaaaaaaaaaaaaaaaagggcgggcggtctagaggaaccaagcttacgtacgcctgcatgccacgtcatagcttttt

SEQ ID NO: 119916 - DNA, 576 bp, Arabidopsis thaliana
  unsure (1)..(576): unsure at all n locations
cacaattgtatccaaaatcaacccaaaaaaagaaagaaatatgtgggatgaaactgtagccggacctaaaccggagcatggccttggccgcctccgcaataagatcaccacccaaccccttgacatcaaaggtgtaggagaagggagcagtagtaaaactgtggcggcggtggccgggagtcctggaactccgacgacgccaggttcggcgcgtaaggaaaacgtgtggagaagtgtgtttcatccaggaagtaacatcgccactagaggaattgggcacaaacctcttttcgacaagcctttttaacccaaacttttcccacccgtctacgggttgggtttttccaggggccggccctttggggcaaagcacccgttttagcccgagagggttaggagttgccattggggatttgttgttaaaataaattattggtccttttacggccaccgggttttatggttccttgttttcggcctnattttttggctttnttgtgccaaatctttttaattttgntttcaatgccggtttgngttttttnaggntncccnttggtttccnccnannttggg

SEQ ID NO: 119917 - DNA, 528 bp, Arabidopsis thaliana
  unsure (1)..(528): unsure at all n locations
cacaattctatccaaaatcaacccaaaaaaagaaagaaatatgtgggatgaaactgtagccggacctaaaccggagcatggccttggccgcctccgcaataagatcaccacccaaccccttgacatcaaaggtatttatttttctttgtcaaccataactccgtaataaacttgcatatacagatctttgtagaaacgtatgatctcataattatatcatgtgatggtttttggaaggtgtaggagaagggagcagtagtaaaactgtggcggcggtggccgggagtcctggaactccgacgacgccaggatcggcgcgtaaggaaaacgtgtggagaagtgtgtttcatccaggaagtaacatcgccactagaggaatgggcacaaacctcttcgacaagccttctcacccaaattttccaccgtttacggttgggtcgnctcagtttctgtattatnttttnccggncggtnngataantctagntngttnaccgttttntntccgangttttcagggcgcnttgg

SEQ ID NO: 119918 - DNA, 534 bp, Arabidopsis thaliana
gaaagatatagagaatttgttgtctttttttctttttcttttgtggggtatttgtttttttttttctccttaaaaagttttttttttttgtgtgtatgaaaaaaaaagctttgaaattctctctcgacaatggtgtcggaccaggatctagcgaaaggagtcgagactttgcttcgacaatccgaccctagctctctcacatcgttaagcagtattgttcagcagcttgaagctaagttagggttagacctcacggagaagacgactttcatcagagatcagatcaatatcctcctccgtgctcaccaaaacccttctgcctccgtcgcctccgcttcatccgtacaacaatctcaccctcctcctccgccgtcttctcaccagcagcagaatttgcattccggcgtcaatgttcctccgatggcgaaagggcttttcacacttagccatccttcgcaattctctggttcttctcaatcacaacaatatcctttacatttcgctcttcagcctccttatcactcttatgaccta

SEQ ID NO: 119919 - DNA, 512 bp, Arabidopsis thaliana
  unsure (1)..(512): unsure at all n locations
cggacgcgtgggctcgaagcgagtgagatatggcaacaaagaccgatgattttgcaccatttccagttaaagatcagcttcccggagtcgaattttgtgtctcgagctctccaaattggccggaaggaatagttcttgggtttcaacattacattgtaatgcttggaactactgtaatcataccttccatactcgtccctctaatgggtggtggcgacgtggagaaagcggaagtcataaacacagtattgttcgtgtcaggaataaacacgttgttgcagagtttgttcggaagtcgacttcctgtggtcatgggaagcttcttatgcttacctcatcccggctccttacatcactttctcttatcgattcacttactatctccatcctcatctcagatttgaagagactatgagagctattcaaggagctcttatcatngcttcaataagtcatatgataatgggttcttcggtttgtggagaatcttggtcaggttctttctctctttc

SEQ ID NO: 119920 - DNA, 624 bp, Arabidopsis thaliana
gcaaggaggatcatcgggtattggttatggtttgaagtatcaggccagatgtatatcggatggtaaagcagatagagatcacactagcttcctcactggaaccctaagcttgaaagaagaaaatgaggttcatttgcttcgtttgtcttctggtggatctgagctgttatgtgagggattgttctcgcatcctaatgaaatttgggacctttgcttcttccccttttggatcaacggcattttctctactgtcttctccactggcgactcatatggagcagcaatatggcagattcctgagccatatggtcaatcgaattcttcaacattggaatgtgttgcttcccttgatgcacatgttggtaagattaattgcgttctttggtgtccctctggaaattctgacaagttaatcagcatggatgaacaaaatcttgtcttctggagtttagactcttcaaagaaaagtgcggaggttttatctaaggagtcagctggtatgcgtcattctttatctggtggagcatggaatccacatgatgtgaattctgttgcagcaacttctgaatcatctatccagttttgggacttacgtactatgaagaagaataattcaattgaacg

SEQ ID NO: 119921 - DNA, 1480 bp, Arabidopsis thaliana
  unsure (1)..(1480): unsure at all n locations
nnnnnnnnnnnnnnnnnnnnnnnnnntggccgtcgttgtaccggtccggaattcccggctcgcgcgcccattttcacattctcttctctctcgatatcatctaaatctctctcgatctcaatttcgcaaaatggctgacaagaagatcagaatcggaatcaacggtttcggaagaatcggtcgtttggttgctagagttgttcttcagagggatgatgttgagctcgtcgctgttaacgatcctttcatcaccaccgagtacatgacatacatgtttaagtatgacagtgttcacggtcagtggaagcaccatgagcttaaggtgaaggatgacaaaactcttctcttcggtgagaagccagtcactgttttcggcatcaggaaccctgaggacatcccatggggtgaggctggagctgactttgttgttgagtctactggtgtcttcactgacaaagacaaggctgctgctcacttgaagggtggtgctaaaaaggttgtaatctctgccccaagcaaagatgcgcccatgttcgttgttggtgtcaacgagcacgggtacaagtttgaccttgacattgtttccaacgctagttgcaccactaactgccttgctcctcttgccaaggttattaatgacaggtttggcattgttgagggactcatgaccactgtccactctatcactgctactcagaagacagttgatggtccatcaatgaaggactggagaggtggaagagctgcttccttcaacattattcctagcagcactggtgccgccaaggctgttgggaaagtgttgccatccctcaatggaaaattgaccggaatgtctttccgtgttccaaccgttgatgtctcagttgttgatctcaccgttagacttgagaaagctgcaacatacgacgaaatcaagaaggccatcaaggaggaatctgaaggcaaaatgaagggaattttgggatacactgaggatgatgttgtgtctaccgactttgttggtgacaacaggtcaagcattttcgatgccaaggctgggattgcattgagcgacaagtttgtgaagttggtgtcatggtacgacaacgaatggggttacagttctcgtgtcgttgaccttatcgttcacatgtcaaaggcctaagcttacaccggcgagagtttgtgtgtggttgagttcgtactgttctgaataaaaaaaaggagaaaagaaaactcgagttgttatgttttttcactgattccatgcgcagtcatgagagtttgtagcttttgtctttttgctttctcttaatgtttccctgctttatttactgaaaccattggtttggttttttatgttaattaagtttttagttcattcctaaaaaaaaaaaagaaannnnnnnnnnnnnnnnnnnnnnnnnnnnnnnnnnnnnnnnnnnnnnnnnnnnnnnnnnnnnnnnnnnnnnnnnnnnnnnnnnnnnnnnnnnnnnnn

SEQ ID NO: 119922 - DNA, 958 bp, Arabidopsis thaliana
gcctgcaggtaccggtccggaattcccgggttgacccacgcgtccgaaagcacgagtacaagtctgaccttgacattgtttccaacgctagctgcaccactaactgccttgctccccttgccaaggttatcaatgacaggtttggcattgttgagggtctcatgaccactgtccactctatcactgctactcagaagactgttgatgggccttcaatgaaggactggagaggtggaagagctgcttcattcaacattattcccagcagcactggagctgccaaggctgtcggaaaggtgcttccagctcttaacggaaagttgactggaatgtctttccgtgtcccaaccgttgatgtctcagttgttgaccttactgtcagactcgagaaagctgctacctacgatgaaatcaaaaaggctatcaaggaggaatccgaaggcaaactcaagggaatccttggatacaccgaggatgatgttgtctcaactgacttcgttggcgacaacaggtcgagcatttttgacgccaaggctggaattgcattgagcgacaagtttgtgaaattggtgtcatggtacgacaacgaatggggttacagttcccgtgtggtcgacttgatcgtccacatgtcaaaggcctaagctaagaagcagatctcgaatgatagggagtggaaagtcatctgttcatccccttttatggtctgaatttgtcgttttcgaataaaatttctttgaacttggaactttttttttttttggttttcttaattctcattcatgtgaggtgatgggagtttgtagaccgatgttttactggaagccctttgtttttggcttttgatatattgagttaacgttatggttttcaaataaaaaaaaaaaaagggcggccgctctagaggatccaagcttacgtacgcgtgcatgcgacgtaatagctggtcggtagtgta

SEQ ID NO: 119923 - DNA, 852 bp, Arabidopsis thaliana
  unsure (1)..(852): unsure at all n locations
gctccctacgactcactatagggaaagctggcacgcctgcaggtaccggtccggaattcccgggtcgacccacgcgtgcgctaaaatctctctctgccaatctcatcttcaacctctctctaactctcgttttcgattctacaatggctgacaagaagattaggatcggaatcaacggattcggaagaattggtcgtttggttgctagagttgttctccagagggacgatgttgagctcgtcgctgtcaacgaccccttcatcactactgagtacatgacctacatgttcaagtacgacagtgttcacggtcaatggaaacacaatgaactcaagatcaaggatgagaagacccttctcttcggtgagaagccagtcactgttttcggcatcaggaaccctgaggatatcccatgggccgaggctggagctgactacgttgttgagtctactggtgtcttcactgacaaagacaaggctgcagctcacttgaagggtggtgccaagaaggttgttatctctgcccccagcaaagaccctccaatgtttgttgttggngtcaacgagcacgnatacaagtccgaccttgacattgtctccaacgntagctgcaccactaactgccttgntccccttgccaaggttatcaatgncagatttggaaattgttgagggcttatgantacagtccactcaaatactgctactcagaagnctttttatgggcttaatgaagnctnnngaggtgaaggnttctnatnaacattattccagagactggggttcaaggcttcggaagggttcactttaacggaagtgctgaatttttccggccaccgttgtgcnaantttc

SEQ ID NO: 119924 - DNA, 646 bp, Arabidopsis thaliana
  unsure (1)..(646): unsure at all n locations
nnatgatctnnnnnnnnnnnnnnnnnnnnnnnnnnnnnnnnnnnnnnnnnnnnnnnnnnnnnnnnnnnnnnnnnnnnnnnnnccacgcgtccgcccacgcgtccgctaaatctctctcgatctcaatttcgcaaaatggctgacaagaagatcagaatcggaatcaacggtttcggaagaatcggtcgtttggttgctagagttgttcttcagagggatgatgttgagctcgtcgctgttaacgatcctttcatcaccaccgagtacatgacatacatgtttaagtatgacagtgttcacggtcagtggaagcaccatgagcttaaggtgaaggatgacaaaactcttctcttcggtgagaagccagtcactgttttcggcatcaggaaccctgaggacatcccatggggtgaggctggagctgactttgttgttgagtctactggtgtcttcactgacaaagacaaggctgctgctcacttgaagggtggtgctaaaaaggttgtaattttttccccccaagcaaaagatttggcccctttttcgttttttgccttcaacgggccccgggtcaaanntttcccctttnnaatttttnccccgnttngttancccntaanttcntttcncctttnccaggnttntt

SEQ ID NO: 119925 - DNA, 852 bp, Arabidopsis thaliana
  unsure (1)..(852): unsure at all n locations
cggacgctaaaatctctctctgccaatctcatcttcaacctctctctaactctcgttttcgattctacaatggctgacaagaagattaggatcggaatcaacggattcggaagaattggtcgtttggttgctagagttgttctccagagggacgatgttgagctcgtcgctgtcaacgaccccttcatcactactgagtacatgacctacatgttcaagtacgacagtgttcacggtcaatggaaacacaatgaactcaagatcaaggatgagaagacccttctcttcggtgagaagccagtcactgttttcggcatcaggaaccctgaggatatcccatgggccgaggctggagctgactacgttgttgagtctactggtgtcttcactgacaaagacaaggctgcagctcacttgaagggtggtgccaagaaggttgttatctctgcccccagcaaagacgctccaatgtttgttgttggggtcaacgggcccgggttcaagtccgaccttgacattgtctccaacgctagctgcaccactaactgccttgctccccttgccaaggttatcaatgacagatttggaattgttgagggtcttatgactacagtccactcaatcactgctactcagaagactgttgatgggncttcaaatgaaggactggagaggtggaagagctgcttcatttcaacaattattcccagncagcactggagctgnccaaggcttgttcgggaaaaggnggnttncnanctcnttaaacgggaaaagtttaacttggaatgnctttttccngggtcccaanccngttgaatgtgctnaanttgnttnncccttaactttnaa

SEQ ID NO: 119926 - DNA, 442 bp, Arabidopsis thaliana
  unsure (1)..(442): unsure at all n locations
gttcttctctcttttaaataacctcttcacggttcccttctcactcacctatctcacgctagaatctctctctgccaatctcatcttcaacctctctctaactctcgttttcgattctacaatggctgacaagaagattaggatcggaatcaacggattccgaagaattggtcgtttggttgctagagttgttctccagagggacgatgttgagctcgtcgctgtcaacgaccccttcatcactactgagtacatgacctacatgttcaagtacgacagtgttcacggtcaatggaaacacaatgaactcaagatcaaggatgagaagacccttctcttcggtgagaagccagtcactgttttcggcatcaggaaccctgaggatatcccatgggccgaggctggagctgactacgtntgtgagtctactggtgtcttcact

SEQ ID NO: 119927 - DNA, 550 bp, Arabidopsis thaliana
atcacgttcttcttctcttttaaataaccctaaatcctcaccaaacccaaaccctcactcactattttcacattctcttctctctcgatatcatctaaatctctctcgatctcaatttcgcaaaatggctgacaagaagatcagaatcggaatcaacggtttcggaagaatcggtcgtttggttgctagagttgttcttcagagggatgatgttgagctcgtcgctgttaacgatcctttcatcaccaccgagtacatgacatacatgtttaagtatgacagtgttcacggtcagtggaagcaccatgagcttaaggtgaaggatgacaaaactcttctcttcggtgagaagccagtcactgttttcggcatcaggaaccctgaggacatcccatggggtgaggctggagctgactttgttgctgagtccactgctgtcttcatctgacaaagacaggttttcttcttactttacttgttgttcctataatctgattccttttttttttttattttatatttcttccattttttacttttttttctccaa

SEQ ID NO: 119928 - DNA, 413 bp, Arabidopsis thaliana
cgcgtccgaacccttctctctagctcacactcacaacactctctctctcctgccataactcagcctgagatgtctccggaagcttacgttctgttctttaacagttttaacctcgtaaccttcgaagcctttgcttcagtctcacttatcatagccacagttgctttcttgctctcaccaggtgggctcgcatgggcctggaccgggtcatccaagagtcgggtttcgattccaggaccatctggttctctttccgtcttctccggctccaatccccaccgtgttctcgccgctcttgctaaacgcttcaaggcctctccgttgatggcgttctcagttgggttttcgcgtttcgttatctctagtgaaccggagacggctaaagagattttgagcagctctgcttttgctga

SEQ ID NO: 119929 - DNA, 584 bp, Arabidopsis thaliana
gtccgaaaggaattaacaagacactggattcaactcttctagagaacagcaggaaccaagtgagattcagacagtttgatatggttaatgactgctcggaccatcatttcctttcttcggataaagggttggctcagtcccaggtcacaaagagttgggtgaagaaagtccagcaagaatggagcaatttggaggcaaatcttccgaacacgatatatgtgcgtgtgtgtgaagaaaggatggaccttctgcgtgcagccctggttggtgcccctggaacgccatatcacgatgggcttttctttttcgacataatgcttccacctcaatatcctcatgagccaccaatggtacattatcattcaggtgggatgcgactgaatccgaacctgtatgagtcaggaagagtttgcttgagtctgctgaatacatggagtggctctggcactgaagtatggaacgcaaggagctcctccatccttcaacttcttctttcgtttcaggctctggttctgaatgagaagccttacttcaatgaagctggctatgataagcagttgggccgagccgagggagagaaaaac

SEQ ID NO: 119930 - DNA, 540 bp, Arabidopsis thaliana
tacgactcactatgggaaagctggcacgcctgcaggtaccggtccgtcgtccttgaagcagtcaaattcttctctgaactccaaacatcgccatgtccgagattctctcttcgttgaggtcactaatggcctctcactctcctcctcttgatgctttggttgttccttccgaagactatcaccagagcgagtatgtttctgcacgagacaaacgccgtgagttcgtgtctggattcagtggaagtgcaggtttggcacttatcacgaagaaggaagcaagactttggacagatggtcgatacttcttgcaagcattgcaacagcttagcgatgagtggacactaatgcggatgggagaagatcctcttgttgaagtttggatgtctgataatctacctgaagaggcaaatataggtgttgattcatggtgtgtctcggtagacactgcgaatagatgggggaaatcgtttgccaagaagaatcagaaactaatcaccacaactactgatcttgtggatgaagtttggaagagtcgtccac

SEQ ID NO: 119931 - DNA, 748 bp, Arabidopsis thaliana
tatacgactcactatagggacaagctggtacgcctgcaggtaccggtccggtattcccgggtcgacccacgcgtccgcccacgcgtccggattcatggtgaccaaccaagaccagatgtcagtttctactcaatgaagaccgcacaaaacactggaagggtttcaaagctcgcaactttgaaggccaaacaagctaatgccctcttctggtcgcccacaggcaagtacataattcttgctgggttaaaaggtttcaatggccagcttgaatttttcaacgtggatgagctcgagacaatggccacagctgaacacttcatggccacggatatcgaatgggacccgactggaaggtacgttgcaaccgcagtgacatcagtccatgagatggagaatgggttcaccatatggtctttcaacgggattatgctttaccggatattgaaggatcatttcttccagttggcttggcgtccaagacctccatcattcttgactgcagagaaggaagaagagatagcaaagaccctgaagaagtacagcaagaagtatgaggcagaggatcaggacgtgtcgttgctgttgagtgaacaagacagagagaagagaaaggctttgaaggaagaatgggagaaatgggtaatgcattggaagctctgcatgaaaagagaaaccgcgaggacaacctcgggatgggaaatagggaggggaaaaaaataatttaacccaaaaatggagttggggtcct

SEQ ID NO: 119932 - DNA, 833 bp, Arabidopsis thaliana
  unsure (1)..(833): unsure at all n locations
tacgactcactatanggaaagctggtacgcctgcaggtaccggtccggaattcccgggcttgctgggttaaaaggtttcaatggccagcttgaatttttcaacgtggatgagctcgagacaatggccacagctgaacacttcatggccacggatatcgaatgggacccgactggaaggtacgttgcaaccgcagtgacatcagtccatgagatggagaatgggttcaccatatggtctttcaacgggattaccctttcccggatattgaaggatcactttcctccaagttggcttggccgccaagaccctcccaatcattcctgactgcaagagaaggaagaagagatagccaagaccctgaagaagtacagcaagaagtatgaggcagaggatcaggacgtgtcgttgctgttgagtgaacaagacagagagaagagaaaggccttgaaggaagaatgggagaaatgggtaatgcagtggaagtctctgcatgaagaggagaaactcgtgaggcaaaaccttcgggatggtgaagtaagtgatgtggaagaagatgaatatgaagccaaagaagttgagtttgaggatcttatcgatgtcactgaggaaatcgttcaagagtcgtaagatactcggtctcttttgttgccatctctttggatcccttagacaattttaaatcgtgttcgctatacttggaagataatttttggttccttcatgattgaaaatttcgttgttagttgatgaaaaaaaaaaaaaaagggcgaccgctctagaggatccaagcttacgcacgcgtgcgtgcctcgtcataatcttgtagagtgca

SEQ ID NO: 119933 - DNA, 646 bp, Arabidopsis thaliana
  unsure (1)..(646): unsure at all n locations
tcggcaaaaagccaaagtttcttttttaaagcctcttgttttgttcttcttctcttgtttcttcttttccaatcttcatttttccagtcaaattcagaaaacgcgtaagttctctttctcgttaaaagggtttgttataaaacccttgattttacttgttttagagaggttcttggtttaaatcttcttgtggtttaagtctttgtggtttctctaatattttcttcccaagatttggatttgctctgttttgtttgtttgtttcagttttaataatggatgatcagagtaatcgtggtaatgataatcataataatgatcatcatcatcatcatcttggtgtgaataagatgggaaaaaacattcgtaaagatccaccaaaccaacaaaatcaacaacaaaaccctcaagctttggtttacaacatcaacaaaaccgatttcagatccattgttcagcagctaaccggactcggttctacttcttccgtcaaatcctccgcaacaaaccatccaaggctccaattacggntnggtaagttagnccggnncttggccccanttaacatnctcactttnacttacntcccgngggtantaggtcnattgatttgnccggtagctttnacaatttggggcccggngtc

SEQ ID NO: 119934 - DNA, 648 bp, Arabidopsis thaliana
  unsure (1)..(648): unsure at all n locations
caaaaacaaaaatttctgctttgaagaagaagagtcgatccataatcgccactttcagatttccagattctggggaaacatctctaaactcttcaacgatggcgactgagaatctcaccgataagaatgttgttttcagaaagctgaaatcaaaatccgagaacaaggtttgctttgattgtagtgcgaagaatccaacatgggcttctgttccttatgggatcttcctatgcatcgattgttctgctgttcatcgaagtctaggtgttcatatcagcttcgtcaggtcaacgaacttagactcgtggagtcctgagcagctaagaacaatgatgtttggagggaacaatcgagctcaggtgttttttaagcaacatggatggaatgatggtggtaagattgaggctaagtatacttcaagagctgctgatatgtatagacagactcttgctaaagaagttgctaaagccatggctgaagaaactgttttaccgtcgttatcctctgttgctacttctcagccagtggaatcatctgaaaatggggtttacttctcgaatctccggaagcagagttctttggggcaaggcgcggctgcagcctgtttgtttcttgcacccaaaaaggtttctnaagaaagtttgttgc

SEQ ID NO: 119935 - DNA, 978 bp, Arabidopsis thaliana
  unsure (1)..(978): unsure at all n locations
cccaaaagaaactaggaagaggaaggacaatcgtncccaaaaaaacctctcttctctctcctcactgtaacaaatttttagatctagatctgcttttctcggtgcctttgatcttcatctctttggctttgctttgaaatttcaggggtgaacaagatgccttctccgttggcagtggtgtggtttttctctccttcgatgtagttgtggatccgatgtgttggaagtagagagttgctacgattcccttcggttgtggacgccggttggtgtagcgatttcttctcgtggctcagccgtcgtgtcggcctctgcaactacggcggaagtcgatcgagagaaggtgggtagtgccaattcgccatggaggttaacggtggatcttcctagatttgttggctgtcgcggattcagtgtgtttgggtgtttcgcttgagccttgggcctcaaacaccaccgtgacttgcttcctcttggccggttgaaggttttttgttcggtaaatcggagattcgttggattgggaaagaggggttatgtttgattgtcggcttgctaggtacgggagctaacaacggcgtgccgtgatgtcggagggttgaccatgccgagagatttgtggtggaaacggttggtcgcgggaaaaggaatagtagcggaagtcggatgcttcctctctgtttactagatacttcgatctgctgcaaagctgtggttctcgcatccgtcggtgctaatggtcggtttctttgcgtcacggtgtcactagggcaagatcctcttttccggtcccgacagattttttcgtttttcctttgtctctggttttctttgtaaaccaaagcccagcccaattttgtgggttctataactaataaaaggccgttttaaaaaaaaaaaaaaaaaaaaagggcggccgctctaaaggatccaagcttacgtacgcgtgcatgcgacgtcagagctcttctnnnngta

SEQ ID NO: 119936 - DNA, 729 bp, Arabidopsis thaliana
  unsure (1)..(729): unsure at all n locations
ctttagagaacttgagaagatttagaaagaaacagagagcttgagagattcctctggctaaacccagatggagtttggatcttttcttgtgtccttagggacatcttttgttatcttcgtcattctcatgcttctcttcacctggctttctcgcaaatctggaaatgctcccatttattacccgaatcggatccttaaagggctggagccatgggaaggcacctccttgactcgaaacccttttgcttggatgcgtgaagctttgacttcctctgaacaagatgtcgttaacttatccggcgtcgatactgctgtccactttgtcttcttgagcactgttctggggatatttgcttgttccagtcttcttctcctaccaactctactgcctctagccgctacagacaacaacataaagaacacaaagaattgcgacaagataccacaagcaaaggaacttttagccaacttgataaanctatcaatggngaacatcacaaaaaaaaagtccgaggctgtgggcgtnctaaggagctggttactggananctttgggcacaanattctcctggtggaaacctntnaggatggcccctnacttggnagcccaanncctgatgctggngatgaaaaacccgggaaatccggaaccntggaaaggggntcntnaccacccnncgggggcccccaaaaggttnntngccncaantnccgggnaaaaccccgggg

SEQ ID NO: 119937 - DNA, 657 bp, Arabidopsis thaliana
gacagataccacaagcaaaggaacttttagccaacttgataatctatcaatggctaacatcacaaaaaaaagttcgaggctgtgggcgttcctaggagctgtttactggatatctttggtcacatattgcgtcttgtggaaagcttataagcatgtctcttcattgagagctcaagctctgatgtctgctgatgtaaaacccgagcaattcgctattcttgttagggatatgcctgcaccacctgacgggcagacacagaaagagtttattgattcttatttcagagaaatataccctgagacattctacagatcgcttgtcgcaacagaaaacagcaaggttaataaaatatgggaaaaattggaaggttacaagaagaagcttgcgcgagcagaagcaatattagcagcaactaataaccgtcccacgaacaaaaccggcttctgtgggctagtcggtaaacaagtagacagcattgagtattacactgagctaatcaacgagtctgtagccaaactggaaacagagcagaaagcggttcttgctgagaagcagcaaaccgcagcagtggttttcttcacaaccagggttgctgctgcatcagcagctcagtctctgcactgccagatggttgataaatggactgtgaccgaagc

SEQ ID NO: 119938 - DNA, 425 bp, Arabidopsis thaliana
attagctatgagattatgaaagtgaagatataaaacaaacacctaaaagtgaaaagtacacaccagatccttcatgtttcatctctttacgcaaccacgactaagttaccaaaaaacagaatctgttctttttttgccttcttgcagatttcttcagagtcaaagacacataaagatttataattgagttgtgagttttggaggccatggacgtaggagagagcaatgagagggtaaaagacgattctgcccttcaagcttcaccgaggagtcctctgagttctatagatcttgcaattgatggagctatgaatgcttctattgagcagttgtatcataacgtttgtgaaatggagagttctgatgatcagtctccgtccagggcgagttttatttcgtatggagctgaatttaggattgatttt

SEQ ID NO: 119939 - DNA, 519 bp, Arabidopsis thaliana
  unsure (1)..(519): unsure at all n locations
actnnnnnnnnnnnnnnnnnnnnnnnnnnnnnnnnnnnnnnnnnnnnnnnnnnnnnnnnnnnnnnnnnnnnnnnnnnccacgcgtccggcggctgggtttatatcattgcttggttgttctgatgatgacataaaagaacttctgcagctgtcgcaggagttcactttagtgcggtacccagaccaggttgcccttgaaaggcttttccgagttgaagatattagagttggggctacttctcgaaaggcgattcccttactagttgaacttcttaaaccaattccagaccgccccggtgctcctctactttcacttaatcttctaactcagcttgctggggactgtccacaaaatatgattgtcatggtagagtcaggtgctcttgagggtctctcgaaatatctttcccttggacctcaggacgagcaagaggaagctgcaacaggtcttttaggcatcttatttagcagtgctgaaattcgaaggcatgagtcagcatttggcgcggtcagccaact

SEQ ID NO: 119940 - DNA, 963 bp, Arabidopsis thaliana
  unsure (1)..(963): unsure at all n locations
ttttgaaccccagtgctatagaaaagctaaaagcaatggagcaaacactggccaaaggcaagcagatccaagatgactgttctacagtggtcaagaagctacgtgctatgctccactccgcagatgagcagctacgggtccataagaagcaaaccatgtttttgactcaattgactgctaagaccattcctaaaggacttcactgccttcctctgcgcctcactacagactattatgctttaaattcatctgaacaacaatttccaaatcaggagaaactagaagatactcagctgtatcactatgcccttttctctgataatgttttggctacgtcagttgttgttaactctaccataaccaatgcaaagcatcccttaaagcatgtcttccacatcgtcacagacagactcaattatgcggcaatgaggatgtggttcctggacaatccacctggcaaagccaccatccaggttcagaatgttgaagaatttacatggctgaattcaagctacagtcccgttctcaaacagcttagttctagatcgatgatagattattacttcagagcccaccatacatattcagacaccaacttgaagttccggaatccaaaatacttatcgatccttaatcatcttcgtttttacttgcctgagatctttcccaagctcagcaaagtgctcttcttggatgatgatatagttgtgcagaaggacctttctggtctttggtcagttgatctgaaaggtaatgttaacggtgctgtagagacgtgtggggaaagctttcatcgctttgaccgttatctgaacttctcaaatccactcatttccaagnactttgaccctcgagcttttgggttgggcggatggattaantgcttttancttgntgaattggaggggaaaacatcccagngggttttcatnggtgnagggcttattaagncccggnattttc

SEQ ID NO: 119941 - DNA, 721 bp, Arabidopsis thaliana
  unsure (1)..(721): unsure at all n locations
cgcgtctccacgactcactattgggaaagctggcacgcctgcaggtaccggtccggaattcccgggtcgacccacgcgtccacagattttaaaaaaccccaaaaactttacattcttaacaatttcaaccctatgggcttacttgatcatctctgggatgatactgtcgctggtccacggccagagaacggccttggcaagcttcgtaaacaccataccttcagtttccgacctagctccggcaatgatcaatcggaagctggaagtgcgagatcgtacggtgaggattcgctaccggaagaagcagtgaaagttacacgtagtatcatgataattaaaccaccgggttaccaaggcagttcagctccagcttcgcctgccggttcaactccgccgctatcacctttctctccgccgctgtctccgttctctgagcaaacgcagggggaaaggaaccctttcggtttaggagacggtcgacgtcggatgcgttcgagaaggcagcaggaggatcagagactggaccaaggagctctcctcctacttacggcatgtgatctctaacacacaacacaagtcttgaaaaagagaagggaggaggaaacagggtacccacccttaaacgatgtcggttagactccatgaagtggtggttttttctttttnggccaagggttttagggttnttatgatgcggattagttttttggggttgttttaa

SEQ ID NO: 119942 - DNA, 503 bp, Arabidopsis thaliana
  unsure (1)..(503): unsure at all n locations
aacagattttaaaaaaccccaaaaactttacattcttaacaatttcaaccctatgggcttacttgatcatctctgggatgatactgtcgctggtccacggccagtagaacggccttggcaagcttcgtaaacaccataccttcagtttccgacctagctccggcaatgatcaatcggaagctggaagtgcgagatcgtacggtgaggattcgctaccggaagaagcagtgaaagttacacgtagtatcatgataattaaaccaccgggttaccaaggcagttcagctccagcttcgcctgccggttcaactccgccgctatcacctttctcttccgccgctgtctcccgttctctgcaaacgcagggggaaaggaaccctttcggtttaggagagcccgggtcgacgtggatncgttcgagaggnacaggaggtcaggncttgnccagggntttctctantnnggatgtntcttncancacanagtttaaaaaggnggggggg

SEQ ID NO: 119943 - DNA, 805 bp, Arabidopsis thaliana
  unsure (1)..(805): unsure at all n locations
acntccagggnancccacngngtcctgaaaaacgtgcaaaaacntgatacngtcgcnggtccacggccagagaacngccttggcaagcttcgtaaacaccataccntcagttcccgaccnagcnccggcaatgatcaatcggaagcnggaagnncgagatcgtacggtgaggattcgctaccggaagaagcagtgaaagttacacgtagtatcatgataattaaaccccccggtttcccaagccagttcaggttcaagtttgcctcgcgggttcacttcgcccgctatcacctttctctccgccgctgtctccgttctgagcaaacgcagggggaaaggaaccctttcggtttaggagacggtcgacgtcggatgcgttcgagaaggcagcaggaggatcagagactggaccaaggagctctcctcctacttacggcatgtgatctctaacacacaacacaagtcttgaaaaagagaagagaagaagaaaacagagtacccacccttaaacgatgtcgtttagactgcatgaagtggtggtttttttgcttttgtaggccaaagaggtgttcagtgttctcttatgtatgcgtgtatgagtttgtttgtgtgtttgttttttatatgtaatctcgtttttttcggtaatgcttttatgcgttttgtaaatttttgctgcaatgaaaataaaaacttgtagatacttaaaaaaaaaaaaaaaaagaaaaaaagggcggccgctctagaggatccaagcttacgtacgcgtgcatggtacgtcatagctaatnctatagttcattct

SEQ ID NO: 119944 - DNA, 629 bp, Arabidopsis thaliana
  unsure (1)..(629): unsure at all n locations
aaaactttacattcttaacaatttcaaccctatgggcttacttnatcatctntgggatgatactgtcgctggtccacggccagngaacggccttggcaagcttcgtaaacaccataccttcagtttccgacctagctccggcaatgatcaatcggaagctggaagtgcgagatcgtacggtgaggattcgctaccggaagaagcagtgaaagtnacacgtagtatcatgataattaaaccaccgggttaccaaggcagttcagctccagcttcgcctgccggttcaactccgccgctatcacctttttttccgccgctgtctccgttctctgggggaaaggaaccccttttcgggtttaggagacggtcgacgtcggatgcccgttcgagaagggcagcaggaggttcagagacttggcccaaggagctctcctcctacttacggcatgttatctctaacacacaacacaangtntttgaaaaaggtgaaggtgaaggaggnaaacaagagttacccacccctttaaaacggattttccgtttangncttncantgaaagtgggggggtttttttttgcctttttttnanggcccaaaaaagggttttcaantgtttcnttaananttc

SEQ ID NO: 119945 - DNA, 374 bp, Arabidopsis thaliana
  unsure (1)..(374): unsure at all n locations
aaaaaaccccaaaaactttacattcttaacaatttcaaccctatgggcttacttnatcatctctgggatgatactgtcgctggtccacggccagagaacggccttggcaagcttcgtaaacaccataccttcagtttccgacctagctccggcaatgatcaatcggaagctggaagtgcgagatcgtacggtgaggattcgctaccggaagaagcagttaaagttacacgtagtatccatggtaatttaaaccaccggcgttaccaagggcagtttaagctccaacgtttggcctgccgggttcaaaattccggccgggtttttaacctttttttttccgccggtttgtttccgntttttntggggggaaaang

SEQ ID NO: 119946 - DNA, 509 bp, Arabidopsis thaliana
  unsure (1)..(509): unsure at all n locations
ttaatggatgtgattagatcaatcggaagctggaagtgcgagatcgtacggtgaggattcgctaccggaagaagcagtgaaagttacacgtagtatcatgataattaaaccaccgggttaccaaggcagttcagctccagcttcgcctgccggttcaactccgccgctatcacctttctctccgccgctgtctccgttctctggtgagtttttatttttcattagttggtgtaggtgaaacagtacactcacttaattcgttgaaggatattttcgtcaattctttaaaggattgtttttgacatttcatgttatacgtcaatttggtgtatagtggattagattaggtctagtagtgtttatgcacagtgcacttacatagttttgtcgagaaaataaactaagttttgtcccatagtgtgaccattatgatttgattatatgtgacattattgattatattggttgaattaggtcattangtgtgttgtctaatcaaatgttatacg

SEQ ID NO: 119947 - DNA, 765 bp, Arabidopsis thaliana
  unsure (1)..(765): unsure at all n locations
atgatactccagctctctacgactcactatanggaaagctggcacgcctgcaggtaccggtccggaattcccgggccaagaaaccaaaagagtaaaacaaacacagagaagcttcttcttaaacgatgccgtactataccagagatgacaacgacgtcgacgatttcgatgagtttgatccaacgccgtacagtggtggttacgacatcacggtgatctacggccgtccgattccaccttccgatgagacttgttatcctctctcatctggtgtcgatgatgatttcgaatacgagagacctgaatttactcagatccatgagccttctgcttacggtgatgaagctcttaacacagagtacagtagctattctcgacccaagccacgacccgcatttcgacccgattcaggtggtggtggtcatgttcaaggtgaaagaccaaatcctggttatggatctgaatccggttatgggaggaaaccggaatctgagtacggatctggctatggtggacaaacggaggtggagtatggtcgggcccttagcagagttttggatctgggtatggtggaaggccggagactgaatcggagtatggatctggtggtggtggaagaactgaggttgagtatggtaggagacctgaatcagggcttggatctggttatggtgggagatcggagtctgagtatgagcgtaagcctagctatggaaggtctgaggaacaagaagaaggttattggaagcctagctatggaagatt

SEQ ID NO: 119948 - DNA, 556 bp, Arabidopsis thaliana
ctctgttttatttttttcttccggtggtacaaaaattcacaatgaactgtatttatcacaattaatgaccgattgcttcttcacctactctctctctctctctctctctctttggaagtaaccaaacaagcctatatgctgctgatcccatctaggggccaagcctctcttctttaaaaacttttgacttccattttcttgagaattcccctttctgggttcttgatttggaaagatgggtaacaagataatctcaatgatgaagaaagatagcaaagatggaggaggaggaggatctaagagcaagagaatgaatcggtctcagaggaaattacttgctgatgaagagatgttgcatcgtcgagctctttccatggcgattcatcaagctcagctttctcagagatttgatggatctatgtctagacgggtcgggtctactagtactaggaaacgtactctctctgacccgttttctaatggcaagcaggttaagtcactactgattctcaatcttctccacacttataaaagtttcaatcttgaaaagttcaaa

SEQ ID NO: 119949 - DNA, 739 bp, Arabidopsis thaliana
gtcttgaattgggttcttttgctgcgggggtcatgatatccactactgatctcgctgaacatacattggagcaaatcgaacccatccgtaatttatttgctgctcttttcctagccagcattgggatgttagttaatgtccattttctgtggacacatgtggatatcctggtaccctctgtgatattaggtatttttattaagccaccaatagttacacccgttgttaagggatttggatacaacaataagacggctcttctggttggaatatctctggctcagataggggagtttgcctttgtacctacttagccgtgcctccaatcttctcctcatcggaagggaaactctatctgcttctcccttgggacaaccgctctaagcctggtttcgacaccgctggttttcaaaatgataccagcacgttgtacatcttgggatactgttgaaatggttttctccaggcagtcctatagagaaaggaggaattgtaagatcagaaagtgggtaacaacggatgattctaatgtcacgtcaatcccaccgctccttaaaccccaaaatggtcctctccactaaagtttgggccactccatccattttgccaaaggaaaaatggggaaaagaacagaaaaaggtttttaccccaaccttggttggttcctgggaggtaccaaacccccagccgcccccaaatcgaaaaccagcctaatcattccctcccacctcaagggggg

SEQ ID NO: 119950 - DNA, 624 bp, Arabidopsis thaliana
  unsure (1)..(624): unsure at all n locations
nnnnnnnnnnnnnnnnnnatgcnnnngcacnnnnnnnnnnnnnnnnnnnnnnnnnnnnnnnnnnnnnnnnnnngatagcaattcataacaagaagattaccaactacagagacagagaagatgggcatggcaatgaagtcagtttctaacttcgcaatctttttaatcctctttttggtcacctctgaaatatctgagatagaagcgaaagataaggaatgtctaaaaggatacattgatgcgcctttaagctattgtatggctaggatttatccgtcgttgtgttatcgaaattgtcgtttttacaagggcgcgaaaggtggaaaatgcgacggtcttaagtgcttctgcgacttctgcagcgacaagcctttttagtcagtttctgatgagaaatgtttgaatcttggcatgtataatggtttgtgtaatgattaaaggtaaacgaacaagtaatagtcaataagtaaaataaactttataaaaaaaaaataaaaaaaaggaaaanaaaaaaaaanaaaaataaaaaaaaaaaaaaaaaaaaaaaaggggcggccgctctaaaggatccaagcttacgtacgcgtgcatgcaacgtaatagcttttnnnnnnnnnnnnnnnn

SEQ ID NO: 119951 - DNA, 639 bp, Arabidopsis thaliana
  unsure (1)..(639): unsure at all n locations
ccggcactatacgactcacttagggaaagctggtacgcctgcaggtaccggtccggaattcccgggtcgacccacgcgtccggaagattagagactacagagacagagaagatgggcatggcaatgaagtcagtttctaacttcgcaatctttttaatcctctttttggtcacctctggtaaattttaactccgtacttctcacatacttattaaaatttgtgattcatacgatccatagaggatttaattatttctgttggtgattgctgcaagtttctttatatgtgaattttatttgccaaaactaatttatttgtatatacatgatatgtgagcagaaatatctgagatagaagcgaaagataaggaatgtctaaaaggatacattgatgcgcctttaagctattgtatggctaggatttatccgtcgttgtgttatcgaaattgtcgtttttacaagggcgcgaaaggtggaaaatgcgacggtcttaagtgcttctgcgacttctgcagcgacaagcctttttagtcagtttctgatgagaaatgtttgaatcttggcatggtataatggcttgtgtaatgattaaaggtnaacgaacaagtaatagtcaataagtaaaataaaaattaaaaa

SEQ ID NO: 119952 - DNA, 572 bp, Arabidopsis thaliana
  unsure (1)..(572): unsure at all n locations
ctatagggaaagctggtacccctccaggtaccggtccggaattcccgggtcgacccccgggtccggacagagaagatgggcatggcaatgaagtcagtttctaacttcgcaatctttttaatcctctttttggtcacctctgaaatatctgagatagaagcgaaagataaggaatgtctaaaaggatacattgatgcgcctttaagctattgtatggctaggatttatccgtcgttgtgttatcgaaattgtcgtttttacaagggcgcgaaaggtggaaaatgcgacggtcttaagtgcttctgcgacttctgcagcgacaagcctttttagtcagtttctgatgagaaatgtttgaatcttggcatgtataatggtttgtgtaatgattaaaggtaaacgaacaagtaatagtcaataagtaaaataaaaattaaaaacgctagactttgattgtgttatcactaaaataaatgaagataagtgggacnnnnnnnnnnnnnnnnnnnnnnnnnnnnnnnnnnnnnnnnnnnnnnnnnnnnnnnnnnnnnnnnnnnnnnnnnnnnnnnnnn

SEQ ID NO: 119953 - DNA, 847 bp, Arabidopsis thaliana
  unsure (1)..(847): unsure at all n locations
aagaggctcccatacccaagcagatcctttgaacttgctcactgttcacgttgtcgtatcgattggnttcaaagagatggtattcttcttctcgagctagacagggtgctaagaccnggtggctattttncatattcatctccagaagcatatgcacaagatgaagaggacctcagaatatggagagaaatgagtgctcttgtgggccgtatgtgttggacgatagctgcaaaaaggaatcaaactgtaatttggcaaaaacctttgacaaatgattgttatttgggaagagaacctggaacccagcctcctctttgcaattctgacagtgaccctgatgctgtgtatggtgtaaacatggaagcatgcattactcaatacagtgaccatgaccacaaaaccaagggaagtggattggctccatggccagctcgattaacctctcctcctcctcggctagctgactttggctattccactgacatttttgagaaggatacagaaacttggaggcagagagtagatacttattgggatctcttgagtcctaaaatccaatcagacacttgtgaggaacataatgggcatgaaaggcaagcattggggctccctttgctgctgctcttgaaggaaaaagatgtctggggattgtgtgttgttcctgaggncggacctaacacgcttaaactggatatatgccagnggtttaatggggcgnnggtcatnagctggtntgaagattctcggccatntccaagggcatttgntcccctncatgcttgggntattttacngggtttcaaggnaaaagggtttaggtaagggggttttnnaccgggnatggncc

SEQ ID NO: 119954 - DNA, 753 bp, Arabidopsis thaliana
  unsure (1)..(753): unsure at all n locations
gagagggatgacaaaccttgaaatactggggcccaaccattattgttctcagtggtacaagtgggagtggaggctctcccaactaacctataagcagagtcttcttgttgggttgcagagaagtcgtttgatctgattgtgttacctggcggtcttaacggtgctcaaagattcgcaagctgcgagaagctagttaatatgttaaggaaacaggcagaagcaaacaaaccatatggaggaatctgcgcatcgcctgcttacgtcttcgagcctaatggtttactcaagggtaagaaggctactactcacccagtggtgagcgacaaactttcggacaagagtcacattgagcacagagtcgtggtagatggaaatgtcataacaagcagagctccagggactgcaatggagttttcacttgccattgtcgaaaagttttacgggcgagagaaagctcttcagctcggaaaggcaacacttgtgtgatttcaaacaatgaaagtatgagagtggcttgaataaaaagaaggctttgccttttagttatctctctccattagtaattacttactttatgatatatgacatatgagcttggcttagtgattggtgtgtaactttatgcctttataaatgaataaacgagatttttctaaaaaaaaaaaaaaaagnnnnnnnnnnnnnnnnnnnnnnnnnnnnnnnnnnnnnnnnnnnnnnnnnnnnnnnnnnnnnnnnnnnnnnnnnntacaatcg

SEQ ID NO: 119955 - DNA, 1418 bp, Arabidopsis thaliana
  unsure (1)..(1418): unsure at all n locations
gcaatacccttccggaatttccggcgcgacccacccgtccgctactattctaaccccattagtgacactcctttcttctccactacactccatttctctttcttcttgactcgaccatcgtttctctaatctccgcaactatggcttcatttacgaaaacggttttgatccctattgcgcacggtacggagcctctagaagcggtggcgatgattaccgtgttgcgtcgaggtggtgctgacgtgacggtggcgtctgttgagactcaggttggcgttgatgcttgtcatggcatcaagatggtcgctgatactcttctctctgatattaccgactctgttttcgaccttattgtgctccccggagggcttcccggtggcgagactcttaaaaactgtaaatctttagagaacatggtcaagaaacaagactctgatggccgacttaacgcagctatatgttgtgctcctgccttggctcttggtacttggggtctactagaaggcaagaaagcaacgggttaccctgtttttatggagaaacttgcggctacttgtgcaactgctgttgagtcaagagtgcaaattgatggaagaatagtgaccagtcgtggaccaggaaccaccattgaattctccatcacgcttatagagcagttgtttgggaaagaaaaagctgatgaagtctccagtatcttgctgcttcgtcctaaccctggtgaggagtttacttttactgagcttaaccaaacaaactggtcatttgaagatacaccacagattctcgtacccattgcagaggagtcagaggaaattgaagctatagcgcttgtagatatcctgaggcgggcaaaagcaaatgtagtgattgctgcagttggtaacagtttggaagttgaaggatctcgcaaagctaagctagtagcagaagttcttcttgatgaggttgcagagaagtcgtttgatctgattgtgttacctggcggtcttaacggtgctcaaagattcgcaagctgcgagaagctagttaatatgttaaggaaacaggcagaagcaaacaaaccatatggaggaatctgcgcatcgcctgcttacgtccttcgagcctaatggtttactcaagggtaagaaggctactactcacccagtggtgagcggcaaactttcggccaagagtcacattgagcacagagtcgtggtaggtttggaaatgtcataccaagcagagctcccaggggcctccaatggggttttcacttgcccatttccgaaaaccgttttccgggcgagagaaagctcttcacctcggcaaagcaaccctttttggtttcaaacaattaaacgatttngggggnttattaaaanaggctttccctttaggttcccccccattgnattcctcctttgattgcattggga

SEQ ID NO: 119956 - DNA, 494 bp, Arabidopsis thaliana
  unsure (1)..(494): unsure at all n locations
tgcaggcaacgggttaccctgtttttatggagaaacttgcggctacttgtgcaactgctgttgagtcaagagtgcaaattgatggaagaatagtgaccagtcgtggaccaggaaccaccattgaattctccatcacgcttatagagcagttgtttgggaaagaaaaagctgatgaagtctccagtatcttgctgcttcgtcctaaccctggtgaggagtttacttttactgaggttaaccaaacaaactggtcatttgaagatacaccacaggtaaatgttcagttgcctctccacttggcccttttaacatttttccaagnccaggcttttgtttgatcccgctatacaagattncttagggacatgctgtgttgtaaagnattttggctttccttgatcaataggccttttttgnggccaggggggttaatggtttnccctttcaanttnncggancccnttcnaggggggcaagngggaatttagncttag

SEQ ID NO: 119957 - DNA, 839 bp, Arabidopsis thaliana
  unsure (1)..(839): unsure at all n locations
aggtgacacttacaagacnatgacgtcgcctgcacgcgtgcgtaagctcggaattcggctcgaggtcctaaccctggtgaggagtttacttttactgagcttaaccaaacaaactggtcatttgaagatacaccacagattctcgtacccattgcagaggagtcagaggaaattgaagctctagcgcttgtagatatcctgaggcgggcaaaagcaaatgttttgattgctgcaggggggtaacattttggaagttgaaggatctcacaaagctaagctagtagcaaaagtttttcttgatgagggggcagagaagtcgtttgatctgattgtgttacctggcggtcttaacggggctcaaagattcgcaagctgccagaagctagtttatatgttaaggaaacaggcagaagcaaacaacccttttgggggaatctgcgcatcccctgctttcctctttcgagcctaatgggtttctcaagggtaagaaggctactccctcacccagtggtgagcgacaaactttcggacaagagtcacattgagcacagagtcgtggtagatggaaatgtcataacaagcagagctccagggnctgcaatggagttttcacttgccattgtcggaaagtttttacgggcgagagaaaagctcttcaagtcggaaaggcaacacttgtgtgnttttcaaacaatgaaagtatgagagtggcttgaataaaaagaaggctttncntttaggtatctcccnccattaggaattccttccttatggttttgcatatnnccttgcttagnnttgggggancttntncttttaatgataccgggttnttaaat

SEQ ID NO: 119958 - DNA, 891 bp, Arabidopsis thaliana
  unsure (1)..(891): unsure at all n locations
tccagcactatcgactcacttagggaaagctcggtacgcctgcaggtaccggtccggaattcccgggtcgacccacgcgtccgagatgatggacgtatcaaaggatcggatgatgagttcgatggaggaacttcgcggaggaaactataatcttgagtcatactcaaacgttcatacttggctgagcagtgtgcttacaaactacatgacatgtttagaaagtattagtgatgtctccgtcaactctaagcaaatagtcaagccacaactcgaggacttggtttctagggcaagagtggctctagccatctttgtctccgtcttgcctgccagagacgatctcaaaatgatcatttccaatcgcttcccgtcgtggctaactgctcttgacagaaagcttttagaatcttctcccaagacacttaaggtgaccgcgaacgttgtggtggcaaaagacggcaccggaaagttcaaaacagtgaatgaggcagtggcggcagcaccggagaacagcaatacaagatacgttatatacgtaaagaaaggggtttacaaagaaactattgacataggaaagataaagaagaacttaatgcttgttggtgatggcaaagacgcaacgatcataaccggtagtttgaatgcattgatggatccccaccttcagatccagccactgtgctgcaatggagacgggttatggacaagcatatggtccaaacactgcaggcggcaagaccngctgggccacgaggagtgtgacaactgataatcgtgcgataatgcgatagaccctcaactacacgtgaacatctacgcaagtactaccggccgaattatctcgaacttgctggatcaactgactgtggcaatctgactggaagactgtac

SEQ ID NO: 119959 - DNA, 1116 bp, Arabidopsis thaliana
  unsure (1)..(1116): unsure at all n locations
gttcaaaacagtgaatgaggcagtggcggcaaccggagaacagcaatacaagataccgggtcgacccacgcgtccgggtttacaaagaaactattgacataggaaagaaaaagaagaacttaatgcttgttggtgatggcaaagacgcaacgatcataaccggtagtttgaatgtcattgatggatccaccaccttcagatcagccactgttgctgccaatggagacgggtttatggcacaagacatatggttccaaaacactgcagggccggcaaagcaccaggctgtggctctacgagtgagtgctgatcaaactgttataaatcgttgtcgcatagatgcgtatcaagacacgctctacactcacacgttgagacaattctaccgcgacagctacatcaccggtaccgtagatttcatcttcgggaactctgctgtggtattccagaactgcgacatcgtggcacgaaatcctggagctgggcaaaagaacatgttgacggctcaaggacgggaggatcagaaccagaacaccgccatttcgatccaaaaatgtaagataacggctagttcggatcttggctcctgtaaaaggatctgtgaaaacgttccttgggcgaccgtggaagttgtactcaagaacagtgatcatgcagtctttccattgacaaccacattgacccggctggttggttcccatgggatggtgagtttgcgctctcccacattgtattatggagagtatgcaaataccggtcctggagcggatacgagtaagagagtgaattggaagggatttaaagttattaaagactcaaaagaggccgaacaattcactgtggcgaagcttattcaaggaggattatggttgaaacccactggagttactttccaagagtggctttgattttaatgtctacttgttcttgtactttgtgttgtgttacctctgttttagtttgatgtattttttctgttttgttttgtatgacttacccaataaataacatgctctgtttcgccnnnnnnnnnnnnnnnnnnnnnnnnnnnnnnnnnnnnnnnnnnnnnnnnnnnnnnnnnnnnnnnnnnnnnnnnnnnnnnnnnnnnnnnnnnnn

SEQ ID NO: 119960 - DNA, 799 bp, Arabidopsis thaliana
  unsure (1)..(799): unsure at all n locations
cagcnnnnnatacgactcaccttagggaaagctggtacgcctgcaggtaccggtccggaattcccgggtcgacccacgcgtccgcggacgcgtgggcggacgcgtgggttttacctctaaagccaaagaccaacatgtctaattcaaaccaaccacttctttccaaaccaaagtctcttaagcacaagaatctatgccttgtcctctccttcgtagccattcttggctctgtggctttcttcacagcccaattaatctccgttaacaccaacaataatgatgattccttattaactacgagccagatttgccatggagctcacgaccaagactcatgccaagctctcttgtccgaattcacgacgttgtcgctctcaaagctcaaccgccttgacctattgcacgtgtttttgaagaactcggtgtggcggcttgagagcacgatgaccatggtgagcgaggctaggatccgctcgaacggtgttagagacaaggcaggttttgctgactgcgaggagatgatggacgtatcaaaggatcggatgatgagttcgatggagggacttcgcggaggaaactataatcttgagtcatacttcaaacgttcatacttggcttgagcagttgtgcttacatacctacaatgacatgtgtagaaagtattaggtgatgtctccgtcaacttttaagcaattagtcaagcnacaacttgagggctttggtttttngggcaannantggctnttngcatcttttctccgnnttncttccnaaancggtnttaaatggccattccnat

SEQ ID NO: 119961 - DNA, 1272 bp, Arabidopsis thaliana
tgtccgtctgcagtaccgttccggaatttccgggtcgacccacgcgtccgccgggacacctgtcgcgccattggatttgtctctgttgatgttggtcttgatgctgacaaatgcaaagtcctagtcaacattgagcaacagagcccagacattgctcaaggagttcacggtcacttcaccaaatgtcctgaagaaattggagccggtgaccaagggcacatgtttggttatgccactgatgaaacccctgagttaatgcccctgagccatgttcttgccaccaagctcggtgctcgcctaacagaagtcagaaagaatggtacttgcgcctggctaagacctgacggcaaaacccaagtcactgttgagtactacaatgacaagggtgccatggtcccaatccgtgtccacacagtcctcatctccacccaacacgatgaaactgtgaccaacgacgaaattgcccgtgaccttaaggagcatgtcatcaagccagtcatcccagagaagtacctagacgagaaaaccatcttccacttgaacccttcaggccgattcgtcatcggtggaccccatggagacgctggtctcaccgggcgtaagatcatcatcgacacttacggtggatggggagctcacggaggcggtgcattctcaggtaaagacccaaccaaggtcgacagaagcggagcctacattgtgagacaagcagctaagagcgttgtggctaacgggatggctcgtagggctcttgttcaggtctcatacgccattggagtccctgagccattgtctgtctttgtggacacttatgagactggattgattccagacaaggagatactaaagattgtgaaggagagcttcgacttcagaccaggaatgatgacaattaaccttgacctaaagagaggaggaaacggaaggttcttgaaaactgcggcttacggacactttggaagagacgaccctgacttcacctgggaagtcgtcaagccactcaagtgggacaaacctcaagcttaaattttacctactctgtttctgtcttcattccacaaaccaattatctgctcacttttttatttctctgtttttgtggtttattgtgtttatgtatcattgtacttgagctatttcaattgggtgtttgtttttatggcgacttttacacggcttggagtaagtttcatgttgttcttatataattaatacaagcttccgtacgcgtgcatgcgacgtcatagctcttctatagtgtcacgtaaattc

SEQ ID NO: 119962 - DNA, 774 bp, Arabidopsis thaliana
  unsure (1)..(774): unsure at all n locations
gtcttccacctcaacccatcaggccggtttgtgatcgggggaccacacggtaatgctggtttaactggacgtaagatcatcattgacacatacggaggatggggagctcatggaggtggtgctttctcaggcaaaggcccacccaaagtcgacagaagtggagcttacaccgtgagccaagcagcaaagagtgtggtgcctaatggcatggctcgcagggctcttgtccaggtctcatacgccattggagtacccgagccattgtctgtcttcgttgacacttacggaacagggttgattccagacaaggagatcctgaagatcgtgaaagagacattcgatttcagaccaggaatgatgacaatcaacttggacttgaagagaggaggaaatggaaggtttcagaaaacggcagcgtatggacatttcggaagagacgaccctgacttcacctgggaggtcgtgaagccactcaagtgggacaaacctcaagcttaaacttgattttatgtttcttctgtctttttactttaaacatctaccatggaccaataatcaaatccctctgtttcttttttcttgtattattgatatgaaagtttctggtttgtttaaacaactaccatagaccaattttctctttcactataaattgtagtagttgaaatttgtgttctcaaccaaaaaagggcaggccgctctagaggatccaagcttacgtacgcgtgcatgcgacgtnnnnnnnnnnnnnnnnnnnnnnnnnnnnnnnnnnnn

SEQ ID NO: 119963 - DNA, 874 bp, Arabidopsis thaliana
  unsure (1)..(874): unsure at all n locations
tnnacgactcactatagggaaagctggcacgcctgcaggtaccggtccggaattcccgggtcggcccacgcgtgcggtttccttcttcgctcgctgttcagattttgctttgaggctttaggctccccagatctctaatcgccgcagctttaagaaatggagactttcctattcacatctgagtctgtgaacgaaggacaccctgacaagctttgcgaccagatctctgatgcagtccttgatgcctgccttgagcaagaccctgatagcaaagttgcttgtgagacatgcaccaagaccaacatggtcatggttttcggtgagatcaccaccaaggctacgattgactacgagaagattgtccgtgacacttgccgttccattggattcatctctgacgatgttggtcttgatgctgacaaatgcaaagtccttgttaacattgaacaacagagcccagacattgctcaaggtgttcacggtcacttcaccaaacgtccagaagacattggagctggtgaccaaggacacatgtttggttatgccactgatgaaacccctgagctcatgcctttgagtcatgtccttgcaaccaagattggtgctcgtctcactgaagtcaggaagaatggaacttgccgttggttaagaccagatggcaagacccaagtcactgttgagtactacaatgacaaggggtgccatggtccnaatcngtgtncaaaacaantccttaattttcacccaacaaggatgaaaacttttnaccaacggnggaaatttccccntgnacctttaaggggcatgttcattaaagccagttnattccanggggaaggtacntnggtnggnaaaaccnttttttccattttta

SEQ ID NO: 119964 - DNA, 577 bp, Arabidopsis thaliana
  unsure (1)..(577): unsure at all n locations
nnnnnnnnnnnnnnnnnnnnnnnnnnnnnnnnnnnnnnnnnnnnnnnnnnnnggaaaaccggccgggacccacgcgtccgctcttttaacacttgttcttttaaggcaaaaaggctcgagccacagagatctgagtttctcttcttcgagatctgatcgccgaatctcataatctcccatcgaagcagaatggagacttttctattcacatctgagtctgtaaacgagggacacccagacaagctctgtgaccagatctctgatgcagtcctcgatgcctgccttgaacaagaccctgacagcaaagttgcttgtgagacatgcaccaagaccaacatggtcatggtctttggtgagatcactaccaaggctactgttgactacgagaagattgtccgtgacacctgtcgcgccattggatttgtctctgatgatgttggtcttgatgctgacaaatgcaaagtcctagtcaacattgagcaacagagcccagacattgctcaaggagttcacggtcacttcaccaaatgtcctaagaaattggggccgttgnccaaggganatttttggttttnnc

SEQ ID NO: 119965 - DNA, 662 bp, Arabidopsis thaliana
  unsure (1)..(662): unsure at all n locations
gactttnagngggcncncggttnntggtttacggccnnaaccntttttcanaatcggaggttggagcccatggaggtggtcctttctcaggcaaagacccaaccaaagccgacagaagtggggcttcccccgtgaggcaagcagcaaagagtgtggtggctaatggcatggcccgcagggctcttgcccaggtctcatacgccatttggagtacccgagccattgtctgtcctccgttgacacttacggaacagggttgattccagacaaggagatcctgaagatcgtgaaagagacattcgatttcagaccaggaatgatgacaatcaacttggacttgaagagaggaggaaatggaaggtttcagaaaacggcagcgtatggacatttcggaagagacgaccctgacctttcacctgggaggtcgtgaagccactcaagtgggacaaacctcaagccttaaccttgattttatggttccttctgcctttttactttaaacatctaccatgggccaataatcaaatccccctggtcctttttctgaataatgnnatgaaagcggccgaatcctgaacccgggggnccctgtctaaaggcccncccggngggnccacctttgncccttagaagggnattcaccttgggacatggcaactntc

SEQ ID NO: 119966 - DNA, 605 bp, Arabidopsis thaliana
  unsure (1)..(605): unsure at all n locations
aggtgacactatagaagagttatgacgtcgcatgcacgcgtacgtaagctcggaattcggctcgaggcagctaagagcgttgtggctaacgggatggctcgtagggctcttgttcaggtctcatacgccattggagtccctgagccattgtctgtctttgtggacacttatgagactggattgattccagacaaggagatactaaagattgtgaaggagagcttcgacttcagaccaggaatgatgacaattaaccttgacctaaagagaggaggaaacggaaggttcttgaaaactgcggcttacggacactttggaagagacgaccctgacttcacctgggaagtcgtcaagccactcaagtgggacaaacctcaggcttaaattttacctactctggtttctgtcttcattccacaaaccaattatctgctcacttttttatttctctgtttttgggggttattgggtttatggatcaattgtaccttggagctatttcaatagtgggggtgttttgttttttatgggggggcttttacancgggntttgnggaaggttcaaggttggccccatnnaattnttanccctgnaaattnatttt

SEQ ID NO: 119967 - DNA, 449 bp, Arabidopsis thaliana
  unsure (1)..(449): unsure at all n locations
gatactaaagattgtgaaggagagcttcgacttcagaccaggaatgatgacatttaaccttgccctaaagagaggaggaaacggaaggttcttgaaaactgcggcttacggacactttggaagagacgcccctgacttcacctgggaagtcgtcaagccactcaagtgggacaaacctcaagcttaaattttacctactctgtttctgtcttcattccacaaaccaattatctgctcacttttttatttctctgtttttgtggtttattgtgtttatgtatcattgtacttgagctatttcaattgggtgtttgtttttatggcgacttttcaaaaaaaaaaaaacaaacgaagtaaagtggtaaataacaaaaaccacaaaaacaatatttgnnnnnnnnnnnnnnnnnnnnnnnnnnnnnnnnnnnnnnnnnnnnnnnnnnnnnggc

SEQ ID NO: 119968 - DNA, 1073 bp, Arabidopsis thaliana
gtaaaaatagcaatgtattatgtatgtcgattaaatgttgagagactcgtatatagagtataatagatctcataaaagatcatacaatgtagacagtaacagaggattgacacatcaatgaaaaggaaggttgagactcacagagtaagaagatttacatacagtacatactgggttcagcgactttgtgtttacgtgttgtaggtcataatcacaaatcagagtagtcgtatagagacccgtcgattgcactcaccgtaatagtaatgaagtcaaggtgcatgcgaatatggaacatgacaagtacttgacagacgtcagtaggatagcgtatgacatgagaatactgatcgacatataagagtgaagaaaattatgattgtagatatagtatatagtaccagagtagacatagtattaggatgacatctaagactattataagtgggataaaggtgggatataatatataatcatatgacataatcaatttgtagctatatatatatataatcttgataaatcgatgagtattcatgacgacaaaaagatgaataaggattataagaaatataatatataatgaatgtacttgttaaatagttatatccaccacaccatccttacctctacaaatctcctcctcctccataccactattagatatctctatcacggagaacacgatgtacacaagaagacaaagacaagacgaaaccagtactggtgattgtaataagagaaacaaaagatgaaagagagaatccaagcagagaaagctttctcatcattttcaaagtattgtttgcgttttattgtaataaatttgaaacttgtgtgtgttgatcaatcaatggttcatgcatgcaatcaatagtcatatatctatgtttgtaaaattttaattacgtcttgtttctttctgatttttttcatgtgcaagtttgctttgtcccaattaataaaggagagttcttaataaaaagaaaaaaaaagggcggccgctctagaggatccaagcttacgtacgcgtgcgtgcgacgtcataatcttctatagttcacataatcaat

SEQ ID NO: 119969 - DNA, 820 bp, Arabidopsis thaliana
  unsure (1)..(820): unsure at all n locations
cattccccaccaccaccaaagatatctctacgtgtacttttttcctcctcctccagttaagcactactctggtgctccggtttaccattccccacccccaccaaagaaacactacgtgtacaaatctccaccaccaccggtgaagcactactctccccctccagtttaccattccccaccaccaccaaagaaacattacgtatacaagtcccctcctcctccggttaagcactactctccccctccagtctaccattccccaccaccaccaaagaaacattacgtatacaagtcccctcctcctccggttaagcactactctcctcctccggtttaccactctccaccaccaccaaaggaaaagtacgtgtacaaatcacctcctcctcctccagtacaccactactctccaccacaccatccttacctctacaaatctcctcctcctccataccactattagatatctctatcacggagaacacgatgtacacaagaagacaaagacaagacgaaaccagtactggtgattgtaataagagaaacaaaagatgaaagagagaatccaagcagagaaagctttctcatcattttcaaagtattgtttgcgttttattgtaataaatttgaaacttgtgtgtgttgatcaatcaatgggtcatgcatgcaatcaatagtcatatatctatgtttggaaaattttaattacggcttggttctttctgatttttttcatgggcaaggttgctttggccccaattaataagggggggccccttaaaaaaaaaaataaaaaggggggcctggggcagnttcgngc

SEQ ID NO: 119970 - DNA, 1077 bp, Arabidopsis thaliana
  unsure (1)..(1077): unsure at all n locations
aaaacaaccaatggggtctccaatggcctctttagtggcaactttgcttgtcttaacaatctctctcacctttgtatctcaatcaaccgctaactatttctattcttctcctccaccaccggttaaacattacactcctccggttaaacactactctcctccaccggtataccactccccaccaccacctaagaagcactacgaatacaaatctccacctccaccggttaagcactactcacctcctccggtttaccattccccacccccaccaaagaaacactacgtgtacaaatctcctcctccttcggtcaagcactactctcccccaccggtttatcactccccaccaccaccaaagaagcactacgtttacaaatctccccctcctccggttaagcactactcttcctcctccggtttaccactctccaccaccacccaagaagcactacgtgtacaaatctccccctcctccagtcaagcactactctaccccaccggtttaccactcaccaccaccaccaaagaaacattacgtatacaagtctcctcctcctccggttaagcactactctccccctccggtttaccactcaccaccaccaccaaaaaaacattacgtttacaagtctcctcctcctccggttaagcactactctccccctccggtttaccattccccacccccacctaaaaagcattacgtctacaaatctccaccaccaccggtgaagcactactcacctcctccggtttaccattccccaccacccccaaagaaacactacgtgtacaaatctcctcctcctccggttaagcactactctcctcctccggtttaccattccccacccccaccaaagaaacactacgtgtacaaatctccaccaccaccggtgaagcactactctccccctccagtttaccattccccaccaccaccaaagaaacatttcgtatacaaagtcccctcctcctccggttaagcactactctncccctncngtntactattccccaccaccatcaaanggancattacgtgntacaagtccccttngtccttcgggntaa

SEQ ID NO: 119971 - DNA, 502 bp, Arabidopsis thaliana
  unsure (1)..(502): unsure at all n locations
aaccggtcccggnaattncccgggntgcgnacccacgtcgtccgtgccttacctctacaaatctcctcctcctccataccactattagatatctctatcacggagaacacgatgtacacaagaagacaaagacaagacgaaaccagtactggtgattgtaataagagaaacaaaagatgaaagagagaatccaagcagagaaagctttctcatcattttcaaagtattgtttgcgttttattgtaataaatttgaaacttgtgtgtgttgatcaatcaatggttcatgcatgcaatcaatagtcatatatctatgtttgtaaaattttaattacgtcttgtttctttctgatttttttcatgtgcaagtttgctttgtcccaattaataaaggagagtccttaataaaaaggagttaacaatactcaaaganagncanacnggttnnnnnnnnnnnnnnnnnnnnnnnnnnnnnnnnnnnnnnnnnnnnnnnnnnnnnnnnn

SEQ ID NO: 119972 - DNA, 1456 bp, Arabidopsis thaliana
aaaacaaaacaaaaccaaatcccaaaggattggtccaaaatctgtgtttacaaaatatcaatggcaatttcgtagtaaagataaaaaacaaggatattgtttttaatctttctattaccctattattctcttatatatatatactcttccctccggtcaaatctcgtcgtcttgtttggtctctgtttttcacgccggagatagagagagagaagtaaaaaagcgagaaaaagctagaaactttagaatacccaataatggatccgatcgaatctgtcgagtacaatggcttcgagacctctaacggtaacgtcgaccatggttggaagaaagtcgtgtacccgaaacgtcaccggaagcaaaaacaagcggatcaagcgacggcaaatggtggcaaaactgttgcttcaaatggaaccgtagctaacggcggagataacgttttccgttcgttggaagagcaagctgaggatcgtcgacgacggatcttagcggcgaagatgactgctattgattcagatgatgatggtgttgttagatctaaacatcgatctaatggttacggtgatgatgggtatgattttgatggtagtgatgatgagatcgcaacgctgaaggttgaggaagttaagaagccaaagcctaagaaggagaagaagcctaaagtttctttgcctgaagctgcatcaaagatcgatcctttaaatctcgaagcttttctcgttgaagcatcggaatcgtatgcgagtcagcctgagattcagctaatgagatttgctgattactttgggagagcactttctggagtctcatctgtgcaatttccatgggtgaagatgtttaaagagtctcctttgtctaagctgattgaagttccgttagctcatattccggaaccagtgtataagacatcagttgattggatcaaccatcgtccaattgaggcacttggagccttttgggtggggggcttttgattgtattctcacagatttagcagcacaacaaggtggtgctaaaggtgggaagaagggtggtcaacaaactacttccaaatctcaggtggcaatatttgttgcattagcgatggtattgcgtaggaagcctgatgctttgactaatgtattgccaactctgagggagaatcctaagtatcagggtcaggataagcttccggttacagtttggatgatggctcaggcctcccaaggtgatatagctgtaggcttgtattcatgggctcacaacttgttacctgttgtcggtaataagaactgtaaccctcagtcaagggatctcatcctgcagttggttgagaaaattttgacgaatccaaaggctcgtaccatacttgtaaatggagctgttaggaagggagagcgtttgattccacctccttcatttgagatcttgttgcggcttacattccctgcatcatctgcaagagtaaaggcta

SEQ ID NO: 119973 - DNA, 542 bp, Arabidopsis thaliana
  unsure (1)..(542): unsure at all n locations
nnnnnnnctaccactcactattgggaaagctggaccgcctgcaggtaccggtccggaattcccgggtcgtcccacgcgtgcgcttctttttccgtacttttttatcagaacttgtagggtttcttctgtttcaattcgtggaatattttgcaacttcgatacgtaaattacgtaattagggtttgataatgttttatgtaaccagccccgaattgaattagttccaaagttagggtttttctctctcaaattagggttttgccccaattgtgttcttatattgaatttaccatttgcgcaggttatgtggtggaggttgtttccaatttaaagtatgtacctttaggttagaaattaggcttatttgtttctccagtgggtttcattgtagaaacaaattgaattttaggtgttaatgtgagattaggaaacagaatctctgcttttaacaaggtaataggagaatagggtttagtagaagaaaggttaaaactttgtgatgggtaataagtactcaaggaagaggcatgtggtgtaagaaa

SEQ ID NO: 119974 - DNA, 472 bp, Arabidopsis thaliana
cagctctatacgacttctatagggaaagctggtacgcctgcaggtaccggtccggaattcccgggtcgacccacgcgtccgagaaggcatgatgcagcagtgactgttatgctttgtgctcaacctgtcagtgggccatcagaatcaggaggttctggtgggaaagataaaaccaaaaaacctgcttgcgatgatatcatagggcttgattccttgaaacagttcttgttatacatagccaaaggtactgagattaagaaagatacccgagtaaaaaagagcattctctgtgcggctggcaagatggaaattcgatcagatctgatggattctcatatatatgccttcaagagagcagttctgcaggaagttttggatcaaaaacctgcttttaggagcctaaaacaggatgtactaccgtatcttgttcgtacacagctgagatcagatgtcttctctgaccaaagtaatg

SEQ ID NO: 119975 - DNA, 857 bp, Arabidopsis thaliana
  unsure (1)..(857): unsure at all n locations
atgannnnnnnnnnnnnnnnnnnnnnnnnnnnnnnnttatctgaaaaattaaaacaaccgcgcctccgaaaaaaaaactaaaaatcaaaaatctcatcaccttccttgctctgtattttttctctctcactaaatcctccatggatccttctctctctgcaaccaatgatcctcatcatcctcctcctcctcagttcacatctttccctcctttcaccaacaccaaccccttcgcctctccaaaccaccccttcttcaccggacccaccgccgtcgcgccgccaaacaacatccatctctatcaagcagctcctccgcagcagccacaaacatctccagttcctcctcatccatctatttcccaccctccttactctgacatgatttgcacggcgattgcagcgttaaacgaaccagatgggtcaagcaagcaagctatttcgaggtacatagagagaatttacactgggattcctactgctcatggagctttgttgacacaccatctcaagactttgaagaccagtgggattcttgtcatggttaagaaatcttacaagcttgcttctactcctcctcctcctcctcctactagtgtagctcctagtcttgaacctcccagatctgatttcatagtcaacgagaaccaacctttacctgatccggttttggcttcttctactcctcagactattaaacgtggtcgtggtcgacctccaaaagctaaaccagatgttgttcaacctcaacctctgactaatggaaaactcacctgggaacagagtgaattacctgtctctcgaccagaggagatacagatacagccgccacagttaccgttacagccacagcagccg

SEQ ID NO: 119976 - DNA, 426 bp, Arabidopsis thaliana
cacagatagagagaagagacagagacagagagtgttggaaacagctgtatttattatgagacgaaacaagaacctctgggtttctacttaaactcttctctctttcctctctcactttaaaaatccacactttagagcacacaatacaaaaaataagggtttctttatcttttcgtttcttccaaattttgtaatggatttgatgcaaatggataagcgtttggattcaacggagcaagtggttgaagaaatcatgagaattcacagatctctacccgcaagaccaggaattgacgaagttgaagctgccaagggtttgattgacaacgttgagaaagaagatcaagcttggttagaagccattgctagacagaggaaaagctctgaagttcctggtgagcttttcatggtgttgcaagaaatgaa

SEQ ID NO: 119977 - DNA, 813 bp, Arabidopsis thaliana
ctccattgagaccttttcgaccgtaaaccgattgcgatcaaattagctgatctgatcggaaaatcacaagaaaaccctagaaaactcctccggattcgaattctcgactcgattcaatgtatcaattgagaaaatttgacttcttcgaggagaaatacggtggcaagatacctgaggatgtaaccggagatatacaatgttgttccagtggccgtggcaaagtcgtcatcggctctaacgacggatccgtcagcttcctcgatcgcggtgtaaagttcgattccggtttccaagctcactcttcctccgtcctcttccttcaacacctcaagcaaaggaactttctcgtcaccgtcggagaagatgaacaaatatcgccgcaacagtcagggatgtgtcttaaggtttttgatcttgacaaagttcaggaggaaggtactagttcctcggctcctgaatgcattggtattcttagaattttcaccaatcagtttcctgaagctaagattacttcttttctagtcttggaggaagttccaccaatattgcttatagccattggcttagataatggctgcatttattgtgtcaaaggagacattgcacgagagcgtatcactcggtttaagcttcaagtggatggacggtccgctattacaggcttggggttcaggatggatggccaagcgcttctgttgtttgcagtcactccagagtcagtcaacttgtttagtatgcaggcgcagccaccgaaattgcagactttggattatattgggggcagtgtgaatactgttacaatgagtgaccgct

SEQ ID NO: 119978 - DNA, 470 bp, Arabidopsis thaliana
cccacgcgtccgtgacatcctcgccgttgaagtctggcaggaggattgcaaagagtggagacgtatgagaagagtgtttggagcggttcatgatttgcagaatccacctagaggcactctcacattgaggttcttagtctacggaagcgcaggaatcaattggatccaatcgccaaacgctattcccgctgattggactgccggagccacctacgactccaacattctacttacttaattgattcacttttcatcagtgtgtttttatcatatagtatttattatggtttctgtatgcaatggctaatatatttaaataatgccctctaggccaatataattaatgatgataatataaataatcgtagtagattcaaatataatttatggattgtgtcccactaaaaaaattgtaatggtttgtatgagtttgattttgatggaataaatcaggactaatccctttttcc

SEQ ID NO: 119979 - DNA, 1380 bp, Arabidopsis thaliana
  unsure (1)..(1380): unsure at all n locations
ggggcggccgcgcccgcgctgggggggggggtagtattgtccggtactatacgactcatttagggaaagccggtacgcctgcaggtaccggtccggaattcccgggtcgacccacgggtgcggcccaaatctctcttccattttctccacacaaatttctcttcaatctccgataatggaaggaaccggcgttgtggcggtgtacggtaacggtgcgataacggaggcgaagaaatctcccttctccgtgaaggtcggtttggctcagatgctccgtggtggtgttatcatggatgtcgtcaacgccgagcaagctcgtatcgccgaggaggctggtgcttgcgccgtcatggctttggagcgtgttcctgctgatatccgcgctcaaggaggcgtcgctcgtatgagcgatccacaaatgattaaagaaatcaaacaagccgttacgattccggtgatggctaaggctaggattggtcatttcgttgaagctcagatccttgaagcaattggaatcgattacatcgatgagagcgaggttttgactcttgctgatgaagatcatcacatcaacaagcataatttccggatcccgttcgtttgcggttgccggaatctcggcgaggctctgaggaggatccgtgaaggtgcggcgatgattaggaccaaaggtgaagctggaaccggtaacattattgaagctgtgaggcatgtgaggtctgttaatggtgacattagggttttgcgaaacatggatgatgatgaggttttcactttcgctaagaaattagccgctccgtacgatctcgtgatgcagactaagcagcttggtcgtcttcctgtagtccaattcgccgccggtggagtggctactccggctgatgcagctctcatgatgcagcttggatgtgatggtgtctttgttggttctggtatcttcaagagcggtgacccagctcgtcgtgcacgtgccattgttcaggctgtgactcattacagtgaccctgagatgcttgtggaggtgagctgtgggcttggagaagccatggttgggatcaatctcaacgatgagaaggttgagaggttcgctaatcgctccgagtgatcaaagaaataaaaggtaaaaatttccccagaccgaaatggtttcagaattttcctcagaccaattttgcagtaatctctttgaaaagaagaagatgatgatattgttggtagtttgtaacctttgtgttttccttataatctttgatagtcttttgttattgtaatctcgtaatccctttgcaagaacaagtttgtcagttataataatgtactactctcttgatcgatcagttggntttgaatctgatatattcttcgatccaaaaaaaaaaa

SEQ ID NO: 119980 - DNA, 568 bp, Arabidopsis thaliana
  unsure (1)..(568): unsure at all n locations
tgatactctcnnnnnnnnnnnnnnnnnnnnnnnnnnnnnnnnnnnnnnnnnnnattctttgcgtcttccttttctacttatcccgcgcgcgcgctttctttttcctcttctttctctctcttctctctgaagacagtacttgtttctgtccggcgttaaaagcttcggtggtggtctcttgacttctctgagaagaagaaaaggaagctgagtctcattttagattcagctcacgaggaagtgacgacgatgtctcattctagaagactttcgttggaacctgctatagattcaatcactggtcgatttcgtgatttacagagaaatgatgatgacgtcaacaaacctgattttcgagaactcgatctaggttctcctgtttctaccttaatgccacgtggctctgcttcttcttccgctgctgcgactcctactagcagctctggctcttctggctctgcttctggtaaaccgtcggtgagttctcagatggctaaacggttagatgatgcttacaagagtcattccggtgagctttctagccccggatccggaatgccgaccacga

SEQ ID NO: 119981 - DNA, 1242 bp, Arabidopsis thaliana
atttaggcgaactatagattagctatgacgtcgcatgcacgcgtacgtaagctcggaattcggctcgagatcgcgtcgcctgaataccggatctctgttctcgaatccgggtcgggtctttggacggagcttcctccgattcctggtcaaaccaaaggacttcctctgttctgcagattggtttccgttggatccgatcttattgtcttgggtgggcttgacccgattacgtggcaggcccatgattcggtattcgtcttcagttttctcacttccaaatggcgcgtgggggcaaccatgccaggtgtacggaggtccttcttcggatgcgcttcggattcggatcggacggtgctggttgcgggtggacacaacgaagagaaatgtgcgcttacgtcagctatggtgtatgacgtgtcagaagacaagtggacgtgttttccggatatggccgggaccgagacgagtgcaaacgggtattccatctgccagattccacgtcatcggtggatatgccactaaggaccagggccagtttagtaaacagccgaatcgttcgatgtgtctaggtggagtggggtctacttacgaggacttcctcgacgacaccggcgataccgttagccctccgacctgcgtcgccggtggggatttgtacgcctgctggggtggcgatgtgatgatgtttctaaatgacaaagtggcaaaaggtgggccagatccctgctgatgtgtacaatgttacttacgtagcggtgaggcccgggatgctgattgtgatcggcaacgggaaggcgttggctggatacggtgaagccaccgtagggtatatatgtgatttaagtagctcacgatgggtaaaattggaaacacacggtggtcatgttcaagctggctgcttcttggaggtctaatggaaaacctattcatctttggagtttgaacctaaaccgcaacaaaccaatgggtagtctcgtgtgtcaatctacaaatcttttcatgaacaacaaaataaagaaatattgtatttattcagtgtcactttaccaaatatttatgttctctatacaaaacttcaaaaggaagatttgaacttttaggttctctatacaaaactgatctaattatataattgcaagcaaacaaactttcgaaaaaaaaaacaaaagggcgaccgctctagaggatccaagcttacgtacgcgtgcatgcgacgtcatagactcttctatagtggaccta

SEQ ID NO: 119982 - DNA, 785 bp, Arabidopsis thaliana
  unsure (1)..(785): unsure at all n locations
nnnnnnnnnnnnnnatgatttttnnnnnnnnnnnnnnnnnnnnnnnnnnnnnnnnnnnnnnnnnnnnccacgcgtgcgaaccttgtctcgatccaaaatttcatcttttaccaaaactattacaatatccctcactctacttgtaaagcttcaatcttcttcacttctcaacaaacagataaacaaaaagcttcaatctttgatactttctcgatggaacttatccccaatcttcccgacgacgttgctcgcgagtgtctccttcgctcctcctaccaacagttccctgtcatcgcctccgtttgcagagcctggaaccgtgaagtctctctctctcagtttttacatcagcgaaaagcttcacgccatagccaagagcttcttattctgtctcaggctcgtgtcgaccccgctggatccggaaagatcatcgctacgcctgaataccggatctctgttctcgaatccgggtcgggtctttggacggagcttcctccgattcctggtcaaaccaaaggacttcctctgttctgcagattggtttccgttggatccgatcttattgtcttgggtgggcttgacccgattacgtggcaggcccatgattcggtattcagcttcagttttctcacttccaaatggcgcgtgggggcaccatgccaggtgtacggaggtccttcttcggatgngcttcggattcggatcgacggtgctggtngcggtagacacaacaagagaatgagcgctacgtagctatggtgatgacgtgcaaaagacaagggacg

SEQ ID NO: 119983 - DNA, 541 bp, Arabidopsis thaliana
caagggccaaagggtggcccagaccccgcctgaggggcacaatgttccttccgtaccggtgagccccgcgatcctgattgtgatcgccaacgggaagccgttgccgggacccggtgaccccaccgtaagggtatatatgtgatttaagtagctccccatgggtaaaattggaaacacccggtggtcatgttcaaccgggctgcttcttggaggtctaatggaaaccctattcatctttggagtttgaacctaacccgcctccaacccatgggtagtctcgtgtgtcccccccccaatcctttcatggccccccaaattaaggaatattggatttattcagtgtccccttacccaatatttatggtctctaatccaaacctccaaaaggaagttttgaccttttaggtcctctacccaaaaaaaaaaaaaaaggccgcccccgggacctacgtaccctggccgacccgggaattatccgggcccggtcctgcaggccgtaccagcttccctatagtgagtcgtatagtagctggagatatca

SEQ ID NO: 119984 - DNA, 758 bp, Arabidopsis thaliana
tggccagcctcgggttgacggtatcgataagctagatatcgaacgcgtcttcttctctgcagtctctcttctctctgttttgccttgctctgttctctcttcctctcatcgtctcctccatcggcatcaactatggccaggtcgctaacaaccttcctccccctaaaaacgtcatccctctcctcaagtctgtgggagctacaaaagtcaagctctatgacgccgatccacaagccctacgtgccttcgccggctccggcttcgagctcaccgtggccctcggtaacgagtacctggctcagatgagcgaccctattaaagcccaaggctgggtgaaggagaacgtccaagcttacctcccaaacaccaagatcgtggccatcgtagtgggaaacgaagtcctcacctcaaaccagtcagccctcacggcagccctcttcccggctatgcaaagcatccacggtgctctggtggattgtggcctaaacaagcagatctttgtgacgaccgctcactcactagccatcttggatgtatcctaccctccctggggcacttactttcgacgcgacctactcggatccctcactgccattttggactttcacgtccagactggctcaccaagcctcatcaacggctaccctttcttcgtctacgaagaaaacctcacacacgtttctctggactgcgtactcttccaaccaaattaaagattaaccgatcctggctgtaatttccactacgacaacatgctc

SEQ ID NO: 119985 - DNA, 626 bp, Arabidopsis thaliana
  unsure (1)..(626): unsure at all n locations
caggtcactacgactcactatagggaaagctggcacgcctgcaggtaccggtccggaattcccgggtcgacccacgcgtccgcttcttctctgcagtctctcttctctctgttttgccttgctctgttctctcttcctctcatcgtctcctccatcggcatcaactatggccaggtcgctaacaaccttcctccccctaaaaacgtcatccctctcctcaagtctgtgggagctacaaaagtcaagctctatgacgccgatccacaagccctacgtgccttcgccggctccggcttcgagctcaccgtggccctcggtaacgagtacctggctcagatgagcgaccctattaaagcccaaggctgggtgaaggagaacgtccaagcttacctcccaaacaccaagatcgtggccatcgtagtgggaaacgaagtcctcacctcaaaaccagtcagccctcacggcagccctcttccccggctttgcaaagcatccacggtgctctggtggattgttggcctaaaaaagaggttttttttttanggcgggtnattaattgccatctttggtggttccnaccctcctttgggcaatntttttgnnggggctncntgggtncttatttc

SEQ ID NO: 119986 - DNA, 743 bp, Arabidopsis thaliana
ttttttcccaaaaaaataccggggtgcccaggaaaaattaaaaggattggaggaccttgtataaagggtccaagcctcttcgggagaattttcacattcgaagaagagaaaaatagtattgccggattttgtatggaaattaaacaaccatggtggtttctccctaattgtacgcattctttatgctcaaagtgttcccgcgattggcacggaaggtcagaatcatgccctttttcccgagacagtcttaagagagtaaactcaggggacttatggatgttaatggagaaatccgatccggttaatatgtatacaattgagcgggagaataagaagaggttgtttgtgtatatagagaagctacctctagtggttccagatcaagtgtttgcttcttctccttatgattgccatgtcaagtaaataagacggagaagagctttggcaaaagccgaaaccgggtctggtaaacttttatctgaatgtatatgtatataatgttttagagtagtagtaagtaatatagtgtaactatttcttggggaagtccatttctacttgcttttctttttatctgcatttggcttttggttcccaaaaactcttatttctgttgtacattcatgtctgaatttaataacctcttcttcaagaaatggctttcactccccttctaataaaaaaaaaaaaaaaaaaaaagggcggccgctctataggataccaagcttacgtacgggtgcgtg

SEQ ID NO: 119987 - DNA, 732 bp, Arabidopsis thaliana
atcgctaaagagaggtttatcgagaaaaatccaagatttactaaaaaaccactatctctctgctcttcctctgtctacattaatgtaattttgatcatcggattgggtgaaagaaacatcaaactcctaaaagagaagcctttaaagtttttttttaatcaaaaacaaaaggaagaaaattttcctttttgttttagatggcatgaatcatcatcatcgctttgctttcttgattctctatttcgtttgatgggatttgtttttctgggaatttattcattcacctgctgccatggctaaattatctttcaaggattctcttaaagctcttgaagccgatattcaacacgctaatacactagctttagattatcctcgggagaaggatggagcgcgcgttcagatgagattatcatacagcccgactgctcaattttttctttttcttgtacaatggactgattgtaagcttgctggtttcctcggtttactcagagttcttatttatatgacttatgcagatgggaaaacaaccatgtcggtttacgaaagaaaagccagtattagagagttccaaggtatgcttatatatatggcgatgatattatttctggtaaacaagattgatatcgtttaattcttatgagctttttaatattttcgttatgttttagctgtgatattaccatctttgtcacaactacaaaggggtgttacagacatagatgacag

SEQ ID NO: 119988 - DNA, 651 bp, Arabidopsis thaliana
  unsure (1)..(651): unsure at all n locations
cgactcactctatggaaagctgcgccgcctgcaggtaccggtccggaattcccgggtcgacccacgcgtccgctttgttttctttgcttcttctatcttcttcttctttcttcttctcgctttaatactctttgattcctctgttcgtttgatgagaattagattttaaatggcaaaagtttcgtttaaggattctctgaaagctcttgaagctgatattcaacacgctaacactgtagctttagattatcctcgggagaaggatggagcgcgtgttcaaatgaggctatcgtacactccagctgctcagtttttactttttcttgtacaatggactgattgccatcttgctggtacactcggtctgctcagagttctgatttacatgacctatgcggatgggaaaaccacaatgtcggtttatgagagaaaaacaagtattaaagatttctatgctgtgatatttccgtcgttgttacaactaggaagagggttcacagacccgcgggtcggaaaagaaggggggcttcaaaaacacggggccaggaattaaagggttnggggggnaaagggcaagccttccgggggtttcaccgggggaaatgaagcactcgggggttttttgggggtaccaccatgggggtnccccat

SEQ ID NO: 119989 - DNA, 789 bp, Arabidopsis thaliana
agttctgatttacatgacctatgcggatgggaaaaccacaatgtcggtttatgagagaaaaacaagtattaaagatttctatgctgtgatatttccgtcgttgttacaactagaaagaggtatcacagacctggatgatcgtaaacagaaagaagtctgcaaaatacggtacagaaataaagatgagactgaaaaggtcaagctctcggagattgacatcgagagagaagaagaatgcgggatttgtatggagatgaacaacatggtggttctccctaattgtacgcattctttatgcatcaagtgttaccgcgattggcacgggaggtcagaatcatgcccttttttccgagacagtcttaagagagtaaactcaggggacttattggatgttaatggagaaatccgatccggttaatatgtatccaattgagcgggagaataagaagaggttgtttgtgtatataaagaagccacctctagtggttccagatcaagtgtttgcttcttctccttatgattgccatgtcaagtaaataagacggagaagagctttggcaaaagccgaaaccgggtttggtaaacttttatctgaatgtatatgtatataatgttttagagtagtagtaagtaatatagtgtaactatttcttggggaagtccatttttacttgcttttcttttttaaaaaaaaaaaaaaaaaaaaaaaaaagggaaaaccccaaggcgaccgctctagaggatccaagcttacgtacgcgtgcgttcgacgtcatagctcttctatag

SEQ ID NO: 119990 - DNA, 650 bp, Arabidopsis thaliana
  unsure (1)..(650): unsure at all n locations
aattgtccggcactacacgactcacttagggaaagatcgtgcgcctgcaggtaccggtccggaattcccgggtcgacccacgcgtacgatcgtagtatgagagacaatgtcgacagtcggagaacttgcttgcagctacgctgttatgatccttgaagacgagggcattgccatcacttctgataagattgcgactttggtcaaagcggctggtgttgagattgagtcttactggccaatgttattcgccaagatggctgagaagagaaatgtcacagaccttatcatgaatgttggtgctggtggtggtggaggcggtgccccagtgtctgctgccgcacctgctgctgctggaggagctgctgctgctgcccctgctaaggaggagaagaaggacgaacccgcagaagagagtgatggagatcttggtttcggcttgttcgattagttgtctcctttcattttacgtttcatatgttctattgctttagttgctttgagatttaagtttgcattccgcactactacagttaccctanacatgactggggtacaattggcacncctctttgagcatngngaccnancnaatcatggccantaatacttggtaaaaaaaaaaccngggccgaccattccaatgngncntt

SEQ ID NO: 119991 - DNA, 426 bp, Arabidopsis thaliana
atcgtcttcgtcttctacaaattttgtttgttgcttggttttgaagccggcctttgatgggtgcggcagaatctggaaccgatcggagaagcttagcttatggatttggagtttctctgtgaatgaatctctgtttgttatggggaagaacaccgtcgaggagcagaatctccctgtgagcgacggagctgcttcggctaggaataacggaggtggaggaataagcacatgttgttgctgcgattggatctctagctactttagtctcagacgcgttccgattcctgctttttctgctgctgtgtgtctctccgccttgtttccgttaccttcatttcttcgatttgcagatccaggggatactagatcttgttccactgtctcacgacgagaaagcagaggattcaccagctgtcacgtacaccc

SEQ ID NO: 119992 - DNA, 630 bp, Arabidopsis thaliana
tgtatcgacaagctcgatatcgaattcgcggccgctcgatatctttacaaccattattcaaaaaatttggccactacaagttgaaaaagttttgattatatctaatcgctgaaatggattacaaggtatcaagaagtggggagatagtagaaggagaagtagaagattcagaaaagattgatttaccacctggtttcagatttcacccaactgatgaagaacttataacacactatctaagaccaaaggttgtaaactcttttttctctgctatagctattggtgaagttgatctcaacaaagtcgagccttgggacttgccttggaaggctaagcttggggaaaaagagtggtacttcttttgcgtaagagacccgaaatacccgactgggtttaaggtccgaatcgtgctactaaaggccggttatttggaagctacagggaaagataaagaggtcctttcaaaaggggaaacctctttggttggtatgaaggaaaacatttggttttcctccaaagggaggggctcctcaaaggggttaaaaccaaatttggggcatgccatgaggattcggttaggaggccaattccctatccgataatttttctaaaacccgctaaagaaccccc

SEQ ID NO: 119993 - DNA, 547 bp, Arabidopsis thaliana
  unsure (1)..(547): unsure at all n locations
caacttttttnctttatctttaacatcaaaaaactttatcgttatctttacaaccattaaacaaaaaaatttggccgctactagttgaaaaagtggggagtatatctaatcgctgaaatggattacaaggcatcaagacgtggggagatagtagaaaggcgaagtagaagattcagaaaagattgatttaccacctggtttcagatttcacccaactgatgaagaacttataacacactatctaagaccaaaggttgtaaactcttttttctctgctatagctattggtgaagttgatctcaacaaagtcgagccttgggacttgccttggaaggctaagcttgggggaaaaagagtggtacttcttttgcggaagaggccgaaaatacccgactggtttaagaaccggatcgtgctactaaagccggttattgggaaagctccagggaagttaaggggttttcaanggggatcctttttgggntgaggaacattggtttttcaaggnnggccctaaggggaaancaattgggcatcntggttntta

SEQ ID NO: 119994 - DNA, 374 bp, Arabidopsis thaliana
ttaaggactatataataacaaattaccttcttgttgttctcagtttcttctcccaataccaaaaatattttgcttcatccaaggtcttgaagatgggtataaaagtttcatcaaagatcaaaagaattctcgcatccacagcttcaggtagttcaaatcccaaagatggtgctgacgtggatgtccgagaggaatatgcaaacgcctttcgtacggaatcatacaatcacttttggacacgtgtcgtacagctaagccgcaaaaagtccgcagtgtcttcttcttcttcttctccaccaatcgaatcatcctccacgtcagctcgtctcatgtcttatcgcctattcgcgcacaatcttctagacccggatctg

SEQ ID NO: 119995 - DNA, 521 bp, Arabidopsis thaliana
acgcgtccgttttcctctcagctcacctatggaaaccctacaaagatctctctctcaagatttctgaaaatggatatataatctcactgatttgtttctttttttgttcttgtttcgttttctatatgtttatggatgagttgtagtttccatctcccagccggatatagaaagaagaaacagaggaaatttgttcataaaggaggtacatatatacacatacaagtctctgtgaaatatgacatctcagctaaaacgaactttaaccaagagatacggtgttcttgaactgtgggagatcatagtgattgctctctttgcagccttcatagtaatccttgtcctttcagtttggctcagcttccgtaaaaagtccaaaagatctaatgctacaacgcttcctgtaactcaaagccctcgctttaccgaagaaatataagatatatgtgttgatcatgggtcatctaacaacattggtacttgttaccaaactgtggtgaagatattcgttgaggacatct

SEQ ID NO: 119996 - DNA, 650 bp, Arabidopsis thaliana
  unsure (1)..(650): unsure at all n locations
aatgatactgccnnnnnnnnnnnnnnnnnnnnnnnnnnnnnnnnnnnnnnnnnnnnnnnnnnnnnnnnnnnnnnnnnnnnnnnccacgcgtgcgcggacgcgtccgcccacgcgtccggttggaggcgttcaagctggagcctttaaaattggtgacacagctggaactattgacaatatcatccaatgcaagttgtacaggcctggatctgttggctttgtctcaaaatctggtggcatgtctaatgaaatgtacaataccattgcccgtgtgacagatgggatctatgaaggcattgctattggtggggatgtgttcccgggctcaactttatctgaccatatcctgcggtttaacaacatcccacagattaagatggtggttgtacttggagagcttggaggaagagatgaatattctctagttgaagccatgaaacagggaaaagtgaccaaaccagtggttgcttgggtcagcgggacttgtgcacgtctattcaagtccgaagtacaatttggtcatgcaggggccaaaagtggtggagagatggagtctgcacaagccaagaatcaagcgctacaagatgctggagctactgtacccacttcattcgaagccctagagttgcaatcaaggaaacttttgcaaa

SEQ ID NO: 119997 - DNA, 544 bp, Arabidopsis thaliana
tctgaatggaccaaaagcttgcgacatctttgtgtcttaatcttctctctcctcttctggaaaaactgaacctttaattcgttcttcacatctcctttagctttctgaagctgctatcttcaagctcaaaaccaacccctagaaataaaatgacggcgacacaaatgctgcttcatcttcttcttcttccacttctcttccttcacttcagcaaccaagtcatggcagaaatcaccgacgagttagcgacattgatggaggttaaaacagagcttgacccagaagacatacacttagcttcatggagtgttaatggagatctgtgtaaagactttgaaggtgttggttgtgactggaaaggacgagttttctaacatatctctacaagggaaaggcttatctggtaaaatctctccgaacattggaaagcttaaacatttgacgggtttgttcttgcactacaatgctcttgttggagatattcctagagaacttggtaacttgtcggaacttacggattcttatctcaatgttaataatctct

SEQ ID NO: 119998 - DNA, 683 bp, Arabidopsis thaliana
  unsure (1)..(683): unsure at all n locations
attatcatcacttttgttcttccttcactcaaaatttctttcaaaatcgngatttcatcntctggggtgtttattgagacagaggggaagaatatcattgatgtagcgctaaaacacctagcgttcgtgagaattgcaacgatccatattctggcttccgtctcaaatctctacgaatacgctaaacaaaactccggtcctctcaaatccgccgtggaaaaggtcgaaggagccgtcaccaccgtcgtcacccctgtctatcagaaattcaaagatgttcctgattctctcctggtctttctagatcacaaggtgggtgaagctgcgtacaagtttgatgagcatgctcctccaatggctaagaaagtggtgaatcaagcacatgtattgatctacaaggcgacagagaaaagctcaaagctttgtgaaagaggctcgtaccggtggtcccaaagctgcgtttaactatgctgcaactgagtacaagtttttcgttgtgaccaactcggttaaagtctgggctaaacttaaccagtataaaccaatccatgcaatgggtgacaaagctttgcctgtggctgcacacttttccagtcggtacaacgatttggtgactgatatgactaatatgggttactctttggttggatatcttccgttggttcctgttgatgacattgtta

SEQ ID NO: 119999 - DNA, 446 bp, Arabidopsis thaliana
  unsure (1)..(446): unsure at all n locations
tactttnctgtttcataacgtcataaagaacagtgacaggcgaaatttctcaagaaagcaaatcagaagaactcaaaaaaaaactaagatggagacagagaagaaaaatagcaaggaggtagcgctaaaacacctagcgttcgtgagaattgcaacgatccatattctggcttccgtctcaaatctctacgaatacgctaaacaaaactccggtcctctcaaatccgccgtggaaaaggtcgaaggagccgtcaccaccgtcgtcacccctgtctatcagaaattcaaagatgttcctgattctctcctggtctttctagatcacaaggtgggtgaagtttcgtacaagtttgattgagcatgctcctccaatggctaagaaagtggtggattcaagcacatgtattgttcttcaaggcgggcagagaaagctcaaagctttgtga

SEQ ID NO: 120000 - DNA, 529 bp, Arabidopsis thaliana
cactcacttggagaagctaccacgcctgcaggtaccggtccggaattcccgggtcgtacccacgcgtccggaaaagacgacggagaaatggcggaggagcagaaaatgaagcagctaagccgattctggatttgggctttatcttccattgctttccgattgatcttgatctccttcccgggaaatctcaatctctcttcccgtccggaggtctctacccctctcaccagcattcgccgccttgctgaaggttattggttgaagcaggcatcgatgtcaccatatgcaggatctatgtatcatggctcaccattgctgctctcggttcttggacctctcacagttcaaaggattaaagggcaaccaagtcacctcttgtgcagcttggtttttgttattgcagatatattaagtgcaatgcttcttcgagctattggtcagaaactccagatggcttatggactgaatgcgagactacttggttttcttaagtcatcaagggataaagtgatcctaccttgtggtgata

SEQ ID NO: 120001 - DNA, 540 bp, Arabidopsis thaliana
caacactacaaagaagaaacacactatctctctctctctctcaatacatctttcctcacttctgatcagtgtgatcacgtagagtgccttgaaggagaagaaagaaacaaaaaagaaagaaaaatgggatacctttttgaagaaaccttaagctctaaccctaaaaccccaattgttgttgatgatgataacgagttgggtttgatggccgtgagacttgccaatgccgccgcctttcctatggttctcaaagccgccctcgagctcggtgtctttgacactctctatgccgaagcctctcgcaccgactcgttcctttcaccatctgaaatagcgagtaagctaccaactacacctcgtaaccctgaggctccggttttgttggaccgcatgcttcgtctactcgctagctattccatggtcaagtgtggtaaggccttatccggaaagggcgagagggtctacagagccgagccgatttgcaggtttttcttgaaggataacattcaagatattggatcccttgcttctcaagtcatc

SEQ ID NO: 120002 - DNA, 821 bp, Arabidopsis thaliana
  unsure (1)..(821): unsure at all n locations
cccagggattcccccatgtcaagcaaagaaagggcagggaaatcagattttccgcaatccaatgggatttcaaagtccttccacctttgggggctgggtcacctaacgtaagccggaagttggagacgtccattaaggtgaagtgtcaaaggctccaacacccaatggttagatctgagccgaacctggggacaaaactggcaatccaacgcacttcttgtcggccaatctctttctttccgagtcaaaacctctgatggccgaagctccacctccaacaacattgctcccagtaactggcaatttggccagacctactccggcaagaacttccgcgtctgatttctagaatatgaaaaagagtcgtgtggcggaagatactaaagcttttttttatatcaaatatatatatttacgtgtctttgatttagtttacgatttggaattggggttttaccatttttcccttattttctcagggaaagtattgggattgcttggtttgcaagttagggtttactttaaagattagggctatattgttttttttgttttttttggtgtgttgtgtcttgtttggtatgtagtcttgtagagaggctgaagcggctgcagaaagaaagggttgggataaagattcatgtagcccgcagctctcttttacgttatgattgtattaaagtatatatatatcatgaagaaattaaacatggtttcttcgatttatataaataaaaaaaaaaaaaaaaaagnnnnnnnnnnnnnnnnnnnnnnnnnnnnnnnnnnnnnnnnnnnnnnnnnnnnnnnnnnnnnnnnnnnaa

SEQ ID NO: 120003 - DNA, 666 bp, Arabidopsis thaliana
  unsure (1)..(666): unsure at all n locations
ctttaatcaagctagcgacaatggtggttggtgtaatcctcctcgtgagcactttgtatctcgctatgcctatgtttctttccatcgctaagtataaggctggtatcgtccccgtctcttaccgcaggatcccatgtaggaagaagggaggaatcagattcacaatcaatggattcaagtacttcaacttggtgctggtcactaacgtagccggagctggagacgtcattaaggtgagtgtgaaaggatccaacacacaatggttagatctgagccggaactggggacaaaactggcaatccaacgcacttcttgtcggccaatctctttctttccgagtcaaaacctctgatggccgaagctccacctccaacaacattgctcccagtaactggcaatttggccagacctactccggcaagaacttccgcgtctgatttctagaatatgaaaaagagtcgtgtggcggaagatactaaagcttttttttatatcaaatatatatatttacgtgtctttgatttagtttacgatttggaatttggggttaccattttnccctaatttcccagggaaagnattgggatccttgggttcaagtagggtaccttaaagntaggngaaatggtttttggtttttgggggtggcctgttganganctgaat

SEQ ID NO: 120004 - DNA, 723 bp, Arabidopsis thaliana
  unsure (1)..(723): unsure at all n locations
cnnnnnnnnnnnnnnnnnnnnnnnnnnnnnnnnnnnnnnnnnnnnnnnnnnnnnnnnnnnnnnnccgggtcgaccacgcgtccgcttctcttctttaataacttttagaaacacaaataaaagtttaattacttttaagcccaacaaaaatgggttatgctaaatcagccatgctgatcttcttactagcattggtcatcgcatcttgtgccacggccatggacatgtccgttgtttcctccaacgataaccaccacgtgaccgccggtcccggccgccgtcagggtattttcgacgctgaagccaccttgatgttcgagtcatggatggtcaaacatgggaaagtgtacgactccgttgccgagaaggaacggcgtttaactatttttgaggacaacctccgttttatcactaaccggaacgctgagaatctcagttaccggcttggtttgaatcggtttgcggatttatctctccatgaatacggggaaatttgccatggggctgatccaagacctcctaggaaccacgtcttcatgactagcagcaaccgatacaagactagtgatggtgatgttcttcctaagtccgttgactggggaaacgaaggcgcagtgacttaagtaaagttaaggccttcacgggggttttgggtttcccccttgggggantgaggttaaaagtttactgggctgaattnntgaagttncattaaaagaanat

SEQ ID NO: 120005 - DNA, 521 bp, Arabidopsis thaliana
  unsure (1)..(521): unsure at all n locations
atacggagaaatttgccatggggctgatccaagacctcctaggaaccacgtcttcatgactagcagcaaccgatacaagactagtgatggtgatgttcttcctaagtccgttgactggagaaacgaaggcgcagtgactgaagtcaaagatcaaggcctttgcaggagttgttgggctttctccactgtgggagcagtggaaggcttaaacaagattgtgactggagagctagtaactttgtctgagcaagatttgatcaattgtaacaaagaaaacaatggttgcggaggaggcaaagtcgagacagcctatgagttcatcatgaacaatggtggtcttggtaccgacaacggtttatccttacaaaagctctcaattggagtcttgcgaaggcccgcctcaagggaaggcaacccaaggatttttaattggttttatggggttttgagaattttcccttcaaaacgggttgaagccgcttttcattgaaacgggttntcaccaagcctttancntcccg

SEQ ID NO: 120006 - DNA, 744 bp, Arabidopsis thaliana
  unsure (1)..(744): unsure at all n locations
acggtcacgtgggtttacacaacacagaatccatttttcttctttcataactatcagaaacaaacacaaattaaatcaaagtttcattagttttaaccccccacaaaaaaacatgggtagtgcaaaatcagccatgctgatcctcttagtagcaatggtcatcgcatcatgtgccacggccattgatatgtccgtggtttcctacgacgataacaaccgtctccatagcgttttcgatgctgaggcctcgttaatcttcgagtcatggatggtcaaacatgggaaagtgtacgggtccgttgccgagaaggaacggcgtttgacgatttttgaggacaacctccgttttatcaataaccggaacgctgagaatctcagttatcggcttggtttgaccgggtttgcggatttatctctccatgaatacggagaaatttgccatggggctgatccnagacctcctaggaaccacgtcttcatgactagcagcaaccgatacaagactagtgatggtgatgttcttcctaagtccgttgactggagaaacgaaggcgcagtgactgaagtcaaagatcaaaggccttttcaaggagttttttggnttttctccacctgttggggagcaattggaagggtttaaacnaagnntttttnnctttggnggagctttttaaactttntgcntttgggcaaagattttngtnccaaattttaaaccaaangggaancaaattggntttccgg

SEQ ID NO: 120007 - DNA, 1443 bp, Arabidopsis thaliana
  unsure (1)..(1443): unsure at all n locations
agcggacgcgtccgcccacgcgtccttgaaaacgttaaatgatcttctcctccgatcattagtctctttaatctttctcagcctcttcttgttcgtgatctctcttcctccggaaaaagatgtcggccggtaacggaaatgctactaacggtgacggagggtttagtttccctaaaggaccggtgatgccgaagataacgaccggagcagcaaagagaggtagcggagtctgccacgacgatagtggtccgacggtgaatgccacaaccatcgatgagcttcattcgttacagaagaaacgttctgctcctaccacaccgatcaaccaaaacgccgccgctgcttttgccgccgtctccgaggaggagcgtcagaagattcagcttcaatctatcagtgcatcgttagcatcgttaacgagagagtcaggaccaaaggtggtgagaggagatccggcggagaagaagaccgatggttcaactactccggcgtacgctcacggccaacatcattctatcttttctccggctactggtgctgtcagtgatagctccttgaagtttactcacgtcctctacaatctttcgcctgcagagctttatgagcaagctattaagtatgagaaaggttcgtttatcacttctaatggagctttggcgacgctttctggtgctaagactggtcgtgctcccagagataagcgtgttgttagagatgctactactgaggatgagctttggtggggaaagggttcgccgaatatcgaaatggatgaacatactttcatggtgaacagagaaagagctgttgattacttgaattccttggaaaaggtctttgtcaatgaccaatacttaaactgggatccagagaacagaatcaaagtcaggattgtctcagctagagcttaccattcattgtttatgcacaacatgtgtatccgaccaactcaggaggagcttgagagctttggtactccggattttactatatacaatgctgggcagtttccatgtaatcgttacactcattacatgacttcgtccactagcgtagaccttaatctggctaggagggaaatggttatacttggtactcagtatgctggggaaatgaagaagggtcttttcagtgtgatgcattaccttatgcctaagcgtcgtattctctcccttcattctggatgcaatatgggaaaagatggagatgttgctctcttctttggactttcaggtaccgggaagacaacgctgtctactgatcacaacaggtatcttattggagatgatgagcattgttggctgagactggtgtttcgacattgagggtgggtncntgctagggtgttaccttcgnggggaagngcctnttctgaccgtncaagnttganagtttgaatnttngttntggccncngaagggttcccgaaactttnaggccatc

SEQ ID NO: 120008 - DNA, 1114 bp, Arabidopsis thaliana
  unsure (1)..(1114): unsure at all n locations
gaaagctggcacgcctgcaggtaccggtccggaattcccgggtcgacccacgcgtccgattggagatgatgagcattgttggactgagactggtgtttcgaacattgagggtgggtgctatgctaagtgtgttgatctttcgagggagaaggagcctgatatctggaacgctatcaagtttggaacagttttggaaaatgttgtgtttgatgagcacaccagagaagtggattactctgataaatctgttacagagaacacacgtgctgcctacccaattgagttcattccaaatgcgaaaataccttgtgttggtccacacccggcaaaatgtgatacttctggcttgtgatgcctttggtgttctcccacctgtgagcaagctgaatctggcacaaaccatgtaccacttcatcagtggttacactgctctggttgctggcacagaggatggtatcaaggagccaacagcaacattccaaccttccttgggtgcagctttcataatgttgcaccccacaaagtatgcagctatgttagctgagaatgatgaatgtcacaatgggtgctactggttggctcgtcaacactggttggtctggtggcagttatggtgttggaaacagaatcaagctggcatacactagaaagatcatcgatgcaatccattcgggcagtctcttgaaggcaaactacaagaaaaccgaaatctttggatttgaaatcccaactgagatcgaagggataccttcagagatcttggaccccgtcaactcctggtctgataagaaggcacacaaagatactctggtgaaactgggaggtctgttcaagaagaacttcgaggtttttgctaaccataagattggtgtggatggtaagcttacggaggagattctcgctgctggtcctattttttagaaaaaccaaactctgaatgatgttgtcgaaaagaaagaaagatctactattattaagaagaataaaatgagactttgtgttagcggccgcgcattcctgcagcccgggggatccactagatctagagcggccgccaccgcggtggagctccagcgtctgcccccatagtgagggttgnnnnnngaagtatcat

SEQ ID NO: 120009 - DNA, 558 bp, Arabidopsis thaliana
atataggttgctggcacagaggatggtatcaaggagccaacagcaacattctcagcttgctttggtgcagctttcataatgttgcatcccacaaagtatgcagctatgttagctgagaagatgaagtcacaaggtgctactggttggctcgtcaacactggttggtctggtggcaggtatatatgtccttctatggaaatcgatacaacaaaacgctgccttgtaacacatgtttgtaggctattaacatgatctgtaatgttttatttcctgcagttatggtgttggaaacagaatcaagctggcatacactagaaagatcatcgatgcaatccattcgggcagtctcttgaaggcaaactacaagaaaaccgaaatctttggatttgaaatcccaactgagatcgaagggataccttcagagatcttggaccccgtcaactccgtaagtttctgcaaatctgtataatgtaattgcttaagtgatgatgaacaattttttgttgatttgggtttaatgaaaatgcaagggtctgataagaaggcacacaaagatac

SEQ ID NO: 120010 - DNA, 661 bp, Arabidopsis thaliana
ccaactcaggaggagcttgagagctttggtactccggattttactatatacaatgctgggcagtttccatgtaatcgttacactcattacatgacttcgtccactagcgtagaccttaatctggctaggagggaaatggttatacttggtactcagtatgctggggaaatgaagaagggtcttttcagtgtgatgcattaccttatgcctaagcgtcgtattctctcccttcattctggatgcaatatgggaaaagatggagatgttgctctcttctttggactttcaggtaccgggaagacaacgctgtctactgatcacaacaggtatcttattggagatgatgagcattgttggactgagactggtgtttcgaacattgagggtgggtgctatgctaagtgtgttgatctttcgagggagaaggagcctgatatctggaacgctatcaagtttgggaacagtttttgggaaaatgtttgtgtttgacatgacgcacaccagagaagtggattactctgataaatctgttacagagaacacacgatgactgcctacccaattgagtcattcaaatgcgaaatacttggatgccaaccgcaagtgtaacttgactgagctggttacaccggaacgacgatgcaacagacataaagacgac

SEQ ID NO: 120011 - DNA, 603 bp, Arabidopsis thaliana
  unsure (1)..(603): unsure at all n locations
ccctggaangccnncgtngcaacccatcgggncntncnttganggcaacctcccaagaaccccgaaatctttggatttgaaatcccaactgagatcgaagggataccttcagagatcttggaccccgtcaactcctggtctgataagaaggcacacaaagatactctggtgaaactgggaggtctgttcaagaagaacttcgaggtttttgctaaccataagattggtgtggatggtaagcttacggaggagattctcgctgctggtcctatcttttagaaaaaccaaactctgaatgatgttgtcgaaaagaaagaaagatctactattattaagaagaataaaatgagactttgtgtttttctttgctgtgataatctctctgaataatagagagaatttaatgttccaaatgtggtgcgatatggataatgatgatgactatatgtaatttattactatccatcgtcatatatttttgttgggcctttgccaacatttacatgatagaaccaagtacgnataatataaatcctggtccnnnnnnnnnnnnnnnnnnnnnnnnnnnnnnnnnnnnnnnnnnnnnnnnnnnnnnnnnnnnnn

SEQ ID NO: 120012 - DNA, 491 bp, Arabidopsis thaliana
aaaacaaaaaaaaaaaacttacaccaaaacgatgtctggaggtgtcggtccaacgtacaacgacataaccttacccaaagaagaagaagaagaacatcaaacccaatccacctcaacagtatcatccaccggaaaacccgccggattcttctcattccgacaactaaacatcctcgcaataatcatcgttctctccgcaagtggtctcgtaacaatccaagatttcatattcacgatcctcactctcatctacttcttcttcctctcgaaacttatcttcccaccacacaacaatccaaaccgtgacgctcctctcacaagctccacaaacaaaatcttccgtatctatgttacagcggcggggatcgtcgggcttatcattccgatctgttacatcttcgaaggaatcgttgaggatgataagaacggtgttagcgcagctgcccgcacgtgttttttttagcgagtcagatttttatggaaggattagc

SEQ ID NO: 120013 - DNA, 857 bp, Arabidopsis thaliana
  unsure (1)..(857): unsure at all n locations
ggctaacttgacaaagaatctggagcaagtttctgagactcttgcggctgcgaaaaggcatttatcacaaaggattcagaatctggatgataaggtagaaaagcagatcgatctctcgaaggaaatcaatagccaggttatttctgctcgtgagaatatcagctcacttgagatggatttggaatcattgcataatttgattactggactggatgggaagttggacacgctggaatacaagcaggatgtcacaaatgttttcatgctaaacttgtataactattttggaggcaagagcacaaagctgcctgaaatggaacagcttcagcttcctgtaaaccagagggctcgtaatttgcttgcagatgttgaaactaagggtctgaaaaacttggctgaagagctgtttaaaagcaatggcacacaggtgacaaccacagtgaaacaaatcagtttgagtaaagtgaatgtgaagtcgaggccattgttatcaagggctgcttcagctaagtgttgatatggaagttttcctgatggcggtttggcttgcgggatgtatataacaaaactcttacttatacaaatggtctcgtgagccgtagaatgctctcttacatctattcgttggtttggcttttttcccccaaaacttgggtcttatgatattttggtttgcactttggaggtttttccccgaattggagtttgtttattgacatgtgtagtgtccccttttgaacttttacgccttttataaaaaaataaaaaaaaaaaaaaaaaaaaaagggcggccgctgtagaggatccaagcttacgtacgcgtgcatgcgacgtcatagctggtntatagtgtaacg

SEQ ID NO: 120014 - DNA, 815 bp, Arabidopsis thaliana
gcagtaccccaccggaattcccgggtgcgacccacgcgtccgtccaaacgctgtctacagaggaaggcttgatgatggtcgtttttttgctgtcaaacgattcaatcgccttgcttgggctgatcatctacacggtctggattgaagctaaagctgctgggagcttgaggagtgatagattagcaaatctgattggatgtcgctttgaaggagaagagagattatctagttgctccctcctcgcctcatgaaacgcttgcaaagcatcttttccactgcgagaataatccgatgaaatgggcgatgagattaagagttgcattgtgtttagcacaagcattggaatattgtagtaataaagggagagctttgtatcatgatctcaatgcttacagggttttgtttgacaaggatgggaatcccaggttgtcttgttttggactcatgaaaaatagcagagatgggaagagttatagcacaaacttggcatttactcctccagagtatttgcgaacgggtagagttacaccacagagtggtgtattcagttttggaaccgttctgctcgatctcatgagtggaaaacatatttcatcgagtcatgcgcttgacctaatcagaagcaagaactgtgcaatggtaatggattctgctctcgagggttcatttctcaaacgaaaaaccggaactgaggctagtaaccccttagcccacaccgttggtccttgcaagtattgaaaagcctctgagtaaaaggacccacaattggttgaaaaatcctcttccgctggaactttccaccttgggtcaacaac

SEQ ID NO: 120015 - DNA, 533 bp, Arabidopsis thaliana
  unsure (1)..(533): unsure at all n locations
tgcactcccgtnnnnnnnnnnnnnnnnnnnnnnnnnnnnnnnnnnnnnnnnnnnnnnnnnnnnnnnnnnnnnnnnaagacgaataagaagaagaataagaaagcttgagaccttctctctgtgtgcaatttcgaaatcgataaagacttcaactttcggttctaacaatgacaatttccgtatagtttgattttgtccacctctttcaccgattacctgatttcatcgctggcgttagtcatcaaatgggagctcgttgctcaaagttctcattctgcttgttcccttctcacttcaaatccgcttcagttctcgagtctcctgatatcgagaatggaggaaaagtgtggccgacttttaaggaattcaaattggagcagctgaaatctgcgaccggaggtttctcttcagacaacattgtatcagaacacggcgagaaagctccaaacgttgtctacagaggaaggcttgatgatggtcgtttgattgctgtcaaacgattcaatcgccttgcttgggctgatcatcgacag

SEQ ID NO: 120016 - DNA, 795 bp, Arabidopsis thaliana
  unsure (1)..(795): unsure at all n locations
gccgngnttgcnagtttntnggccaggaccattcttccggntgaacccttccattggggaatntgccggttcntgcanccacttttnttcagngcaataccgtcatggggatgtaccccatcatgttccgccctctgttctcaccccttcttactggataccaatgtttctcatagttggagcaggcatgggtcctattttcgcattgaagtacttccgctacacatacagacccagcaaaatcaataatactccagcaagctgaacgaatgggtggtccaatactgacactaggaaacatcgaaacgcaaccaaggaccattgaaaaggacttgtctccaatatccatcactcagcccaagaacagaagcccggtctatgagccattgctatcagattctccaaacgcaacacgacgctcatttggccctggaactccattcgagtttttccaatcacagtcaagattatcatcatcctctggttataccagaaactgcaaagacaactaaaaagctttttaattttttttgtttctttcaaatttttacggttccgtgacgtttgtgacttttctgatctcaatggtaaatgcagtccaagtcgcgggtattaacaagaacttgatttatacagcagccaagaaaacacattgtcttgtctgcaacaaagatcttattttattaatttattaatctttgcgagggaaaaaaaaaaaaaaaaagggcggccgctctagaggatccaagcttacgtacgcgtgcatgcgacgtcatagctaatctataggtcgcc

SEQ ID NO: 120017 - DNA, 814 bp, Arabidopsis thaliana
  unsure (1)..(814): unsure at all n locations
acnnnnnnnnnngngggaccgggcctgaantcccngggtggccaactgcgcccggtcgttttctgactcttcaatctctcccaaagcctaaagcgatctctgcaaatctctcgcgactctctctttcaagatgcaaatcttcgtgaaaacactcactggcaagactatcactctcgaggttgagagctctgacaccatcgacaatgttaaggcaaagattcaggacaaggaaggcattcctccggatcagcaaagattaatattcgccggtaaacagctagaagatggccgtaccttggccgattacaacattcagaaagaatcaacccttcatttggttctccgtttaagaggtggtatgcaaatctttgtcaagactctgactggcaagaccattactttggaggttgagagctctgacactattgacaacgtcaaagcaaagatccaggacaaggaaggaatccctccggatcagcagagacttatctttgccggtaagcagcttgaagacggaagaactcttgctgactacaacattcaaaaggagtcgacccttcatttggtgcttcgtctcagaggtggtatgcaaatctttgtcaagaccctcactggtaaaacaatcacccttgaggttgagagttcagacaccattgacaatgtcaaagctaagatccaagataaagagggaattcctccggatcagcagaggcttatctttgccggtaagcagctcgaagatggacgcacccttgcaggttacaacatccaaggggtgccttantttnttggtccggggggttnnnnttttttc

SEQ ID NO: 120018 - DNA, 978 bp, Arabidopsis thaliana
acgacccactatagggttaagctggtacgcctcgcggtaccggtccggaattcccgggtcgacccacgcgtccgggacaaggaaggaatccctccggatcagcagagacttatctttgccggtaagcagcttgaagacggaagaactcttgctgactacaacattcaaaaggagtcgacccttcatttggtgcttcgtctcagaggtggtatgcaaatctttgtcaagaccctcactggtaaaacaatcacccttgaggttgagagttcagacaccattgacaatgtcaaagctaagatccaagataaagagggaattcctccggatcagcagaggcttatctttgccggtaagcagctcgaagatggacgcacccttgcagattacaacatccaaaaggagtcgacacttcatcttgtgcttcgtctccgtggtggtatgcagatctttgtgaagacccttaccggaaagaccattactctggaggttgaaagctcagacaccatcgataatgtcaaggctaagattcaggacaaggaagggatcccaccagaccaacagagactcatcttcgctggaaaacagcttgaggatggtcgcacacttgcagattacaacatccagaaggagtcgactcttcacttggttcttcgtcttcgtggtggaagcttctaagctttttgtgatctgatgataagtggttggttcgtgtctcatgcacttgggaggtgatctatttcacctggtgtagtttgtgtttccgtcagttggaaaaacttatccctatcgatttcgttttcattttctgcttttcttttatgtaccttcgtttgggcttgtaacgggcctttgtatttcaactctcaataataatccaagtgcatgttaaactggattaaaaacacaaagggaggccgctctagaggatccaagcttacgtacgcgtggtatgcgacgtctagctcttctatagtggca

SEQ ID NO: 120019 - DNA, 882 bp, Arabidopsis thaliana
  unsure (1)..(882): unsure at all n locations
aggtaccggtccgaatttcccgggtctacccacgctgccgtgggtgctttacattctctcccaagccctaaagcgatctctgcaaatctctcccgactctctttttcaaaatgcaaatcttcttgaaacactcactggcaagactatcactctcgaggttgagagctctgacaccatcgacaatgttatggcaaagagtcaggacaaggaaggcattcctccggatcagcaaagattaatattcgccggtaaacagctagaagatggccgtaccttggccgattacaacattcagaaagaatcaacccttcatttggttctccgtttaagaggtggtatgcaaaatctttgtcaagactctgactggcaagaccattactttggaggttgagagctctgacactattgacaacgtcaaagcaaagatccaggacaaggaaggaatccctccggatcagcagagacttatctttgccggtaagcagcttgaagacggaagaactcttgctgactacaacattcaaaaggagtcgacccttcatttggtgcttcgtctcagaggtggtatgcaaatctttgtcaagaccctcactggtaaaacaatcacccttgaggttgagagttcagacaccattgacaatgtcaaagctaagatccaagataaagagggaattcctccggatcagcagaggcttatctttgccggtaagcagctcgaagatggacgcacccttgcagattacaacatccaaaagggagtcggcacttcatcttgtgcttcggtctccgtggtggtatgcagatctttttgaaggcccttacccgggaaacccccntttactttggggggtttnaaaagcntaggcccccctncggtnattt

SEQ ID NO: 120020 - DNA, 641 bp, Arabidopsis thaliana
tgacactatagaagagctatgacgtcgcatcgcacgcgtacgtaagctcggaattcggctcgaggataaagagggaattcctccggatcagcagaggcttatctttgccggtaagcagctcgaagatggacgcacccttgcagattacaacatccaaaaggagtcgacacttcatcttgtgcttcgtctccgtggtggtatgcagatctttgtgaagacccttaccggaaaaaccattactcttgaggttgagagctcagacacaattgataatgtcaaggctaagattcaggacaaggaagggatcccaccggaccaacagagactcatcttcgctgggaagcagcttgaggatggtcggactcttgcagattacaacatccagaaggagtcgactcttcacttggttcttcgtcttcgtggtggaagcttctaagctttttgtgatgtgatcacaagtggttgttcgagtctcatgcacttgggaggtgagatcttcacctggtttggtttctccttcggtctgcggggaaaaccttttccttatcggtggttctgaaggttcatttcctgttttcctttattttcttatgaacctttggttgctgtttcaacttttaataataatccaagtgcatgtt

SEQ ID NO: 120021 - DNA, 621 bp, Arabidopsis thaliana
  unsure (1)..(621): unsure at all n locations
tctgactcttcaatctctcccaaagcctaaagcgatctctgcaaatctntcgcgactctctctttcaagatgcaaatcttcgtgaaaacactcactggcaagacaatcaccctcgaggttgagagctctgacaccatcgacaatgttaaggcaaagattcaggacaaggaaggcattcctccggatcagcaaagattaatattcgccggtaaacagctagaagatggccgtaccttggcggattacaatatccagaaagaatcaacccttcatttggttctccgtttaagagggtggtatgcagatcttttgtcaagactcttgacttggcaaaacccattacttttgggaggttgagagctcttgacactatttggtaacggccaaaggcaaaggttccagggccaagggaaggggattccctccggggttcaagcaaaaggcttttttttttcccgggtaaggagccttttaggccggggggaccttttggcttggcttcaaccattccaaaaagggggttggccccctcaattttggggnttgggcttaaaagggngggttcaaanctttttttaaagncctcctggaaaaatcccntggggttnnngnttncccctt

SEQ ID NO: 120022 - DNA, 549 bp, Arabidopsis thaliana
  unsure (1)..(549): unsure at all n locations
tccggattcatcatctctctcacagaaaaaagtaaaaaaaaacctagatcgctcttcacatctcttcgaacgattctctctttcaagatgcaaattttcgtgaaaacactcactggtaagaccatcactctcgaggttgagagctctgacaccatcgacaatgttaaggcaaagatccaggacaaggaaggcattcctcctgaccagcaaagattgatcttcgctggtaagcagctagaagatggccgcaccttggctgattacaacatccagaaagaatcaacactccacttggttctcaggttaagaggtggtatgcagatctttgtcaagactctgactggcaaaaccattaccttggaggttgaaagctctgacactatttgctaacggcaagggaaagnttcaggccaagggaggantcctncggnccagcaaaaggcttttttcnctgggaagaanttttaggttggagggcttttcttgnctcaaantccaaaggggtttcttttancttgnccttggttnccggggggtttnaaanttttt

SEQ ID NO: 120023 - DNA, 521 bp, Arabidopsis thaliana
  unsure (1)..(521): unsure at all n locations
nnatacgactcactttagggaaagcacgtacgcctgcaggtaccggtccggaattcccgggtcgacccacgcgtccgcccacgcgtccgtacgagaagacgacagaagggtcctccggatcagcagaggcttatctttgccggtaagcagctcgaagatggacgcacccttgcagattacaacatccaaaaggagtcgacacttcatcttgtgcttcgtctccgtggtggggtgcagatctttgtgaagacccttaccggaaagaccattactctggaggtagaaagctcagacaccatcgataatgtcaaggctaagattcaggacaaggaagggatcccaccagaccaacagagactcatcttcgctggaaaacagcttggggatggtcgcacacttgcagattacaacatccagaaggagtcgactcttcacttggttcttcgtcttcgcgggggatgcttctaagctttttgtgatctgatgataagtgggtggttcgtgtctcatgcacttgggag

SEQ ID NO: 120024 - DNA, 765 bp, Arabidopsis thaliana
gtacgcctgcaggtaccggtccggaattcccgggtcgacccacgcgtccgagttcttgttccctttcgaatcaagtgatcatggctcaagaagagatacagaaacctactgcctctgttccagtggttaaggaggaaactcctgccccggttaaggaggttgaggtgccggttactacggagaaagctgtggctgcgcctgctccggaagctacggaggagaaagttgtgtctgaggtggcggtgcctgaaacagaggtgacggcggtgaaagaggaggaggttgcgacgggaaaggagatcttgcaatcggagtcgtttaaggaggaaggctatttggcttctgaattacaggaagctgagaagaatgctttggctgagttaaaggagttggttagggaggctttgaacaagcgtgaattcaccgcgccaccgtcaccaccagctccggtaaaggaagagaaagttgaggagaagaaaacacaggaaacagaggaaaagaaggaagaagttaaagcagaggaaaaatctcttgaggctgacaccaatgaagaggagaaatctgctgttccggccaccgtagaaaccaagaaagaagagatcttggccgttccggcttcgatcgtcgcataagaccaagaaggaagagacacccagttgcctcctgcttcccggtagaagactaaaacccgcctggctttccggctcgattgccacgaccaccaaagaaagggaaagaaatctttttacccaggccttgctttcc

SEQ ID NO: 120025 - DNA, 545 bp, Arabidopsis thaliana
aaaagacggccgtttggagaaagagaaaatttgggaccctctactaagaaaagtatcttccaaattagctgtccaacagctccgaccagtctgttctcttttgctcttctcacacacacacaaacataacatctcctccattttctctcttctctctttttataagaactcttcttcttcttcttcttctctctcaattccatctctctctctctttctagttcttgttccctttcgaatcaagtgatcatggctcaagaagagatacagaaacctactgcctctgttccagtggttaaggaggaaactcctgccccggttaaggaggttgaggtgccggttactacggagaaagctgtggctgcgcctgctccggaagctacggaggagaaagttgtgtctgaggtggccgtgcctgaaacagatgtgacggcggtgaaagaggaggaggttgcgacgggaaaggagatcttgcaatcggagtcgtttaaggaggaaggctatttggcttctgaattacaggaagctgagaagaatgctttggc

SEQ ID NO: 120026 - DNA, 486 bp, Arabidopsis thaliana
aaaaaaacgaatccggaagatgtggaatcagaagcatgatttggagtcggctcagacgcctctctacccgatgatgtcggagagcccggagctccgatggtctttcatccgcaaggtctattccatcatctccatccagctgctcgttacaatcgccgtcgctgccaccgtcgttaaggttcattctatttctgtattcttcaccaccaccaccgccggcttcgctctctacatacttcttatattgactccattgatcgttatgtgtcctttgtattactatcaccagaagcaccctgtgaactatctgttactcgggattttcaccgtcgctcttgcctttgcggttggcttgacctgcgcctttacaagcgggaaggtgattctggaatctgtgattttgaccgctgttgtggtcatatccctcactctatacactttctgggcggccaaaagaggccatgacttcaacttcctcggaccttt

SEQ ID NO: 120027 - DNA, 1497 bp, Arabidopsis thaliana
  unsure (1)..(1497): unsure at all n locations
nnnnnnnnnnnnnnnnnnnnnnnnnnnnnnnnnnnnnnnnnnnnnnnnnnnnnnnnnnnnnnnnnnccacgcgtccggcaagagtgagcttcacgggcagacaaaagctgactctacgctctctcaaaagtcgaatatcccaaattcgatccgttttccggcgataatctccgatctagatccgatggcgaaagaaccagttcgtgtgctcgttactggagctgcaggacaaatcggatatgctcttgtacctatgattgcaaggggtatcatgcttggtgctgaccaacctgttatcctccacatgttggatattcctccagctgctgaagctttgaacggtgttaagatggagttgatcgatgctgctttccctcttcttaaaggtgttgttgctacaactgatgccgttgagggatgtactggagtcaatgttgctgttatggttggtggtttcccgaggaaagaaggtatggagaggaaggatgtgatgtccaagaatgtttccatctacaagtctcaggctgctgccttggagaagcatgccgctcctaactgcaaggttcttgttgtggccaacccggcaaacaccaacgcattgatcctcaaggaatttgcaccatcaatccctgaaaagaacatctcttgtttgacaaggcttgaccacaacagggctttgggacagatctctgagaggttgagcgtgccagtgtctgatgttaagaacgtgatcatctggggaaaccactcatcctcacagtacccagatgtcaaccatgctaaagtgcagacctcgtctggagagaagcctgtccgtgagctcgtcaaggacgatgcatggttggacggagaatttatctctacagttcaacaacgtggagctgcaatcatcaaggcgaggaagttgtctagtgcgctctctgctgctagctctgcttgtgaccacatccgtgactgggtccttggaactccagagggtacgttcgtttccatgggagtatactccgatggctcttacagcgttccatcaggacttatctactccttccctgtaacttgtcgcaatggagactggagtattgtccaaggccttccgattgatgaagtatcaaggaagaagatggatttgactgcagaggagctcaaggaagagaaggacttggcgtactcatgcctctcttaaacccttctggagcaaaattttcatctataaggtgtgagatcagttaaagcctttcagggctttgtccgaataagaagtgtgtttgaaagatctccaaacactgttttataacctctttggtctctttgatgagtattgtccctggtctgtttctaaaccaggatatcgtttttttcaatgtgtctgatttggtttacccatgaaaagaagaaaattggcagttgcatggttaaaaaaaaaaaaaaagnnnnnnnnnnnnnnnnnnnnnnnnnnnnnnnnnnnnnnnnnnnnnnnnnnnnnnnnnnnnnnnnnnn

SEQ ID NO: 120028 - DNA, 846 bp, Arabidopsis thaliana
  unsure (1)..(846): unsure at all n locations
ctctacgctctctcaaaagtcgaatatcccaaattcgatccgttttccggcgataatctccgatctagatccgatggcgaaagaaccagttcgtgtgctcgttactggagctgcaggacaaatcggatatgctcttgtacctatgattgcaaggggtatcatgcttggtgctgaccaacctgttatcctccacatgttggatattcctccagctgctgaagctttgaacggtgttaagatggagttgatcgatgcttgctttcccctcttctttaaagggggttgtttgctacaacctgaatgcccgttgaaggggttgtacctgggggtcaatagttgctgttaatggttgggtgggtttcccgaggaaaagaagggatttggggaggaagggttgtgattgtccaagaatgtttccttctacaaagtctcaggctgctgcctttggggaagcatgccgctcctaactgcaaggtttcttgttgtggccaacccggcaaacaccaacggcattgatcctcaagggatttgcacccccaatccctgaaaagaacatcccttgtttgacaaggcttgcccacaacagggctttgggacagatctctgagaggttgagcgtgccagtgtctgatgttaagaacgtgatcatctgggggaaccactcatcctcacagtancccagatgtcaacccatgctaaagtgcagancttcgtnttggagggaagcctntccgtgaggnttgtcaaaggncggttgcattggtttgnccggggaatttttttnttacaagtttnaacaacggtggnggtnnaaatnattaaaggngggggaagttntttaggtgg

SEQ ID NO: 120029 - DNA, 617 bp, Arabidopsis thaliana
  unsure (1)..(617): unsure at all n locations
aacacgggcctgaacacaaggcngaantgcaaggcnccncctntgcaancctccttnnccaacccnnacgggncctggaacccaaagggncgtncgttcncnatgggagnaaccccgatggctctacagcgttccatcaggacttacctactccttccctgtaacttgtcgcaatggagactggagtattgtccaaggccttccgattgatgaagtatcaaggaagaagatggatttgactgcagaggagctcaaggaagagaaggacttggcgtactcatgcctctcttaaacccttctggagcaaaattttcatctataaggtgtgagatcagttaaagcctttcagggctttgtccgaataagaagtgtgtttgaaagatctccaaacactgttttataacctctttggtctctttgatgagtattgtccctggtctgtttctaaaccaggatatcgtttttttcaatgggccggttggggcccataaaaaagaaaatggcagtgcnnnnnnnnnnnnnnnnnnnnnnnnnnnnnnnnnnnnannaaggcgccgctctaagatccaagcttacgtacgcgtgcatgcgacgtcatagtctttctatagtgtcac

SEQ ID NO: 120030 - DNA, 622 bp, Arabidopsis thaliana
  unsure (1)..(622): unsure at all n locations
ccgcccgaatnccgggcgccacgcgtcgcgtacacgcctgagcctgagagttctcgtcgtccttatctcgatcttggttgattcgctctccgatcggaaattagggcttttgttttctgaagatgacgactgcagcacgaccaacctgggctccagctaagggaggtaacgagcaaggtggtgctcggatctttggtccatctcagaagtattcgtcccgtgatgtcgccgctcacacaactttaaagccaaggagggaagggcaacacactcaagaggaactccagaagataaatcttcgtgatgagcttgaagagcgtgagaggagacatttctcatcaaaagacaaatcatacaatgatgatagagatcgcagaagaggaagtcagcttttactggaagactcgaaaagggatcctgaagagcggattattcctcgcagtgtagatgctgatgattctgatgttgatatcaaaagtgacgatgattagtgatgccgaaagtnacgatnatgatgaggccgcctgagcnctnttgggggactcnccagttaatgaagantaatggananagncccgatggaaaanccccnntgangctacccagganggnctncaagacc

SEQ ID NO: 120031 - DNA, 458 bp, Arabidopsis thaliana
  unsure (1)..(458): unsure at all n locations
cgctctctcaaaagtcgaatatcccaaattcgatccgttttccggcgataatctccgatctagatccgatggcgaacgaccagttcgtgtgctcgttactggagctgcaggacaaatcggatatgctcttgtacctatgattgcaaggggtatcatgcttggtgctgaccaacctgttatcctccacatgttggatattcctccagctgctgaagctttgaacggtggtgagatggagttgatcgatgctgctttccctcttcttaaaggtgttgttgctacaactgatgccgttgagggatgtactggagtcaatggtgctggtatggttgggggttcctcatgaaagatggtttggaaaggaaggattttttatccattaatttattttttacaatttnnnnnnnnnnnnnnnnnnnnnnnnnnnnnnnnnnnnnnnnnnnnnnnnnnnnnnnnnn

SEQ ID NO: 120032 - DNA, 794 bp, Arabidopsis thaliana
  unsure (1)..(794): unsure at all n locations
gtccgaataagaagtgtgtttgaaagatctccaaacactgttttataacctctttggtctctttgatgagtattgtccctggtctgtttctaaaccaggatatcgttttttaaccatgcaactgccaattttcttcttttcatgggtaaaccaaatcagacgagagttctcgtcgtccttatctcgatcttggttgattcgctctccgatcggaaattagggcttttgttttctgaagatgacgactgcagcacgaccaacctgggctccagctaagggaggtaacgagcaaggtggtgctcggatctttggtccatctcagaagtattcgtcccgtgatgtcgccgctcacacaactttaaagccaaggagggaagggcaacacactcaagaggaactccagaagataaatcttcgtgatgagcttgaagagcgtgagaggagacatttctcatcaaaagacaaatcatacaatgatgatagagatcgcagaagaggaagtcagcttttactggaagactccgaaaaggggtccctgaagagcgggttattccctccgcagtgtagatgctggatgattcctgatgttgatancaaaagtggcggatgatagtggatgaccgnaaagtggccgatgatgatgngggcgncacttgaagcnctttttggnggggacnccggccaggtttaaggaaaggaagaagttgnaaaaaagnccccngggaggggaaaaagcccccnnnttgnaagncttaccnctttggggangnactttccnaaggancccnttnttt

SEQ ID NO: 120033 - DNA, 625 bp, Arabidopsis thaliana
  unsure (1)..(625): unsure at all n locations
gacaaatcatacaatgatgatagagatcgcagttgaggaagtcagcttttactggaagactcgaaaagggatcctgaagagcggattattcctcgcagtgtagatgctgatgattctgatgttgatatcaaaagtgacgatgatagtgatgacgaaagtgacgatgatgatgaggacgacactgaagctcttatggcggaactcgaccagataaagaaagaaagagtggaagagaggctcaggaaggaaaaagagcagcagatggaagagctaaacgctaaggaagaggaacttctcaaaggaaacccattgcttaatactccaacgtcttttagcgtcaaaaggaggtgggatgatgatgttgtattcaaaaaccaggcacgtggtgaaatgaaagctcctaagcgcttcatcaatgatacaatcagggaatgacttccacaggaaattcctgcatagntacatggaagtgattgtttgtccaagagtgttattgctacttcttttgtatgatggtttntggccttaaaagctttttatcctggcctnggaattccgntgnctctngtncttcaaccaacnaantnntttttaaanctttnttnccaaaacctttttgccnttt

SEQ ID NO: 120034 - DNA, 416 bp, Arabidopsis thaliana
acggacgcgtgggcggacgcgtgggcattaatcatcatcttttcttcacagagaggaaaaaaaaaaaatggcgacagattctcaaccaaaccaaaagctaacgcttccgttaaaaacaagaatcgctctcaccgttatctccaccatgaccgataacgctcaacgtcctgacggaactatcaaccgccgtttcctccgcctcttcgatttccgtgctcctcccaatcctaaacccgtcaacatcgtctccacctccgatttcgtcgtggatcaatcccgtgatctctggttccgattgtacactccacatgtctccggcgataaaatccccgtcgttgttttcttccacggcggtggtttcgctttcctcagtcctaatgcgtatccttacgataatgtatgccggagattcgcta

SEQ ID NO: 120035 - DNA, 759 bp, Arabidopsis thaliana
atcaccactatcgctattgtctccagctagtcccagaattcgatccaggtcatcttcgtcttcatcatcttcatcttcatcttcatcttccgtctcatcatcatcatcgggatccgagtcatcatctgttgctccttctcatagggtggactgactattcattcattctcatcatgtcgtcggaatctgaaatcccgccgttgtcgtcatcaaccgccgcagcggaggaatctggagagaagaccagcaagaaagcggctaagaaggaagctgccaagctagagaagttaagacgtcgtcaagaacaagaggaagcaacgcgtcgaacagcttcgatctctctggaagagaatgacgagttttccaataactacggcgacgtgactcttaccgagttgcaatcgtcggcggatccgaaagccgggaagtggatagaggctgttgagggaaaggagtggaccgatgtgagcgatttggtggaagagatgttggaatcagaggttctgatcagaggccgagtgcacacgaatcgtccaacgtcttaacaatttggggtttgtgggccttgagggagaccggttcaactgttcagtccggggtttcccaatccgggaagcccaaagtgggtgccaacatgggtaaatccctcaagcagctgacccgcgacccctttgtcgatgttatcggtgtcgtcactctccccaaggagccgcttacgggaactacgcagcaagttgaaatttaagtgagaaaagtgta

SEQ ID NO: 120036 - DNA, 422 bp, Arabidopsis thaliana
agacaacaaaaatatcttgcattcatttttgttactctcttaaaatctcattctttgattatcttctcttcccctgtaagtactccgatctaattatttgttcctatcagacatcccccaatttctacgatcggatttattcgtcgatcaagaagctggctaagttgtattgttggtgattgtatagtttttattattattcgagagaatgaacagtagaagctgtatctgtgtctctgcgatgaaaccctgttgtagatttcttattagttttagaagttcctcgcttttcggtttttctcccccgaactctggcaaattcatcaattcgtcgaagttacactgtacaaagattgattccaggagtattagatctggtattcattgccgtcggattgttctggatcggaatgctttttgtg

SEQ ID NO: 120037 - DNA, 555 bp, Arabidopsis thaliana
tgagatctccagctctatggaccactataggaaagctggtcgccgcagtccggtccgaattccgggtcaccacgcgtcgaagacattcttcaccgccgctacagcttccggcggaaccgtttctctgactcaaccgcagttttcgccgttgttcccacatttctcacaccgtttatctccgctttcgaaatggttcgttcctcttaatggacctctcttcttatcttctcctccttggaaacttctccagtctgcgacacctttgcactggcgcggaaacggctctgttttgaaaaaagtcgaagctctgaatcttagattggatcgaattagaagcagaactaggtttccgagacagttagggttacagtctgtggtaccaaacatattgacggtggatcgcaacgattccaaggaagaagatggtggaaaattagtcaagagttttgttaatgtgccgaatatgatatcaatggcgagaatagtatctggtcctgtgctttgggggatgatctcgaatgagatgtattcttctgctttcttagggttggctgt

SEQ ID NO: 120038 - DNA, 539 bp, Arabidopsis thaliana
  unsure (1)..(539): unsure at all n locations
nnnnnnnnnnnnnnnnnnnnnnnnnnnnnnnnnnnnnnnnnnnnnnnnnnnnnnnnnnnnnnnnnnnncccacgcgtccggctacctctactgtgaagacgttgctgaggcttttgaagttgttcttcacaagggagaagttggccatgtttacaatattgggacgaagaaggagaggagagtgaatgatgttgccaaagacatctgcaaactcttcaacatggaccctgaggcgaacatcaagtttgtcgacaacagaccttttaacgatcagaggtacttccttgacgatcagaagctcaaaaagttgggatggtcagagagaaccacgtgggaagaagggttgaagaaaactatggattggtacacacagaacccggagtggtgggggtgatgtttctggagcattgcttcctcatccaaggatgctgatgatgcctggtgggcgacactttgatggctccgaggacaattcgctggcagctactttatctgaaaaaccaagtcaaacccatatggttgttccaagccaaaggagc

SEQ ID NO: 120039 - DNA, 733 bp, Arabidopsis thaliana
  unsure (1)..(733): unsure at all n locations
cgggaaaagaccccaatttgctttaaagaaaagaactccccctggccctgccttggctttaaaaaaaaaaaaataaattggcccgaaaaaacccgtctaaattaaaagaaaagtttccttgaaaaggaaacccccctaattagagatccaaggcctttaaggcacagcttccttgcttgatttcccggttttccctcccaccaaacccaaccaaaggcattggtttcacccggttcgtttaattatcacaaatgtgtagctgttaagggtgatgatgctccagaatgcgataagtttgcaaagttttatcgatctctttgccccagcgaatgggttgataggtggaacgagcaaagagaaaatggaacattccctggtcctctaccctgaagaaaaatcatattgccatcattcctcttttgctgttaccttcatgagattacactgcagagtttaataagattttacaaaaccagcacttctggttcccatcatcataaaatgtgagaatttaacaaaactttatgaatctcaaattttcctcttatataagtttttgaggatcatctgattttcctgaattgttgttcttccctggtttaggctttactatggcaagcttcaaattcttgcggcccnggggccatttnngtnntccggttcccnaannnnnnnnnnnnnnnnnnnnnnnnnnnnnnnnnnnnnnnnnnnnnnnnnnnnnnnnnnnnnnnnn

SEQ ID NO: 120040 - DNA, 672 bp, Arabidopsis thaliana
cccaagcgtccgaaagattcttggtctccgatccagtcacctgaagattctccgagcttcttttgaccacacactttcaatggcggatgctgtgaacgctcaaactccatcgctctccgagcaatatcatttggagaaagaagtgaagcaagacacaagtgcaaagcctgttgaagtgaaagaggtggcaccagaagttactacacaagctgaagaggttaagacggagcaagctaaggaagaatctcctgttgaggaagcggtttctgtagttgaagagaagtctgaatctgctcctgaatcaacggaagtggcttctgaggctcctgctgcagcggaagacaatgctgaagagactcctgctgctgctgaagaaaataatgacgaaaacgctagtgaagaagttgctgaagaaacccctgatgagatcaagcttgagacagctcctgctgatttccgtttccctacaacaaaccaaacaaggcattgtttcactcgctacgttgaatatcacagatgtgtagctgctaagggtgatgatgctccagaatgcgataagtttgcaaagttttatcggtctctttgccccagcgaatgggttgatagggtggaacgagcaaagaggaaatggggccattccctggtcctctaccctgaaggaaaaatcatatt

SEQ ID NO: 120041 - DNA, 1143 bp, Arabidopsis thaliana
gtccgtctgcagtaccggtccggtaattcccgggtcgacccacgcgtccgataacttgtaatcaaccaaagtcgaaaaacagagttattttgtcggatcaaaatggtgaagattgagataggaagtgtgggtgactcctttagtgtagcatctcttaaggcttacttgtctgaatttatcgcaactcttctctttgtgtttgctggcgttggctctgctcttgcttttgccaagctcacatccgatgcagccttggaccccgctggtcttgtcgctgtcgctgtggctcacgcctttgcccttttcgttggtgtttccatagccgccaacatctccggcggacaccttaaccccgccgtgacactcggtctcgccgtcggtggcaacatcacagtaataaccggtttcttttactggattgctcaatgccttggctccatcgtcgcgtgtctcctcctcgtcttcgttaccaatggcggagagcgtaccgactcatggagtagcggccggtttaggagctattgaaggagtagtgatggagatttgtggtgacctttgctctggtctacacagtctacgccacagcggctgatccaaagaaaggttcactcgggaccattgctccaattgctatcggtttcatcgttggtgccaacatcctcgcagcgggtccctttagcggtggttccatgaacccggccaggtcatttggaccagctgttgtcagtggtgacttctctcagatatggatctactgggtgggtccactagtcggtggtgcacttgccggactcatctacggagacgtcttcatcggatcctacgctccagctcccaccacagaaagctacccttgatcaatcctatagcgttttaatttgcttggcttgctttttgttgtgtgaaaatgtttggtcctcgtttcttccaaaaatgaatgattgaatgtggagaaaaagatcaaagttgtactttgtgttggttataaataagaattgtatattttcaaattttatatctctgccttgtactttcttgcatgtgttaatggctaaaaataaccggttttaactgtccaaaaaaaaaaaaaaagggcggccgctctagaggatccaagcttacgtacgcgtgcatgcgacgtca

SEQ ID NO: 120042 - DNA, 1751 bp, Arabidopsis thaliana
  unsure (1)..(1751): unsure at all n locations
nnnnnnnnnnnnnnnnnnnnnnnnnnnnnnnnnnnnnnnnnnnnnnnnnnnnnnnnnnnnnnnnnnnnnnnnnnnnnnnnnnnccacgcgtccgctacacaatcacattagccaaaaccatggcctcctcaagtctccatttcttcttcttcttgacacttctcttgccattcactttcaccaccgccacacgtgacacatgtgcgaccgccgctcccgatggttccgacgacctctcaatcatccccattaacgccaaatgctcacctttcgcacccactcacgtctctgcctccgtgatagacacggtccttcacatggcctcctcagactcccatcgactcacctacctctcaagcctcgtcgccggcaaaccaaaacccacctccgtccccgtcgcctccggtaatcagctccacatcggaaactacgtggtccgagccaaactcggcactcctccacagctaatgttcatggtcctagacacaagtaacgacgccgtttggctcccttgctccggctgctccggttgttccaacgcctcaacttctttcaatacaaactcctcatccacttactcaaccgtctcttgctccaccgcacaatgcacccaagcacgtggcctcacgtgcccatcctcctcaccacaaccgtccgtctgctccttcaaccaatcctacggcggagattcatccttctctgccagtctcgtccaagacacgctaacgttagcccctgacgtcatcccaaatttctccttcggctgcatcaactccgcctcaggcaattctctaccaccgcaaggactaatgggcctaggacgcgggcctatgtcattggtctctcaaactacgtcgctttactcaggagtgttctcatactgcctccctagcttcaggtccttctacttctccgggtcgttgaaactgggtctcttgggtcaacccaaatccatcagatacactccactcctccgtaaccctcgccgtccatcactttactatgtgaatctcaccggagtgagtgtcggttccgtccaggtacccgttgacccagtgtatttgacgtttgacgcaaattccggcgccggtacgatcatcgattccggtactgttatcacccgttttgctcaacccgtgtacgaagccattagagacgagtttaggaagcaggtgaatgtgtcgtcattctcaacattgggagcgtttgacacgtgtttctcagcggataacgagaatgtggcgccaaagataacgctgcacatgacgtcactcgacttgaagctgccgatggagaatacgcttatccacagcagcgcgggaacgctgacgtgtctatccatggccgggatacggcagaacgcaaacgctgttctaaacgtgatcgcgaatctccaacagcagaacttaaggatcttgtttgacgttcctaattctcgcataggaattgctcctgagccctgcaactaagagaggacatatgaatgatctctctctccctctctttttattttacgttcttcgtacgttttgatttgaagaggtgcttaatggcgcttgaccttctacatatactttgtatgaacggctatcttcactacgcataacatggcctgcagtttcatctaaaaaaaaaaacaaaaaaagnnnnnnnnnnnnnnnnnnnnnnnnnnnnnnnnnnnnnnnnnnnnnnnnnnnnnnnnnnnnnnnnnnnnnnnnnnnnnnnnnnnnnnnnnnnnnnnnnnnnnnnnn

SEQ ID NO: 120043 - DNA, 417 bp, Arabidopsis thaliana
cgttcgtctggaactctgttctgttgccaggaacttgttgacgaagaaggtcgatgatgatagctcaagaattgggaatatatgttgtggagagcaaaggaggagcaatattatgtctattgctttctctgctctgtttaggcacttggcctgctcttatggctcttcttgaacggcgtggtcgtctcccacgacatacttatcttgattattccatcactaactttttgcctgcaatctttatagcctttgtgtttggtgggataggtgaaagtacacatgaggcaccaagtttcattacacaactcactcaggttagaacttgaaggattttgatctctataatggagattgcattgatgaatctcttgctgctgctgctacagattcaagataattgggcctctgtgttgtttg

SEQ ID NO: 120044 - DNA, 522 bp, Arabidopsis thaliana
ctacaatacgactcactttagggaaagctcgtacgcctgcaggtaccggtccggaattcccgggtcgacccacgcgttcggttgcggttaagcgtttatggacaggttctgttaaggaaactggagattgtgatccagagaaaggttacaaacctggagttcaagatgaggcttttgaagctgaagttgagacattgggtaagattaggcataagaacattgtgaagctatggtgttgctgttctacaagagactgcaagctcttggtttatgagtacatgcctaatggtagtttgggagatttgcttcatagcagtaaaggaggaatgttgggatggcaaacgaggtttaagattatcttagatgcggctgaggggctttcgtatcttcaccatgattctgttcctccgattgtgcatagagatattaagtcaaacaatattttgatcgatggagattatggtgcaagagttgctgattttggtgtggctaaagctgtcgacttgaccggaaaagctccta

SEQ ID NO: 120045 - DNA, 753 bp, Arabidopsis thaliana
  unsure (1)..(753): unsure at all n locations
tttgtcagtatggaactatcttgatctttctggtaacatgttctctggcaagatcccggtttcattgcagagtttgaagctaaaccagctgaatctgtcttagggccggttagcgggtgacttaccgccttctttagcgaaagatatgtataagaatagcttcattgggaacccgggattgtgtggggatatcaagggattgtgtggctctgagaatgaagctaagaagagaggctatgtatggcttcttagatcgattttcgtacttgctgcgatggtgcttcttgcgggtgttgcttggttctacttcaagtacaggactttcaagaaagcaagagccatggagagatctaagtggactctaatgtcgttccacaaactcgggttcagtgagcatgagattcttgaaagccttggatgaaggtaatgtgattggagccggagcttcaggtaaagtttacaaggttgtactcacccaatggggaacctgtttgcggttaagcgtttatggacaggtcctgttaagggaactggagattgtgatcccngagaaaggttacaaacctggagttcaagatgaggcttttgaagctgaaagtttgngacatttngggtaanatttagggcataaggancattgttnaagctatgggtgtttcctggttcttcaaagaagncctntcaaaanctccttnggntttattagggncantgccttaaatgggtnaggttttgggggntttttcnttcaat

SEQ ID NO: 120046 - DNA, 917 bp, Arabidopsis thaliana
  unsure (1)..(917): unsure at all n locations
cccctttggttacccaaaagtcattgaattccaaccgaaaagaggctggccgttcccccccgttacccaaatgttgagccctaggactcgacaatccaccataaagtttgtaaccgggatgtaacattttgttggaggacggggccatatcctttaagcaccttgggattgcctggaaattgttggttcaccccaacataacaaaagggccaaggcaaagggcacctctcatgcttaacagacggttcgagacaacattttggttttttcaccaagaaggcaaaccgggtcgaacccaagagcgtaatgggacattttccgagcaaatttatccccggtttacgatgttggtcttctccgaaacggacaaggcggtggaggccgcccagcaatgcccgcacctagtactgccgccggtaaatggtgtgtagcgaggtccggggcgacgaatactcagctgcaagacagtattaattgggtgtgtggtcagggtgttgactgtaaaccgatccaagctggtggttcgtgctttaacccgagcagtttgaggacgcacgcatcttttgttatgaatgcttatttccagagccacggccgcactgatggtgcttgtaacttcagtggaactggtatgatcgtagggaacaacccaagcaatggtgcatgtaagtactaaggagattgtctatgtagtagtatttgtctggaaaatcctaacataatggttctgaggaactttggatttgagagatcatcagctttgtgtttaatttcggattatcctaattttaagatttttttgtttattaaaaaaaaaaaaaaaaaaaaaaaaaaaaaaagagnnnnnnnnnnnnnnnnnnnnnnnnnnnnnnnnnnnnnnnnnnnnnnnnnnnnnnnnnnnnnnnnnnngttacatt

SEQ ID NO: 120047 - DNA, 934 bp, Arabidopsis thaliana
gcaggtaccggtctcggattcccgggtcgacccacgcgtccgcaaaaacgtcaacttcgcaattttccgaacaccgtacaaggcagtccgtgacccgttcacccgccacgtctacaccaacatgtttgatgcactcatggactcgacatactcagccatgaaagctcttggatacggtgatgttaacattgtcgttggcgagactggctggccatctgcttgtgacgcaccttggtgctcgcctgcgaatgctgcttggttcaacctcaacattatcaaacgtgcacaaggccaagggacacctctcatgcctaacagacggttcgagacatacattttcggtctcttcaacgaagaaggcaaacccggtccgaccgcagagcgtaactggggacttttccgagcagatttctccccggtttacgatgttggtcttctccgaaacggacagggcggtggaggccgcccagcattgcccccacctagtactgccggcgtaaatgggtgtgtaccgaggtccggggcgacgaatactcagctgcaagacagtattaattgggtgtgtggtcagggtgttgactgtaaaccgatccaagctggtggttcgtgctttaacccgagcagtttgaggacgcacgcatcttttgttatgaatgcttatttccagagccacggccgcactgatggtgcttgtaacttcagtggaactggtatgatcgtagggaacaacccaagcaatggtgcatgtaagtactaaggagattgtctatgtagtagtatttgtctggaaaatcctaacataatggttctgaggaactttggatttgagagatcatcagctttgtgtttaatttcggattatcctaattttaagatttttttgttaattattttttcgctgattccttttatttaaataaagtggaacttccat

SEQ ID NO: 120048 - DNA, 452 bp, Arabidopsis thaliana
  unsure (1)..(452): unsure at all n locations
cacatgcgactggcctccgcgggacgggaggcattctcatccccagattatccccttcaagcaaaagtcaaaacagtgcactttntgagaagaaagtcatgtgataattgaagctggccagacactaacccaagaagctgaaaatgaaaagccaaaaaatccctcagatttgatgctttgcttcaaaccgcttgtttgaatttgcaaatctctcacacatgtattagtaatttaatcagcgagtgaaataatagagtttcagaagagtaaaatgcatgtgaatagatctgattatttatggtaatgtgagcattagagttatgacaaacccatgatgcaaagatttgtatatactgttttgtgttaaaaaaaaaaaaaaaaaaaaaagggcggccgctctagaggatccaagcttacgtacgcgtgcaggcgacgtcataactctnctatag

SEQ ID NO: 120049 - DNA, 630 bp, Arabidopsis thaliana
  unsure (1)..(630): unsure at all n locations
gncccnctttttccccngggttngcccancagcccccttttcntntgggccccctttggtttgctaacccggccgcaatcccggttaataaggtggttgggaaggctttccagggcccctggaaaccttaaggtcaccgcttctaccccgcaaggttatccagggaaccctagggtgggaccaatgagagggtttcctggggaagccccaattccgttcaggagaatttcgggaaagtttactattcccggtgtttacggcgcacgggacagcggatggagtaacatgtcctacatcttcgaagctactatacgaaaaagcgtcaagcgctgataaaacgttgaagatctatgaagggatgtatcactcgctgattcaaggagagcctgacgagaacgctgagatagtcttgaaggatatgagagagtggatcgatgagaaggttaagaagtatggatctaaaaccgcttgaacaaagctacatttgtgttacaagaacttgaagagaaatgtatattgatgttatgatccgtatcgtcgatttgacttgttttgttgtctgttgtaatccaagaacatgaattttctgatgtaagaacttataatatcatggattacagaaatcctttt

SEQ ID NO: 120050 - DNA, 555 bp, Arabidopsis thaliana
  unsure (1)..(555): unsure at all n locations
ctttatcaccaccaaaaaccaaaattcactgccaaaaaaaacacatcaaaacgatgccgtcggaagcggagagctcagcgaattcagctccggcaactccgccaccaccaccgaatttctggggaaccatgccggaggaagagtactacacttcacaaggagtacgtaacagcaaatcatacttcgaaacaccaaacggcaagctcttcactcagagcttcttaccattagatggtgaaatcaaaggcactgtgtacatgtctcatggatacggatccgatacaagctggatgtttcagaagatctgtatgagtttctctagttggggttacgctgttttcgccgccgatcttctcggtcacggccgttccgatggtatcccctttgctacatgggctgttttggttccgtttacttcgttcctctgtttttgatangntaaaggtttccantctttggccnaatttgtaagntaatttccggtnctttnagggggttaaaaggnttggtttttaatnggtntttggggatttgggaagttcngnacacctttgc

SEQ ID NO: 120051 - DNA, 687 bp, Arabidopsis thaliana
  unsure (1)..(687): unsure at all n locations
cacgcgtgccaaaaaccaaaattcactgccaaaaaaaacacatcaaaacgatgccgtcggaagcggagagctcagcgaattcagctccggcaactccgccaccaccaccgaatttctggggaaccatgccggaggaagagtactacacttcacaaggagtacgtaacagcaaatcatacttcgaaacaccaaacggcaagctcttcactcagagcttcttaccattagatggtgaaatcaaaggcactgtgtacatgtctcatggatacggatccgatacaagctggatgtttcagaagatctgtatgagtttctctagttggggttacgctgttttcgccgccgatcttctcggtcacggccgttccgatggtatccgctgctacatgggtgatatggagaaagttgcagcaacatcattggctttcttcaagcatgttcgttgtagtgatccatataaggatcttccggcttttctgtttggtgaatcgatgggaggtcttgtgacgcttttaatgtatttccaatcggaacctgagacttggaccggtttnatgttttcggctcctctctttgtnatccctgaggatatgaaaccaagcaaggctcatctttttgcttatggtctcctctttggtttggctgatacgtgggctgcaatgccggataataagatggttgggaagg

SEQ ID NO: 120052 - DNA, 527 bp, Arabidopsis thaliana
cgtcagcgatgacgtctctattctctaaacctagagctctcacttctcatatcaccaactttaaaacttaccgtccggttatcggaaaactccacgtggcaactttaacgcttcttctcttcctaatcgccgccggtattgccgtcacttcctctctatggcttaacaagacgacaaaagcatttgatcgaccgacattagtagcaacaaaaccagaaccggagctagagccaccgcatgaaaccggagtattggtaaattgcacaagtttcttgaatcaaaaccggtccggttcttgctcaagaacacctctacttaacaagaaaaaaccatctcatcgaccgacaataacaacaataaaaccggtcccggtacgtgtatcagagaagaaatcaccggaggaaaccggaagctcggtagattgctcaagtttcttgaatcaaaaccggtctggttcttgctcaagaacactgcaatcgggttataatcaaaaccaaaccgaatctaaccggtcttgtcctgattac

SEQ ID NO: 120053 - DNA, 876 bp, Arabidopsis thaliana
  unsure (1)..(876): unsure at all n locations
nnnnnnnnnnnnnnnnnnnnnnnnnnnnnnnnnnnnnnnnnnnnnnnnnnnnnnnnnnnnnnnnnnnnnnnnnnnnnnnnnnnccacgcgtccggcttcgcttctcctctctcgctctctactcaggactcgtttactctttcaaagctaagctttcaagatgcaaaacgaagagggtcaggtcactgagctttacattcctaggaaatgttctgctactaaccggttgatcacatccaaggatcatgcctctgttcagctcaacattggtcatttagatgctaatggcttgtacaccggacagttcacaacctttgctctctgcggttttgtccgtgctcagggagacgctgacagtggtgtcgacaggttgtggcagaagaagaaggttgaagccaaacaaaactaagagcttaatctgtcttgttttttgtcgaatcttgtttttttttttccgaaagattgcctcatactgaagtaatgattttggctttgggtcgtggaacttaacttaaatgcttttgtgcaccatgtcttctaatttttcaccagttcgatatagtatctccagtttctcgacctttttatcaaaaaaaaaaaaaaaaaaaaaaaaaaaaaaaaaaaaaaaaaaaaaaaaaaaaaaaaaaaaaaacaaataaaaaaaaaaaaaaataaaaaaaataacatggggggggccttttttaaaaaaaaaatttttttcccgcggttgggtgggggaatttttttttttttggggccccaatataaaatctttgggcgggcgagtttcaaatggtgggagatacaaacactcgatggcccccaccaaaaacttggtggtgggcaaccgctcttttttaacacgggttatttact

SEQ ID NO: 120054 - DNA, 519 bp, Arabidopsis thaliana
  unsure (1)..(519): unsure at all n locations
gagagttattacaacttgaaaaacatggcatccaaggctttgattctgttgggtctcttcgcaattcttctggtggtctccgaagtttctgccgcaagacagtcgggcatggtgaagccagagagtgaggcaactgtgcaacctgaaggttatcacggaggacatggtggtcacggagggggaggccactacggaggaggaggccacgggcatggaggacacaacggaggagggggccacggacttnacggatacggaggaggacatggaggacactacgggcttaacggacctgttcagccgaaaccgggtgtttaaaagttaaaactataaaataaattcaccaccagtccaccatgcataattgcatctctatatacacttatgtcttataagtatgcatcaaaataaaccatggtgagtttgtaattcagttccttcagaaatgtgtggaataatgttttataataataatagaatatctctcagtttgaattaaaagaactaaatatgcccttg

SEQ ID NO: 120055 - DNA, 551 bp, Arabidopsis thaliana
aacatactaagagagttattacaacttgaaaaacatggcatccaaggctttgattctgttgggtctcttcgcaatttttctggtggtctccgaagtttctgccgcaagacagtcgggcatggtgaagccagagagtgaggcaactgtgcaacctgaaggttatcacggaggacatggtggtcacggagggggaggccactacggaggaggaggccacgggcatggaggacacaacggaggaggaggaggaggaggaggccacggtggtggtggacactacggaggtggaggacaccatggaggaggaggccacgggcttaacgaacctgttcagacgaaaccgggtgtttaaaagttaaaactataaaataaattcaccaccagtccaccatgcataattgcatctctatatacacttatgtcttataagtatgcatcaaaataaaccatggtgagtttgtaatgcagttccttcagaaatgtgtggaataatgttttataataataatagaatatctctcagtttgaattataatctgtgctgtttgcat

SEQ ID NO: 120056 - DNA, 601 bp, Arabidopsis thaliana
  unsure (1)..(601): unsure at all n locations
catactaagagagttattacaacttgaaaaacatggcatccaaggctttgattcttttgggtctcttcgcaattttcctggtggtctccgaagtttctcccgcaagatactcgggcatggtgaagccagagagtgaggcaactttgcaacctgaaggttatcacggaggacatggtggtcacggagggggaggccactacggaggaggaggccacgggcatggaggacacaacggaggagggggccacggacttgacggatacggaggaggacatggaggacactacggaggaggaggaggacactacggaggaggaggaggccacggtggtggtggacactacggaggtggaggacaccatggaggaggaggccacgggcttaacgaaccttttcagacgaaaccgggtgtttaaaagttaaaactataaaataaattcaccaccagtccaccatgcattaattgcaatctttatatacaacttatgtcttataagtttngatcaaattaaaccccttggtgggtttgtaattcatttccttccnnaaattnttttggntnaatttttttttataaatacttggttnnccttcnngtttt

SEQ ID NO: 120057 - DNA, 485 bp, Arabidopsis thaliana
  unsure (1)..(485): unsure at all n locations
gagattagaacttgcaaaaaatggcttccaaggctttgattctgttaggtctcttctcagttcttctcgtcgtctccgaagtgtctgccgcaagnaatcgggcatggtgaagccagagagtgaggaaactgtgcaacctgaaggttatggcggtggccacggaggtcgtggtcgccccggaggtggtggaggaggatacggaggtggaggaggacaccacggaggaggaggccacgggctaaacgaacctgttcagactaagccgggtgtttaaaactatataatatcttcactaccatgcatgattgcatatatatatatacgcttatgtattatctatatgcctataaataaaccatggtgagtttgtaacgcagtgccttcagaaatgttcggaataaatttccataatattagtataatgtctctctgtttgaattataaactgcgctgtttgcataataaaatctcttgtagctaaaaaa

SEQ ID NO: 120058 - DNA, 411 bp, Arabidopsis thaliana
  unsure (1)..(411): unsure at all n locations
aacatactaagagagttattagaacttgcaaaaaatggcttccaaggctttgattctgttaggtctcttctcagttcttctcgtcgtctccgaagtgtctgccgcaagaaattcgggcatggtgaagccagagagtgaggaaactgtgcaacctgaaggttatggcggtggccacggaggacatggtggtcacggagggggaggaggccacggacatggaggacacaacggaggagggggccacggacttgacggatacggaggaggtggaggacactatggaggaggtggaggacactacggaggaggtggaggacactacggaggaggtggaggacactacggaggaggttgaggacactaccggaggaggttgtttgaggccacggaggttgaggccacttcggngnt

SEQ ID NO: 120059 - DNA, 456 bp, Arabidopsis thaliana
gggttcagagaagatcgtttactctttcctcaatttcgaacaaagttttcgaattttccaactctctctagtgaatttagggttctgatttcgacattagtgtaaagatttgttttttatccgaggggtgcgattgtgtagtcaaaccagatcaaatgtcggcatcaacggtgtcgatcaccgctaatacggcggcagcgactagacggacgccgattcttgccggagagaaaaaatcaaactttgattaccctcaaagcgaatcgcttgcgaacggtggtgttggggaagccggtggtacgagtagagatctgagccgcggtgaagctacccttgatcgatctcagggacaagatttgggtcctgtgacgagaaggtctgtttccgctgcgacggggactaataccaccgctacgcagcgccggacgcggaaggttgcgacccctaagtctgaga

SEQ ID NO: 120060 - DNA, 439 bp, Arabidopsis thaliana
gacccacgcgtgcgggcagatgtcagtatacatgtctgagaaccttccatttcagacccttcgttccatattggcaaggcgtgaacaggcatactggggggggatcgcatttgagtatatgcacattgcagatcgagataaatgtaactggttgagagaaaagattgagacaccagctccttggcggtacaacagggagcgccgtgaggtgattctcgatcggcttgcatggagtactcagctcgagaatttcttagctaccaagtggacaacagccaaaagatttggacttgagggaggagaatcattaattcctggaatgaaggagatgtttgacagagcagcagatcttggagtagagagtattgttattggaatgtctcacagaggaagattgaatgttctgggtaatgttgttcggaagccactccgtcagata

SEQ ID NO: 120061 - DNA, 427 bp, Arabidopsis thaliana
  unsure (1)..(427): unsure at all n locations
atgttgactagatttaagaaacaaaataataagatggttagggcaaatatagtgagcatggttctgttgatgcatgccatcgttgggtttccttttcatgcgaggggattaagtatgacttactacatgatgagctgtcctttcgctgaacagattgtgaagaacagtgttaacaatgctcttcaagccgatcccactttagccgctggtcttatccgtatgttgttccacgactgtttcatcgagggatgtgatgcgtcaattctgctagattcaacggaagacaacactgcggaaaaaggattcgcctgcaaatctaagtctacgggggctacgggnttcatncggtgntgcaaangnggnaattcggggattagntttnccnggggtttntatcnatccgcagttttaggtttcccntgggctc

SEQ ID NO: 120062 - DNA, 492 bp, Arabidopsis thaliana
cccgagcgtccgctttatctgatcgcaccaaaccagttttttcgcatcggcttcttccttttgctactagctctcctctcttctccgaaaatggcgttacaaaacaaagaagaagagaaaaagaaagtgaagaagttgcaaaagagttacttcgatgttctcggaatctgttgtacatcggaagttcctataatcgagaatattctcaagtcacttgacggcgttaaagaatattccgtcatcgttccctcgagaaccgtgattgttgttcacgacagtctcctcatctctcccttccaaattgctaaggcactaaacgaagctaggttagaagcaaacgtgagggtaaacggagaaactagcttcaagaacaaatggccgagccctttcgccgtagtttccggcttacttctcctcctatccttcctaaagtttgtctactcgcctttacgttggctcgccgtggcagcagttgccgccggtatctatccg

SEQ ID NO: 120063 - DNA, 582 bp, Arabidopsis thaliana
  unsure (1)..(582): unsure at all n locations
tgaatntgcttcacagggaattgaattagtagctagtgaaatgaacgctgttgctgatggaaaagttaatcagaaacatcttgatcgcgccaaagcagcaacaaaatctgcgattctgatgaatctggaatctcggatgattgcagcagaagacattggtagacagattcttacttacggagagaggaaaccagtagaccaattcttgaagacagtagaccaacttaccttaaaggacattgcagatttcactagcaaggttatcacaaagcctttgacaatggcaactttcggagacgtgttgaatgttccaagctatgactccgtaagcaaaagatttcgctgaaagagtgaagaagtaaaaaagatctttttacatcataagatagagttgggacctgtagaataaagatagccttttttttggaggtccaaccaaattttttgttccacctatccctcaagtttctgccctaaggtaagtccatgaaaatggtgccaaattacgcccatgtctccaattccgttgttccggatttcttctcttcggttagtgaataatgattgatacgtttaccaact

SEQ ID NO: 120064 - DNA, 957 bp, Arabidopsis thaliana
  unsure (1)..(957): unsure at all n locations
gaggctacacactttgcggttgctttcgtggtgcctggctggaataacgagaaagaagcggtcaccgccactgttctccagatgcttatgggaggaggtggctcattctctgcgggaggtcctggaaaaggaatgcactcgtggctttatcgccgtgttctaaacgaatatcaggaggttcagtcatgcactgcattcactagcatctttaacgacaccgggttgtttggaatctatggttgctcgagtcctcaattcgctgcaaaagcaattgaattagcagctaaagaactcaaagatgttgcaggaggaaaagttaaccaggcacatcttgatcgtgccaaggcagccacaaaatctgcagttctgatgaatttggaatctcggatgattgcagcagaagacattggtagacagatacttacatacggagagaggaaaccagttgatcaattcttgaagtcagtagaccaactaaccttgaaagacattgcagacttcaccagcaaggttatttcaaagcctttgacaatgggttcctttggagatgtgttggctgttccgagctatgacacaataagcagcaaatttcgttgaagcaaaacaaacaatttgccaaatcaacaatattttgggacttgtaaaataaagaagatcttggggagaagaagacccaaccaattttaattttaatttttttttttacaattacagtttcgtatttttatgaaatggattttgtttccatcgacagatataaatgactggattttgtccggtttgtctctccaattttcaggagtatttgtattccaataaataatcttttactacgtgtaatgcaaacaacttcagtggtacagaaaaaaaaaaaaagaaaaaaaaaaaaagtataaaaaaaccaggngcagccgctctagaggatccaagcttacgtacgnnnnnnnnnngtaatcg

SEQ ID NO: 120065 - DNA, 520 bp, Arabidopsis thaliana
  unsure (1)..(520): unsure at all n locations
gcaacttttgactaaaaaaagcagctcatagcagcggttatgcctttttccgccgcgagttcgagctccgtaagctcaatcgctgaagaaccgccgccaaagaaacagcatgatccatcgccgtcctgttcatcgtatctgttactacttccagacgaaatcattctgaattgcttagcacgcttgccgaaatgttactacccggtgatttcactcgtctccaagacctttaggcgtctcatagcttcaccggagatctacgttgaaaggtcattacttcgccgcaccgagcgtgtcctttatgttgtgcttagatctcacgctacagaaactccccgatggtacactctcaatttcaaaccctttggaaatgattcaaataanccataggttggttcccgattccggtcgntttccnttcgnttccttncttgggggaattgtcaaattggccgnnattggtttcnnnaaattaacggccccttggnggnttcaattgataatnnaattggcnncannt

SEQ ID NO: 120066 - DNA, 1278 bp, Arabidopsis thaliana
  unsure (1)..(1278): unsure at all n locations
nnnnnnnnnnnnnnnnnnnnnnnnnnnnnnnnnnnnnnnnnnnnnnnnnnnnnnnnnnnnnnnnnnnnnnnnnnctttttttttttttttagataatgactcgtcgttactattaaaaggaaggaaaacaagatttcgattaagtgaggccgctctcttctcttcacaacgcatcatctcatgcattttgggctattatataaacacccaacttcctcacgaaatcttacaccaaacacaaatattccattaaaagaaacattttctatagtcaagcataaagagcattccaatggcgatcccaagtttctccatgtgtcacaagcccgagctccttaaggaaggcaaaagcgaaggccaagaagaagaagggctaagctacgagttccaagagatgttggactctcttcctaaggagagaggacggagaaatcgttacctttacttattccaagggtttcggtgccaagctaaggagattcaagctatcacgtctttccaaaaacattttcagtcccttccagacgacgttgtcctcgccaccatacctaaatctggcacaacctggttaaaagctttaactttcaccatccttaccggtcatcggtttgatccggtttcctcatcaagttccgaccaccctcttctcacatccaaccctcacgacctcgtacctttcttcgagtacaagctttacgccaacggaaatgttccgatctctcgggtctagccagtccaagaacattcgcaacccacgtaccgttcggtgcccttaaggattcggtcgagaatcccagtgtgaaggttgtgtacctgtgccggaacccgtttgacacattcatctccatgtggcattacatcaacaacatcacttccgagtcagtgagcgcagtcttgctagacgaagcttttgatctatattgccggggattactgatcggatttggcccgttttgggaacacatgttgggatactggagagagagcttgaagaggccagagaaagtcttatttttaaagtacgaggatctcaaagaagacatcgagaccaacttgaagaagctagcaagtttcttaggacttcctttcaccgaagaagaggaacaaaagggagttgtgaaagctatcgctgatctgtgtagctttgagaatctgaagaagttggaggtgaacccacgcgtccgcggacgcgtggactatgagaaccnnnnnnnnnnnnnnnnnnnnnnnnnnnnnnnnnnnnnnnnnnnnnnnnnnnnnnnnnnnnnnnnnnnnnnn

SEQ ID NO: 120067 - DNA, 686 bp, Arabidopsis thaliana
ttggagagagagcttgaagagaccagagaaagtcttttttttaaggtacgaggatctcaaagacgacatcgagaccaacttgaagaggcttgcaactttcttagagcttcctttcaccgaagaagaggaacgaaagggagttgtgaaggctatcgccgagctgtgtagcttcgagaatctgaagaagttggaggtgaacaagtcaaacaagtcgatcaagaactttgagaatcgattcttgtttcggaaaggagaagtgagtgattgggttaactatttgtcaccttcacaagtggaaagattgtcagccttagtggatgacaagttaggtggatctggtctcactttcaggttgagctaaatataaggccacgtgcccccatttctactcttgttctgagggcctactatatacgttaagctaagttaaggcagttgtattgttgttacagatagacatcgaagcaacgtaacgtccataattaagttaatttgtcgtttttatttttgtcaacaccgaagtttgtcgaatttttattttattaaatatcgcttgtttttgcagttatgtttttatttttactagagtattattgttcatgtgtgaagctaaatgtattgtaaagtatgttaaaattgagtatatatatatatatatatatatatatataaaaaaataatttcat

SEQ ID NO: 120068 - DNA, 538 bp, Arabidopsis thaliana
gatacccagctctatacgactcactatgggaaagctggtacgcctgcaggtaccggtccggaattcccgggtctacccacgcgtccgatgagcattaccggagaacaaaagtgtaagagttatcgcaggttgtcggataaaatgtatattcagatgacagatggagttcctccgccaccagagcaaagttcgttagaccaccggattgacgagcttgagagacagaaagagatcgatgattggcttccgataacttcatcgagaaacgcgaaatggtggtactccacgtttcacaacgtgactgccatggttggagctggcgtccttggtctccctttcttcatggcccaactcggatggggaccaggcatagcagtcctgatactatcatggataataacactttacacgttatggcaaatggtggagatgcatgagatggttcccggaaaacgctttgatcgctatcatgaacttggtcagttcgcatttggcgaacgtcttggcctttatattatcgtccctcagcaaatcattg

SEQ ID NO: 120069 - DNA, 602 bp, Arabidopsis thaliana
tctacgactcacttagggaaagctggtacgcctgcaggtaccggtccggaattcccgggtcgacccacgcgtccggcagtgacgaatccagatgaagtagcggacgaagttctcgccttgacagaaatgagtgtgagaaaccataccgagaggaggaaactaggttactttacttgcggaacaggaaaccctatcgacgattgttggcgatgtgaccccaattggcacaagaaccgtaaacgcctagcggattgcggtatcggatttggaagaaacgcgatcggtggtcgtgatggacgattctacgtagtcactgacccaagagacgacaatccggttaaccctagaccggggactttacgtcacgccgtgatccaagaccgaccactatggatcgttttcaaacgtgacatggtgattcagctaaaacaagagcttatcgttaacagtttcaaaacgatcgatggacgtggcgcaaacgttcacattgctaacggtggttgcatcacgattcagtttgtgacgaatgtgatcgttcacggattgcatattcatgactgtaaaccaactggtaacgctatggtgagaagctcagagacgca

SEQ ID NO: 120070 - DNA, 594 bp, Arabidopsis thaliana
  unsure (1)..(594): unsure at all n locations
ctactctctctctctctctcctctgttctaattctctaggaacagagtaaaagactttggctcagcttctgcctctccaatggcggttcttccgacatggcttttagcaatgatgtgtttactcttcttcgtcggagctatggagaacactacacacgacaacatctcttctctccctagatccgacgaaaccgaatggaaccaacacgcagtgacgaatccagatgaagtagcggacgaagttctcgccttgacagaaatgagtgtgagaaaccataccgagaggaggaaactaggttactttacttgcggaacaggaaaccctatcgacgattgttggcgatgtgaccccaattggcacaagaaccgtaaacgcctagcggattgcggtatcggatttggaagaaacgcgatcggtggtcgtgatggacgattctacgtagtcactgacccaagagacgacaatccggttancctagaccggggctttacgnacgccgngttcaagancgnccactatggtcggtttcaaacgtgcatggngttcagctaaacaanggtnttcgtaacagttcaaacgtcgtggggnggnga

SEQ ID NO: 120071 - DNA, 534 bp, Arabidopsis thaliana
caactctttgcgactcatatagggaatgtctggtacgcctgcaggtaccggtccggaattcccgggtcgacccacgcgtccgcaacaatggctacttcaagaacattcattttctctaatctcttcatcttcttcctcgttatagccactacttatggtcaggctccagctccaggcccttcaggtccaacgaacataaccgcaatcctagaaaaggctggtcaattcacattgttcataagacttcttaaaagcactcaagcctcagaccaaatcaacactcagctcaattcttcctcgagtaatggcttaaccgtgtttgccccgactgataacgccttcaacagcctcaaatccggaaccttaaactcattgtctgaccaacaaaaagttcagcttgttcagttccatgtcttacctacactctataaccatgcctcagttttcaaaccgttagtaaccctttcccacgcagctggagatggccaaaacggaaattcctcttaacataactagctccggtaccaagttaca

SEQ ID NO: 120072 - DNA, 449 bp, Arabidopsis thaliana
agggaacactggtacgcctgcaggtaccggtccggaattcccgggtggaccacgcgtgcgcccacgcgttcgcaatgatgctgttaatggttttgtggatgatggatggtcaccaatgggtagcgatggtgcagaggatgttactgtaatgataaacttgtcccctgggaagtttggtgggtctcactacggtaacttcattccttccaggctttggtagtggcgtgctttgtgccaaggcatctatgttgcttcagaacgttccacccgctgtgctggttcgattccttagtgaacaccgatctgaatgggctgattatggcgtggatgcttatgctgctgcatcgctcagagcaagtccttttgctgttccttgtgctagagctggggggttcccaagtaaccaagtcattcttcctcttgcgcagacagttgaacatgaagagtca

SEQ ID NO: 120073 - DNA, 1815 bp, Arabidopsis thaliana
  unsure (1)..(1815): unsure at all n locations
cagctctccnnnnnnnnnnnnnnnnnnnnnnnnnnnnnnnnnnncttttcgatcaaaagacatgatctttgtgaatgtgggcaacgattgtaagcagagggaaggcgaagaattatgataacctctcatcaacgataagacaaaatccataaactagtaatatcatccaatcctctcacttcttccttattccctcactttcactctcactatctgttgacttcacatggcttccaccgccgcaactgcagctctttcgatcatcaaatccaccggtggcgccgccgttacacgctcctcccgcgcctcctttggacacattccctccacatctgtctccgcacgtcgccttggcttctccgccgtcgttgactctcgtttctcggtccacgtggcgtccaaggtccactccgtgcgcggaaagggcgccaggggagtgattacgatggcgaagaagagtgttggagatctgaattctgtagatttgaaggggaagaaggtgtttgttagagctgatctcaatgtacctctcgatgacaaccagaatatcactgacgacactagaatcagagccgccattcccaccatcaagtttttgattgaaaatggtgctaaggtcatcctctccactcatttgggaaggccaaagggagtcaccccaaagtttagtttggctcctcttgtccccagattatcagagcttcttggtattgaggtcgtgaaagctgatgattgtattggcccagaagtggaaaccttggtggcttcccttcctgaaggtggagttttgcttcttgagaacgtcaggttttacaaggaggaagagaagaacgatcctgagtttgctaagaagcttgcttctctagctgacctttatgtcaatgatgctttcggaactgctcacagagctcatgcttctaccgaaggagtcactaagttcttgaagccttcagttgctggtttccttttgcaaaaggaactggactacctagttggtgctgtttcaaacccaaagagaccatttgcagccatagtgggtggttccaaagtctcatccaagattggagttattgaatcgcttctggagaagtgtgatattcttcttcttggtggtggaatgatcttcacattctacaaggcacagggtctttcagttggttcgtcccttgttgaagaagacaagcttgaattggctacagaactccttgccaaagctaaggccaaaggagtctctcttttgttgccaacagatgttgtagttgctgacaagtttgctcctgatgccaacagcaagattgtgcctgcatcaggcattgaggacggatggatgggactggacattggtccagactctatcaaaactttcaacgaagctctggacacaacacaaacagtcatttggaatggacctatgggagttttcgagatggaaaagtttgcggctggaacagaggcgatagcgaataaactagcagagctaagtgaaaaaggagtgacaacgataataggaggaggagactcagtggctgcagtggagaaagtaggagtagcaggagtcatgagtcacatctccactggtggtggagccagcttggagctgttggaaggaaaagtacttcccggtgtgatcgcccttgatgaagcaatcccagtcactgtttagaaactcttaccatctataaggcaaacgctgtatacttaaaagagtttctttcgctttaaatctacctatgcaaaacttaagggcggccgctctagaggatccaagcttacgtacgcgtgcatacgacgtcaagctgttatataagaacgtta

SEQ ID NO: 120074 - DNA, 663 bp, Arabidopsis thaliana
  unsure (1)..(663): unsure at all n locations
gaaatattccaaactcataaaatctcaaatggctaataaataagaacattgtgagtcactctcgctgtttctcatctcctcatctttttatcttctttgattgatccacatggcttccgctgccgcaagttccgccttttcactccttaagtccaccggcgctgttgcttcctccgccggaactcgcgcacgtgcctcccttctgccaattccctctacctctgtttccgcgcgtcctctaggcttctccgccactctagattcccgtcgtttctctctccacgttgcttccaaagttgaatcggtgcgtgggaagggaagcagaggagtggtttctatggcgaagaagagcgtcggagatctgacctcagctgatttgaaggggaagaaggttttcgtgagagctgatctcaatgtacctctcgatgataatcagactatcactgacgataccagaatccgtgccgccattccaacgatcaagtatttgattgaaaattggtgctaaagttatcctctccactcatttgggaaggccaaagggggtaaccccaaagtttagtttgggcccttttgcccccaggggttcccngggtttttggaatttggggcaaggaagctgttcctttatttggccccaaggngaaanttggggggtttttc

SEQ ID NO: 120075 - DNA, 711 bp, Arabidopsis thaliana
  unsure (1)..(711): unsure at all n locations
caccattcttacaaggcacaaggggtctttcaagttggttcgtcccttgtttaaagaagccaggcttgaatgggctccaaaactccttgccaaagttaaggccaagggagtctttttttggttgcaacagatgttgtagttgctgacaagtttgctcctgatgccaacagcaagattgtgcctgcatcaggcattgaggacggatggatgggactggacattggtccagactctatcaaaactttcaacgaagctctggacacaacacaaacagtcatttggaatggacctatgggagttttcgagatggaaaagtttgcggctggaacagaggcgatagcgaataaactagcagagctaagtgaaaaaggagtgacaacgataataggaggaggagactcagtggctgcagtggagaaagtaggagtagccaggagtcatgagtcacaatctccactggtggtggagccagcttggagctgttggaaggaaaagtacttcccggtgtgatcgcccttgatgaagcaatcccagtcactgtttagaaactcttaccatctataaggcaaacgctgtatacttaaaagagtttctttcgctttaaatctacctatgcaaaactttactatgtatcagagtcgcggcccccngaaangaaaactcacatattaaaattnnnnnnnnnnnnnnnnnnnnnnnnnnnnnnnnnnn

SEQ ID NO: 120076 - DNA, 443 bp, Arabidopsis thaliana
cttttcgatcaaaagacatgatctttgtgaatgtgggcaacgattgtaagcagagggaacgcgaagaattatgatagcctcgcatcaacgataagacaaaatccataaactactctttcgatcatcaaatccaccggtggcgccgccgttacacgctcctcccgcgcctcctttggacacattccctccacatctgtctccgcacgtcgccttggcttctccgccgtcgttgactctcgtttctcggtccacgtggcgtccaaggtccactccgtgcgcggaaggggcgccaggggagtgattacgagggcgaatgaagagtgttggagatctgaattctgtagatttgaaggggaagaagggggttgttagagctgatcctcattgtacctctcgatgacaacctaaattttacttgctacacttgtattcagagccgtcat

SEQ ID NO: 120077 - DNA, 498 bp, Arabidopsis thaliana
  unsure (1)..(498): unsure at all n locations
tgggtggatgggattggacatcggtccagactcggtgaaaacattcaacgaagctctggataccacgcagacagtcatttggaatggaccaatgggagttttcgagtttgaaaagtttgcaaaaggaactgaggcggtagcgaataaactagcagagctaagcaaaaagggagtgacaacgataataggaggaggagactcggtggcagcagtggagaaagtgggagtagcaggagtcatgagtcacatctccacaggtggtggtgccagtttggagctcttggaaggcaaagtgcttcccggtgtcgtcgctcttgatgaagcaacgccagtcactgtttaacaacatctctttattacacctgaagggacccccctaaatgagtttcttcttcttattctgttgtaaatcaaagtctttgttggaccatcaaatccatagagaccgggcactctttttgtctccgggggaaaagataggaagagngggaaaaggaa

SEQ ID NO: 120078 - DNA, 585 bp, Arabidopsis thaliana
  unsure (1)..(585): unsure at all n locations
ctgtcccaaaaccaaaagacttgagagtgtgtctttagagagagatcttctctcttttatcttacgactctcacttcttatctcaaatctacttcaactctatttccagtctccacattttcccacaaatttcaactcttgttctcttcctccaaagtaaaaaacaaaacactgcaagtgaggtttggttttggtgttatagaattatgaagagcgggaagcaatcttcgcaacctgaaaagggtacttccaggatcttgtcactgactgtcctgtttatcgcattttgcggtttctccttctacctcggtggtatattttgctctgagagagacaagattgtagccaaggatgtcacaaggacgactacaaaggctgtagcttcccctaaagaacctacagctactcctattcaaatcaaatcccgtttctttcccggagtgcgggtcagagttccaagattacacccggngaacggtccaaagaggtggagaagatggngncancgctaagttcttgggngcatggccncgggaatgaaagatgagggttgtcncacagagggntaacgcaaaagaggccntc

SEQ ID NO: 120079 - DNA, 973 bp, Arabidopsis thaliana
  unsure (1)..(973): unsure at all n locations
caggctacnnnnnnnnnnnnnnnnnnnnnnnnnnnnnnnnnnnnnnnnnnnnnnnnnnnnnnnnnnnnnnnnccacgcgtccgcccacgcgtccgcccacgcgtccgatgcaccagtgcctggatggcaagctggtccacctcatgctatgcactatggcatgcagcagtataataaccccgtgccgtatcagaatgttccgcagccaggcaagtcaatgaacccttttgacttcagccctgggccgccatcacaaacacaaacggaaaatatgttcccttccatggctcctctgcaaggtgcattacctccttcaggcatgatgccttctcaaggagtacacaatcaattcaatataccttctcaaggctcagcccatccatctgcaatgccaccaaggtacatgccttctcaaataccaggaagcatgccacctagcaatgtaaacccaattggcgacataaacacgtcatatgacactcaacaaacatatcaaaattttggaagctcgtttgctgctgcagttcctttgaacccaccttctttccaatcaggaggaaacccatttgggtaagaaagagcgagaatattagctcacgagagctatgttatgcatgaggattgcgtttgtgttctaaggtgtagtataagactataaggaggtattaaatcgaatacaaacatgggttaaatagggtgaacgagggaaggtacgggccatgaacctgaagaagaattgggtttgtgagagtgttagattactgtattttttataagcatcaaaatgatttgaaataggtttgatatttattctttggtgtttctatattccatttccattttgttgtttgtccttcagaaaatcttcaggctcctcctgtgttgtatgattttgtataacagtttacacattgaccaaaaaaaaacccaaagggcggcacgctctagaggatccaagcttacgtacgcgtgc

SEQ ID NO: 120080 - DNA, 515 bp, Arabidopsis thaliana
atacgactcactttagggaaagctcgtacgcctgcaggtaccggtccggaattcccgggtcgacccacgcgtccgcattaatcctcacaactctctatctctctctcgccccattctctatcataatgacaggtgccacaccggaaaaccgaacggccccgtcgccaccaccggtgaaacatgtgccggagtcagttctgccggctaaaccaccaaagaggaacaattatgcattcgcgtgtgctatcttagcttccatgacttctatcctccttggttatgatataggagtgatgagtggagcaatgatttatataaagagagatttgaagattaatgatttacaaatcgggattctcgctggaagcctcaacatctattcacttataggatcttgcgccgccggaagaacctctgactggattggtcggcgttacactatcgtgttggctggagccatattcttcgccggagctatccttatgggatgtcccctaactacgctttcctcatgt

SEQ ID NO: 120081 - DNA, 1085 bp, Arabidopsis thaliana
  unsure (1)..(1085): unsure at all n locations
tccgggtcgacccacgcgttcctggtgctctgtttcactgtgcgtgatcgggaagaagaagaaaatgttggcgattttcgacaagaacgtggcgaaaacacccgaggctcttcagggtcaagagggtggatcggtttgtgctcttaaagataggttcttgccgaaccatttctcctctgtttatcctggtgctgtcaccatcaatctcggatcttctggtttcattgcttgctctctcgagaaacagaaccctcttcttcccagattgtttgctgtggtggatgatatgttctgcatattccaaggacatatagagaacgttccaattcttaagcaacaatatggactaaccaaaacagctacagaggttaccattgtgattgaagcctacagaactctaagagatcgtggtccgtattcagctgaacaagttgttagagattttcaaggcaaattcgggtttatgctctatgactgctccacacaaaatgtcttccttgccggggatgtagatgggagtgttcctctctactggggaaccgatgctgaaggacatcttgttgtttctgatgatgttgagactgtcaagaagggttgtggtaaatcctttgcgccattccctaaaggatgtttctttacctcatctggaggtttgaggagctatgagcatccatcaaatgagttaaagccggtaccaagggtagacagttcgggtgaggtttgcggtgtaacgtttaaagtggattctgaggccaagaaagaagcgatgcctagggttgggagtgttcagaattggtctaaacaaatctgaactagctgaaaaaggcttgttttattttttacttgttggactcctgtggctgtgttccacagatttactcttttcctgatattctcactgtagccattctaaggactaatggtgctcttattgctattgtacctgtacttggtaacaaggaagctaagaataaaatattttataaacgtctaaaaaaaaaaaaaagcaaaagnnnnnnnnnnnnnnnnnnnnnnnnnnnnnnnnnnnnnnnnnnnnnnnnnnnnnnnnnnnnnnnnnnntcann

SEQ ID NO: 120082 - DNA, 833 bp, Arabidopsis thaliana
  unsure (1)..(833): unsure at all n locations
tgatacgctnnnnnnnnnnnnnnnnnnnnnnnnnnnnnnnnnnnnnnnnnnnnnnnnnnnnnnnnnnnnnnnnnnnnnnccacgcgtccgcccacgcgtccgaaaacagctacagaggttaccattgtgattgaagcctacagaactctaagagatcgtggtccgtattcagctgaacaagttgttagagattttcaaggcaaattcgggtttatgctctatgactgctccacacaaaatgtcttcgttgccggggnatgtagatgggagtgttcctctctactggggaaccgatgctgaaggacatcttgttgtttctgatgatgttgagactgtcaagaagggttgtggtaaatcctttgcgccattccctaaaggatgtttctttacctcatctggaggtttgaggagctatgagcatccatcaaatgagttaaagccgggtccaagggtagacagttcgggtgaggtttgcggtgtaacgtttaaagtggattctgaggccaagaaagaagcgatgcctagggttgggagtgttcagaattggtctaaacaaatctgaactagctgaaaaaggcctgttttattttttacttgttggactcctgtggctgtgttccacaaaattactcctttcccgaaaatctccccggaacccatttaaggactaaagggggttctaatggtaatggacctggacctgggaaccaagaaacttagaaataaaaaatttaataacgtctaaaaaaaaaaaaaaaaaaggcgcgccgctctagagggatcccaagcttacgtacgcgtgcatgcgacgtcatagctcttctatagtgtca

SEQ ID NO: 120083 - DNA, 518 bp, Arabidopsis thaliana
  unsure (1)..(518): unsure at all n locations
nnnnnnnnnnnnnnnnnnnnnnnnnnnnnnnnnnnnnnnnnnnnnnnnnnnnnnnnnnnnnnnnnnnnnnnnnnnnccacgcgtccgcggacgcgtgggcgaagccgacttcacgtcacgattacttacttccacgttacattttgtcgtgttttcttccttccgtttccttctctggcaagtctgcttcgtacgtacgctctcgtcattcccacttcacactttctactttttaccaaatcctatcctcaactctaattcccaccatttctgatccacgatttcaaattgggtggttggaagcagtgtttgtgctgtaattggatctgatctgatcggattcgattgaaatttggatcccatggagaagcacgacgaggaaaacggtctttgcaaggcggaatctgttgatggtagccttgatgtttggagttgtcagaattctgattcttcttccgctgatcaccttgtcgttatggtccatgggatcttgggaagtacggatgattggaagtttg

SEQ ID NO: 120084 - DNA, 405 bp, Arabidopsis thaliana
ggctccaaagattccaatcattgcagatgcagatactggtggaggaaatgctctcaatgttcaaagaaccgtcaaggacttaatcgcagcaggtgctgctggttgcttccttgaggaccaggcatggccaaagaggtgtggacatatgcgtggcaaagaggtcatacctgcggaggaacacgctgctaaaatagcatcagcaagagacgctattggagatgctgacttttttctaatcgctaggactgatgctcgtgcactttccgcaaaaacaggactttcagacgccattgaccgtgctaatctttatatggaggcaggagctgatgcttcctttgttgaggcaccgagggacgatgacgagcttaaggaaatcggaaggcgcacaaaaggttacagactgtg

SEQ ID NO: 120085 - DNA, 533 bp, Arabidopsis thaliana
tctcggacgcgtgggcggacgcgtgggctgtggaggaattgggtgagctcggtggggtttcatggttgctgaagataactcgagagaccgagtgcaagcgaaacaaagagaatgcgatagtgatactgcatactatatgtttcagcgacaggacaaagtggaaggagatcaaagaagaggagaatgctcatggaacgataacaaagctttcgcgtgaaggaacttcaagggcgcagaggaaagcaaacgggatattggacagactgagaaaagctatgaatctcactcatacagcctgagaaaagccttgaaatctgcaatgtaaattacctaaaatcttgtttcttttttttactttatttggctgtaagaatttttgtaaattattcatatctttaggatctgaatggttattggttttcgtatgtgagatgtaagtagagatctgtgtgaatagtttttgcgtttgatgtttctggagaaatcaatcaataaaatcaatgttggtggctttattcacaaaaaaaaaataa

SEQ ID NO: 120086 - DNA, 813 bp, Arabidopsis thaliana
acgcgtccgatagaaagcaaacataaattctctgacaatcagaaaacaaaaaaaaatcagaacaactcttatcttcttcacgagactgactaaacaatcatagatttttccgttttttgggtttcgtctggtgttactctctccttctgagttatggtgaaataatggcagcagctgaagcaagagcagtgtggcaaagaacagttaatcgttgctttgtccaagaagacgctaaaagagctcccaagttaacttattgccaatcatcttcatcctcaactgcttcttcaactaagcaagtggaagtttctggttcttctcctcgagtttctgttgaaccacggactcaatcatcttgtgcaggtttcatgcctcttcctcgaaacccgaatttccctgatctgttaccccacaacaccagactgtggagtcatcctcatcatcagtttcaggtgaataagaagcagccattggaggatgaggttaacaatcaaggtgtatctgagaagaagtctgaattgggagctggagagaaacaaggaaagtcttttaattccgaaagctttcaagagtttatagagttgatggagacaagggagagttatggttcaactgggtatgatgagtcctctgagaaaaagttaagtgagctctcttttgatcctagctcgccgtggaatcttctctcgagtgagaaagctgcaccgtggtggcgaactacggataaagacgagttagcttccttggttgcacaaagatctctagactatgttgagaattgtgatttaccaacaccgcaaaagatgaaacgat

SEQ ID NO: 120087 - DNA, 463 bp, Arabidopsis thaliana
atacttataaagtccaaatcttgaagtgcgtgcacggtgcaccacgaatccacgatccagtgagcagcagcaactccatctccggagctctagattcagataagaacaatggcgattccgatgcctactcgccagctattcatcgacggcgaatggagagaacccatcttgaagaagcgaatcccgatcgttaatccagctactgaagaggtcattggtgatattcctgcagctacaacggaggacgtggatgttgctgtcaacgctgctcgaagagcattatcaaggaataaagggaaagattgggccaaagcacctggagctgttcgtgctaagtatttacgtgctattgctgctaaggtaaatgaaagaaagacggatctggcaaagctcgaggcgcttgattgtggtaaaccattggatgaagcagtatgggatatggatgatgttgctggatgttttg

SEQ ID NO: 120088 - DNA, 401 bp, Arabidopsis thaliana
acttttcattgcaacgaagtgggctcttttcttactcttaactgccattgaaccagggcttgtcagttcttgacagagaacctcttttcattggcatatctgtcagctccactgaaaaggcttatagaacagttgatattgggccagatgctgaaaacaagatagagattccggaagttttggggtgagaagtctgatctaaggaggtttaaagatggaagaatatctgaaagcacagtttgggagactcagcagtggaccaaacatcttatcatgaaacaaattgttgaatatatccttaagcggcatctttcacttgacgtccgatgacattgtacaattagtggatcaacttgatttctctctaaactatgggggcaaagacccaatatctttatctg

SEQ ID NO: 120089 - DNA, 625 bp, Arabidopsis thaliana
  unsure (1)..(625): unsure at all n locations
nnnnnnnnnnnnnnnnnnnnnnnnnnnnnnnnnnnnnnnnnnnnnnnnnnnnnnnnnnnnnnnnnnnnnnccacgcgtccgtttaatccgtgggatggcttcatcctctaaggatctacggagttacatgattcagttaccgcctttaggggaccctgtagtgcccgaaatgctgttgaagatactagaaccttatcggaaagaaggttgcttgctggacgatgaaagagcaaaactttacgctgatgtggtcaagaaaggttatgctgcaagatttgcttttgcagcttctgtttttggtgaaacctcagaagcacttttctggttgcaacttcctcaagccattcgccatctgatgaacaagctaacgagaaggtctccgcagaaaatctcttcccctactttagactcaggagctgatgaagtagctatgccgagtaaaataccatctactggattatcgtcacctgaagccaggaagatagactctatgtgtgatggttcacttagattgatggccttttgagcgagaagaattacggacgcgtgccaatgaacgtcttccttggcatgaaaaattagacggagaagattgcattcagaaacaagtacacgagctgatatc

SEQ ID NO: 120090 - DNA, 580 bp, Arabidopsis thaliana
  unsure (1)..(580): unsure at all n locations
gggtaaaactgtaaagacagagagaagagcactccccagtctcagtggtgcggtgaggagagcttcgttgtcttccccattgcaattagggttttcaaaacgggtaatcgaattcggtggtgctcggctttgaaattgaggatgagatcctttccacttccttctacctgctgacaatgggcaactgcggtactagagacgaggctgccgtcttcactcctcaagctcaagcccaacagctccagaagaagcactcccgatccgtctcagatctgagcgatccatccactcctcgcttccgagacgactctcgcactcctatttcgtatgcccaagtcatcccctttactttgtttgagcttgagaccatcaccaagagcttccgcccagattatatactcggagaaggtggtttcggtaccgtctacaagggttacattgatgacaatctccgcgttcggcctcaagtctctccctgttgccgtcaaggtccttaacaaggagggactccagggtcaccgtgaatggcttacagaggtcaacttcctcggccaactccgtcatcncaacctcgtcaagc

SEQ ID NO: 120091 - DNA, 558 bp, Arabidopsis thaliana
tatggggacagctggtacgcctgcaggtaccggtccggaattcccgggtcgacccacgcgtccgattttagttttatattaccaaaagaaaaaaaccttatcccttctctctctctttcttctttcctctattggctgccatggcgatttctactattctctgagtctgtgatcttaaagatttgatgagacagaaacccagaaactgaaaaacaaaaacccaactcgtgatatttcgttccgaccaaatctgtctgatttgtgatctgaacaaagtacggtaatggagttgatggctaaaccaaccttctccatcgaagtctctcaatacggaaccaccgatctaccggcgacggagaaagcctcctcttcctcttcctctttcgagacaacaaacgaagaaggagtagaggaatctggtctaagtcggatctggtcaggacaaacggcggattactcatcggatagttcatcattcggaactcccggggattgcgaagaagacgaaaaagaaagcgaaaacgaaaacgatgacgtttcatcctaggaggctaggct

SEQ ID NO: 120092 - DNA, 598 bp, Arabidopsis thaliana
tcttgtgatggtatgttacgtggtgcttctattgttaatggcttgaaggtggaagaagctcttgtgatggtctatttcatggctctataactggtgttgagactggaagaagaagcttgtgtgaagacggaatgtttcatggcgttgaaggcaaacggaatcatcttctccagagtgatgacaagcttggtacttactcgcctgacaacctcagaaatggtatggttagattctacttgacgccattaaacagccatatgacaagcaagtccggtaaaagtaggctgatgaattagtctgatctctgattgttcagttcatgatggactatattcaaactgtgttgtaattagcaattacccttgtgtgttacttatttctcccactgttctatagatatatgaactaaaatcatatgaccatgttgttctctcttctttttccttttctactttttatgtgtattaatgctcttaaagagttcaatacaatagtgattttgtttaaaaaaaaaaaaaaaaaaagggcggcccgctctagaggatcccaagcttacgtacgcgtgcatgcgacgtcatagctctgctcatagttgtcc

SEQ ID NO: 120093 - DNA, 1211 bp, Arabidopsis thaliana
  unsure (1)..(1211): unsure at all n locations
cgctctatacgactcactttanggaaagctggtacgcctgcaggtaccggtccggaattcccgggtcgtacccacgcgtccgttcgattccccattgtaccggatttgatagaggatgaagaagaagaagatgatgagggtaagaagctcgttgaagaagaaatcgaagatggagagcagaagacgatgaaggagttaatagatctggaatcgagaaatcaacaactgaagaacaacggcaaagattcggtttttagcagaacactcaggaagttttcactcaaacatcatcgaaaaattccagattccgggaacagtcttggtcgtcgttcatgtgatgtagatcctaggttgtctcttgacgcaggtcgagtctctttcgacgagcctagagcttcatgggatggatgtttgattggaaagacatatccaaagctgatacctttgtcctctgtgactgaagacgttaaagcctcgccggagaagataaccggtgagaaggtagaggaagatgagaagaacaatccaggtgggacagctcaaacgagggattactacttggattcacgaaggagaagaagctttgatcgatcatcgagacatggtttgcttgaagttgatgaattgaaagctatttctaatgctaaggtatcacctgaaactgttggtttgtttcatggagcgaagttgcttgttactgagagggaacttagggattcgaattggtattctattaagaattacaaaccggagagcttggagttaggttctaaaggtgttggttgcgttgctgctggtgaggtgaagaagcatgatggttttgggttgaagaagagcggaaagaactggtctaaaggatggaacttttggggattgattcagaggaaaactgatgtggcgaagaacgaaatgaaaaccgagcaaagtttgaaacttggaggaaatactatggagggttctcttgctgagtctttgttgaagcttaagagagtggcttaaggagaaaccaatggtgatgtcagtgagaaactcataagaagttacagcgttagtgcgagaaagtcttgtgatggtatgttacgtggtgcttctattgataatggctttgaaggtggaagaagctcttgggatgggctatttcatggctctattactggtgtcgagactggcagaagaagcttgtgtgaagacagaatgtttcatggcgttgt

SEQ ID NO: 120094 - DNA, 1151 bp, Arabidopsis thaliana
  unsure (1)..(1151): unsure at all n locations
cactgtcacagcgagagactcatacaacttccttgtcaactggttcaagagatttccccagtacaagtcacacgacttctacattgccggagaaagctacgccggccattacgtcccacaactttcggagctcatctacaaagaaaacaagattgcgtcgaagaaagatttcattaatctcaagggtttaatgataggaaacgcgttattggatgacgaaacggatcaaaaggggatgatagaatatgcatgggatcacgcggtgatatcagatgcattgtacgagaaagttaataaaaactgcgatttcaaacaaaaacttgtgaccaaggaatgcaacgacgctttagatgagtattttgatgtatacaagatccttgacatgtacagtctgtacgctccaaagtgtgtccccacctccacgaactcctctacttctcattcagtcgccggaaaccgccccctacccgcattccgaagcattctacgaccccgtctcatctctcacaatgaaggatggaggaggatggccgccgggtacgatccatgtgcatcagagtatacagaaaaatatatgaacagaaaagatgttcaggaggcacttcacgctaatgtcaccaacatctcttacccttggactcattgcagtgacactgtctcattctggtctgacgctcccgcttctatgcttccaaccttaagaacacttgtttcagcgggattacgcgtatgggttttcagttgggatacaggcgggcggatccccgtgccgcgcaccaaaaaatcccttaaaaaggtaagttttaaaaaaagtccaagctgggccccctgggaccaccaactacaaggccgaaggttgaccgttgaagtataccgtttaaaggttggtacgggtaaaagaaccggaccaccaggttctgcctttaaaaccaaaagaagttcttaagctcattcttcatttttaggccattaagaaactccgaccttttcccttttgaaattttccctacccccagatttaaggttcttaaaataatcctaaaaccaataataaccggatttgaccaaaaaaaaaaaaaaaaggcggcccgctctaaaggatccaagcttacgtacgcgtgcatgcgacgtcatagctctnctataggtca

SEQ ID NO: 120095 - DNA, 551 bp, Arabidopsis thaliana
  unsure (1)..(551): unsure at all n locations
nnnnnnnnnnnnnnnnnnnnnnnnnnnnnnnnnnnnnnnnnnnnnnnnnnnnnnnnnnnnnnnnnnnnnccacgcgtccgctttaaacctcttagagaagcacttaaagatccaggcgactttcttctaagtgacttttcaaagtttgaccgaccacctcttctccacttagcattccaagcacttgataggttttcgtctcaagcaggccgatttccgtttgctggttcagaagaagatgctcagaaactagtggaaattgcagttgacattaatgagggtttgggtgatgcaaggttggaagatgtcaactctaaactgttgcggcatttggcctttggatccagggctgttctgaatcctatggctgcaatgtttggtggcattgttgggcaggaggttgtcaaggcatgctctgggaaattccatcctatctttcagttcttttactttgattcggtggagtcactccccaaggaacctcttgatgcatcagagtttagaccacaaaatagccgttacgatgcacagatctctgtatttgggtctac

SEQ ID NO: 120096 - DNA, 546 bp, Arabidopsis thaliana
  unsure (1)..(546): unsure at all n locations
cnnnnnnnnnnnnnnnnnnnnnnnnnnnnnnnnnnnnnnnnnnnnnnnnnnnnnnnnnnnnnnnccacgcgtccggagaacggtacagtccgttgccggtgtgagaactctgcgatgctcggtgagagaaagaacgttaatctcccaggtgttgttgtggatctcccaactctaactgagaaagacaaagaagacatcatgcaatggggagtcccgaatcaaatcgacatgattgctctgtcttttgtcaggaaaggttcagacttggttcaagtccggaaacttctaggaaagcacgccaaaaacattcttctcatgtctaagggtcgagaaccaagaaggtggtggcaaattttgatggacattttggtcaattcagacgctttcatgattgctagaggagatctgggcatggaaatcccgattgagaagatcttcttagctcagaaggtgatgatctacaaatgcaacatccagggaaaacctgtggtcacagcaactcagatgctcgagtccatgatcaaatctcctagacccacaagagcc

SEQ ID NO: 120097 - DNA, 521 bp, Arabidopsis thaliana
ctcaggcacttgtagcacgtcgtctctcctttggtttctctccttatattcgacgagtgactccgattggatcgctatttcgtcatttctcactttccaaaaagaaaaaaacgaatctctctccaccatcatcacctttctccttcacttgcctcagatctggctgcgatttcaaatcttccttagtttctctcgcatcgctcggccgttgacggtcccgtcctttccgtggatctgattctggccccggattctctcgccgcgatctgaggtcaaacatggcggctgctaacgcgcccatcattatgaaggaggtcctaacgcttccgagcgttgggatcggtcaacagttcatcacctttacaaatgttactatggagtctgataagtacatatgtgtacgagagacggcaccgcagaacagtgttgtaattatcgatatgaatatgccgatgcagctcttaaggaggcctataactgctgattctgctcttatgaacccaaacttcgggttccttgcc

SEQ ID NO: 120098 - DNA, 2666 bp, Arabidopsis thaliana
  unsure (1)..(2666): unsure at all n locations
tgatctttgtgataacaatcttccaccatgggaacaaagtttttagctctgggtttgtctctgtgtcttgttctctcaagcttctatcaagtttcttgccaggatgaaggaactggaagtttgagtactttagatctaattgagcatgaatatcaaactagtgtcaattctctccaaggcaatgaagcagtagatcaaactgagaccagtggtcagaaaaacagtacagtgtctgataacaacactatttctttgtctctatctgaagaacctgcattggaaactcttaaagaatctgttgatacatcagctgagttaggagctgttactgatgaagtcgataaaccttcaagtatgttggaccatattgaacttgagttcgaagcacatatcaatgaacttaaagaagctggatctgatggtatcaacaaagttgaggaatctaaagatgatgaagaagctgcaaggagacataaaatgttggaagccattgaacgtgaatttgaagctgctcatgctggatttgaacaactaaagactgatgattccgcccaaggattagatgatgaacaatctgcaaagagacaaagcatgttggacgagattgaacgtgattttgaagctgctacaaaaggtcttgagcaactaaaggctgatgatttaactggaatcaacgatgaagaacacgctgcaaagagacaaaagatgcttgaagagatcgaaagagagtttgaagaagctacaaaaggtcttgaagaactaaggcattctacctcaagcacagatgatgaagcacaatcttgcagagagacagaatatgctagatgagatcgaacgggagttttaagctgctacaagtggtcttaaagagctaaagattaatgctcacactgtcaaagatgatgttgatgataaagaacaagatgccaaaagacaaagtatgctagatgcaattgaacgtgagtttgaagccgttaccgagagttttaaacaacttgaagatatcgccgataacaaagctgaaggagacgacgaatctgcaaagaggcaaagtatgttggatgagattgaacgtgaatttgaagctgctacaaatagtcttaagcaactaaaccttgacgatttcagtgaaggagatgacagtgcagaatctgcaaggagaaatagtatgcttgaagctatcgaacgcgagtttgaagctgctacaaaaggtcttgaagagctaaaggctaatgattcaaccggcgacaaggatgatgatgaacacgttgcaaggagaaaaattatgcttgaagctattgaacgcgagtttgaagccgcgacaaaaggccttgaagagttaaagaatgaatcagaacaagctgaaaacaagagaaacagtatgttggaagcattcgaacgcgaatttgaagctgctacaaatgcaaaggctaatggagaaaactctgcaaagaatccatcaaccataagtactacagtgcagaaatcttctggcggatacaatgctggtttagaaggtcttctaaagcctgcagatggtgtatgtggttgtttcaacaaggagtaaagatggtcttcaggcagacactgattcttcgattaacatagcggggatactcgcagaagnatccaattnncagggctcaggggccttttggctcaccacatcattgaacaatcttgtttgatactcatagaaaagaaacgtcctcaaaggtaggctcagtccttggctcatcttcatcagttacttctaccacaagcgaatcagcggctacatcagagagcatagagagcttaaagcaaacactaaggaagctacgcggtctaagcgcacgtgatctcgtaaaccacccgaatttcgatgcgattatagcagccggtacacgttacgaggtactcagctcagcttctattggttacatctctttgctagccaaatacaaaaccgtcattaaagaaggactcgaggcttctcagagagtccagattgctcaaacccgagccaaactgctaaaagaaaccgcaatggagaagcagagaaccgtagactcggttttcgcagcagcaaagaccactgctcaaagaggagacgcgttgcacatcagaatcgtagcgatcaagaaactgttggcaaagctagaagcagagaaagtggacgttgattcaaagttcacctctttaacgacgagtctgtcagagcttctcaaggaggcgtcacaggcttacgaagagtatcacgaggcggtgcataaggcaaaggacgagcaagcggctgaggaatttgcggtggagacgacaaagagagcagaacatatttgggttgagtttcttagttcacttaattgaactaatgagattcttgattgtggttaaagcacatgttcaattagttgtggttcttgtgttttattttcttgtgttgttttgtttgagactttgtttgttgcttatatcaggggagagaggttgaaaaacctttgagagagatagataaatgagagatttgtgaaacacaaataatgttttagtcgtcttataataaaactttttttttttttataaaaaaaaaaaagggccgcacccgtagnnnnnnnnnnnnnnnnnnnnnnnnnnnnnnnnnnnnnnnnnnnnnnnnnnnnnnnnnnnnnnnnnnnnnnnnnnna

SEQ ID NO: 120099 - DNA, 961 bp, Arabidopsis thaliana
  unsure (1)..(961): unsure at all n locations
tcnnnnnnnnnnnnnnnnnnnnnnnnnnnnnnnnnnnnnnnnnnnnnnnnnnnnnnnnnnnnnnnnnnnnnnnccacgcgtccgcccacgcgtccggtttttagctctgggtttgtctctgtgtcttgttctctcaagcttctatcaagtttcttgccaggatgaaggaactggaagtttgagtactttagatctaattgagcatgaatatcaaactagtgtcaattctctccaaggcaatgaagcagtagatcaaaaacctgcattggaaactcttaaagaatctgttgatacatcagctgagttaggagctgttactgatgaagtcgataaaccttcaagtatgttggaccatattgaacttgagttcgaagcacatatcaatgaacttaaagaagctggatctgatggtatcaacaaagttgaggaatctaaagatgatgaagaagctgcaaggagacataaaatgttggaagccattgaacgtgaatttgaagctgctcatgctggatttgaacaactaaagactgatgattccgcccaaggattagatgatgaacaatctgcaaagagacaaagcatgttggacgagattgaacgtgattttgaagctgctacaaaaggtcttgagcaactaaaggctgatgatttaactggaatcaacgatgaagaacacgctgcaaagagacaaaagatgcttgaagagatcgaaagagagtttgaagaagctacaaaaggtcttgaagaactaaggcattctacctcaagcacagatgatgangcaccaatcttcaaagnggcagnatatgctagatgagntccgancgggngtttaangcttctcaagtngtcttaaagngctnanggttaattctcnactgtcaaagttgttntnntnntaangccaggtnccaaaggcaagtttcttgtcaattaccgggttttgcctacccggtttttc

SEQ ID NO: 120100 - DNA, 621 bp, Arabidopsis thaliana
  unsure (1)..(621): unsure at all n locations
gttcccgannccccantttcccnacccccggccccaaccttctnaaanaacccccaantgngnaccnngggnaccccgtagcccccggttttcnccacncancaaaggcccaccttgctcaaaagnngnaggccccctttncaccatcagaaatcngtagccaatccaaggaaaccttgtttgccaaaagcttagaanccagaggaaagtgggccgttgattcaaagttcacctctttaacgaccgagtctgtcagagcttctcaaggaggncgtcacaggcttacgaagagtatcacgaggcggtgcattaaggcaaaggacgagcaagcggctgaggaatttgcggtggagacgacaaagagagcagaacatatttgggttgagtttcttagttcacttaattgaactaatgagattcttgattgtggttaaagcacatgttcaattagttgtggttcttgtgttttattttcttgtgttgttttgtttgagactttgtttgttgcttatatcaggggagagaggttgaaaaacctttgagagagatagataaatgagagatttgtggcggccgcgaattcgatatcaagcttatcgatacaattgaccaagggggggt

SEQ ID NO: 120101 - DNA, 1041 bp, Arabidopsis thaliana
  unsure (1)..(1041): unsure at all n locations
ccaattaccaaaatcctcggcgacaaagaggagagatagagagagagaaagaggcgaaaataatggcgtcgatccctccgccggagcttgacaacgactcactggcgtcatcgccgagatcggagtacgatagtcagccacgcgtacggttcatgtgtacttttggaggaaggatcttgccacgtccgccggataatcagctctgttacgtcggcggcgataatcgcatggtcgctgttcatcgtcacactactttcgcctctctccttagtaaacttgctaaactctccggtaaaagcaacataagcgtgaagtaccagctaccaaacgaagatcttgacgcgttgatttccgtatcaacggacgaagatgtagagaacatgatggacgaatacgaccgcgtcgcacagaatcaaaacccacgcgcctctcgtcttcgtctttttctcttcaccaaaaacgtcgccggagaagaagataacgatagtcgagctagcagtatcagctctctcctcgatagctctgttaatcgggagcaatggttcctcgacgctcttaacctcggttcttccgccgccgcaaccgcggtatctaacggtgggtccggtagagtctttgagcgagttagatctgaagtctcgtcgattgtttctgaagttcctgattatctctttggattggataatttcgatgaaactgctccgccgcatgagcttcgtgatcgtgatccgagagctaagatccaacgagaagtctcgacgctttcggatcctggttcgcctcgtcgcgatgttccttcgccgtatggttcgacgtcttcggctcctgtnatgcgaatatctacaacggaacttccaccaccagtttttattaaancggaaagtccagaaccggttttgnctccgaaatcaatcctcaaccggacaagtaaatgaacaggtaatctcccggtaaactcggaatgnaatatgccctggccaggccaanaggtttattaccagggtanaccattaccaattaccggttttnangtctnggggc

SEQ ID NO: 120102 - DNA, 964 bp, Arabidopsis thaliana
gaaggagaagaatatatttgactcagagagagattcattcagtaatggcagcctcaggcacctctgctactttcagagcctccgtttcttcagctccttcctcttcttcccaattgacccatttgaaatcacccttcaaagctgtcaaatatacgcctctgccatcgtctcgctccaagtcatcatccttctccgtctcctgcaccatcgccaaggacccgcctgttctcatggccgccggatctgacccggccctgtggcaacgacccgattcgttcggtcggtttgggaagtttggtgggaagtatgtacctgaaacccttatgcacgctctatctgagcttgaatccgctttctatgctcttgccaccgacgatgatttccagagagagttggctggaatcttgaaggactatgtgggtagagaaagtcctctgtattttgcagagaggcttacggagcattacaggcgcgagaatggcgaagggcctcttatatacttgaagagagaagacttgaatcacacaggagctcacaagattaacaacgctgtggctcaggctcttcttgctaagcggttggggaagaagaggattattgctgagacaggagcgggtcaacatggtgtggctacagctactgtgtgtgcccgttttggtttggagtgtattatctatatgggtgctcaagatatggagagacaagcactcaatgtgttcagaatgcgacttcttggtgccgaggtgagaggagtccactctggaacagcggcattgaaggttgcggcatctgaagcgataagagattgggtgacaaatgtggagactacccattacatattgggatctgtggcgggtcctcatccttaccccatgatggtcagagactttcacgctgtgattggtaaagaaacaaggaaacaagcgttggagaaatggggcgggaagccggatgtcttggtggc

SEQ ID NO: 120103 - DNA, 818 bp, Arabidopsis thaliana
  unsure (1)..(818): unsure at all n locations
gaaaacccgggccggccgacgcgtacgggcgatttcttcttcttcctcctctatatgtttcaaccccactcgatttcacacagctcgacatatttcatctccgtcgcgtctcttcccagtcaccagcttctcccctcgctctctccgtttctccgacagacgatctctcctatcttcctccgcctctcgcctccgtctttctcctctatgcgttcgtgattctcgagcagctgaagttacacaacgatcatgggaagactcagttctaaaaagcgaaaccccggtgttagtagaattctacacgagttggtgcggtccatgtcggatggtccacaggataatagacgaaatagcaggggactatgctggaaaactaaactgctatctccttaatgcagacaatgacttgccggtggctgaagagtacgagataaaggctgtgccggtagttctgctcttcaagaacggggagaaacgggagtcaatcatggggacaatgcctaaagggttctatatttccgccattgaaagagtcttgaactcatgaagaaggtaacaatcgttgatgagaactctcactaccactttgattaaaaatattgttggaagattatcatcatcgctccattgcgatatggttgatgtctttgtttcttcttttattctctgtgaatataactgttgggnttgtggaaagatagctcaggaagtattgtgaatacataaatattccttcttcttattgatgnttttagtgttctatattttctcttctttgaacttgtttttataggttactactgttgttgcctttaaaa

SEQ ID NO: 120104 - DNA, 839 bp, Arabidopsis thaliana
atgatattggtcgggaacaagcagcaaataaacctcttttaaagactgtgttccaggttatgatgcggttgtttagtccgcggaagacaactttgatgtttgttataagagataaaacacggacgccactggaaaatttagaaccagtgctgagggaagacattcaaaagatatgggattcagttcccaagcctcaggcccacaaagaaactccacttagcgatttcttcaatgttgaagtagttgctctctcgagttatgaagaaaaagaagagcaattcaaagagcaggtctacaatttgagacaacggttcttccaatctgtcgcacctggcgggcttgctggtgatcgacgaggagttgtccctgccaatgcttttgcttttagtgcaaaacagatgtggcaagtcatcaaagacaacaaagacttggatcttccagcacacaaggtcatggtagcaactgtgcgatgtgaggaaattgccaatgaaaaattctctagttttatcgcgaatgagaattggcgcgagttggaagaggctgtacagtctggtcctgtttccggatttggaagaaagctgagctcaattctccaagcaagcttatcagagtatgacacagaagcgacatactttgaagaaagtgttagatcatccaagaggcaacagctgcaagaaaagttattgcaacttgttcaaccaactttccaagacgtgcttggacatttgagggctggagcacttgaaaacttcaagaatgcttttgagaaggccttggatgctggagaagggttttcatcatctgcgaaatcctgcgctcagtcatgcatatctaagttt

SEQ ID NO: 120105 - DNA, 682 bp, Arabidopsis thaliana
  unsure (1)..(682): unsure at all n locations
gannnnnnnnnnnnnnnnnnnnnnnnnnnnnnnnnnnnnnnnnnnnnnnnnnnnnnnnnnnnnnnnnnnnnnnnnnnnnnccacgggtccggacaatttttatttttcatcaagtttcttagatcatcagaaatggcgtctaattcttctaacgggacgacgacgacaaagccaccacctatgccgtctcctctgcgtaattccaagttttttcagtcgaatatgaggatcttggtgaccggaggagctggattcattggttcacatctcgttgataaattgatgcaaaacgaaaagaatgaagtaatcgttgcggataattacttcacaggatcaaaagacaatctcaagaaatggattggtcatccaagatttgagctaattcgtcatgatgtgactgaacctcttttcgtcgaggttgatcaaatctaccatttagcatgtcccgcttctccaattttctacaaatacaaccccgttaagacgataaaaacaaatgtgattggcacacttaacatgttaggactagctaagcgagttggagcaagaattttacttacttccacatctgaagtgtatggtgatcctttggttcaccctcaaaccgagagctattggggaaatgtaaacccgatcggtgttagaagctgttatgatgaaggaaaacgtgttgccgagactc

SEQ ID NO: 120106 - DNA, 1270 bp, Arabidopsis thaliana
  unsure (1)..(1270): unsure at all n locations
ttgcccttacgtcctcgagctcaaccctttaattgcatctacgacagtcgtaccttttgctaggttatcgtcgtcatgatgcagcagccacctccagcttccaacggtgctgcaacagggccagggcagattccttccgaccaacaagcttacctccagcagcagcagtcgtggatgatgcagcaccagcagcaacaacaaggtcagccgcctgcaggatggaatcagcagtctgcaccgtcttctggtcaaccacagcagcagcagtatggtggtggtggatctcagaatccaggatcagctggtgagatccggtccctgtggatcggtgacttgcagccatggatggatgagaactatctcatgaacgtctttggtcttactggcgaggctacagcagctaaagttattcgcaataaacagaacggatattcagaaggttatggctttattgagtttgtgaaccatgctacagctgagaggaatttacagacttacaatggtgctccgatgccgagcagtgagcaggccttcaggttgaactgggctcagcttggagctggagagagacgccaggctgaagggcctgagcacacagtttttgttggagacttggcacctgatgttaccgaccacatgcttactgaaacgtttaaagctgtgtattcctctgtcaagggagctaaagttgtgaatgataggactactggacggtccaagggttatggatttgtcaggtttgcggatgaaagtgagcagattcgtgccatgactgaaatgaatggtcaatactgctcatcaaggcctatgcgtactggtcctgctgccaacaagaagcctcttacaatgcaaccagcttcatatcagaacactcaaggaaattcaggagaaagtgatccaactaacacaacaattttttttggagctgtggatcaaagtgtaacagaagatgatttgaagtcagtttttggtcaatttggtgaactagttcatgtgaaaatacccgcaggaaaacgttgcggatttcttcaatacgccaatagggcatgtcctgagcaagcactttctgtgttgaccggaccacaacttgggggccagagcattcgtctttcatggggtcgcagtccttccaacaaacagnctcaacctgatcaagcccngtatggtggtggntggnggggacnntgggggatncccccnccaaggtttttttggcttccnggttttcccccccccccctngggcccctnannggctttttcgggggntt

SEQ ID NO: 120107 - DNA, 1218 bp, Arabidopsis thaliana
  unsure (1)..(1218): unsure at all n locations
taggtacaactatagcaagagctatgacgtcgcatgcacgcgtacgtaagctcggaattcggctcgagctgggctcagcttggagctggagagagacgccaggctgaagggcctgagcacacagtttttgttggagacttggcacctgatgttaccgaccacatgcttactgaaacgtttaaagctgtgtattcctctgtcaagggagctaaagttgtgaatgataggactactggacggtccaagggttatggatttgtcaggtttgcggatgaaagtgagcagattcgtgccatgactgaaatgaatggtcaatactgctcatcaaggcctatgcgtactggtcctgctgccaacaagaagcctcttacaatgcaaccagcttcatatcagaacactcaaggaaattcaggagaaagtgatccaactaacacaacaatttttgttggagctgtggatcaaagtgtaacagaagatgatttgaagtcagtttttggtcaatttggggaactagttcatgtgaaaatacccgcaggaaaacgttgcggatttgttcaatacgccaatagggcatgtgctgagcaagcactttctgtgttgaacggaacacaacttgggggacaaagcattcgtctttcatggggtcgcagtccttccaacaaacagactcaacctgatcaagcccagtatggtggtggtggaggatactatgggtatcctcctcaaggatatgaagcatacggatatgcacctcctcctcaggaccctaacgcctactacggtggttatgctgggggcggctatggaaactaccagcagcctggtggataccagcagcaacagcagtgaagcatgatgtgtaagtcgtgatcgagctgaagttgtagaaagctgtaaccgtttgacaatggtgaatgaattattgaagtggatgtgtattagctcttcttgtctcagattctctcttcaactcttttttttttcttttggattatttttctttcgcgtggctattgttgagtgtccttgcaagtcataacaaaaagcttaaacccaagtgttttttgtcatgactaatatgaccattatgttttcttaaaaaaaaaaaaaaaaaaaaanaaaggnnnnnnnnnnnnnnnnnnnnnnnnnnnnnnnnnnnnnnnnnnnnnnnnnnnnnnnnnnnnnnnnnnnnnnnnnnnnnnnnnnnnnnnnngtagc

SEQ ID NO: 120108 - DNA, 896 bp, Arabidopsis thaliana
  unsure (1)..(896): unsure at all n locations
cccaggttttatccaattactcttagggaaggctggtcccccgtgcggtcccggcccggatttcccgggtcgacccacccgtccggttaaattctataacatatatgggaccaatctagaaacccctcatagtgtttgctatgggaatgagaagatgcccgttaaagatctaacgaatctaagatacttccagccgacatatatatgcgtggatggtgatggcacagtcccgatggaatctgccatggcggatgggcttgaagcagtagcaagagttggagtccctggtgagcaccgaggaatcctcaacgatcaccgtgtcttccgaatgctcaaaaaatggctaaatgtaggcgaaccagacccgttctacaacccagtaaacgattatgtcatccttcccaccacatatgaatttgagaaattccatgagaatggactcgaggttgcttccgtgaaagaatcgtgggacatcatatcagatgacaccaatatcggcacaaccgggtcaaccgtgaactccatatcagtctctcaacctggagatgatcaaaaccctcaagctgaagctcgtgcaaccttaaccgtccaaccccaaagcgatggtagcccccatgtagagcccaatcctgtaagtgtctctgttgatgcataaaaacgcatcttccctttgtaatgtgtcgccaagtgtgtctttgtgtctgtatatagcaaataaatctcatccctcggggccataagtcatcatcataataaatttcgtgttctttttcnnnnnnnnnnnnnnnnnnnnnnnnnnnnnnnnnnnnnnnnnnnnnnnnnnnnnnnnnnnnnnnnnnnnnnnnnnnnnnnnnnnnnnnnnnnnnnnnnnnnnnnnnnnnnnnnnnnnnnnnnnn

SEQ ID NO: 120109 - DNA, 565 bp, Arabidopsis thaliana
  unsure (1)..(565): unsure at all n locations
tgatactctcnnnnnnnnnnnnnnnnnnnnnnnnnnnnnnnnnnnnnnnnnnnnnnncgccctcgcgtccgctccttctccaaacaacaaaccaaagcttctctcttttcttgcttcagagagacctagaagagttatcaacatgagtcttcttctacatctctttgctctgtctctgctcatctctgtttcaggagcaaagttctccggccggccaggaatcaactatggccagctcggaaacaacctcccgtcaccgtccgactcagtcaacctcatcaagtccctaaacgcgaaacgcgtcaaactctacgacgctaacccaaaaatcctcgccgcgttaaacggcaccgacattaccgtctccgtcatggtcccaaacgagctcctcgtcaacatctccaaatccgcatcactctccgacgactggatccgatccaacatcctcccgttttacccaaccaccaagatccgttacctcctcgtcggcaacgagatcctctctttaccagactctgagctcaaatctttactccttcccgcaatgcgcaagatccaacgctcc

SEQ ID NO: 120110 - DNA, 965 bp, Arabidopsis thaliana
taggtgacttatagaagagctttgacgtcgcatgcacgcgtacgtaagctcggaattcggctcgagattctccacgtctgtcttatccacaataaaaccgaccttagcttagcttagactcattactcatttcacaaaaacagagagagaaatagagagacatactttacaggcaaacgatcgttcaccagctcagtttgttaggctggataaaccgagagccgtagacgatctctatataggcaagagagaaaagatgcgtaggtggttgtgctgtgcttgccacgttgaagaaccttaccattcttctgaaaatgaacacctcagaagccctaagcaccacaatgattttgggcatcacactagaaaaccacaggcggctgtgaagcctgatgctttgaaggagcctccatctattgatgtgcctgcattgtcattggatgagttgaaagaaaagaccgataactttggatcaaagtcattgattggtgaaggatcttacggcagagcctattatgcaaccttgaaagatggaaaggctgtcgcggtgaagaagcttgacaatgcagcggaacctgaatcaaatgttgagttcttgactcaggtctctagggtttccaagctgaagcacgataattttgttgagctcttcggttattgtgttgaagggaatttccgcattcttgcgtatgagtttgctactatgggatctttacatgacatcttacacgggaggaaaggagtccaaggagcacaaccaggtcctacgcttgactggatccaacgggtcagaatagcagttgatgcagctagaggacttgagtatttgcatgagaaagttcaacctgcagtaatacacagagatattcgatctagcaatgtgcttctctttgaagattttaaagccaagatcgctgattttaatctatcgaaccaatctcctgatatggctgctcgtcttcatt

SEQ ID NO: 120111 - DNA, 480 bp, Arabidopsis thaliana
caaagggtttcgagtccttttgagttctttgggcttcctcccaaatttctccacgagctcgacccctttcgtatcttccttctcatttttttgccaaatttattcgatccgtctttcactatgtatccgatggattctgattaccatcgccgtggtctggtggcaaacgatcgttcaccagctcagtttgttaggctggataaaccgagagccgtagacgatctctatataggcaagagagaaaagatgcgtaggtggttgtgctgtgcttgccacgttgaagaaccttaccattcttctgaaaatgaacacctcagaagccctaagcaccacaatgattttgggcatcacactagaaaaccacaggcggctgtgaagcctgatgctttgaaggagcctccatctattgatgtgcctgcattgtcattggatgagttgaaagaaaagaccgattactttggtcaaagtcattgattggtg

SEQ ID NO: 120112 - DNA, 771 bp, Arabidopsis thaliana
  unsure (1)..(771): unsure at all n locations
aagctggtacgcctgcaggtaccggtccggaattcccgggtcgacccacgcgtccgatagatgagattgatgctgttggtaccaagcggtatgacgctcactcaggaggtgaacgtgagatccaaagaactatgttggaacttctgaaccagcttgatggatttgattcaagaggagatgttaaggtcatccttgcaacaaacagaatcgagagtcttgacccagcactgcttcgacctggacggattgataggaaaatcgagttccctctcccagatatcaaaacaagaagacgtatcttccagatacacacatcgaagatgactctctcggaagatgtaaacctcgaagagtttgtgatgacgaaagacgagttctcaggagctgatataaaggctatatgcactgaggctggtctactagctctcagggagcgtcgtatgaaggtgacacatcctgatttcaagaaagcaaaggagaaggttatgttcaagaagaaagaaggcgtccctgaaggcctctacatgtaaaattataatcatatcgtcatcatcggctttcctcctccacactttgttataatacttttgcttctgcttaggatctttctggtcatataaattgatcatgttttctgatctcctccggtaaaacaattcctcatttccaaaaaaaaaaaaaaaaaaagnnnnnnnnnnnnnnnnnnnnnnnnnnnnnnnnnnnnnnnnnnnnnnnnnnnnnnnnnnnnnnnnnngaannnnnnnnnnnnnn

SEQ ID NO: 120113 - DNA, 1148 bp, Arabidopsis thaliana
gggtcggaaattccgggggggagccacgcgtccaagaatcatgggacaaggaccatcgggaggattgaatcggcaaggagatcggaaacctgatggtggagataagaaagagaagaagtttgagccggcggcaccaccggctcgtgtagggaggaagcaaaggaagcagaaagggccagaggcggcggcgagacttccgacggtgactccgtctactaagtgtaagctccggttactgaaattggaacggatcaaggattatttgttgatggaggaagagtttgtggcgaatcaagagaggttgaaacctcaggaagagaaagctgaggaagatagatctaaggttgatgatcttcgtggtacacctatgagtgttgggaatttggaagagttgattgatgagaatcacgctattgtttcttcttctgttggacctgagtactacgttgggattttgtccttcgttgataaagatcagcttgaaccggcccgcgcgtccgtgatgcataataaggttctctctgttgttgggattctacaagatgaagtggatccaatggtgtctgtgatgaaagttgagaaagctcctttggagtcatatgctgatattggaggtttagaagctcagattcaggagattaaggaagctgttgagcttcctttgactcatcctgagttgtatgaagatattggtattaaaccaccaaagggtgtaattttgcatggtgagcctggaactgggaagacattgcttgctaaggcggttgcgaattcaacatcagctactttcttgagagttgttggtagtgacgctgattcacaagtatttgggagagggtcctaagcttgtgagagaacttttcagagttgctgatgaccttttcaccatcaatcgtcttcatagatgagattgatgctggtggtaccaagcggtatgacgctcactcaggaggtgaacgtgagatccaaagaactatgttggaacttctggaccagcttgatggatttgattcatgaggagatgtttaagtcatccttgcaaccaacataaatcgagaattttggaccccagcacttgcttcgacccttggacgggattggataaggaaaaattctgagtttccccttcttccccagatgttcaaaaa

SEQ ID NO: 120114 - DNA, 629 bp, Arabidopsis thaliana
  unsure (1)..(629): unsure at all n locations
ctcccacntcagnggttcttgccaccgtccccccggggncntgaccaagccttntggctntgnccnctgtgnttgtcaggggnttttaggcaccttnaacaacngatcgnggnttgccccacatgctcgacctggacggttgntggaaatcgngtcccnntcccngtntcaaaccaggagacgatcttcccagatacncacatcgaagatgactctctcggaagatgtaaaccctcgaaggagtttgtgatgacgaaagacgagttctcaggagctgatataaaggctatatgcactgaggctggtctactagctctcagggagcgtcgtatgaaggtgacacatcctgatttcaagaaagcaaaggagaaggttatgttcaagaagaaagaaggcgtccctgaaggcctctacatgtaaaattataatcatatcgtcatcatcggctttcctcctccacactttgttataatacttttgcttctgcttaggatctttctggtcatataaattgatcatgttttctgatctcctccggtaaaacaattcctcatttccatttaggatgtctatttcgcattaaacttaaccaactgaaaccaagcccaaataaaaaaactgatcttgtc

SEQ ID NO: 120115 - DNA, 434 bp, Arabidopsis thaliana
caagagtacaagagagaaagaaaggaacctcgaactcagagaaattgagagaagagagaagaatcatgggacaaggaccatcgggaggattgaatcggcaaggagatcggaaacctgatggtggagataagaaagagaagaagtttgagccggcggcaccaccggctcgtgtagggaggaagcaaaggaagcagaaagggccagaggcggcggcgagacttccgacggtgactccgtctactaagtgtaagctccggttactgaaattggaacggatcaaggattatttgttgatggaggaagagtttgtggcgaatcaagagaggttgaaacctcaggaagagaaagctgaggaagatagatctaaggttgatgatcttcgtggtacacctatgagtgttgggaatttggaagagttgattgatgagaatcac

SEQ ID NO: 120116 - DNA, 659 bp, Arabidopsis thaliana
  unsure (1)..(659): unsure at all n locations
nnnnnnnnnnnnnatacgactcactatagggaaagctggtacgcctgcaggtaccggtcccgaattcccggggtcgacccacgcgttccgcgttaatggcgactcagatctgaagataatctcttcttcatttctggtgggcaaaatctaaaagcttttcgaattccggagctagagaatttaaaggaatccaatggatgatttcacaggattgttagcgagagacttcggattgaaacctcagggaaaatcagctcccatggcgtctcaatcgaactcttctgccgctgatttcaacactttcgcttcttcttatagcttcgccaccgccgccggtaaaaagtccgattctttgccggtgtttgacgatcctggtcgagatggtgatgatcttctcttcaaagatgtgtttagtggaccaccaccaccaaagtacggatcttcttctggtgattcacgttctccatctgctcctgcttttgactatgatgctatgttcaaggaacccaatccaaatcagcgtcgtctatgccggtttatgacaagcctgtgtatgatgatgaggatgtgtttgagtctattcctgagctcaaaatcccttccacttcttctcagtcagctaggtttgagaatgttttctcttctatctcatcttctcc

SEQ ID NO: 120117 - DNA, 783 bp, Arabidopsis thaliana
  unsure (1)..(783): unsure at all n locations
acgcctgcaggtaccggtcgggaattcccgggtcgacccacgcgtccgtgtatgtttggtgtcaagtttcatgggattgaacctgctaatcccggaacagcagagtgttttagcttaatagagaagcctcttaaccacaaagtcacttggatgatgagcaagttctcgtccttcaaccctggaaaggctcatcagtctaatgaatttgtcgttggaaccaggaaatggagacttgaagttcatccaagagggtatatggatgaaaaagacaaatcattttctgtgtatctatcagtagaagggtttgtcaacaatgcaccaatgacaaaaacttacgccaagttcaagctgcgggtattggatcaagttagctggaatcatgttgaggaatcaggtttgagctggtttgatgcagaaccttcggaccaaagtggctttgcggatttcatgcctctggggaaactaaatgaaccttatttggtaaaggataagctttatgtgggagttgagtttgaagtcgtttctaccacttattactgttagcttctaggctgtaataagtcttattgtgagctaaaaataacaagaaatgttataatgtattgaataaaatgttggagaatgtacctactgagacttggaggtggaactacattgacctagtcttagccaaagtccaaaaaaaaaaaaaaaaaaaaaaaagnnnnnnnnnnnnnnnnnnnnnnnnnnnnnnnnnnnnnnnnnnnnnnnnnnnnnnnnnnnnnnnnnnnnnngaaatgatac

SEQ ID NO: 120118 - DNA, 871 bp, Arabidopsis thaliana
  unsure (1)..(871): unsure at all n locations
cgacccacgcgtcccgcttaaaaagatatcatttgtagcttcttacaatgtcgcgaccaatccccattgaagaaatggtgaggctgttcaaaatacgtcacacaacatctcacttgttcaagatagacaacttctctttactcaaaaagcatggaatcgaaaaggtcgaatcctctgttttcgatctcgctggtcacaaatggaaactctctgtgtacccaaatgggcataagaatgctaaggggactcatgtctccatgttcttagtgaatcaagttccggtaaatgatatgcctacatatgagctcctagtcgtcagtcaactagagcgaaaatggcacacccatggacgagatgagtttgatataaatccagaaccagctagtgaggggtttttaaggttcatatctcttgctgatcttgagagaaaaggtttccttattggagattgttgtatgtttggtgtcaagttccatgggattgaacctgctaatcccggaacagcggagtgttttagcttaatagagaagcctcttaaccacagagtcacttggatgatgaccatgttctcgtccttcaaccctggaaacgttcatcagtctaatgaatttgtcgttggaacccggaaatggagaattaaagttcatccaagagggtctatgggtgaaaaagacaaatcattttctgtgtatctatcggcactagggtttgtcaataatgcaccaatgccaaaaaacttacgccaagttcaagctncgggtattggntcaaggtagctggatcatgtttnnggntcaggtttagnctggtttattcagaacctttggcccaaagnggntttcgggttttnaatnccnctggggaaacattg

SEQ ID NO: 120119 - DNA, 1606 bp, Arabidopsis thaliana
  unsure (1)..(1606): unsure at all n locations
acggcacccatttttcaccaatttctctccacttaaaaccaaccccaattctcaccaaaaatcgcaaaaaaagatttcaactttcgataaacccagatcgaaaaatcagatttttccagatcaatcagagagttagagatggagtataataacaacaatcagcaatctttttggcagttcagcgaccagctgagagttcagacaccgaatctagcgaatctgtctctcaacgactcgatctggagcacaaactctgtcttcaaagagcgtcgaaacttagacatagccgccaccaccgacaagaacaacaaccagatcgactattatcagaagaagacaacttccgacaacatcaattccaactggaactggaagtcttctggttcaaacaacgacatgggtttaggattcggacctgtgggttcaaaatccaccgtcgatttaaacccaatcgacaaattcaactcaccgttcaacgacacgtggaaattcaactcagtcaacgttaacgttaacggttactcaccgtcaagcgccgttaacggagatttcaacaaaggggtttacacgtcgatgaagaagtatgggtacaacgtcaatctaaagaacaacaacaagaacaaaggaatcgatgaagatcatcagattcagaaaggtgggaagaagaacagaaagaatcagcagaacaataataaccagaggaacgaagacgacaagaacaatggtttggacaagaggtttaagactcttcctccagcagaagctttgccaagaaacgaaaccattggtggttacatctttgtctgcaacaacgataccatggaagagaatctcaaacgccagcttttcggattgccaccaagatacagggactcggttagagcgataactccaggacttcctctgtttctttacaactactccactcaccaacttcatggaatctacgaggcagctagcttcggaggaacaaacattgagttgaatgcttttgaagacaagaaatgtcctggcgaatctcgtttccctgctcaggtgagggccataacgaggaaagtatgtttgccactggaagaagattctttccgacccattttgcaccactacgacggtcctaagttccgactcgaactcagtgtccctgaggtgctttctctattggacatttttgctgaccaaaacccttgaattgggtaataccaatgaagaacacaaaacagtggtttgttacttcaaatccagaaagagagagataccccattatacatatatgattataaggaggagtattaataataattgtctgaagaaatggtattttactagtttatacagtttctttcttaagtatattcccaggagatatgggataaatagaagatgtgctatttttgtgtgggtggatgaagaatagatctcatctccgcgcttttttctttttgtaaattatataaaataacatatgtacaaccccaaaaatagggagaaatgagatgatgaactcttatcaaaaaaaaaaaaaaaagttnnnnnnnnnnnnnnnnnnnnnnnnnnnnnnnnnnnnnnnnnnnnnnnnnnnnnnnnnnnnnnnnnnnnnnnnnnnnnc

SEQ ID NO: 120120 - DNA, 876 bp, Arabidopsis thaliana
  unsure (1)..(876): unsure at all n locations
cgcctgcaggtaccggtccggaattcccgggttgacccacgcgtccgtaccgctgcgagaagacgacagaacaatggttgggacaagaggtttaagactcttcctccagcagaagctttgccaagaaacgaaaccattggtggttacatctttgtctgcaacaacgataccatggaagagaatctcaaacgccctcctttgggattgccaccaagatacagggactcggttagagcgataactccaggacttgctctgtttctttacaactactccactcaccaacttgatggaatctacgaggcagctagcttcggaagaacaacattgagttgaatgcttttgaagacaaaaatggtcctggcgattctcgtttccctggctcaggtgagggccctcaacgaggaaaagtttgtttgcccccgggaagaagattcttttccgaccctattttgcgcccacttccacgggtcctaagtttccgactccacactcagtgtcccagagggggctttcttctattggccatttttgctgcccaaaacccttaaattgggtaaacccaatgaagaacccaaagcagtggtttgttacttcaaatccaggaagagagagatacccctttatccatatttgnttatacgccggagggaggataattattgtctgaagaaatggtattttactagtttaaacagtttcttttttaagtatattcccaggagatatgggataaatagaagatgtgctatttttgtgtgggtggatgatgaactcttatccaaaaaaaaaaaaaggttttaacccccccagcagccgctctagaggatccaagcttacgtacgcgtgggtaccatctatacgaacttctatagg

SEQ ID NO: 120121 - DNA, 633 bp, Arabidopsis thaliana
aaaaacattcttctcacaagaatcagattcaagatagaagtttttcaaacaatgtctagtcctcttggtcactttcagattcttgtttttcttcatgctttgcttatcttctcagctgagtcccgcaaaacccaattgctgaacgataatgatgttgaatctagcgacaagagtgcaaaaggcacacgatgggctgttttagttgctggatcaaatgaatattataactacaggcatcaggctgacatatgccacgcgtatcagatactccgaaaaggcggtttaaaagatgaaaacatcattgtgtttatgtatgatgatatcgcgttttcctcggagaatcctaggcctggagttatcattaataaaccagatggagaagatgtttataaaggagttcctaaggactacactaaagaagctgttaatgttcaaaacttctacaatgtgttacttggaaatgaaagtggcgtcacaggaggaaatggcaaagttgtgaaaagtggtcctaatgataatatcttcatctattatgctgaccatggagctcctggcttaatagcgatgccaactggaactggaagtcttctggttcaaacaacgacatgggtttaggattcggacctgtgggtt

SEQ ID NO: 120122 - DNA, 452 bp, Arabidopsis thaliana
gtggcgtcacaggaggaaatggcaaagttgtgaaaagtggtcctaatgataatatcttcatctattatgctgaccatggagctcctggcttaatagcgatgcccactggtgatgaagttatggcaaaagatttcaatgaagtcttggagaagatgcataagagaaaaaaatacaacaagatggtgatctatgttgaagcatgtgaatcaggaagtatgtttgaagggattttaaagaaaaatctcaacatatacgcagtgactgctgctaattctaaagagagcagctggggagtttactgtcctgagtcatatcctcctcctccttctgagattggaacttgtctcggcgatacatttagcatctcttggcttgaggacagtgaccttcatgacatgagcaaagagactttggagcaacaataccacgttgtaaagagaagagtaggatct

SEQ ID NO: 120123 - DNA, 908 bp, Arabidopsis thaliana
  unsure (1)..(908): unsure at all n locations
gggaaagctggtccgcctgcaggtaccggtccggaatcccgggtcgacccacgcgtcggttctctcaacggagaggagaagaaggggaagattgctgagatcaagtctggaatagacgaagctgatgtcttgatccggaaaatggatcttgaggcaagaagtttgcagccgagtgctaaagctgtgtgtctttctaaactaagagagtataaatctgatctgaaccaattgaagaaggaattcaaacgagtctcttccgcagatgctaagccgtcttcccgtgaagagttgatggaatccggaatggcggatctgcatgcagtatctgctgatcaaagaggaagattggcaatgtccgtggagaggcttgaccaatcaagtgacagaatcagggagagtagaagactaatgctggagacagaagaggttggcatctcaattgtccaagatttgagtcagcaacgccaaaccctccttcatgcgcacaacaagcttcatggtgtggatgacgccattgacaagagcaagaaggtgttgacggctatgtcaaggagaatgactaggaacaaatggatcattacatcggtaatcgtggctctcgttctcgccatcatcttgatcatctcatacaagctttctcattaatatactcaaaaaacattattcatcgtgattgtgtatatatatatgatggttgatttactttgtaatggcccaagtggttacttgtatttttaagtacgatgtttgtattgaagtggcaacacttttaacattcataaggtttcccaagtcttttcttttttgtcttaaaaaaagaaaaaaaaaaaagnnnnnnnnnnnnnnnnnnnnnnnnnnnnnnnnnnnnnnnnnnnnnnnnnnnnnnnnnnnnnnnnnnnnnnnnnnna

SEQ ID NO: 120124 - DNA, 641 bp, Arabidopsis thaliana
  unsure (1)..(641): unsure at all n locations
tatacgactcatatagggaaagctggtacgcctgcaggtaccggtccggaattcccgggtcgacccacgcgtccgcccacgcgtccgttgattagctttaagcaaagaggaaactgttttgcttctagatccgatccaatccaatcaaacaaaggatccgattgatcagaaaaaatccaccaaatttctcaagatcgaaacatataattgaagatgagcgacgtatttgaagggtacgagcgtcaatactgcgagctctcaaccaatctctctagaaaatgtcactctgcatcggttctctccaacggagaggagaagaaggggaagattgctgagatcaagtctggaatagacgaagctgatgtcttgatccggaaaatggatcttgaggcaagaagtttgcagccgagtgctaaagctgtgtgtctttctaaactaagagagtataaatctgatctgaaccaattgaagaaggaattcaaacgagtctcttccgcagatgctaagccgtcttcccgtgaagagttgatggaatccggaatggcggatcttcatgcagtatctcctgaccaaaggggtaaggtttggaaatttcccgggggggggttttccccattaagntgcacaantncgggggggnt

SEQ ID NO: 120125 - DNA, 528 bp, Arabidopsis thaliana
aaaacttaggccgcgcctggccccctgccgaagcctgggattccggttatcaaacacataaagttctttctcttactcatctccgccgccggcagtaaaaatatcacatcgttagggtttcacggcggagattcaagttctttgacctaggaagctttcactatcaccggagactatttcaatggcaaccatggctaggtcgtttctgcaggcgatatcgaaggatgaggcggtggctcctccgcttagagttgttcagatcgaaggactggctgtactaaagataatcaaacactgcaaggagttttcaccgacccttgtcactggacagcttcttggacttgatgttggtagcgtcctcgaagttaccaattgttttcctttcccggtcagggatgatgatgaagaaattgaagctgatggtgctaattatcagcttgagatgatgagatgtctgagggaggttaatgttgacaacaacactgttggctggtatcaatctaacagtcttggttcgtatcagactgt

SEQ ID NO: 120126 - DNA, 445 bp, Arabidopsis thaliana
ggggccacccacgcgtccgcacacgcgtccgcaaaaaaaatctccaccgctctgagagaaaaaagttggaagaggagagagagagagagcgacaacgcaccaactgttgcggctcaaagagatctcgatcgggatccacaagacggagatagatagagagagagtgagagctaacggaaatgggatctcagctacttgagtgttgcttccgtttcgtcttctactgtcactcccacagctccaactgttttccttgattgtttttcttttatctcggcgttttactcggaagcttacaacacactctctcagggatttgaaatcctcacgtttcagcacattctttgtggttcccatctattctctagccagttcggagtttgcctgaagaaatcaaatgggttcgagatacgcatctcaccagctcagcaatgggctttttgtg

SEQ ID NO: 120127 - DNA, 374 bp, Arabidopsis thaliana
cggacgcgtggggtgaaatcaaagcaaaaaagagagaaggagaggtcgtgttagataattagagcgcacttgcgagcaacaacgaacgacgacccactgattcaatctcctcctctctgcatattccttggcatcttttctggtaccgaagctgagtctctggagagtttctagatcttcttcaattctgcaattcagagcgaagatttattagtgattgattattcactctggagctcgagttctggatccgtgtggctggagggaatgttctgttaagctgattgtttaggcttgttggatcagtatagaaattgtcagattgagaaagacaacatatgaagaacggtatagctgagtgccctgcatgtcat

SEQ ID NO: 120128 - DNA, 448 bp, Arabidopsis thaliana
  unsure (1)..(448): unsure at all n locations
gataattggcaaaggaggtgaaacactcatatctatgcaggctaagactggagctagaattcaggttattcctttacatttgccccctggagacccaacgccagaacggactttgcagattgatgggataaccgaacagattgaacatgctaaacaattagttaatgaaatcatcagtggcgagaaccgtatgagaaactcagcaatgggtggaggctatccacaacaaggtggttatcaagcccgcccaccctcaagctgggcaccacctggtggtccgccagcacaacctggttatggtggttacatgcaaccaggagcatatccaggtccacctcagtatgggtcaatcacccttacgggaagtttcccctcaacaaacttcagcttggttactttgatcagtcctctgtgcccccccattaccagcaaaggggnnaaagttggt

SEQ ID NO: 120129 - DNA, 1318 bp, Arabidopsis thaliana
  unsure (1)..(1318): unsure at all n locations
tctctacgactcactatttggaaagctggtcacgcctgcaggtaccggtccggaattcccgggtcgacccacgcgtgcgagagtttcgagctatcgtattcaaccaccgatctcagatctctaaatctccgatggaccgtttgatttcagattacttcgaacggagcatcaaagctctagatgtctgtaacgccatccgcgacggtatcgaacagatccgtcaatgggagaaacttgccgatattgtgatctctgctttagatagtcaccgtccgatcggagaaggtcagctccggcgagctaagaaagctctgattgatttagcaatcggaatgcttgacgagaaagatcatccttctggaaccaatctagctcatcgtaaccgttcattcggaagagtcaaagacagtcaccaccgttcgattggtcatttcagattcttcttgagtgttcaagatcaggtcagctttaaccagttcaagcttagcgagtaacttgcaacgcctcgaccaaacgatgtcgttgctagcaatggtttagctgtaccggttacacaatgacttcggttttgctttttgtcatgtgggttttggtagctgcgattccttgtcaagaccgtggattgcaagttaacttctttgtgcctaggcatttccaatgggcagctccggttatgtcgttgcacgataagattgttgaggaatctaagagaagagataggaagaattgttgtggtttgcttaaggagattgataggattgagaagagttcgaggttgatgaatgaattgatcgattcgattcatttcccgttgaatgatgacaaggaagttgaggtgaaacagagagttgatgagcttgttcaagttcgtgaagctttgagaaatggtttggatccgtttgagaggaaagtaagagaagttttccatcggattgtgagaagcagaactgagagtcttgattctctttgatcttgcacatgtttgtctgaatatgatgaatgattcatgtttggattttttgttttgtttttgtttttctctatttatcctttttgatcacttgtaaaaaagaaactcaaagagtgtagaagtgtcatcttctctttgtgatgctgatagtgattctgttcttctttgtgtagctacttgcttagattgaagttattttttcaatgaacagttgtatcaaatacttcattgaatttgaaagattacattcaagaaaagaaaaaaacacagaaaagnnnnnnnnnnnnnnnnnnnnnnnnnnnnnnnnnnnnnnnnnnnnnnnnnnnnnnnnnnnnnnnagtccaccta

SEQ ID NO: 120130 - DNA, 574 bp, Arabidopsis thaliana
  unsure (1)..(574): unsure at all n locations
nnnnnnnnnnnnnatgatcttgccggcannnnnnnnnnnnnnnnnnnnnnnnnnnnnnnnnnnnnnnnnnnnnnnnnnnnnnnccacgcgtccgcccacgcgtccgctctctctcaatccaacaaagaaaaaaaaagtcttcttctttttttacaagtctgagaattttctacagaaacaaaaatctgattgtttttcccactttgcatctgttttgaggatgccagctacggattttcaaggatcatttggaaggtcgttgctaagtttacggcgagaccaagttgactcatcaacagtcgtctccggaagtagtagccaccacgagccaagcaccatggaggttgagctagattcgtttcaaagacaagtcgctgagaaattcatcgatctcaacgcttcttcaaacgaccttctctctctcgaatggatcggaaagcttcttgattctttcctctgttgtcaagaagagtttcgagctatcgtattcaaccaccgatctcagatctctaaatctccgatggaccgtttgatttcagattacttcgaacggagcatcaaagctctagatgtc

SEQ ID NO: 120131 - DNA, 541 bp, Arabidopsis thaliana
  unsure (1)..(541): unsure at all n locations
cnnnnnnnnnnnnnnnnnnnnnnnnnnnnnnnnnnnnnnnnnnnnnnnnnnnnnnnnnnnnnnnnccacgcgtccggacaggtaactgtgcatataaagggaaaaacagaatgttatgagtgccaaaccaaacctgctccaaagacttatcctgtgtgtacaataaccagcacgccaactaagtttgtgcactgtattgtatgggcaaaagacctgctctttgcaaagttgtttggcgacaagaatcaagataatgatcttaatgtgcgatccaacaattctgcaagctcatccaaagaaacagaagatgtatttgaacgttcagaagatgaagatattgagcagtatggtaggaagatatatgatcatgtgtttggttctaacattgaagcggctttgtccaatgaagagacatggaaaaatcgcagacgaccaaggcctatatacagtaaggatgtcttgcctgaaagtctgactcaacaaaatggaagcactcagaattgttctgttactgatggtgatttaatggtctctgccatgc

SEQ ID NO: 120132 - DNA, 861 bp, Arabidopsis thaliana
  unsure (1)..(861): unsure at all n locations
ccgctccnnnnnnnnnnnnnnnnnnnnnnnnnnnnnnnnnnnnnnnnnnnnnnnnnnnnnnnnnnnnnnncccacgcgtccgaaacaaacagagagcgagtcacgcgccgagttttcctcacttgttctcaataaatctctctctctttcttctctatcgctttcatttttctcctccagatctcgattccaatctctctccctctctacttccttcaacagaaatggaaacgttcctatttacctctgaatccgtcaatgaaggacacccagacaagctttgtgaccagatttctgatgcgatccttgatgcttgcttagagcaagatcctgaaagcaaagtggcgtgtgagacatgcaccaagaccaacatggtgatggtgtttggtgagatcactaccgctgcgaaagttgactatgagaagattgttagatccacttgcagggagattggttttatctctgctgatgttggtcttgacgctgacaaatgcaatgttttggttaacattgagcaacagagccctgacattgctcagggtgttcatggtcatttgaccaagaagcctgaagatattggtgctggtgatcagggacatatgtttgggtatgctactgatgagactcctgagctcatgccgttgactcatgtcctagccaccaagcttggtgctaagcttactgaagtgaggaagaacaagacttgcccatggttgaggcctgatggtaagacacatgtcacagtggagtacaagaacgatggtggagctatgattccgattagagtccacactgttcttatttcaactcaacatgacgaaactgtcaccaatgatgagattgctgctgacctgaaggagc

SEQ ID NO: 120133 - DNA, 553 bp, Arabidopsis thaliana
gcaagtacatggaccgaacacaatctccaaagacagctctgttcgccgtgttggcaacactccttgtcttaaccgtgaacggccagtcactttgtaacacacacaggttcaccaataacctcgccttcgcagattgctctgacctctcggccttaggctctttccttcactggacctacaatgaacaaaacggtaccgtctcaatcgcctatcgccaccctggaacctctgcttcttcttgggttgcttggggacttaacccaagtagtactcagatggttgggacgcaagctctcgtagccttcacaaacacaacaactaaccaattccaggcctatacctcttccgtgagttcctatggtacgcggcttgaacgtagtagcctaagtttcggtgtgagtggcctctccgcgactctggtcagtggcgaggttacgatctttgcaactcttgagttgtctccgaatctgatcacggccaaccagctttggcaggtgggacctgttgtcaacggtgttcctgcgagtcatcaaacctcaggagataatatgag

SEQ ID NO: 120134 - DNA, 540 bp, Arabidopsis thaliana
  unsure (1)..(540): unsure at all n locations
gccacccagaaaaaaccctcaagtcttcttcttcttcctcaatctctccacctcttttcaaaccttcttcacactctctctcaatcaatcctttttcttctcaaatctttcagttttgatctctaaatttccagaaaatgagcaacgataaggacagtttcaatgtcagcgatctcacttctgctcttaaagatgaggatcgagctggtcttgtcaacgctcttaagaacaagctccagaatctagctggacaacattctgatgtgctcgagaatctgactcctaaaattagaaggcgtgttgaggttttgcgggagattcagggcaaacatgatgaaatagagacaaaattccgcgaggagagagctgctcttgaagccaagtatcaaaagttattttcaggcctttgtattaaccaggggnttatggngnttttnaatgggggcnccttaagttnaagggggtcccanngggtnctaaggtggcccnnggggcggggaaacnttcagnngggnangggnccctaggttttgggtgnct

SEQ ID NO: 120135 - DNA, 442 bp, Arabidopsis thaliana
cccacgcgtccggcaaatccaagagaacatggcggataaatcagaaaccactccaccgtcaattgatggcaacgttctcgtggccaagtcactctctcatctcggcgtaacccacatgttcggcgtcgttggaatccccgtcacgtctctagctagccgagctatggctttaggtatacgtttcatcgccttccacaacgaacaatccgctggttacgccgcttcagcttacggttacctcacgggtaaaccgggtatccttttaacggtttcgggtccgggttgtgttcatgggctcgcgggtctttccaacgcttgggttaatacatggccgatggtgatgatctctggttcttgtgatcagagagatgttggtcgtggagatttccaggagcttgatcagatcgaagcggttaaagctttctcgaaattatcagagaaa

SEQ ID NO: 120136 - DNA, 576 bp, Arabidopsis thaliana
  unsure (1)..(576): unsure at all n locations
cagctccnnnnnnnnnnnnnnnnnnnnnnnnnnnnnnnnnnnnnnnnnnnnnnnnnnnnnnnnnnnnnnnnccacgcgtccgcccacgcgtccgcggacgcgtgggtttcagacaattttggttctttttcttttgtatttatacattcttaatcttctacaaaacaaaagaagaaagacacatttcgttagtagaaatggcgggaaacggaaacgaaagtaccggtggagacttcagtttctcggctgcggcggcccgtgatgcgcttccgaggatcacgactgagaagggcggcaaatctccagggccggcagacgtctgccaggatgacatcgcaccgcgggtcaactttcagaccatcgacgagcttcacagtctccagaagaaacgatctgcccctaccactcctcttagagatggcagcgccagcggagtcagcggaactagtggtccgactactcctgtctccagcgagaccatgcttcaatccgtcagtgcatcgttggcttcgttgacgagagagacaggaccgaagttaataagaggagatccgacttcggcagctaaagtagcac

SEQ ID NO: 120137 - DNA, 781 bp, Arabidopsis thaliana
gtgtgcccgtcccgattttagtttcgggctcgccccacgcgtgcgaagactctcttttcttgcggctctatctctctttgctttgtctcttccattagtaattgcttccgatccaagcccccttcaagacttttgtgttggtgtcaacacaccagcagatggcgtgtttgtgaatggaaagttttgcaaggatccaaggatagttttcgcggatgatttctttttctcgagcctcaacagacctggaaatacaaataacgcggttgggtccaacgtgacaaccgtcaatgttaacaaccttggaggactaaacactcttggtatctcacttgttcgtatagactatgcacccaacggtcagaacccacctcacacccacccacggtgccaccgagatcttggttgttcaacaaaggaactctactttgtaggggtttattctcatcaaaccaaggcgggaaacccgtcttttcgcccaaacactcaacgtgggtgacgggtttgctgtttccagaaagactcatccatttccagttcaacctacgaggaacttcagcagttgcaatcgctgctttgagcacccaaaacgcaggtgttatcacaattgctaacacaatatttgggtctaaccagatgtatacccgattgttcttgccagagcattccaaatggatgttaatgccggtcaggaattttaacaagccaaggtttttaataattgtgtaataggaaaatattagttcttttggagaattaacttttaatttaattacaaagcctt

SEQ ID NO: 120138 - DNA, 385 bp, Arabidopsis thaliana
accacacaaataagaaactaacaaaaacctttttgtcttctacaaatcgtctccatacatacatgtgacgataaatagtctctcttttcttgcggctctatctctctttgctttgacacttccattagtaattgcttccgatccaagcccccttcaagacttttgtgttggtgtcaacacaccagcagatggcgtgtttgtgaatggaaagttttgcaaggatccaaggatagttttcgcggatgatttctttttctcgagcctcaacagacctggaaatacatataacgcggttgggtccaacgtgacaaccgtcaatgttaacaaccttggtggactaaacactcttggtatctcacttgttcgtatagactatgcacccaac

SEQ ID NO: 120139 - DNA, 1169 bp, Arabidopsis thaliana
  unsure (1)..(1169): unsure at all n locations
tgatttgccggcannnnnnnnnnnnnnnnnnnnnnnnnnnnnnnnnnnnnnnnnnnnnnnnnnnnnncccacgcgtccgcccacgcgtccggcttcgtggaaattattttctctttctcttccattattatcttaaagtgagaaatcaataagatgttggagaaagagtttttcacggagtatggtgaagcaagtcaatatcagatccaagaagttgttggcaaaggaagctacggagttgttgcttctgcggaatgtccacacacgggaggcaaagtagccatcaagaagatgacaaatgtgtttgaacatgtctcagatgctattcgtatcctcagagagatcaagcttctcaggcttcttcgacatcctgatatcgtggagatcaagcatatcatgcttcctccttgtcgcaaggaattcaaagatatatatgttgtttttgagttgatggagtctgatcttcaccacgttcttaaggtaaatgacgacctcactcctcagcatcatcaattcttcttgtaccaacttcttcgtggcttaaatttcatgcactcaggtaagggttctttgtccccttggtgttttctcggcctcttacattttcatctgaagatatattgggtgtttttctttaaatcttgcttcttatcatattttggtccttgattatagctcatgtgtttcctagagatctcgaagcctaagaacatcctcgctaatgctgattgcaaaatcaagatctgtgatttaggacttgctcgtgtctcctttactgattccccttctgctgtgttttggactgactacgttgctacaagatggtaccgtgcgccagagctctgtggttccttctattctaactacacgccggcgattgacatgtggagtgttgggtgcatatttgcagagatgctaactggaaaacctttgtttcctggcaaaaacgttgtgcaccagctagaactcgtgactgatctgcttggaactccgtcgccgataactctatccaggattcggaatgagaaggctagaaagtatttgggaaacatgaggcgaaaggatcctgtacctttcacccataaattccccaatatcgatcctgtggcgctgaagttacttcagcgtttgatcgcttttgacccaaaggaccgtccctctgcagaaga

SEQ ID NO: 120140 - DNA, 964 bp, Arabidopsis thaliana
  unsure (1)..(964): unsure at all n locations
cccangaagaagatttgtattgatggaatnnngttgatgttgttntgaacagtgagaaatcaataagatnttggagaaagagtttttcacggagtatggtgaagcaagtcaatatcagatccaagaagttnttggcaaaggaagctacggagttgttgcttctgcggaatgtccacacacgggaggcaaagtagccatcaggaagatgacaaatgtgtttgaacatgtctcagatgctattcgtatccctcagagagntcaagcttctcaaggcttctccgacatcctgaatatcgtggagatcaagcatatcatgcttcctccttgtcgcaaaggaattcaaaggtatatatgttgtttttgaggtgatgggggctgttcttcaccacgttcttaaggtaaatgacgacctcactcctcagcatcatcaattcttcttgtaccaacttcttcgtggcttaaaattcatgcactcagctcatgtgttccatagagatctgaagcctaagaacatcctcgctaatgctgattgcaaaatcaagatctgtgatttaggacttgctcgtgtctcctttactgattccccttctgctgtgttttggactgactacgttgctacaagatggtaccgtgcgccagagctctgtggttccttctattctaactacacgccggcgattgacatgtggagtgttgggtgcatatttgcagagatgctaactggaaaacctttgtttcctggcaaaaacgttgtgcaccagctagaactcgtgactgatctgcttggaactccgtcgccgataactctatccagggtttgttttgtttttatttttcccggaagctaaactaactctcccaatacagaggcttctctctctctatctccgagagatagacttgctttgaacgcaagtgtgtttttattagctttgtgtgtcatgaagttgtttataatgaatct

SEQ ID NO: 120141 - DNA, 900 bp, Arabidopsis thaliana
  unsure (1)..(900): unsure at all n locations
nnnnnnnnnnnnnnnnnnnnnnnnnnnnnnnnnnnnnnnnnnnnnnnnnnnnnnnnnnnnnnnnnnnnnnnnnnnnnnacaatccacgcgtgcgcaaaatcacaacaccaacaaaacaaaaaaaaggttttgatcaaagagatcactgttaaaccctcacaaaatttcctcaggactaataatctgcgatcgatcgtcgttatgataagtctctaaagaagattgatgattctggattacattatcatgggaggagcttgttcaaggaagagagatcaacaagttgaggatattttaaacagaggtgtctctggaaaatatagcaagagttcaagttcgaaatggttagctacttcgctctctaggtctggctccgatgttaaacggaagaatggagaatgcccgtcgcttatggagctctgtgtccgcaagatacaggaggacattgatagatataccaagttctctgacctacctagagatatcagtcagcagatttttgatgaattggtttattcccagaggttaactttaaagtctcttgaggcatttcgggactgtgcaatccaggatctttacttgggggaataccctggagttaatgatgactggatggatgtcatctcctcgcaagtacatcgttgctttctggtggattttcggggtctgatatcacagactctggactggttctttaaaaggttgacaaacctggaattttaacttaatttcttgaccagaatccaaccgtggcttgtgctctagcggctctcaatttgacagcctgacttagaagatgctgcatcctgacaggcatgcggcttatcaacttggttaacttgaagaagctagatcttgagaagtgtcctgggattgacggtgggcttgttcacctgcgag

SEQ ID NO: 120142 - DNA, 615 bp, Arabidopsis thaliana
  unsure (1)..(615): unsure at all n locations
acggacgcgtgggcggacgcgtggctttggctcggattcgtccgtcttctttcttcttagccgagtacttcggtagattagttggaacgattgatgattttgagttaattgaacgttcggcgtatgagtggtgatcggatagctagtgttcgtaggctccatgctcgcgcatcgaactacctaccacctatccttctcagttaattcacgggcgatgttacgctcgatgatgagttccggggcctgtgtttcgtacctaatttgaaggaattgttgagtttggtttacacctttgcccgcggcttctccttcgtggggaagtcgtgggcacaaacatcggcgcttgttcacctctcgtcatcgcatttgttgccttgctcgcattggtgaatgagttgcgggttgaaatctcggatgcggaaaagttgtcgacggtgactcgaagtgattcagtcccgccaaagctcactcccgtccttcgggcaaaagatgacgggcaagacctcggccttcccctctttccattgcggtttgaaagcatgtgccgggatttccccctatgatgcaccggtaaccgcagaggaatgctgccaaagtaagcatgatgnaagaatc

SEQ ID NO: 120143 - DNA, 532 bp, Arabidopsis thaliana
  unsure (1)..(532): unsure at all n locations
ggtacgnacggtnatacgttnaagncttgcatcatacgcaattacgccggccgccgcttgttcacctctcgtcatcgcatttgttgccttgctcgcattggtgaatgagttgcgggttgaaatctcggatgcggaaaagttgtcgacggtgactcgaagtgattcagtcccgccaaagctcatccgtccttcgggcaaaagatgacggtcaagacctcgtcctttctctctttccattgcgtttgagaggatgtggcggggaattgccgtgatcgatgaatgctacctggttgatcctgccagtagtcatatgcttgtctcaaagattaaggccatgcaatgtgtaagtatgaaccgaattcagactgtgaaactgccggaatggctcatttaaatcagttataggtttgttttaatgggaacctactaccncgggtaaccctaggaatttctgggggctaatacggggaaaaaaaccccggcttttttgnggggnngtttttttggtaaaggttagcgggggcttcccttt

SEQ ID NO: 120144 - DNA, 865 bp, Arabidopsis thaliana
  unsure (1)..(865): unsure at all n locations
ttaggtacacactatagaagagttatgacgtcgcatgcacgcgtacgtaagctcggaattcggctcgagggcggaagttgcttcgtcggttattccaggttttgatatgcctaatatgaaaatttacggtaacgggatcgagtggtcgacgttacttggacaaggctcatcggccggtggtgttttctcggagatcggtggttttccggcggtttcagctattgaaactacaccgtttggattcgggggtaaattcgtaaatcaagatgatcatctgaagttagaaggtgaaactgtacagcagcaacagtttggagatcgaacggctcaggttgagtttcaaggaagatcttcggatccgaatatgggatttgaaccgttggattggggaagtggcggtggagatcaaacactgtttgatttaaccagtaccgttgatcatgcatactggagtcaaagtcaatggacgtcgtctgaccaagatcagagtggtctctaccttccttgattctgatcatagcttcttcttcttaacccaaaaatatatattttatacacataaggtaaagttcgatgaagtggttttttttaatttttatttgatgggtttaaaacgggatttattatataattatatgactgcttgtaaatttttttcccaaatatcaaatttaccccccctttttttttaagtttttggnatatccccagggggcaaatttatggggcatgggtttaagtttggcttcgggtcnagttttnggacngggccggtttaccttaccgggngganccaaanttgggaaagggtttnaaantnncngggggttttttttggggtnnnaatgggggncccaaaaaattt

SEQ ID NO: 120145 - DNA, 909 bp, Arabidopsis thaliana
ttcacctctctctctctttcttctccactgtaacctcccaattcaaaaacaattataaaccaaacttgattaatatatatttctttatcatcatctcttcgaaatgcaagatattcatgatttctccatgaacggagttggtggtgggggaggaggaggagggaggtttttcggtggaggaattggcggcggaggaggtggtgatcgaaggatgagagctcatcagaacaatatacttaaccatcatcaatctctcaagtgtcctcgttgtaattctcttaacacaaagttctgttactacaacaattacaatctttctcagcctcgtcacttttgcaagaactgtcgtcgttactggactaaaggtggtgttctccgtaacgttcccgtcggaggtggttgccggaaagctaaacgttcgaaaacaaaacaggttccgtcgtcgtcatcagccgacaaaccaacgacgacgcaagatgatcatcacgtggaggagaaatcgagtacaggatctcactctagcagcgagagctcttctctcaccgcttctaactctaccaccgtcgccgccgtctccgtcaccgcggcggcggaagttgcttcgtcggttattccaggttttgatatgcctaatatgaaaatttacggtaacgggatcgagtggtcgacgttacttggacaaggctcatcggccggtggtgttttctcggagatcggtggttttccggcgggttcagctattgaaactacaccggtttggattcgggggtaaattcctaaatcaagatgatcatctgaagttagaaggggggactggacagacaaaacagtttggagatccaacggctcagggtgagtttcaagggagatctttcgatccgaatatgggatttgaacccttgatttggg

SEQ ID NO: 120146 - DNA, 408 bp, Arabidopsis thaliana
ttgagaggttgaaggaagtaggtactgatcggcaattgactctggaggagtttgagatttgtgttggtacgtcaccgattgtgcttgagttgatgaggaggcaaaatgttgaagatgtttgtaaagactctgtggatttggatactaatgttagtggaagcagggtgactaaacatagaaggagagggagttggttaaagagtattaagaatgttgctagtagtgtgactgggtataaagagcgacggagcaccgatgatagggattcaccgtctgagagaggtggtcagaggtttagctctgcaactgatgatagtcgagatatgtcttttcatgaccctgagagagttaaggttaggcagttggggaagtcgtgtaaagagcttactgcacttttcaagagtcaag

SEQ ID NO: 120147 - DNA, 802 bp, Arabidopsis thaliana
aatcgactcacttagggaaagctcgtacgcctgcaggtaccggtccggaattcccgggtcgacccacgcgtccgctttggtttttcttcactgacaaaacccctaaaaatggccgactcattcgagctaattgtaacccgaaaagaacctgttctcgtctctccagcctccgaaactccaaaaggtctccattatctctcaaatctcgatcaaaacatcgccatcattgtcaaaacattctactacttcaaatcaaactcaagatccaacgaagaatcctatgaagtcatcaagaagtcactctccgaggttctcgttcactactatcctgccgcagggagactcacgatcagtcctgaaggaaagatcgctgtggattgcaccggagaaggagttgtagtggtggaagctgaggccaattgtgggatagagaagataaagaaggctatatcggagattgatcaaccagagactcttgaaaagttggtttacgacgttcccggtgctcggaatattctcgagattcctccagtggttgttcaggtgaggggttgatcgattgatattatgttttgcttgctgttttgtgtgagtgaacgaacatgacctatactggatttggtccgatattggtttcaaataactatattatatagtagaattagattaatattgattttttaattatgcatgtacgtataaatacgctaattagtaagaaagaaaaagatccatactattattcactacaaaatacataaatttcataacttttaattcaaaagtatttatattggaacat

SEQ ID NO: 120148 - DNA, 1032 bp, Arabidopsis thaliana
  unsure (1)..(1032): unsure at all n locations
nnnnnnnnnnnnnnnnnnnnnnnnnnnnnnnnnnnnnnnnnnnnnnnnnnnnnnnnnnnnnnnnnnnnnncccacgcgtccgaacaaacccttcactgcgccagtgttgtgcggctctgcgaatcttcgaaaatgggtgcgtacaagtatgtatctgagctatggaggaagaaacagtccgatgtgatgagattcctccagagggttaggtgctgggagtacagacagcaaccttcgattgttcgtctcgtcaggcctactcgtcctgataaggctcgtcgtttgggttacaaggccaagcagggctttgttgtgtaccgtgtacgtgtgagacgtggtggacgcaagaggccagtgcctaagggtattgtgtatggtaagccaacaaaccagggagtgacacaactcaagttccagcgtagcaagcgttctgttgctgaggagcgtgctggcaggaaattgggtggtctcagagttgtcaactcttactggctcaatgaggattcgacctacaagtactacgagatcatcttggttgacccagcacacaatgctgtgcgtaatgacccgagaatcaactggatctgcaacccagttcacaagcaccgtgagctcagaggacttacctcagagggaaagaagaacagaggtctccgcggaaagggtcacaacaaccacaagaaccgtccatctcgcagggctacatggaagaaaaacaactctctcagccttcgtcgttaccgttgattgccttttgcttttattattactgttatcatcttctaggttccatgttgttgcacttttatctctctcaggatgacttgtttttgcaaattttggagactatacaattatgctttgaacctaaattttatatttgctttgcttttttgttgatctcagtctggctttggaatatatcgaggcccctttgcaatnnnnnnnnnnnnnnnnnnnnnnnnnnnnnnnnnnnnnnnnnnnnnnnnnnnnnnnnnnnnnnnnnnnnnnnnnnnnnnnnnnnnnnnnnnn

SEQ ID NO: 120149 - DNA, 651 bp, Arabidopsis thaliana
  unsure (1)..(651): unsure at all n locations
nnnnnnnnnnnnnnnnnnnnnnnnnnnnnnnnnnnnnnnnnnnnnnnnnnnnnnnnnnnnnnnnnnccacgcgtccgcaactgtgtcgattgtcccaaataattttaaaaataatttcacgtgtccccattttgctgacgtcattattcccctttttcctttttattgtcacatcagaattttttctaactcattcatttcaatcaatcttcttcttcttcttcttcttcttcctcagagaaattctgtgttgttgtatacagagagatgttctcatcttctacactcgtttattctctatctctcttcctctctctttctcttctcttcttcctcttcatcctctcaccacacatccttctctcttcctctaccctcatttccaccgccgatgacctagacgacctctctctcttccaccgcgccgtcgtctcttcctccaccaacaacaaccgtcgtctcatctccctctctccaaatccacccccaaagatcgctttcctcttcctaacaaactccgatctaaccttcttacctctcttgggaaagcttctttcccaagggcaaccaggatctcttacaaagggttaaaatccagggnngtccaaacntctttgggttttcncnttttggnttttaaataattaaagg

SEQ ID NO: 120150 - DNA, 937 bp, Arabidopsis thaliana
  unsure (1)..(937): unsure at all n locations
nnnnnnnnnnnnnnnnnnnnnnnnnnnnnnnnnnnnnnnnnnnnnnnnnnnnnnnnnnnnnnnnccacgcgtccggaaaggaatatttgaaggaggacttgagagtgcagacagaggaggtactgttgatgaagaagatgttgaaggggattggggtgaggaacttgacattaatgttgatggaatggagaacatccttctctcttcctctaccctcatttcctccgccgatgacctagacgacctctctctcttccaccgcgccgtcgtctcttcctccaccaacaacaaccgtcgtctcatctccctctctccaaatccacccccaaagatcgctttcctcttcctaacaaactccgatctaaccttcttacctctctgggaaagcttcttccaaggtcaccaagatctctacaacgtttacatccacgcagatccaacctcctccgtctctcctcttctcgattcttcatcaatcaacgcttagttcatcccggcgagaagaaccgcacgagcttctccgacgttaatctccgccgaacgacgattactagcaaacgcaatcctcgacgatcctaacaatctctatttcgctttaatctcacaacactgtatccctctccattccttctcttacatccacaaccacctcttctccgatcatcatcaacaaagcttcatcgagatcctctccgatgaaccgttccttctgaaacgatacaacgcaagaggagacgacgcgatgcttcctgagatccagtaccaagaactccgtgttggatctcagttcttcgtattagcgaaacgtcatgctctaatggtgatcaaagngagaaagctatggnggaaattnaaattaccatgccttgatgttgaatctggtnaccctgaagnacattatttccngncttttttgnctcttgagggatcctcaagg

SEQ ID NO: 120151 - DNA, 569 bp, Arabidopsis thaliana
  unsure (1)..(569): unsure at all n locations
cnnnnnnnnnnnnnnnnnnnnnnnnnnnnnnnnnnnnnnnnnnnnnnnnnnnnnnnnnnnnnnnnnnnnnnnccacgcgtccgttcttcctcagagaaattctgtgttgttgtatacagagagatgttctcatcttctacactcgtttattctctatctctcttcctctctctttctcttctcttcttcctcttcatcctctcaccacacatccttctctcttcctctaccctcatttccaccgccgatgacctagacgacctctctctcttccaccgcgccgtcgtctcttcctccaccaacaacaaccgtcgtctcatctccctctctccaaatccacccccaaagatcgctttcctcttcctaacaaactccgatctaaccttcttacctctctgggaaagcttcttccaaggtcaccaagatctctacaacgtttacatccacgcagatccaacctcctccggctctcctcttctcgattcttcatcaatcaacgctaagttcatcccggcgagaagaaccgcacgagcttctccgacgttaatctccgcccgacgacgattact

SEQ ID NO: 120152 - DNA, 986 bp, Arabidopsis thaliana
atctccagcacaatacgactcaccttagggaaagctcgtacgcctgcaggtaccggtccggaattcccgggtcgacccacccggctgcggccacgtgggcaaacacattcaaatctcataaacacattgataagtaaaaatcctctcgagagacaagaatgagaatgacacttgttcacttgtctctctccctcttctcatgtctcctccttgtcctttctccgaccttcattgcctccactcccgtctccgaacccgaactcgtagttcaagaagttaacgaaaagattaatgcgtctaggaggaatctaggcgtgctctcatgtgggaccggaaatccaattgacgactgttggagatgcgacccgaaatgggagaaaaaccgacaacggttagccgattgcgcgatcgggtttggcaaacacgcaatcggtggtcgtgacggtaaaatctacgtggtgactgactcgagtgacaaagacgtggttaaccctaaacccggaacccttagacacgcggtgatccaagacgagccactatggatcatcttcgcgcgtgacatggtcataaaactaaaagaagagctgattatgaactctttcaagactatagacggccgtggagcgagcgtccacattgctggtggcgcgtgtatcaccgtccagtacgtgaccaacatcatcatccacggtgttaacatccatgactgtaaaagaaaggggaatgcttacgttagagactctccgtcgcattatgggtggaggacagcgtctgacggtgacgccgtctcgatttttggtggctcccacgtgtgggtagaccattgctcgttgtccaactgcgctgacggtctgattgactccattcatggatcaacggccattactatctttaataactatttgagtcactctcattaagttatgcttttgtttcacattgatatttcctctatagacaataatattttattttttctttttttt

SEQ ID NO: 120153 - DNA, 564 bp, Arabidopsis thaliana
  unsure (1)..(564): unsure at all n locations
gcttgtagtatacttcnnnnnnnnnnnnnnnnnnnnnnnnnnnnnnnnnnnnnnnnnnnnnnnnnnnnnnnnnnnnnnnnnnnnnnnccacgcgtccgggagactctctggtcagagacggcgatgattctaggccgatgggtttccttcagttgcggaaacacgccggtgactaattgttccgaacgacgacgacatacggagtttcgtcgtctctcctctgctagtacttgtcgaccttctctcatatgctcttgtctcaaaagcaaatcctcccaagaaactactcagattgaacagttggggaatggagaagggttctcagttttggcatcagagattccatgggaggatgataacatatggagcacatttgctctttacatgttctctctgcatattcctctcagttttgggggtttatccattgttgccaacatactccaccggcaggttcttgatcctcagacccaagtgctatcacttgtggttctccaaatggtagaacttgcagggacagtcttgctgctgaggaccacagcgaagcctcagtgcaaatcaatc

SEQ ID NO: 120154 - DNA, 524 bp, Arabidopsis thaliana
caactctatgcgactcatatagggaaagtctggtacgcctgaaggtaccggtccggaattcccgggtcgacccacgcgtccgctatctagtaaatagacaaagaaaacaacatggctgattctaagatgaagctccactgtggctttatctggggtaattcggcagctctcttttgtatcaatgagaaaggtcttgactttgagcttgtcttcgtagattggcttgctggtgaagccaaaaccaaaacttttctctctactctcaacccatttggtgaagtcccggttcttgaagatggagatctcaaacttttcgaaccaaaggcgatcacgcgatacctagccgagcaatacaaagacgttggaacaaatctattaccagatgatcccaaaaagagagcaatcatgtcgatgtggatggaagtagatagcaatcaatttcttcctatagcatcaacactcatcaaagaactcatcatcaatccatatcaaggtttagccacagacgatacagcagttcaaga

SEQ ID NO: 120155 - DNA, 524 bp, Arabidopsis thaliana
  unsure (1)..(524): unsure at all n locations
agatttgccggcactnnnnnnnnnnnnnnnnnnnnnnnnnnnnnnnnnnnnnnnnnnnnnnnnnnnnnnnnnnnnnnnnnccacgcgtccgcccggttcttgaagatggagatctcaaacttttcggtactataatcttgtttcttattctggaattttatttgaagtcttggatttgaatgtggaggttttgcaaaaggttacataattattaccttttcataagtttctttgttaccatatttttgcgaaatttttatagtgttttgattatgcatatagaaccaaaggcgatcacgcgatacctagccgagcaatacaaagacgttggaacaaatctattaccagatgatcccaaaaagagagcaatcatgtcgatgtggatggaagtagatagcaatcaatttcttcctatagcatcaacactcatcaaagaactcatcatcaatccatatcaaggtttagccacagacgatacagcagttcaagagaacaaagaaaagttatcagaggttctgaacatc

SEQ ID NO: 120156 - DNA, 629 bp, Arabidopsis thaliana
cgcctgcagggcccggtccggatttcccgggtcgacccacccgtccggcctgcttcacattggaaagctacatctttttcgttttttgtggtggcgatttctattctccggctgaaacctaccttcaggattcagcctttctcaggttttcagttggattcagatagcagcttgtacttcttctagataatcggcgacacatatggatgattgggaggccgaggactttcaaccacttccctcaaaagttgaactgaaaagtaactgggatgatgaggatgtggatgagaatgatatcaaggactcgtgggaggaggaagatgtatctgctccgccacctatagtaaagcctgcttctgagaaggctccaaagaaaccagcagtaaaagctgttgaaaagaaggttaaaactgttgaagctccgaaaggaacatcaagggaagaacctctagatcctattgctgagaaacttcgcatgcagaggcttgtagaggaagctgattaccaatcaactgctgaactctttggagtaaagactgaagagaaaagcgtcgatatgttaattccgaagtctgaaagcgatttcttggattatgctgagttgatatctcagagacttgtaccatttg

SEQ ID NO: 120157 - DNA, 513 bp, Arabidopsis thaliana
tctatgcgactcatatagggaattctggtacgccagaaggtaccggtccggaattcccgggtcgacccacgcgtccgatttcctcatcttcttgttgaaagtaatggcaagactcacgagctttctccttcttctttctctcatctgctttgtccctctctgtctctgcgacaagagctatggaggcaaacttttcccgggttattacgcccattcatgcccacaagtcaatgagatcgtgagatcagttgtagctaaagctgttgctagagagacacgtatggctgcttccttgttgagacttcatttccacgactgtttcgttcagggttgtgatggctctttgcttctagacagcagtggaagggtagcgactgagaaaaactcaaaccctaacagcaaatcagctcgtgggtttgacgtagttgacccaaaatcaaagctgaactgggggaaacaatgccctgggacttgtttcttgcggtgatgttctttaccctagccgtagggact

SEQ ID NO: 120158 - DNA, 1312 bp, Arabidopsis thaliana
  unsure (1)..(1312): unsure at all n locations
caaatttgatttgccttgcctcttgcggtaccggtccggaattcccgggtcgacccacgcgtccgatcacaatctactctctttaaaagaaattcgtaagtactatcaagaagcagaagatggcccaaaaggtggaagcacaaggagggaaaggagccaacctatgggacgatggatcgacacatgacgccgtgaccaagattcagctcgcagcaggcatagacggaattcaatatgttcagtttgattatgtcaagaacggacaacccgaacaagctcctcttcgtggtaccaaaggccgtgttctcccagctgatccgtttgtgattaaccatccagacgaacatctagtttctgtagaaggttggtatagccctgaaggtatcattcaaggaattaagttcatctccaacaagaagacttctgatgtcattggatccgatgagggtactcacttcactctacaagttaaagacaagaagatcattggctttcatgggtctgccgggggcaatcttaattctcttggggcttactttgctccgttgactactacaactccgttgactcctgccaagcagctaacggcatttggtagtgatgacggaactgtatgggatgatggtgcttacgttggggttaagaaggtgtacgttggacaagcccaagatggaatctcagctgttaagtttgtgtacgacaaaagccctgaggaggtcacaggagaagaacatggaaagagtactctactcggattcgaagagttcgtacttgactatccaagtgaatacatcaccgcagtcgatggcacttatgataaaatctttgggagtgatggctcagtcataactatgctcaggttcaagactaataagcaaacgtctcctccctttggacttgaagctggcacagtcttcgaactcaaagaggaaggccacaagatcgttggtttccatggaagagccgatgttctgctccacaaaattggagtccatgttcgtcctttatccaactgatgatggagctctttatccttgattccatgcatctaataagttatcaaatctatcttctaaatttctcatatgaggtctcttcatgcctctggtgaatggtgatctttgataagtgttttacgcgttgtctcttgcgatgttgttttttctttgttcttcttgtgctctattttaataaaggaagtttgttcccaaataaaaaaaaaaaaaaaaaaacaaagggcggccgctctagaggatccaagcttacgtacgcgtgcgtgcgacgtcataaatcttctatagtgcacctannn

SEQ ID NO: 120159 - DNA, 1557 bp, Arabidopsis thaliana
tccgtcgcagtaccgcaccggaattcccgggtcgacccacgcgtccgcaatttcgttgttaaagaacaaagctttaagcagccatggatccaaaccaacgtatcgcgagaatctctgctcatctcaatcctcctaatcttcataatcagattgctgacgggtcaggtttgaatcgggtggcttgtcgggcaaaaggtggatcacccggattcaaagtggcgatacttggagcagctggtggaattggacaacctcttgcgatgttgatgaagatgaatcctttggtttcggttcttcatctctatgatgttgctaatgctcctggtgttactgctgatattagtcatatggatactagtgccgttgttcgtggatttctcgggcagccgcagttagaggaagcacttacgggtatggatttagtgatcatacctgctggtgttccgaggaaaccagggatgacgagggatgatctgtttaacattaatgctgggattgtgaggacactctctgaagctatagctaaatgttgtcctaaagcaattgtgaatataatcagtaatccggtgaacttcacggtgccaatcgcagctgaagttttcaagaaagctggaacctttgatcccaagaaactcatgggtgtcactatgcttgatgttgttagagctaatccctttgtggcggaagtaatgagtcttgatcccccgtgaagttgaagttccggttggttggaggacacgccaggaagttacgattttaccactgcctttcccaggtgaaacctccttgctcgttcactcaaaaagagattgaatattttacagacccgcatccaaaacgggggcactgaagttgttgaggctaaagctggagcaggttctgcaacactatccatggcatatgcagcagtggagtttgcagatgcttgcctcaggggtctacgaggtgatgcaaacatcgttgagtgcgcatatgtggcatcccatgtgactgagcttcccttcttcgcatcgaaggtgcgtctgggacgatgtgggatcgatgaagtgtacggccttggaccattgaacgaatatgagaggatgggattagagaaggcaaagaaagagctttcagtaagtattcataaaggtgttacctttgcgaagaaataaagagactcgatcgtgaataaacacacttaagcgatggttttggaatagtcagagttttggaataagaataatgcctcccaataaaagctcttgcggtcttcttggatccaatcttaaaggttcaagaaactcatctcctttaggtaaaatcttcgattgttttatcgttccatcgaacccctttgttcttagatacaaaaacgtttatgatttatgtagttgggctataaaagtgagaacagagcaataatcttgcaacattttttttcatcttcttggggggttttttttttgttggttaaaaaaaaaaaaaaaaaaaaaaaaaaaaaaaaaaaaaaaaaaaaaaaaagggcggccgctctagaggatccaagcttacgtacgcgtgcatgcgacgtcatag

SEQ ID NO: 120160 - DNA, 1015 bp, Arabidopsis thaliana
  unsure (1)..(1015): unsure at all n locations
atgatctgnccnnnnnnnnnncggacgcgtggggtctgataatagttttgtagagtttggttaataaaactaatcgtgtacgctactaatccgctcaggtaactaattaatattcaaaaagatggctcaaaaagtggaagcagggggtggcgccggaggagcttcatgggatgatggtgtccacgatggcgttagaaaggtgcatgtagggcaaggccaagatggtgtgtcatctatcaacgtcgtgtatgcgaaggactctcaggatgttgaaggaggtgaacacggaaagaaaacgttacttggatttgaaacgtttgaggttgatgcagacgactacatagtagcagtgcaagtgacctacgacaacgtgtttggccaagactctgacatcatcacatctattaccttcaatacattcaagggaaaaacatctccaccctatggattggaaacgcaaaagaagtttgtactcaaggacaaaaacggtggtaaacttgttggcttccatggacgcgctggtgaagctttatatgctcttggagcatattttgctacaaccacaactcctgtgactcctgccaaaaaactatctgcaattggtggtgatgaaggaactgcatgggacgacggtgcgtacgatggtgtcaagaaggtgtacgtaggacaaggccaagatgggatatcagccgttaagtttgagtacaacaaaggcgcggagaatatcgtaggaggtgaacatggaaagcctactttactcggattcgaggagtttgagattgactatccaagtgaatacatcaccgcagttgaaggcacctatgataaaatctttgggagtgatggcctaatcataactatgcttaggttcaagactaataaacaaacgtctgctccctttggacttgaagctggcacagccttcgaacttaaagaggaagggcacatgatcgttggcttccatggaaaagccagtgagttgctttatcagtttggagtccattgtttgccactc

SEQ ID NO: 120161 - DNA, 709 bp, Arabidopsis thaliana
  unsure (1)..(709): unsure at all n locations
atcataatctactctctttaaaagaaattcgtaagtactatcaagaagcagaagatggcccaaaaggtggaagcacaaggagggaaaggagccaacctatgggacgatggatcgacacatgacgccgtgaccaagattcagctcgcagcaggcatagacggaattcaatatgttcagtttgattatgtcaagaacggacaacccgaacaagctcctcttcgtggtaccaaaggccgtgttctcccagctgatccgtttgtnattaaccatccagacgnacatctagtttctntagaaggttggtatagccctgaagggtatcattcaagggggttaaggttcatcttccaaccaaggaaggccttcttgattgtcattgggtccccgttgaggggtacctcactttcaatttctcccagggttaaggcccaggnggggtcctttggggtttcaattgggctttcccggggggaattttttaatttttttttggggnttanttttncncccgtgggttcttaaacttccggtggcttcctgccaagcagctaacggcattttggtagtgttgacggaactgtatgggatgatggtgcttacgttggggttaataaggtgtacgttggacatgcccaaaatggaattttagttgttatgtttgtgatcttctaaattatttgtaatatgttttaaattgttattataattt

SEQ ID NO: 120162 - DNA, 554 bp, Arabidopsis thaliana
atcgaaggtgcgtctgggacgatgtgggatcgatgaagtgtacggccttggaccattgaccgaatatgagaggatgggattagagaaggcaaagaaagagctttcagtaagtattcataaaggtgttacctttgcgaagaaataaagagactcgatcgtgatttaactcacttaagcgatggttttggaatagtcagagttttggaataagaataatgcctcccaataaaagctcttgcggtcttcttggatccaatcttaaaggttcaagaaactcatctcctttaggtaaaatcttcgattgttttatcgttccatcgaaccactttgttcttagatccaagaacgtttatgatttatgtagttgggctataaaagtgagaacagagcaataatcttgcaacattttttctcatcttcttggtgtgtgttttttttgttggttttcatctttttgttcttgctcatgagagcatccttagaaggctattgttgggaagtaaataagtttgcatcgccggaaatatgatcaaggtcattcggtatacctcata

SEQ ID NO: 120163 - DNA, 364 bp, Arabidopsis thaliana
aaagaggaaggccacaagatcgttggtttccatggaagagccgatgttctgctccacaaaattggagtccatgttcgtcctttatccaactgatgatggagctctttatccttgattccatgcatctaataagttatcaaatctatcttctaaatttctcatatgaggtctcttcatgcctctggtgaatggtgatctttgataagtgttttacgcgttgtctcttgcgatgttggtttttctttggtcttcttgggctctattttaataaaggaaggttgttccaatctgatctttagtttccctatatgttctataatacttacttttgccaaagactaaaatacaatgcggttctaattca

SEQ ID NO: 120164 - DNA, 460 bp, Arabidopsis thaliana
tgcagatgcttgcctcaggggtctacgaggtgatgcaaacatcgttgagtgcgcatatgtggcatcccatgtgactgagcttcccttcttcgcatcgaaggtgcgtctgggacgatgtgggatcgatgaagtgtacggccttggaccattgaacgaatataagaggctggcattagcgaacgcaattctcgtgcggcttactttgctccgttgactactacaactccgttgactcctgccaagcagctaaccgcagttggtagtgatgacggaactgtatgggatgatggtgcttacgttgggggtgtcataatatactgtttataatattataatttgtgttatctcatatagtttcatagctaacaagttttccttacactgtctttgactaattttaatttttattattttaatttattttttttttatatatatcatatattttatatattattta

SEQ ID NO: 120165 - DNA, 683 bp, Arabidopsis thaliana
ctctaatacgactcactatagggaaagctgggacgcctgcaagtacccgtcccgaatttccgggtcgacccacgcgtcccgtcttttatctttttttcttttccacggttgcttaattccaatgccatcgtgatcgattcatctctctctctctcttccaattttcccaattcttttttaaaaccctaatttttcagatatctgattatctcttgtatttcttctactcgatttgctcccataaaaacccttactttcttcaagttctggttttcaccgattgatgggtcgtggctcagtgacgtcgcttgctcctgggttccgttttcacccgacggatgaggaacttgttcgctactaccttaagcgtaaggtctgcaacaaaccctttaagttcgatgctatttccgtcaccgacatatacaagtctgagccttgggatctaccagataagtcgaagctgaaaagtagagacttggaatggtacttctttagtatgctggataagaagtacagtaatggttccaagacgaatcgtgctacggagaaagggtattggaagacgactgggaaagatcgggagattcgtaatggttcaagagtcgttgggatgaagaagacacttgttccatcacaagggtcgagctcctcgtggtgaaaggaccaattgggttatgcatgag

SEQ ID NO: 120166 - DNA, 752 bp, Arabidopsis thaliana
gggtgcggaccccccctggaggccgccggttcggttagcctggttttcgattccggggccgcgattcgaatcattctttttctctttcttgatcggaaaatggagtcccatttccagcaaaattatcattcgattttctgatcaactgagcgcgacggtggtggcgacggtggtggcgacggtgacagcgatcgacggttatggcttcgaagactaaaactagtttgtccgaaacaacaactactactactcctaccgggaaatcatctccagcaactccaagaatagcaaaaagaacagttaataaatccgaaactagtaataataattctccatctactactactccacattcacgtctttctcttgatcgttcttctccaaattccaaatcttctgttgagagacgatcaccaaagcttccaactcctcctgagaaatctcaagcgcgagtagcagcggtgaaaggaacagaatcaccgcagacgaccacacggttgagtcagatcaaggaagatttgaagaaagctaatgagcgggtatcttcattggggagggataaagctaaagcacttgatgaactcaaacaagctaaaaaagaagctgaacaagtgactctgaagcttgatgatgctttaaaagctcagaagcatgtggaggagaattctgagattgaaaaatttcaggctgttgaggcagggatcgaggcagttcagaacaatgaagaagaattgaagaaagaacttgagact

SEQ ID NO: 120167 - DNA, 416 bp, Arabidopsis thaliana
aataaagctagattataagtggtttctttgtttttatacatcggatcggtagcagaataaataagcttctttttaacgagttagtgaggccactctgaagacaaccacacctgccattatctatatcagtctccgttacttcgatcccaccgattcgaatcattctctctctctttcttgatctgaaaattgagtcccaattccagcaaaattatcaatcgcatttctgatcaactgagcgcgacggtggtggcgtcggtggtggcgacggtgacagcgatcgacggttatggcttcgaagactaagtaagactctttactcagtttcactctgttctagttttatcctattttctctgggaaattttttagtagatcgtagtagatctgatccaagttactattttgagaaattg

SEQ ID NO: 120168 - DNA, 761 bp, Arabidopsis thaliana
  unsure (1)..(761): unsure at all n locations
nnnnnnnnnnnnnnnnnnnnnnnnnnnnnnnnnnnnnnnnnnnnnnnnnnnnnnnnnnnnnnnnnnnnnnnnnnnnnnnnnnnccacgcgtccgcggacgcgtgggcggacgcgtggggttcaagttatgcggtcacagttttattttggacttcttgcacatgcaaagactagacatggaaacaggagcaaaaacccctcttgcatggattgacaatgcaggaaagtgctttttccctgaaatttatgagagtgatgaaaggaccaattactgccatcataaatgtgtggaagacccaaaacagaatgctcctcatgatatcaaacttcgcctagagattgatgttaatggtggcgagacaccgaggttaaatttggaggagtgcagtgatgagtctggtgataatatgatggacgatgttccccttgctcaacgatcttcaaatgagcactatgacgaggctacggaggatagctgcagccgcaagctcgaagctgcttgtttcgaaatgggttgagactgatgctatagtcgtctctggtgccaagcttacggggaagcgaagtacttgataaagattgcagtaaaaaaaatgtttgctgtaggcacagcttctctaggacatgtaccagtgctggatgtgggccgtttttccagtgagattgctgaagctcgtctagcacttttccagaagcaggttgagatcactaagaaacatcgaggggatgcanacgttaggtatgcctggcttcctgcaaag

SEQ ID NO: 120169 - DNA, 683 bp, Arabidopsis thaliana
aaatctagtaaaacagatgctgagagcaaaatctgcgatcttctgctatttccccatttgaaactccaccgttcaagccggtcactgctccaacggaccggcggaacaaggagacaaaaagatgggtgaatctccagatttcataagcgatctacctcaaagcattattgagaatatccttactcggctttcgattagagatgcaataagaacaagtgtattatctagcaaatggagatataaatggtctacactcactgatcttgtctttgatgagaaatgtgtttctccttctaatgaccgttgtgttgttgagactaatcttgtgagattcattactggagtgcttctccttcaccaaggacctatccacaagtttcagctctctacttctttcaaacaatgtcgtccagatattgatcagtggttgctttttctttcgaggaacgggattaaggagcttgttcttaagttaggtgaaggagaattcagggttcctgcatgtctctttaactgtttgaaattgacctgtttggagttatgtcattgtgagtttgatccgcctcagtatttcaaagggttttcgtatctgaagagtttaaaccttcaccagatccttgttgctcctgaggttattgaaagtctgatctcaggatgtccgcttctcgagttcctgtctttgt

SEQ ID NO: 120170 - DNA, 404 bp, Arabidopsis thaliana
cgcaaaatccgcgtccggttctacgcaactccataatttcaattcctctcgacgtttcacggcgaagcttcagatctacttttccccagctcagtatggagacggttgattctcggaacaaattgcattcccggttacgtttatgggaattccccgatcagtacatcatcgagccagctgatggctcaggctcttcatgtttggatattagtcgtgttgatgcttccatgaagctcatcgatcaagtcccagaaagcaattccgtgcgtgtccctaaaatccgttccatttttggtgtggttgggatgttgaagctccttgcaggatcatacttggtggttgtaactgagagtgaacgtgttggatcgtttctggggcatcctatattcagagttacaacgctt

SEQ ID NO: 120171 - DNA, 425 bp, Arabidopsis thaliana
gaaaaattaaatatccatccaactgtgtgaattagatattttctcttatctcttctctttgttcgatcaaaaattcaattttcccgagatttttgtttctctcgatcgattcaacacctaaagattgaagcttttgctcgtgggttatgtaaagtttccacctttcgtcttctttctgatctgtgagcaaaaatgggacaacagcaatcaaaaggggaattgctgtatcagcaagttagttatggtaactctgaaggaattcgagctcttcatcgagatggtggagaccttgagtggatggatagagaaggaaaaactccgttgatcttggcttgtatgaactccgagctatttgatgttgctaagactttgattgaggtgggttctaatgttaatgcttatcgtcctggtcgtcatgctgggac

SEQ ID NO: 120172 - DNA, 415 bp, Arabidopsis thaliana
ctcctcgatttcgatgacgatagagccgacgcaatcgccgtcttcggagccggaggttcactctggagaggacttcgttcacatcgatgaccctaggcctaccggcgatatctctttaagcgacagcatagttaatgtggagaaggatgaactgctcgacgaagcggcggaggaagaatttagaggctccgattctgtgtttagcggcggcgatggcggtggagcggatgatgatggcggcgagtgttcatcggaggctactaaagtggagctaccggaggaattggcgaaaagtgttgtgattctgacgtgcgagtcaacagcggatggtggatcttgcgatgtgtacttggttggtactgctcatgtatcaaagcaatcctgtcttgaagttgaagcaataatcagcatcttg

SEQ ID NO: 120173 - DNA, 896 bp, Arabidopsis thaliana
  unsure (1)..(896): unsure at all n locations
agcccacgcgtccgatcagaaaaaaaaaaaaaaaaaatccaaattcaacactctcacacttcgatatctccgccttcattctcctcagagccaactgtcctgagatttcgatttcgatttctccgatctctcttcctccgtcgccggcgaaaccatgtctcagtctattcaattctccactccttcacacactcctcaccttctccatctccctcactcacaattcaaccgtcctctctcctctatctccttccgtcgcttccctctaacaaccatcaaatacacttccatcagagcctcctcgtcatcatctccttcaccggatctcgattcatcgtcctcatcatcatcctcgcaagtacttctctcacctaacggtactggtgctgtgaagtctgatgagagatccgttgtcgctacggcggttacgactgatacgtctgggattgaggttgatactgtgacggaagctgagcttaaggagaatggatttagaagtacgaggaggacgaagctgatctgtacgatcggaccggcgacttgtggatttgagcagcttgaggcgcttgctgtgggaggtatgaatgtggcgaggcttaatatgtgtcacggtacgcgtgattggcatcgcggtgtgattcgtagtgttcggaggcttaatgaggagaaaggctttgcggttgctattatgatggatactgaaggtagtgaggttcatatgggagatcttggtggtgaagcttcagctaaagcagaggattggtgaggtttggactttcactgttaagggcttttgattcttctcgtcctgaacgtaccattagtgttagctaccatggtttcccttaagatttaagattttggtaatnaccncctggtnaangggtggattntaa

SEQ ID NO: 120174 - DNA, 426 bp, Arabidopsis thaliana
accacgcgtccgcgtgttctaacctcattcctccataacccctttcttccttttgaatctctccttcttcttcttcatccccaaattcgaaaccctaaccctaaaactcagtttcaaaatggctgaaccaatcaccaaggagcagcctcctccacctgctccggaccctaattccacctaccctcctccgtccgattttgattccatctcgatccctccgttcgatgatcatttctccgatcagactccgattggggaactaatgtccgatctggggtttcccgatggtgaattcgagctcactttcgacggtatggacgatctttacttccctgctgagaatgagtcgtttctcatccctatcaatacgtccaatcaagaacagtttggtgattttacttcggagtctgaaagttctggaatttc

SEQ ID NO: 120175 - DNA, 710 bp, Arabidopsis thaliana
tagactctcgggtctctacgactcacttcatgggaaagctggcacgcctgcaggtaccggtccggaattcccgggtcgacccacgcgtccgattccgaccactgtactccggcgaaaacctcaatttctggggatggattagaaaaagagagcgactttaagaagcaactgaactctgagatagatccacaagcttcttcctcgcaaaacgatgcaataactatggaagatggagccgtctctgtaaacaatagggatctgcaagagataaaggaatcatccttctctaaaggaagtgagcaatatcgagttgatggagcccttgaagaaagtttgaattttgaggagaaggaacaagaatctgaagctcagagactattggaagcagagaagagaagattgctggctgaaatcgaacttgggtcaatctttaggaagagtgttgatgtggatacgttgcctaagatcgaagagacgatggataatgatgttgataagattgaattggttgatcatactgcgttggttggatgttgttcatcatcctaagagaccagggactgctcaaaatgagaaggatacacctagaaagcttaagaaaattggagataagagaaatgttattgaggggagtggagtagaaaacaatgggaagcagtttaggagattgtacactaggaaacaattggagtcaatgaggtttgcccaca

SEQ ID NO: 120176 - DNA, 940 bp, Arabidopsis thaliana
  unsure (1)..(940): unsure at all n locations
ctttcagccgccgctttcactacctcttcctcttccttcttcttcttctaccttcttctcgtaaaggttttgctacacactggagctcgcaaatctggctatcgaaaaccacaatcacaaactcaacttcggggccttcaaggccaatcacaagaaagtcatgggaccaatgataagaacagaggaagaagaagactatacaagtccaccgtggctaatgccaatgctacgagggagttacttcgtcccttgttccatccatgtcgattcaaacaaaaacgaatgcaatttgttctgtcttgattgtgctggaaatgccttttgctcttactgtttagtcaaacataaagaccatcgtgttgttcagatacgaagatcttcgtaccataacgttgtgagagtgaatgagatacagaagttcatagacatcgcttgtgttcagacatatataatcaacagcgcaaagatcgtgttcctcaatgaaagacctcagcctagaatcggtaaaggtgttacaaacacttgtgaaatctgttgcagaagtctccttgattctttcaggttctgctctctcggctgcaagcttggaggaatgaggagaggagatttatctctaaccttctctttgaaagggaagcatgggagagagttccttggtgggtcggaatcaaatgaagctactacaccgactaagatgcgtaagaccaatgctttcaaccgtctgatgagtggtctctcgatctcaaccgttagattcgatgactacgggtcccaatggtgatcaaaaggtcttcaagctctggtgatgaaggtggttttaagtttcctttcccggggacaacctcccgntcctttaatcacccgggttttgaaggcgaaggggaccctacgggtccgtttagaaaggtnnttccaaatttcnacccctggattatttttt

SEQ ID NO: 120177 - DNA, 535 bp, Arabidopsis thaliana
  unsure (1)..(535): unsure at all n locations
ttcatgtggatatnctctgtttttgtaatgttatttgtggaaataacgatattgtcctttggttgttttttgtgctgtttancttggaggaatgaggagaggagatttatctctaaccttctctttgaaagggaagcatgggagagagtaccttggtgggtcggaatcagatgaagctactacaccgactaagatgcgtaagaccaatgctttcaaccgtctgatgagtggtctctcgatctcaaccgttagattcgatgactacggtcccaatggtgatcaaaaggtcttcaagctctggtgatgaaggtgggtttagtttctctccggggacacctccgatctataatcaccgggaattcaaagcagacgaaaggggtgtccctcaaccgggctccggtctaaggaaaggttattacctaatttcccacccccttagtaattaattttaatttatatatanttggggaattgaataattcaattgtntaaccttngggggnaattttnggntntnggcntaaatgttgntaaa

SEQ ID NO: 120178 - DNA, 443 bp, Arabidopsis thaliana
cccattctctctctctgttttccttgttctccaagccagatctctctccataaatctctcttcatctctctctttccaccaaacatccgcgatcctcgattctcaattccgtgtctgttttttttcttcacttagcgatggcgatgatagagcaaaggccgaagacgaagatcgtttgtactctaggtccagcttccagatctgttccgatggtcgagaagcttcttagggctggtatgaacgttgctcgtttcaatttctctcatggatctcatgaataccatcaagagactctcgataatcttcatcaagctatgcttaacactgggattctctgtgccgtcatgctcgacaccaagggtccagaaatccgaatcgggttcttgaaagatgggaaaccaatccagctgaaacaaggacaagagatcactatttcgactgac

SEQ ID NO: 120179 - DNA, 597 bp, Arabidopsis thaliana
  unsure (1)..(597): unsure at all n locations
cgactcactatatgggaagctggtcacgcctgcaggtaccggtccggaattcccgggtcgacccacgcgtccgcttcaatttcactctctctcttgagtttattcttctctgctgtatcaatcaaatcaacggagtttgagtttcttttccgattccggcgatggggtcagtccccgatccaggcgagttaactgagttagctcagccgagtttcgaggagtttcagaaacagacgtcgttgatgactagctgtactcttctatggcaagagctctccgatcacttcacttctctagagcagaatctgatgaagaaatctgaagcgttgaagcagatgattgaaactctagataaccagactcagacctcgctcgagtctctgaagcgtagagaggtaacaatcgaccatagcgttgagatcgtagctgggaaagtaggtgaacgagctagagctgctcttgaatcgttagagaaagctagagatggttgtggtgaataagtcctaatttgagctntcctccctcccatctgccacccttttccttccctacacacccccagattacgtctccccaccccattcactgcattttcac

SEQ ID NO: 120180 - DNA, 533 bp, Arabidopsis thaliana
gtttattcttctctgctgtatcaatcaaattaacggagtttgagtttcttttccgattccggcgatggggtcagtccccgatccaggcgagttaactgagttagctcagccgagtttcgaggagtttcagaaacagacgtcgttgatgactagctgtactcttctatggcaagagctctccgatcacttcacttctctagagcagaatctgatgaagaaatctgaagcgttgaagcagatgattgaaactctagataaccagactcagacctcgctcgagtctctgaagcgtagagaggtaacaatcgaccatagcgttgagatcgtagctgggaaagtaggtgaacgagctagagctgctcttgaatcgttagagaaagctagagatggttgtggtgatggttctaatgatgattccggtgatgttgacgatgaagaaggtcttctctctgctttgaaatctctttgtcttaaaatggatgcgagaggtttttggaactttgcgacggcgaggaagaaggagttggagaatc

SEQ ID NO: 120181 - DNA, 466 bp, Arabidopsis thaliana
gtccaaccacgcatccgcagattcctgagaatttgagcctaatccttcatcaccaagctaagtctcaagatctgattgtggttgtggttgacttcttcttcaaaggtttcacgagtacaataatgagtcaaaagggtttgatatatagctttgttgctaaaggaacagttgttctagcagagcatactccttattcaggaaactttagcaccattgctgttcaatgtctgcagaagctacccacaaatagcagcaagtatacttactcttgcgatggtcatactttcaatttccttgttgacaatggctttgtgtttctagtggttgctgatgagtccaccggaagaagtgttcctttcgtgtttctcgaacgggtcaaggaagactttaagaagcggtatgaagcgagtataaagaatgatgagcgacatcctcttgcggatgaggacgaagatgatgatttgtt

SEQ ID NO: 120182 - DNA, 413 bp, Arabidopsis thaliana
cttcttcttcttcgtcttcttcctccgaaacttttttttgtttttcaaagtggtggagctaaccatgaaatcgactcaccatcacagagctccactaatatctgcttcttcctcatcttcatcttcttcccaaaaccattcattcgtctctaggctcctccttctccttactctacttccagtttcccttgcttgtctcgcctttatcctccaatggcgaggcggtggtctcgccgatcctgcctctgcttctgttcgttcctctacgtcggttcctggcggctccgatctcaatcacgaggtctttcccggcatggagactgtttcatctgtctccccaaagtctcaccaatcctcctccgactgctcaaatctagctcgcagctcttctccttcatttccttactatgctg

SEQ ID NO: 120183 - DNA, 1114 bp, Arabidopsis thaliana
  unsure (1)..(1114): unsure at all n locations
tgatacttccaggnnnnnnnnnnnnnnnnnnnnnnnnnnnnnnnnnnnnnncaggtaccggtccnggattcccgcgtcgacccacgcgtccgtctcttctctggctatcttagagggatttttgattgagattttaaaattttctgagttggattagttggttggtaaagagatggatccggatacggtgaagtcgaccctctcgaatctggcattcgggaatgtattggcggcagctgctagagattataaaaaggaagttcttgcaaatgaaaaggcacaaggatcaagacctgtcaacgaggaagttgatcttgacgaattgatggatgatccagagctagaaaagttgcacgcagataggattgcagcactcaggagagaagtggaaaagagagaagcattcaaaagacaaggacatggtgaataccgagaagttagcgaaggcgacttcttgggagaagtcacaaggagtgaaaaagttatatgtcacttctaccacaaggagttctatcgctgcaagataatggacaagcatttgaagacccttgctcctagacatgtggacacaaagttcattaagatggacgctgagaacgctcccttcttcgtcaccaagcttgcaatcaagactttgccgtgtgttatcctttttagcaagggaatcgcaatggataggcttgtcgggtttcaagatctaggtgccaaggccgatttctccccgacgaagctggagaatcttctggtcaagaaaggaatgcttagtgaaaagagaaaagaggaagatgaggaagtttctgaggtatcaagaaagcatacgtcggtccgttaggtcttcagcgaatgtcgactctgattcagattgatctcgaagcttttctcatagtagacccccgaccctttttgtattttgttttcccccctgctctgtttgaattgtttggtctatgaatcttatgcttctataagtctttatagtgggaaatttcgttccccaacaaaaatacatataagataaaaaaaaaaaaaaaaacacatagnnnnnnnnnnnnnnnnnnnnnnnnnnnnnnnnnnnnnnnnnnnnnnnnnnnnnnnnnnnnnnnnnnnnnnnnnn

SEQ ID NO: 120184 - DNA, 557 bp, Arabidopsis thaliana
  unsure (1)..(557): unsure at all n locations
ttcgataaataattgaaaagaacaaaagaaacaaaagagacgagaaagagttttggcgatgaagaagaacgcactttggctactgtgcattctggtgttaccggcgatagcctgtggtaggaaaccggagaagaaggtaacaatttcatcctctgggaggaaggaagatgaccttgtaaccggtttgcccggccaaccaccggttaacttcaaacactacgccggttacgtgaatctggggcctgaacagaagcaaaaggcacttttctattggttcttcgaagctcaacaaaactcttctcgtcgtcctctcgtcctttggctcaatggaggaccgggttgctcatcaatagcctatggagctgcacaagaactaggcccttttcttgttcacgacaacggtggcaaacttacctacaatcatttctcttggaacaaagaggccaatatgtttgtccttggaagcngccggtttggggttgggttcccgtttacccataaccaaattggtccttcaaaattttggngttaagtancatcaatcgnctctttttntt

SEQ ID NO: 120185 - DNA, 832 bp, Arabidopsis thaliana
  unsure (1)..(832): unsure at all n locations
cggacgcgtgggcggacgcgtgggcagatttcaagaaacccttaaaatcctctctctgtctctgtctgtttgtttgttttcttgtttccttctctctctctctttctttctttgtcttcctttcccaggttgttttttttttgctctctctgccttcttgactttcaaaagactctttctttcttttggattgattttggattctagggctctctttcttttagtgggtttttgttgttgttgttgtggtctctctgatgattactgaacttgagatggggaaaggtgagagtgagcttgagcttggtctagggctgagtcttggcggtggaacggcggccaagattggtaaatcaggtggtggtggcgcgtggggagagcgtggaaggcttttgacggctaaggattttccttctgttggttctaaacgtgctgctgattctgcttctcatgctggttcatctcctcctcgttcaagtcaagttgttggatggcctcctatagggtcacacaggatgaacagtttggttaataaccaagctacaaagtcagcaagagaagaagaagaagctggtaagaagaaagtgaaagatgatgaacctaaagatgtgacaaagaaagtgaatgggaaagtacaagttggatttattaaggtgaacatggatggagttgctataggaagaaaagtggatttgaatgctcattcttcttacggggatttggcgcaaacattggnaaggtatgtcctttccggactaatcccggggtcctttcggggttaacccagtcagttccncttannccgttngggnnttttaaggntggtccnnnt

SEQ ID NO: 120186 - DNA, 646 bp, Arabidopsis thaliana
accgtgacccgattcaaatccgagatgcccagttgaagattatcgagaggcgtggaaagaaggcgaatcatcatgttggagataccgagggtaaaactcaaactcctggatctacttttctgagaaatttcactcctttagatgaatttgatggtaaaacccccgcgtccgctggagtatctggtagagaatttcatggtgttgaagtagatgctggtgatggagatgaagatatagatcttaatttgtccctagatgagttctttaggagatatactagtgaggataacgagagcttttcgaagattcttgagaaggtaaataggaagaagaaggagaagtatggctttctccttgaaggtgaaaaggaggatggtaaatctattgaggatgtgaagagagataggattacagatgggtatggtacatctgatcagccaccgagtactttagaaggatggaaatatacggcgaagaatcttctgatgtaccatccagctgatcggggtgaggcgcctttaactgaggcggaaagggcagtgagattacttggattgactaaggagatagttaaagggaacactcgttttcatggtaagactatggattctaggccaagagaagatggttctgttgagattctcta

SEQ ID NO: 120187 - DNA, 815 bp, Arabidopsis thaliana
  unsure (1)..(815): unsure at all n locations
gaaggaccgggncgacccgacgccgtccgaagaaataatgtattcagaggaaaagaaaagcagaaattatggttcaatctttgtctactgcttcttctgtttcgtactcattgtggaggttgcaagattcgcaaaaccttatatcaaccttcaaaacctaattgagacggaagcagtagtagaagaaggtttcatggcggtggggaactcagggaatcttccgtgtggctcgtcaaaacctagctctgcctctgttcgtgctcatgatgaacagaagctctcgcaagcagtaacaacagatacgagaactcgtcctccaaattcgtactgcgtgaagttccagtcttttgtcactatggcaaagcaggtcaaagaaaacggtggcaagtatgagtcacgtcctttctccgtcggtggatacaattggacgctcctaatctacccagtcatatacattccaacggactcgggtgggtacgtttcgatttacgtaagagtcgataactcaagcctcatcaccaatccaaaagatgtgtatgcagagatcacattcctcgcttataaaagcagtacagacaagtaccaaataagccaggagactgaggcccagcgatttcatttggtttaaacaacagtggggacttttacaatttcctaccaatttaactattttgaaaatccggcatatggatcctttttcgggggggaagcgtttttntttggggttgaatnaacaattgttacccttngaaatnggaggnttttgnccgccaaaaattgggccnntttgntgggnncccaaatttacgtttttc

SEQ ID NO: 120188 - DNA, 777 bp, Arabidopsis thaliana
  unsure (1)..(777): unsure at all n locations
catacaagtaccaaatangccaggngactgaggcccagcgatttcatttgtttaaacaacagtggggncttttacaatttctaccaatttactattttgaaaatccggcatatggatactttttcgagggcgaaagcgttgtgtttggcgttgacatcaacattgttaaaccctttgcaaaattgggaagtgttctctaatgaacaaaacattcgtgaccctattttccgaatggtgactcaccaaacttctctacacgttttcttgactcttacacttctgattccttttcttccggaggaagaaactgggcattgaaagtgtatccaaatggagttggaaatgctacgggtaattcgttgtcactctatttgttgagtgatcagtcaaatgataagggttatgtggaagctaagttacgagttattgaccagatccaatccaacaatttcgagaaaaaagtggcggcatggcccaatgcaacggagaatggatggggtttcgacaggtttctatcatttgcagatatcaaaaacacatcaaaaggtttcctagtcaacgatactctcaaacttgaagtccagatcttgtccttctcgaaaaccgactactactctcatcaatcgtctcttaatgttttaacgggagatagtacttaggtgactaatcgtcgctagtgtaattttacaactggctactatcactttgcttcattgtgttttttgtttctgttcaataataatgagttcgagcttaacaaaaaaaaaaagggcggcc

SEQ ID NO: 120189 - DNA, 444 bp, Arabidopsis thaliana
atcaagatcaagagtaagacagagacacaaaggcgagagctatgtcgtcgtcggtggatttcgtgacggaacaggggagatgcggcgacgatggtaacggcgccggagagacagtaaagaatggcgaaattgatcatttgctttccgaaccgtcggctccgactatttctctccctacggaatctttcctcagagcagcgacgttactcaagaaccaggttgtggaggccacgtggaaaggtggtgtcgaagctcttgcctctggttcgggtccagtgctggatccgactgtgtacacaggactactcggcacagcgttcacctgcttgaagtcgtacgaggtaacgcggaaccatcaagatctgctaacttgcgcagagataatcgacacgtgtgccaacgttgcgcgtgccacaaccaggcacgtgacatttttatgtggaa

SEQ ID NO: 120190 - DNA, 1020 bp, Arabidopsis thaliana
gactcacttactacgtgtatctgtcttttttacatatattttgaaagtttcatcctttatgcggggggatgcgaataatacaaataacctaacaaaactcgaatcagagaattccagatattacttacataagacaattttagcaattagctttcagatctcatctcgttattctctctctctatctcttctcctcaagaaccctaaaaatctccagaaaaaagatcccaaatttcgtatttcaacgatctgaatctctctctctttcgggtttattttgtttcccgatatggtttagaatttgtgatttaaatggaagctgacgtgtcaatttcctgaaaaaacccttatcgcgaaattttccagattaccaaaaaaaaaaagattgaaacttttttcgatttgtttgaagaagaagcacggtaggaacgacgacgatgaatcgtgctttggtcctacttttatatgtttgtactgtttcttgtttagcttcaagcaaagttattttgatgaggaataacatcactctctcttttgatgacatcgaagctaacatcgctccgtcagtgaagggtacaggtgaaattggagtggtttatgtggctgagcctcttgacgcttgtcaaaatcttatgaataaaccagaacagagctccaatgaaacttctccttttgtgttgattgttagaggaggctgtagttttgaagagaaagttagaaaagctcagagagctggtttcaaagctgctattatctatgacaatgaagaccgtggaacattgatagcaatggcaggtaactctggaggtataaggattcatgcggtctttgttacgaaagaaacgggagaagttttaaaggagtatgcgggtttccccgatacgaaagtttggttgatcccaagttttgagaactcggcgtggtctattatggcggtttcgtttatctcgctgcttgcaatgtcggctgttctcgctacttgtttctttgtgcgtaggcatcgaataagaaggcggacat

SEQ ID NO: 120191 - DNA, 1917 bp, Arabidopsis thaliana
  unsure (1)..(1917): unsure at all n locations
nnnncnnnnnnnnnnnnnnnnnnnnnnnnnnnnnnnnnnnnnnnnnnnnnnnnnnnnnnnnnnnnnnnnnnnnnnnccacgcgccccgtagctccttttttctctatctcgctttctctgtttcaccacagtcatggcgagtcggcgaatcttatcatcgcttctccgttcttcttcgagtagatctacttctaaatcctccttgatcgggagccgaaacccgaggcttttatcccccggtcccgcgcatggagccgctccatgtgggactctccttggccgagtcgccgagtattcgacttcttctccggctaattcggctgcaccatcttctgctcctgctaaagatgagggaaagaagacctatgattacggtggcaaaggcgcgatcgggcgtgtgtgtcaggttattggtgccattgttgatgtgagattcgaagatcaggagggattgcctccgatcatgacatctctcgaggtacaggatcatccaacaaggttggtccttgaggtgtctcatcacttgggtcaaaatgtcgttaggaccattgctatggatggtactgagggtctcgtccgtggaaggaaggttctcaacactggtgctccaatcactgtacctgttggaagggctacccttggccgtatcatgaatgttcttggagaacccattgacgagagaggcgaaatcaagaccgagcattacttacctattcacagagatgctccggctttggttgatctagccactgggcaagagatcctggccactggtattaaggttgttgatcttcttgctccttaccaaagaggaggaaagattggtctctttggcggtgctggtgttgggaaaactgtgcttattatggagctgatcaacaatgttgccaaagctcatggtggtttctctgtgtttgctggtgtgggagaacgaacccgtgaaggcaatgacttgtacagagaaatgattgagagtggtgtcatcaagctaggcgaaaagcagtctgagagcaagtgtgctctagtgtacggacaaatgaatgagcccccgggtgcccgtgcccgttttggactgactggtttgactgttgccgagtatttccgtgatgctgaaggccaagacgttttgcttttcattgacaacattttccgtttcactcaggccaactctgaagtgtctgctttactcggtcgtatcccgtctgctgtgggataccagccaactctggcttctgatcttggtgctcttcaagagcgaattactaccaccaagaaagggtctatcacctcagtccaagccatctatgtacctgctgatgatttgactgatcctgctcctgctacaacttttgctcacttggacgccacaacctgtgctctcaagacagatttctgagcttggtatctaccctgctgtggatcctttggattcgacatcccgtatgctctcaccccacattctgggtgaggagcactacaacacggctcgtggtgtgcagaaagtgttgcagaactacaagaatttgcaagatattattgccattttgggaatggatgagctaagtgaagatgacaagctgactgttgcccgtgcccgtaagatccagagattcttgagtcagccattccatgttgctgaaatcttcactggtgcccctggaaaatatgtcgaccttaaagaaaacatcaacagtttccagggtttgttggatggcaagtacggtgatctttccgaacaatcgttttacatggttggaggtatcgatgaggtggttccaaaggcagggaaggtcgctaaagggggcaccagctttgaaggtgggtccctcccttggaaatgggtaaaacccgcctgttttttggcaaaaccggaaggaaaaccnttccttngttcccnccaangggtttggtcgttnc

SEQ ID NO: 120192 - DNA, 865 bp, Arabidopsis thaliana
  unsure (1)..(865): unsure at all n locations
aggtctactacgactcactattgggaaagctgacacgcctgcaggtaccggtccggattcccgggtctacccacgcggggcgcacaactgtgctctcaagacagatttctgagcttggtatctaccctgctgtggatcctttggattcaacatcccgtatgctgtcacctcacattctgggagaggagcattacaacacggctcgtggcgtgcagaaagttctacagaactacaagaacttgcaagatattattgcaattttgggtatggatgagctaagtgaagatgacaagttgactgttgcccgtgcccgtaagatccagagattcttgagtcagccgttccacgttgctgagatcttcactggtgcccctggaaaatatgtcgaccttaaagaaaatatcaacagtttccagggtttgttggatggcaagtacgatgatctttccgaacaatcgttttacatggttggaggtatcgatgaggtggttgcaaaggcagagaagatcgctaaagagtcagcagcttaagagattgattcagatctttcatgcttaatacttctcttttttttcctgacaataacgaaaaaaaaaaaccaatgcgtgcgactctccgaccaaacggaatctgagttccgtaattatagtttcttttggttcaaattccatgagagctggcaagatgatactgaacagatccattcactgttaatcaaatttttggttgttttgcttcctttgttgaaataaagatgaaaaatcttgcagattctaaaaaaaaaaaaaaaggnnnnnnnnnnnnnnnnnnnnnnnnnnnnnnnnnnnnnnnnnnnnnnnnnnnnnnnnnnnnnnnnnnnnngaat

SEQ ID NO: 120193 - DNA, 687 bp, Arabidopsis thaliana
  unsure (1)..(687): unsure at all n locations
caaacatttcactttctctctctctctcccgcacacacccactcatggcgtctcggagagtcttatcatctcttctccgttcatcttccggtagatctgccgccaaattaggcaaccgtaaccccaggcttccttctccttcacccgcgcgtcacgccgctccatgtagctacctcctcggccgcgtcgccgagtacgcgacctcttcacctgcaagctcagctgcgccatcttctgctcctgctaaggatgaggggaagaagacctatgattacggtggcaaaggtgcgatcgggcgtgtttgccaggtcattggtgccattgtcgatgtgagatttgaggatcaggaaggattgccaccaatcatgacatctctcgaggtgcaggatcaccccacaaggctagtgcttgaggtgtctcatcacttgggtcagaatgtcgtcaggaccattgctatggattggtactgaggggtctcgttcgtggaagggaaagtcctcaaaaactggcggtccaatcaactttacctgttgggaagggctactttttgacggcgcatgaatgttcttggngagccttttacggaagnggggaattnaggccnaccatactttacctattanaggntganccgcttttggtnatcngntatttggaaagaanctggcnctggtttaagttttttcc

SEQ ID NO: 120194 - DNA, 852 bp, Arabidopsis thaliana
gaaaatacgttgatcttaaggaaaacatcaacagtttccagggtctactcgacggtaagtacgatgatctttccgaacaatcgttttacatggttggaggtatcgatgaggtggttgcaaaggcagagaagatcgctaaagagtcagcagcttaaggaattgattcatctctttcatatgcataatacttctcttcttcttttgttgacaataacgaaaaaacaacaagaccaatgctttaggttgtctgctgaggcattgtgatcattgtgagtgtgagagatagtacggagaaaacagattcattcgttgaagttttgacttggaataatggagacaggtgttgatgttttcaatctctccacatttgtattcaagcttttgtattaaggaaagtatcgtgtttttacaggattcgatgttagaaatgaatttgcacttttattagtcttaaaataaacaaaaaaaagaatattgtttcccaggcccgagctggttcgtggcaggttggccgcgtgggtgggcggttgggttcctactgcctcccgggtcgttcgtgtgtatggcgggtttcgggatggcggtcttgtttgttgtgtccgggggccgcggcccgcgctcttgggtgcggggggcggggcgcatccgtaaatcagagagtcggaaaattgcgtcctactgggcatctgagtgccagtaattatagtttcttttggttcgaaattccatgagagctggcaagatgatactgaacagatccattcactgttactcaaatttttggttgttttgcttcaaaaagaaataaaaaaaacaggcgaccgctctaagggatccaagcttacgtacgcg

SEQ ID NO: 120195 - DNA, 572 bp, Arabidopsis thaliana
  unsure (1)..(572): unsure at all n locations
gtaagatccagagattcttgagtcagccattccatgttgctgaaatcttcactggtggcccctggaaaatatgtcgacccttaaaggaaaacatcaacagtttccagggtttgttggatggcaagtacgatgatctttccgaacaatcgttttacatggttggaggtatcgatgaggtggttgcaaaggcagagaagatcgctaaagagtcagcagcttagaagctggatccatctcttgcatatgcttaatacctgtctgtttcttgtgacaataacgaaaagaaaaaaaccactgcctgtgagttacccacaccaagcggaatttgagttccgtatttatagtttctttcgaattccttgagagctacgagatgatgctgaacatacccttcattcccttgtactcagatttttggttcatttacttccttgacttgttgaaataaaggttaagcaagtcttgcagattaaaaaaaaaacaaaaaaagnnnnnnnnnnnnnnnnnnnnnnnnnnnnnnnnnnnnnnnnnnnnnnnnnnnnnnnnnnnnnnnnnnnnnnnnnnnnnnnncg

SEQ ID NO: 120196 - DNA, 962 bp, Arabidopsis thaliana
  unsure (1)..(962): unsure at all n locations
gatcctccagctacatacgactccattagggaaagctcgtacgcctgcaggtaccggtccggaattcccgggtcgacccacgcgtgcgggaaagagatgtcagtctgaaggctgtggcaaaagtgctcaaggtagtaccgacttttgcaaagcacatggaggagggaaaaggtgtgcgtggggtcaacccgagactgagtatgcgggacagtcttcttctggtccttgtacctcgtttgctcgcggtaagactggtctttgtgcactccataacagtctggttcaggataaccgggttcacggaggaatgactataacttccgagagccaagaaccgagagtaagcagcagcgaaacagagaacgaggaagagtttagcggctctcaagacatgaacatggatacaatgaaagcgagaagtgctaccggatctccagagactgatgttgatctcaatgagtatgaagcaggattggggttagctccggaaggaagagtccatggtggaagtttgatgatggcgatgttgggtagagctggtggctctggctcgaccggtgggccaaagaggtgggtgtaagttgtcttccgtttggttccagtcttgaattcaatgcgtgtgggccagtgagagtgaaagagtctgtggttgttctagttttaggtttgcttagagtaaaaaaaagggtccaaagtctgtgtcttattggtctttgtagatattgaatcaaagggtcgaagcataggttattgtgatgttgtgaattatacaggtaaaagcccacctgtggaaattgtcaaaaacagtcttatgatgatgatgataaataataataaaactcatgtcttttgtttgccaaaaaaaaaaaaaaaaaaaaaaaacacaaagnnnnnnnnnnnnnnnnnnnnnnnnnnnnnnnnnnnnnnnnnnnnnnnnnnnnnnnnnnnnnnnnntgtaccta

SEQ ID NO: 120197 - DNA, 920 bp, Arabidopsis thaliana
accacgcgtccggcaacaacaccaataagctcgggtacatgtacttccggtttatctcagcagctgaagccacagcttaagaattcttctagttcaaagttatgtcaagtcgaaggatgtcataagggagcaagaggcgcatctggtcgttgcatttcccatggtggtggacgtagatgccagaaacatggttgccacaaaggtgccgaaggtcgaactgtgtactgtaaagcccatggaggtggtcgtcgatgtgagtttctcggatgcaccaaaagtgcagaaggccgtactgacttctgtatagcccatggaggtggtcgaaggtgcagccatgaagattgcacacgagctgctagaggaagatcaggactctgtatcaggcacggtggaggaaagagatgccaaagagagaactgcactaaaagcgctgaaggcctttcaggactctgtatctctcatggtggtggtcggcgatgtcaatctaatggatgcacaaaaggagcacaagggagtacaatgttctgcaaagcacacggtggtggaaaacggtgtacacactcaggttgcaccaaaggagcagaaggaagcacgccgttctgtaaaggacatggaggaggtaaaagatgtgcctttcaaggagatgatccttgctccaagagtgttcacggaggtaccaatttctgtgtggcacatggcggtggtaagagatgtgcggttcccgaatgcacaaagagtgctagaggaagaactgatttctgtgtcagacatggtggaggaaagagatgtcagtctgaaggctgtggcaaaagtgctcaaggtagtaccgacttttgcaaagcacatggaggaaggaaaaggtgtgcgtggggtcaacccgagactgagtatgcgggacagtcttcttctggtccttgtac

SEQ ID NO: 120198 - DNA, 1223 bp, Arabidopsis thaliana
  unsure (1)..(1223): unsure at all n locations
accacgcatccgcccacgcgtccgcggacacgtgtccggaagaaacaaaaaaaaatggcgacggtacaattgtccacccaatttagctgccaaaccagagtttcaatctcaccgaactctaaatctatctccaagcctccgtttctggtaccggtgacctcaattattcaccgcccgatgatctccaccggaggaatcgctgtttccccccgtagagttttcaaagtccgagccacagatacgggagagataggatcagctctattggcggcggaggaagcaattgaagacgtggaagagacggagcggctaaagagatcgctcgtggattcgttgtacggaacagatcgaggtttaagcgcatcgagcgaaaccagagctgaaatcggagatctaatcacacagctcgagtctaagaaccctactccagctccgacggaagctcttttccttctcaacggcaaatggatcctcgcctacacatcgttcgtgaatttgttcccgttgctatcacgaggaatcgtaccgttaataaaagtcgatgagatctctcaaaccattgattcagataacttcaccgtccagaactctgttcgtttcgctggtcctttaggtacaaactcgattagcaccaacgctaaattcgaaatccgaagccctaaacgcgtccagattaagtttgagcaaggcgtaattgggacgcctcagctaacggattctattgagataccggaatatgtagaggttcttggtcaaaagattgatcttaacccgatcagagggttacttacctcggtgcaagacacagcctcgtctgtggctagaaccatatcaagccaaccaccgttgaaattctctttgccggcggacaatgcgcagtcttggctactcacgacttatctagacaaagacattcggatctctagaggagacggtggaagtgtctttgtgcttatcaaagaaggaagccctctcttgaatccttgaacttggtcaaaatatatgtgtctctcttgtcgttgtgttaagtgagacaaatatatatagtgttgttgtaggtttacttcttaatcgttattatgaacttgatgataatgaatataatgtttttaactgctaaaaaaaaaaaaaaaaaagnnnnnnnnnnnnnnnnnnnnnnnnnnnnnnnnnnnnnnnnnnnnnnnnnnnnnnnnnnnnnnnnnnnnnngaattgcaacccaacc

SEQ ID NO: 120199 - DNA, 518 bp, Arabidopsis thaliana
atacgactcactttagggaaagcacgtacgcctgcaggtaccggtccggaattcccgggtcgacccacgcgtccgtgttcacccagtttccctgcaaaaccctaaatccaagctcatcaaacactaaacaccaatcgaaatctccgatcctactaccgattaactcaataaatcggcgatcggagattggagtctctgttcatcggccagatttcaaaatccgagcgacggacatcgacgacgaatggggtcaagatggagtggagagagtatttgcctcatcttcaaccgtatcggtagcagataaagcaatcgaatccgtggaggagacggagaggctaaagagatcactagcggattcgttgtacggaacagatcgaggtttaagcgtatcgagtgatacgagagctgagatcagcgagctcatcacacagctcgagtctaagaaccctactccagctcctaacgaagctctgtttctcctcaacggcaaatggatcctcgcctacacgtcgttc

SEQ ID NO: 120200 - DNA, 812 bp, Arabidopsis thaliana
  unsure (1)..(812): unsure at all n locations
agtcggccatcggaccggggnggacttaatttgcccaatccattccacggacgattccgttcttagcncgatctgacggagtctcaggctactcgtatttcccagcagctacgtatctcaactgggaagagagtttctcattcttctccacttacttcgtccgtcaatgtggcttgccgtcgttttgcggcgattacggttactgcgatcgtgggatgtgcaacgcgtgtcctacaccaaaaggattactcggatggagtgataaatgcgcaccacctaaaacgacgcagttttgcagcggagtcaagggtaaaactgtcaattattataagatagtcggtgttgagcattttactgggccttatgttaatgatggacaaggcccaacttctgtgaacgattgcaaggccaagtgcgatcgtgattgcaagtgtttgggttacttctacaaagagaaagacaagaaatgtttgcttgctcctctgcttggtacacttatcaaagatgccaacacttcttctgttgcttacatcaaatattagtgtttttttgggaaagttatttaccgaattctttttgaattcttagagatttaatgaataatcggtgtgcttgtaatgatccaccgttgaatatattgtattaccttaaaaaaaagccatcagatgtatttactatatatatatagtacctttgagaatccaaaaaaaaaaaaaaaaaaaaaaaagnnnnnnnnnnnnnnnnnnnnnnnnnnnnnnnnnnnnnnnnnnnnnnnnnnnnnnnnnnnnnnnnnnnnnnnnnnnnncagatcc

SEQ ID NO: 120201 - DNA, 722 bp, Arabidopsis thaliana
  unsure (1)..(722): unsure at all n locations
cgacgtatctcgaatggaagagacttcgctttttctccaattacttcgtccgtcaatgcggtttgccgacgttttgcggcgattacggttactgcgatcgaggaatgtgcgtcgggtgccctacaccgaaaggtctgttagcttggagtgataaatgcgctccacctaaaacgacgcagttttgcagcggaggcaagggtaaagctgtcaattattacaagatagtcggtgttgagcattttactgggccgtatgttaatgatggacaaggcccaacttctgtgaacgattgcaaggctaagtgcgatcgtgattgcaagtgtttgggttacttctacaaggagaaggacaagaaatgtttgcttgctcctcttcttggtacacttatcaaagatgccaacacttcttccgttgcttacatcaaatattagcgagatttataaaccgaaaccaacgtgaattctcatagatttaatgaataattggtgttgttataatgcttcaccgtttttgttttcgtagactcgcgtattatgctcagtcctagtcaagtatgatattatcaaaataaaaatggatgatattgatgttcttcagattatcaaaattgaaattaatagtcgatcattataatgcgtcaaaaaaaaaaaaaaaagnnnnnnnnnnnnnnnnnnnnnnnnnnnnnnnnnnnnnnnnnnnnnnnnnnnnnnnnnnnnnnnnnn

SEQ ID NO: 120202 - DNA, 530 bp, Arabidopsis thaliana
  unsure (1)..(530): unsure at all n locations
nnnnnnnnnnnnnnnnnnnnnnnnnnnnnnnnnnnnnnnnnnnnnnnnnnnnnnnnnnnnnnnnnnnnnnnnnnnnnnnnnnnccacgcgtccggcggggggccgggctcgattggcagtttacaaaaagaggtatattacatataaaagtggatattttccatgataagtgaaaatggccaattctttaagaggagaagtattgaatctttataagaatctgctgtatcttggacgagactatccaaacggagcagactatttcaaaaggcgtctgaagaatgttttccttaaaaacaaagatgtgaaggacccagagaagatcacggaacttattgaaaggggcagatttgtaatgaaagaactagaagcattatacttccttaggaaatacagagctatgaaacaacgctattactcagataccaacaatactaaatgatcagtattactatcatttgactgaagatcagtgccagctgtttatgtaccagctatgacaaaaataacatttaaagtgcaaggatata

SEQ ID NO: 120203 - DNA, 501 bp, Arabidopsis thaliana
aatccgtagccaggagtttcaccctacttacttccggcgagttagtgatcaaggaatgcttttgcttgctgacaaatgcttgggaatggaaaccatttgtcttggtggcttttgtcgggtaacagatgctggtttcaagactattcttcactcttgcgctagcctctccaagtttagtatatatcatggacctaaattgacggatcttgtcttccatgacatcttagcaactactctttcgcttagtcatgttagcttaagaaggtgccatcttcttactgaccacgcaattcaaaagctggcatcaagtctcaagctggagaatcttgacctcagagggtgcagaaacctgagggatgaaaccttgacagctgtatctcatctgccaaaactgaaggttttacttcttgatggcgctgatattagcgacacagggctttcgtacctaaaagagggagttttggactccctagtttctttatctgtcagagggtgcagaaa

SEQ ID NO: 120204 - DNA, 668 bp, Arabidopsis thaliana
  unsure (1)..(668): unsure at all n locations
aaatgatatttttcccaattgaaaatacactttccttttttattgttctagaagacttatccctctataaagtagccacactcttctgtcttctctcatcacctcgcgcgcatctctctcaacctgaacattttcattttttctaaatcaagaacttcaaatcttgaaactttctaaaaagatggagcttattcctgatcttcccgaaactgtagcctacgagtgtctcctacgctcctcctacaagcaattccctcttatggcctctgtttgcaaactctggcagcgagaaatcagcctctctgattttttccgacaccggaaagcttcaggacatagtcaagagcttgttgtcttgtctcaagctcgggtcgacccggttaaagaactcgtatcgggtaataaaaccatccccacccccgtgtaccgaatctcggttcttgaacttggtaccggtctaaggagcgagctgcctccggttccaggtcattccaacgggttgcctctgttctgcagattagtctctgtcgggtcggatcttgttgtattggggggggtttcccggtaaattggggacccctaaatcgggttcggttttaagtttttaccccacggggggggtgggaagggattcaagggggcccggtccttttngctnggttggatgc

SEQ ID NO: 120205 - DNA, 519 bp, Arabidopsis thaliana
  unsure (1)..(519): unsure at all n locations
nnnnnnnnnnnnnnnnnnnnnnnnnnnnnnnnnnnnnnnnnnnnnnnnnnnnnnnnnnnnnnnnnnnnnnnnnnnnnnnnnnccacgcgtccggattatgctgcggaagactatcccgtagttaaaatggaaaacttacgtgaggctcgaatcttccttttggttactgataatgaaatagagcgagtaagactaccaattaatgatggattagaggatgctatggacaatgttgttctcagatttggacatgtggggaagctcatgaatggcatacgaaatgttgagtatctggagttgtctgctgatactctcgaggtgctttctctatgctgtgagtcaatgccagtgttcaaaaacctcaaatcgttagctattaaaagtactgaaggtcgaggatggcaagcaatgccagttcttctaaggaattgtccacatttagagtttctactcattgagggactcttgcaccatgtcacagataaatgcggggatgcttgtgactgcgttcctcgggag

SEQ ID NO: 120206 - DNA, 478 bp, Arabidopsis thaliana
cagctctatacgactcactatagggaaagctggtacgcctgcaggtaccggtccgggatttccggggtcgacccacgcgttcgcagcttcgcccaatccgaaggtgccatcgcctatgtcacctggtgcgaccctgctttgcaatcgtgcaacccccctgctggtggtaacggtgatcctcaattcgtcggtttgcaaggccaaaactaccaattccacggtatggctgatgaggtgttctccttggtctctacccctgagttgcagatgaactctttgttcaaattcatcgcctctggtaactgcgagtacaacaacaccgtctgctggtctcaccctggtacctatttgggtcaaatcgccatccagtatggtaacgagaagatcttgttgcaggctggttctcactcggagggtgccaccgtcctggtcaacgacaaggtcattgcccctagcgcccatgtgcacaagtaccatg

SEQ ID NO: 120207 - DNA, 324 bp, Arabidopsis thaliana
agccacgaaggaaaagtaacgtttccgataaacttaggtttaagaaaattgagaagaggaacgataatactgaatctgagagtttaagtgttgttgaggaaccgaagaacgataaagaattgagtcttcgagctttgaatcagaatggtgatccattagggcggagagatttagggaggaacgtagtgaagtggattagtcaggcgatgaaagcgatggcttcggattttgcaactgcggaggttcagggggagttttcggagttgaggcagaacgtcggatctggtttgacgtttgtgattcaagctcaaccgtatctcaatg

SEQ ID NO: 120208 - DNA, 591 bp, Arabidopsis thaliana
  unsure (1)..(591): unsure at all n locations
attttaggagagctaatatctggagtaacccaaaacactatataacaccatcttcgttcttttgccgtgataggaaaggattgcttcatgatgttactaaagttttgacagagctagagtttacaatacaaagagtcaaagtcatgacaacaccagatggaagagttttggatatgtttttcatcactgacgcaatggatctattgcacacgaaacagagacaaaccaaaacgtgtgaccatctaacggctgtgcttggtgagcatggtgtgagttgtgagcttgaactagctgggcctgagttagagagtgtgcaacgattctcttcacttccacctttggctgctgatgagctgtttggcccagatgggtttgatattagcggctctagctctaacaaagcggttcttaccgttgataatcagttgagccctgcacatacgttgcttcagattccgttgtgtgatcaaaagggcttttctatggtatcccagggctccaaagccttcggtgccccaattgatacgggaggtctccccaggtaaggtagaggatttgggtntttagggcacggtnaaatgccacccantc

SEQ ID NO: 120209 - DNA, 542 bp, Arabidopsis thaliana
ccgagatttttttcctctgttcggtcggccattgaattgttgttgattcattggctctaaaacgaaaatgggaattctcaacgacgacgccgttttaatcgaaccgggaaaaatctccggagatcccaccgtcgttaccgtcaattgtcctgatgaatccggtctcggttcaactctgtgtagaatcatcctcgaatttggtctctccattacccgagcagatttttcaacagatggaagatggtgttatatagtgttttgggttactccagatattagctctcctaaaattgattgggacagcttaaagaatcgtcttttatcagcttgtccttcttgcttaggctctttctacttctgccttcaatccaatgtctctaagcctccttccctttatcttctcaagttcttttgccgtgataggaaaggattgcttcatgatgttactaaagttttgacagagctagagtttacaatacaaagagtcaaagtcatgacaacaccagatggaagagttttggatatgtttttcatcactgacg

SEQ ID NO: 120210 - DNA, 1153 bp, Arabidopsis thaliana
  unsure (1)..(1153): unsure at all n locations
cgaaatctaaagcatcatctcattaacaaaaataaaacacacaatctcaagattttctacttcttattacaaagattcaatcttcttgtttcttcttgcaaccatgagtcttcttgcagatcttgttaaccttgacatctcagacaacagtgaaaagatcatcgctgaatacatatgggttggtggttctggtatggacatgagaagcaaagccaggactctccctggacctgtgaccgatccatcaaaacttccaaagtggaactatgatggttcaagcactggtcaagctcctggtcaagacagtgaagtgatcttataccctcaagcaattttcaaagatccattccgtagaggcaacaacatccttgttatgtgtgatgcttacactccagcgggagagccaatccctactaacaagcgacatgctgcggctgagatctttgctaaccctgatgttattgctgaagtgccatggtatggtattgagcaagaatacactttactccagaaagatgtgaagtggcctgttggttggcctattggtggttatcccggccctcagggaccgtactattgcggtattggagcagacaaatcttttggcagagatgttgttgattctcactacaaggcctgcttatacgctgggatcaacattagtggcatcaatggagaagtcatgccgggtcagtgggagttccaggtcggtccagctgttggtatctcggctgctgatgaaatatgggtcgctcgttacattttggagaggatcacagagattgctggtgtagtggtatcttttgacccaaaacctattcctggtgactggaatggagctggtgctcacaccaattacagtactaaatcaatgagggaagaaggaggttacgagataatcaagaaggcgatcgataagcttggcttgagacacaaggaacacatttccgcttacggtgaaggaaacgagcgtcgtctcacgggacaccacgaaactgctgacatcaacactttcctttgggggtgttgtcgaaccgtggagcatcgatccgagtaggacgtgatacggagaaagagggaagggtactttgggataggggccacttcaaagggccccaantnnncccccnntttnaaaaaaaccncgaaccct

SEQ ID NO: 120211 - DNA, 787 bp, Arabidopsis thaliana
atgccgggacaatgggagttccaagtcggcccatcggtcggtatctcagctgctgatgaaatatggatcgctcgttacattttggagaggatcacagagattgctggtgtggttgtatcttttgacccaaaacctattcctggtgactggaatggagctggtgctcacaccaattacagtactaaatcaatgagggaagaaggaggatacgagataatcaagaaggcgatcgagaagcttggcttgagacacaaggaacacatttccgcttacggtgaaggaaacgagcgtcgtctcacgggacaccatgaaactgctgacatcaacactttcctttggggtgttgcgaaccgtggtgcatcgatccgagtaggacgtgacaccgagaaagaagggaagggatactttgaggataggaggccagcttcaaacatggacccttacgttgttacttccatgattgcagagactacactcctctggaacccttgaaaggatgatccgtaactcttgaagttgcttctgattgggttttttggaagttccaagcttgtcttttctctacagtgtgtattaagcaattgtaccggttgacactgccggagtttgtgatttggggcctttctttctttttcttctttttataatcttttgggttctgtggttagagcaaattcggtttgctctgtttgtttgacctttattgaaacctttggtattggtactaataatacaatctgaaaaggcctcttcatgtttcaaaaattgagacttactttctaatttt

SEQ ID NO: 120212 - DNA, 625 bp, Arabidopsis thaliana
  unsure (1)..(625): unsure at all n locations
cgccgagcactaatacgactcatatagggaaagccggtacgcctgcaggtaccggtccggaattcccgtgtcgacccacgcgtcgagacagatttgattccatttttattactgttactatcatccaaacccttggtatttgtagccatgagtcttgtttcagatctcatcaaccttaacctctcagactccactgacaaaatcattgctgaatacatatgggttggtggttctggaatggacatgagaagcaaagccaggactctacctggaccagtgactgacccttcgcagctaccaaagtggaactatgatggttcaagcacaggccaagctcctggtgaagacagtgaagtcatcttataccctcaagccatattcaaggatcctttccgtagaggaaacaacattcttgtcatgtgcgatgcgtacactcccgcgggtgaaccaatcccgactaacaaaagacacgctgcggctaaggtctttagcaaccctgatgttgcagctgaagtgccatggtatggttttgagcaaggatacactttactccggaaagatgtgaagtggcctttggtgcctttggggtttccggcctagggcctttttnggtttgggagnatgc

SEQ ID NO: 120213 - DNA, 785 bp, Arabidopsis thaliana
  unsure (1)..(785): unsure at all n locations
caatggagaagtcatgccgggtcagtgggagttccaggtcggtccagctgttggtatctcggctgctgatgaaatttgggtcgctcgttacattttggagaggatcacagagattgctggtgtagtggtatcttttgacccgaaaccgattcccggtgactggaacggtgctggtgctcactgcaactccagtaccaagtcaatgagggaagaaggcggttacgagatcatcaagaaagcaatcgataaattgggactgagacacaaagaacacattgctgcttacggtgaaggcaatgagcgtcgtctcacaggacaccacgagactgctgacatcaacactttcctttggggtgttgcgaaccgtggagcatcgatccgagtaggacgtgatacggagaaagaagggaaaggatactttgaggacaggaggccagcttcgaacatggatccttacattgtcacttccatgattgcagagactacaatcctctggaatccttgatgatcatcagatcaagaaaaaatcttgaatgtcactcaaatttgtgtttcttgcaagattcaaagtttgtgttctctatcaagcaatgtcttaggataagtcaaagatttgctctgcttattctgctttttatttacttcacatcctattgaaaacatttctgtgtattatttatgaataaacattatcttaaaagggctgaaaaatttactannnnnnnnnnnnnnnnnnnnnnnnnnnnnnnnnnnnnnnnnnnnnnnnnnnnnnnnnnnnnnnnnnn

SEQ ID NO: 120214 - DNA, 548 bp, Arabidopsis thaliana
  unsure (1)..(548): unsure at all n locations
ataaaacacacaatctcaagattttttacttcttattacaaagattcaatcttctngtttctccttgcaaccatgagtcttcttgcagatcttgttaaccttgacatctcagacaacagtgaaaagatcatcgctgaatacatatgggttggtggttctggtatggacatgagaagcaaagccaggactctccctggacctgtnaccgatccatcaaaacttccaaagtggaactatgatggttcaagcactggtcaagctcctggtcaagacagtgaagtgatcttataccctcaagcaattttcaaagatccattccgtagaggcaacaacatccttgttatgtgtgatgcttacactccagcggggagagccaatccctacttacaacggggcatgctgcgggttgagatctttgctaaccctgatggtattcctgaggtgccctgggntggattggccagggtncacttttttgcagagggtttactggcctttggtgcccttggggtcctggcctaggccantnctnggtttgggtncaattt

SEQ ID NO: 120215 - DNA, 703 bp, Arabidopsis thaliana
  unsure (1)..(703): unsure at all n locations
tgcaactacagtaccaagtcaatgagggaagaaggcggttctgagatcatcaagacagcaatcgataaattgggactgagacacaaagaacacattgctgcttacggtgaaggcaatgagcgtcgtctcacaggacaccacgagactgctgacatcaacactttcctttgggtatactaacaaacatctttgcgggtttccggattggtaaaaacccccggattgcgatacatttggggatccttttgtgtgttggaatgttgtatgctagggtgttgcgacccgtggagcatcgatccgagtagcacgtgatacggagaaacaggggaaaggatactttcgaggacaggaggccagcttcgaacatggatccttacattgttacttccatgattgcagagaccaccatcctctggaatccttgatgatcatcagatcaagaaaaaatcttgaatgtcactcaaatttgtgtttcttgcaagattcaaagtttgtgttctctatcaagcaatgtcttaggataagtcaaagatttgctctgcttattctgctttttatttacttcacatcctattgaaaacatttctgtgtattatttatgaataaacattatcttaaaaaaaaaaaaaaaagnnnnnnnnnnnnnnnnnnnnnnnnnnnnnnnnnnnnnnnnnnnnnnnnnnnnnnnnnnnnnnnnnnnaac

SEQ ID NO: 120216 - DNA, 1117 bp, Arabidopsis thaliana
cctttgaagacccattcggaatttccgggacgacctacgcgtccgcccaccgacacacttctcgttggacagtctttgaaactcaacggtcggaccaaactcgtaagcagactgtctccatctgtcaacacaaacggaccgtacagtctcgtgatggaagccaagaagctagtcttgtactacacgacaaacaaaactccgaaaccaatcgcttattttgaatacgaattcttcaccaagataacacaattccagtcaatgacgttccaagctgtggaagattccgacacaacgtggggtctagtcatggaaggtgtcgattctggttctaaattcaacgtttcaacgttcctctcacggccgaaacacaacgcgacgttgagttttattcggttagaatcagacggaaacatcagagtttggagttacagtacgttggcgacttccacggcttgggacgtgacatacacggcgtttaccaacgccgacactgacggtaacgacgagtgtaggatccctgagcattgtttggggtttggtttgtgtaagaaaggccagtgtaacgcttgtcctagcgacaaagggcttcttggttgggacgagacatgtaaatctccaagtctcgcaagttgcgatcccaagacatttcactacttcaagatcgaaggagctgatagtttcatgacaaaatataacggtggatcatcgacgacggagagtgcgtgtggggacaagtgtacgagagattgcaaatgtttagggtttttctacaatagaaagagttcgaggtgttggttgggctacgagctcaagacattgactagaaccggagattcttccctggttgcttatgtcaaagctcctaatgcaaacaaaaagtcaactctttgaggtctgaaagtcatatatatatatgaaattattgtgttgtgtgtttaataaggttcgtttgtgtacctttttaaaaataaatggtgtactgattctcaagataaatcctaatacaaagtgaagtgaaaaaaaaaaaaaaaaaagggcggccgctctagaggatccaagcttacgtacgcgtgcaggcgacgtcataactcttctatagttgtacctaatacattcc

SEQ ID NO: 120217 - DNA, 809 bp, Arabidopsis thaliana
  unsure (1)..(809): unsure at all n locations
aatacgactcactttagggaaagctcggtacgcctgcaggtaccggtccggaattcccgggtcgacccacgcgtccgcacaaaaacaaaatgaaattttcaatcacattagctctatgcttcactctctccatcttcttgatcggatcacaagccaaagttccagtcgacgaccaattccgagtggtcaacgaaggtggctacaccgattacagtcccatcgaatacaaccccgacgtacgtggcttcgtacccttcagtgacaacttccgtctctgtttctacaacacaaccccaaacgcatacactctcgctctcagaatcggaaacagagtccaagaatccactctcagatgggtctgggaagcaaacagaggctcaccggtcaaagaaaacgcgacgttgacttttggcgaagacggaaacctcgtactcgctgaagccgatggacgcttggtatggcaaacgaacacagctaacaaaggcgccgtggggatcaaaatcttggagaatggcaatatggtaatatacgattccagtggaaaatttgtatggcagagctttgattctcccaccgacacacttctcgttggacagtctttgaaactcaacggtcggaccaaactcgtaagcagactgtctccatctgtcaacacagacggaccgtacagtctcgtgatggaagccaagaagctagtcttgtacttacacgacaacaaaactccgaaaccaatcgcttattntgaatacgaattcttaccaagatacatcattccagtcatgacgtcaagctgtggagattccgcacac

SEQ ID NO: 120218 - DNA, 709 bp, Arabidopsis thaliana
  unsure (1)..(709): unsure at all n locations
ctctnnnnnnnnnnnnnnnnnnnnnnnnnnnnnnnnnnnnnnnnnnnnnnnnnnnnnnnnnnnnnnnnccacgcgtccgcggacgcgtgggcggacgcgtgggcaaaaacaaaatgaaattttcaatcacattagctctatgcttcactctctccatcttcttgatcggttcacaagccaaagttccagtcgacgaccaattccgagtggtcaacgaaggtggctacaccgattacagtcccatcgaatacaaccccgacgtacgtggcttcgtacccttcagtgacaacttccgtctctgtttctacaacacaaccccaaacgcatacactctcgctctcagaatcggaaacagagtccaagaatccactctcagatgggtctgggaagcaaacagaggctcaccggtcaaagaaaacgcgacgttgacttttggcgaagacgggaacctcgtactcgctgaagccgatggaccgcttggtatggcaaacggacacatgctaacaaaggcggccgtggggggtcaaaattctttgggaattggcaatattggaatttnacggttccagtngaaaatttgtttggaangcttttnttttccaccggaaaattntnngttggcagnttttnaacttaacggtgggccaantgaagaggnttntcattntaanaacggccgncanttgttntgggcagagtgttnctagga

SEQ ID NO: 120219 - DNA, 533 bp, Arabidopsis thaliana
  unsure (1)..(533): unsure at all n locations
nnnnnnnnnnnnnnnnnnnnnnnnnnnnnnnnnnnnnnnnnnnnnnnnnnnnnnnnnnnnnnnnnnnnnccacgcgtccgagcccatcatttttttatttctcctgcgaattctccgccatagattttcttttgaatttctcctgctaactcttgagctccccaaaggcggctacatcggttttgtcacctctactcgctcacttttctccgtccaattttgcagcttttgaagatcaagaggtgaacattcggagtgatgaatcggccaaaggttcagcgtcgtgttggaaagtatgaggttggaaagacgcttggacaaggcacttttgcgaaagttcggtgtgctgttaatactgagacaggagaacgcgtggctctcaaaatacttgataaggagaaggttcttaagcataagatggctgaacagataaggagagaaatttgtactatgaagctgattaaccatccaaatgtagtgcggctgtatgaggttttggcgagcagactaagatatatattggtctagagttc

SEQ ID NO: 120220 - DNA, 783 bp, Arabidopsis thaliana
atcatcggaatttataatttctttctctgagaactataaaccaaacgagttgtccaaaaagaagagatcaaagtttcttcttgaagaaagaaagaaacacaaaagctatggcatattcaactaaactttatcttcctcttaaaacaccatgttttgttccaaagacagtaagagcaaagactttgatgcttcaacagagtcaagttcatgttaaagtcaagaaagccacagtttcacagcctcagccgatcagatactccaccaagaacattgtttttgaagatccgatacaagggatcatctgttacacagatgataatggagaggttatatgtgaaggatacgatgaaggtcctcgttgtcccacacagagtccaatggtagcttcttactcaagagaggtggagattcttgatcttctgcaaagaagttatcaggagctgagcgattcaaacaaggatggtcaaagaccgataattgcttcagaacaagagttcatgatgatcaaatggagcagctttgacttcctctaaatcccctttcttttttcttcatcgaaacatcaaaatctggttctctcttcaaaaaggcctcttgaataagaatgtacagaaaaaaggctatgaaagaagcagcgatttgcttctttcttgtttctcttttgtaagaaacttacgtccagattttgatttcaatctttcccccaaaaaaaacaaaaaaaaaaaaaaagggcggccgctctagaggatccaagcttacgtacgcgtgcatgcgacgtcatag

SEQ ID NO: 120221 - DNA, 971 bp, Arabidopsis thaliana
  unsure (1)..(971): unsure at all n locations
cagtaccggttcgggattccccgactcgacccacgcgtccgttttggtgatatgagtttcatggaagagaagcctcagatgtacaacaatcagtttgggttaacaaactcgttcgatgctggaggtaacaatggataccagtatttcagttccgatcagggcagtaactccttcgactgttctgagttcgggtggagtgatcacggccctaaaacacccgagatctcttcaatgcttgtcaataacaacgaagcatcatttgttgaagaaaccaatgcagccaagaagctcaaaccaaactctgatgagtcagacgatctgatggcataccttgacaacgccttgtgggacaccccactagaagtggaagccatgcttggcgcagatgctggtgctgtgactcaggaagaggaaaacccagtggagctatggagcttagatgagatcaatttcatgctggaaggagacttttgaagtgatcgatggttccttagtttgtaaataaagctgtgttggattttgctgttgggggatggtacaagtcacacctcaagctctatgcattggtatctcatgagcctctcttccatagagagtttctcttttaattttgtcgaaataaaaaaggtgtgatgaagtaaatagaggtataataatatctatctattaagtcttgttttgttctttcatttttgtatttcttttctatttaaaagacagtttattagtcttctgagctctctttttgatctttgttatagcgtatcatcaccctcgaaagtgtaatgttttgtacccccaaacttgtttagcattataataaagtctctttggaacttctctaaaaaaaaaaaaaaaagggcggccgctctagaggatccaagcttacgtacgcgtgcatgcgacgtcatagctcgtctatggtcnnnnnnnnnnnnnnnnnnnnnnnnnnnnnnnnnnnnnnnnnnnnn

SEQ ID NO: 120222 - DNA, 1315 bp, Arabidopsis thaliana
  unsure (1)..(1315): unsure at all n locations
nnnnnnnnnnnnnnnnnnnnnnnnnnnnnnnnnnnnnnnnnnnnnnnnnnnnnnnnnnnnnnnnnnnnnnnnnnnnnnnnnccacgcgtccgcggacgcgtcgagacaaagaagaaaaactaaaaaagagaaccccaaagaatcgaatatttattatttcgccccgaagattctatttctgatcatttacacccctaaaaagagtagagctttcgtgaagccaccatgtgtggaggagctataatctccgatttcatacctccgccgaggtccctccgcgtcactaacgagtttatctggccggatctgaaaaacaaagtgaaagcttcaaagaagagatcgaataagcgatccgatttcttcgatcttgacgatgatttcgaagctgatttccaagggtttaaggatgactcggcttttgactgcgaagacgatgatgatgtcttcgtcaatgttaagcctttcgtcttcaccgcaactactaagcccgtagcttccgctttcgtctccactgtaggttcagcatatgccaagaaaactgtagagtccgctgagcaagctgagaaatcttctaagaggaagaggaagaatcaataccgagggattaggcagcgtccttggggaaaatgggctgcggagatccgtgatccgagaaaaggctcccgagaatggcttggaacattcgacactgctgaggaagcagcaagagcttatgatgctgcagcacgcagaatccgtggcacgaaagctaaggtgaattttcccgaggagaagaaccctagcgtcgtatcccagaaacgtcctagtgctaagactaataatcttcagaaatcagtggctaaaccaaacaaaagcgtaactttggttcagcagccaacacatctgagtcagcagtactgcaacaactcctttgacaactcttttggtgatatgagtttcatggaagagaagcctcagatgtacaacaatcagtttgggttaacaaactcgttcgatgctggaggtaacaatggataccagtatttcagttccgatcagggcagtaactccttcgactgttctgagttcgggtggagtgatcacggccctaaaacacccgagatctcttcaatgcttgtcaataacaacgaagcatcatttgttgaagaaaaccaatgcagccaagaagctcaaaccaaactctgatgnggtcagacggttttatggcattaccttgacaacggcttttttgggcncccccttngagtgggngccnttttttgggganntnttggnctntgnctcgggnggggaacccctgggnttttgggtttgt

SEQ ID NO: 120223 - DNA, 824 bp, Arabidopsis thaliana
  unsure (1)..(824): unsure at all n locations
cttctcagacaagggccaaggttgtccacatgagtgagcttgaaaaacgtgaatgttcttcaaacctcaaaccatgaaaaatgttgataagagctcgacattactctctaccttaatctaaaccacaaaggagaaaaagaatccccttcaagcaacttagatcaaagtgtcatcaagaaactccgagatcaaatctaatctttctctggtttgaatcaagaagagcaaaatcacattctcaaccccatcttttcagtgtggttaaagcaaaaagaatctcgagacaaagaagaaaagctaaaaaagagaaccccaaagaatcgaatatttattatttcgccccgaagattctatttctgatcatttacacccctaaaaagagtagagctttcgtgaagccaccatgtgtggaggagctataatctccgatttcatacctccgccgaggtccctccgcgtcactaacgagtttatctggccggatctgaaaaacaaagtgaaagcttcaaagaagagatcgaataagcgatccgatttcttcgatcttgacgatgatttcgaagctgatttccaagggtttaaggatgactcggcttttgactgcgaagacgatgatgatgtcttcgtcaaatgttaaggcctttcggtcttcaccgcaactacttaggccgtaggttccgctttcggctccactgtagggtcagcatattcccaagaaacctgtggggcccttggnaaagcttggnaatcttttagggggaggggcaggtcagtcccgggggttgggcaaaggcctttgggaatggttcggggcctacccggat

SEQ ID NO: 120224 - DNA, 620 bp, Arabidopsis thaliana
  unsure (1)..(620): unsure at all n locations
catcaaccttcttggaaagagtctcaacacttgcagagaaaaagaacaaggaagatcccggaaaatggcaacggcgattgtacgttcagctctttcccgagcagtgactcgcgcagtccgaagacatccgtcgctcctaagcgaaacttttcctcttccgccggccatgacgatgcttatgaagctgcgaagtgggagaagataacttatctgggtattgctagttgcactgctctagctgtctatgttttatccaagggccatcatcacggcgaagaccctcctgcctatccgcatatgcacatccgcaacaaggagtttccttggggtccggatggtctgtttgaggtgaagcacaacaaagagcactgagtcttgcgtggtcataataacgtcttcttggtttatttgaaaggctaaaatgttttaccgtatttgttctcaccgtttgtcaacgatttgctactccaatctcttttcttttgttgggaaataaaagttaatactttgcttggcaaaaaaaaaaaaaaaaaaagggggccncctnaagggccaanctttgancgggnatnggggnaaancccccaangggcccaaattatccanggggnggttaaagc

SEQ ID NO: 120225 - DNA, 840 bp, Arabidopsis thaliana
ctatggttgccttttccatgagcttttggctttccagcttgctgatcgccatgccccggctgagagggaaagtgagaaagcaaagtctgaagagatcattggattttcaagctcagcagtctctattctaaaagatgctgagctttcagtcactgagattgacgaaacttctctaatccacatggatgttgatcaaagtttcttgcaaattccacaatctgttaaggctgcaatctttgaaagttttgtgaggcagaacatatctgaagcggaagttgatatcaacccatgtattaagcagtttgtgtggagtaattatgggtttccaaccaaaagcagcacaggctttgtatatgctgatggctcactagcactattcaataaactggtaatttgttgtgctcaagaaggtggaacgctttgtttacctgctggtacaaatggaaattatgttgctgctgccaaatttttaaaagctaatgtcgtgaatatccctaccgagtctagtgatggctttaagctgacagaaaagactctaacgaaagcactcgagtctgtgaagaagccgtgggtttgtatatctggaccaacggttagcccctacaggcttggtgtacagcaatgagggagatgggtatacctcgttgtcttccttgtcgctaagtttggagcaaagggcatcatcgatacttcattctcgggattagaatacagtgcaactagctgggatttgaagaacgctttgtcgaaaatggattcttccttatcagtttcgctgcttggatgtctctctttgaatttgctcagtggagctattaaactcgggtttctagttttgga

SEQ ID NO: 120226 - DNA, 498 bp, Arabidopsis thaliana
  unsure (1)..(498): unsure at all n locations
cagctannnnnnnnnnnnnnnnnnnnnnnnnnnnnnnnnnnnnnnnnnnnnnnnnnnnnnnnnnnnnnnnnnnccacgcgtccggaaaaaccctagaaaccattacttatctctcccactggctctgtctctgtcaaatctcggatcgatttcgcggtgggctcgattcgtgattcctcaaagttcatcatccctaaggcactgtcacttaatggcatcggaatcgaaaagctacgctaggagagatcgtcttcttgagattgaggccactgttcgaaagtggtgggaagacgaggatgtattcagagccgaatcttgtgagaatcttccaaaaccaggagaaaagtttttctcaaccttccctttcccgtatatgaatggttatctacacattgggcatgccttttcattgtccaaggttgattttgcttctgcttaccataggctaagaggacctagtgggcttcttcctttgggttcccattgccccggaatgcc

SEQ ID NO: 120227 - DNA, 556 bp, Arabidopsis thaliana
ttgcagagcttgaaggtgttgttaaaagtgctacatcatatgcattaaacagacaactaagcatggatgatcttacaaagcctgtggaagaagagaatatcaagatcactatggaggattttctccacgctatctatgaagttcaacctgcatttggagcctccacagatgacctagagcgctgcagactcaatgggatggtagattgtggtcatcggcataatcacatttacaaaagagctatgcttctagtcgagcaagttaaagttagtactagaagtcctctagtcacttgccttctggaggggcccagtggaagtgggaaaactgctttagcagcaacaattggtatcgatagtgacttcccatatgttaagatagtttctgcggaaactatgattggtctttctgagagcacaaaatgtgctcacattgtcaaggtctttgaggatgcatataaatctccaatgagcatcattatccttgacgatattgaaagattgttggaattcatagcaatcggtcctcgcttttcaaacataatttcacagacgct

SEQ ID NO: 120228 - DNA, 566 bp, Arabidopsis thaliana
ccccctcgatgtcgacggtatcgcataagcttgatatcgaattcgcggccgccgcggtcgtagtcagagagagagacaaatggctatgcctagggcaacctctggtcccgcttacccggagaggttctacgctgctgcatcttatgtcggtctcgacggatctgattcgtcggcgaaaaacgtcatctcgaaattccccgatgatactgcactacttctctatgcgctataccagcaggctactgtaggaccatgcaacactccgaaacctagtgcctggagaccagtggagcaaagcaaatggaaaagttggcaggggctcggaaccatgccctccattgaggcaatgcgtctctttgtgaaaattctggaggaagatgatcctggttggtattcgagggcatctaatgatattccagatcctgttgtagatgtccaaattaatcagagagcaaaagatgagcctgttgttgagaatgggagcacatttagtgagacaaaaacaatttctacgggggatggacgtttggctgtaacccaagataaagatgtagtctcagaagact

SEQ ID NO: 120229 - DNA, 416 bp, Arabidopsis thaliana
gaaactagaaaacgcctatctctgctcattggcttctccatctccgatcaaatccgcggtcgtagtcagagagagagacaaatggctatgcctagggcaacctctggtcccgcttacccggagaggttctacgctgctgcatcttatgtcggtctcgacggatctgattcgtcggcgaaaaacgtcatctcgaaattccccgatgatactgcactacttctctatgcgctataccagcaggctactgtaggaccatgcaacactccgaaacctagtgcctggagaccagtggagcagagcagatggaaaagttggcaggggctcggaaccatgccctccattgaggcaatgcgtctctttgtgaaaattctggaggaagatgatcctggttggtattcgagggcatctaatgatat

SEQ ID NO: 120230 - DNA, 743 bp, Arabidopsis thaliana
  unsure (1)..(743): unsure at all n locations
aaatagcaataattttttattaaatatcttttacatcaaatatctctataagcctcgtctttaaaaccagacacagaaactcctcactttcgaaaaaaacaagatcattacacaaaaatgggacacctaattcctcaaaccggagatgaagagaccgagcttggtttagctgcggttaggctagctaactgtgcagccttcccaatggttttcaaagctgccatcgagctcggtgtcatcgacactctctacttagctgctcgtgatgacgtcaccggatccagttccttcctcacaccttctgagatagctattaggctccccacaaaacctagtaaccctgaagcaccagctctgttggatcgtattcttcgtttacttgctagctactccatggtcaagtgccaaattatcgatggtaacagagtctacaaagcagagccgatttgtcgatatttcttgaaagataatgttgatgaagaattaggaacacttgcttctcaacttattgtcactctcgataccgtcttcctcaatacatggggaggattaaaaaattgtggtacttgaaggaggagttccatttggccgtgccaatggggggtttgaaactctttgcctatattagcaaagatgatggttnagcaaanntttacccgncccggattctnttcnggggttttnaaagancctcaaanttnnggtgggtncgaagggtaatgtgttggttnttagggggngtc

SEQ ID NO: 120231 - DNA, 499 bp, Arabidopsis thaliana
  unsure (1)..(499): unsure at all n locations
aaggggccgggttggtttnccccggttnggcttgcnaactgngcaccntcccaatggttttcaaagctgccatcgagctcggtgtcaccgacactctctacttagctgctcgtgatgacggtcaccggatccagttccttcctcacaccttctgagatagctattaggctccccacaaaacctagtaaccctgaagcaccagctctgttggatcgtattcttcgtttacttgctagctactccatggtcaagtgccaaattatcgatggtaacagagtctacaaagcagagccgatttgtcgatatttcttgaaagataatgttgatgaagaattaggaacacttgcttctcaacttattgtcactctcgataccgtcttcctcaatacatggtaactttcttttcaagattcactctctttcgatttctaatattagatccatatatcaagaatttggagattgatgtttttttgcatggggggaatttaaaaaatca

SEQ ID NO: 120232 - DNA, 864 bp, Arabidopsis thaliana
  unsure (1)..(864): unsure at all n locations
nnnnnnnnnnnnnnnnnnnnnnnnnnnnnnnnnnnnnnnnnnnnnnnnnnnnnnnnnnnnnnnnnnnnnnnccacgcgtccgctctaatggctacaacaaccacatcatgggaagaactcttaggctcaaagaattgggacactatcttagacccattagaccaatcacttagggaactcatcttacgttgtggcgacttttgtcaagccacctacgatgccttcgtcaacgaccaaaactccaagtactgtggagccagccgctacggcaaatcttctttcttcgacaaggtcatgctcgaaaacgcttccgactacgaggttgtaaacttcctctacgccacagctcgtgtttctctccccgaaggtttgcttctccaatcacaatcaagagattcttgggaccgtgagtctaactggtttggctacattgctgtcacgtctgatgaacggtctaaggctttaggacgccgtgagatctatatagctttgagaggaacgagcaggaactatgagtgggtcaatgttttgggtgctaggccaccttcagctgaccccttgctgcacggacccgagcaggatggttctggtggtgtagttgaaggtacgacttttgatagtgacagtgaagatgaagaagggtggaaggtgatgctcggggggctcacaatctatacttctaatcaccccgaatcgaaattcactaagctgagtctacggtcacagttgttagccaagatcaaggagcttctgttgaagtataaggacgagaaaccgagcattgtgttgactggacatagcttgggagctacagaggctgttctggccgcctatgatatagctgagaacggtccagtgatgatg

SEQ ID NO: 120233 - DNA, 415 bp, Arabidopsis thaliana
ctacagagctcgcagcaactagcgcaggatgttggagaaggttgaaactttcgacatgaacagagtcattgatgaattcgatgaaatgactagaaacgctcatcaagtccagaaacaaactttgaaagagattcttctcaagaaccaatccgccatttacttacaaaactgtggtctcaatggaaacgctactgaccctgaagaagctttcaaatctatggttcctttagtcactgatgttgaattagagccttacatcaaaagaatggttgatggtgacacttcacctattctcactggtcaccctgttcctgccatttccttaagctctggaactagtcaaggccgtccaaagtttattcctttcactgatgaattaatggagaacacattgcaactgtttcgcactgctttt

SEQ ID NO: 120234 - DNA, 501 bp, Arabidopsis thaliana
tcgctggagaaaaataaagagagagaaatagagagagagactctgtagaagaagcacatgaattgttctggttttatgatagctttctcttaagaagaagaagaagaaagataaattaaaagggtggttctgagttttaaggattattgtttgaaacaagaagcaagaagaagaagaattgaagaataaaaaagatggagttatctgattgctctaatgaatatgagaagctcgttgttcggatgaacatgcccagggtcgtaattgacaatggagtttgccctaattcaactgtcgtcaagattgatagtgcaagaagcccaggaatattgcttgaatctgtacaacttctcactgatatgaatctctggatcaaaaaagcttacatttcctctgatggaaaatggaatatggatgtttttcatgtgagcgatcttaacggagacaaattaaccgacgagaacctaatccgttacattgaaaagtctattgaaacgtctc

SEQ ID NO: 120235 - DNA, 529 bp, Arabidopsis thaliana
gttggagggttattctcaaaagaggttttagattctatgaaaggttcaacctcgacaaggcctgctatatttgcaatgtcaaaccccacaaaaaatgctgaatgcacgcctcaagatgcattttcgatattaggcgaaaatatgatttttgcgagtggaagcccattcaagaatgtggaatttggaaatggtcatgtacgacattgcaaccagggaaacaacatgtatctatttccaggtattggacttggcactcttttatctggtgctcccattgtctccgacgggatgcttcaggccgcatccgagtgcctagcagcatacattgagcgaagaagaagtgctagaggggattatataccctccaatatcaatgatacgagacataacataaagaatagcagctgcggtgattaatgaagcgattgaggaggatttggttgaaggatatagagaaatggacgctcgagagatccaaaagctggatgaggaggggctgatggagtatgtggaatacaacatgtggaat

SEQ ID NO: 120236 - DNA, 469 bp, Arabidopsis thaliana
  unsure (1)..(469): unsure at all n locations
aaaacgttaaaaataccaaaatttagaaatccaataaaagttgtgaaaaaaagccgcaaagggtcgttgttgtttgtcgcctctcaatggcagcttcttcaactaatgctcgtctcaccaaccctcctcgtctactctccaaaccccgactttcacctacctccgtcgccaatctccgttttccagccgccgatttctccactcgcttctttgccgattcttcgtccccgcggctaaggagtgtaccgtttccggtggtattttccgatcaaaggcgccggcgaagcatgtgaacctagcaatgtctatgtggcttcaaattccacggaaatggagatcggaagtcatgatatcgtgaagaatccgagcttgatctgtgctncantgatggcggnttcaatagncangatggtgattgaaacgagtaaagcccatcgaaattgggtgcagaccttgggttgaaatttcg

SEQ ID NO: 120237 - DNA, 460 bp, Arabidopsis thaliana
cgatcacgcggccgctcttctgtatctaaaagacatatcaaacgaaagaaatcaataaacacaatattctttcttccaaattttctcatttctcatgggcatatctcaagtacactattgcaatggtgaccagaacttagaagcaaaccttctagatcatgaggaaactgaatcattttcagtacctcaaacgaagaactgtaagaggtggctccgtgtctccatatacgcaatctttgtcatcttctgccaaccacttgctacagttctgggtagactgtactatgaaaatggagggaaaagcacatatgtggtaacacttcttcaactcattggcttccctgtactgattctcttccgcttcttttctcgaatcaggcaacccaaatcaacagatacaaatttcagtcagtccccttccttcaccaccctttgcatcggtttacttgtgcactggact

SEQ ID NO: 120238 - DNA, 407 bp, Arabidopsis thaliana
cccacgcgtccggtttttttgtaataccatcaatgtgtgtttaaagaaaggcctcttgtgtatctgcacgacatctcaaacaaaaccaatcaataaaaacaagaaacaatcttctttctcatggacagatctcaagaacactatgccaatggtgaccagaacttagatgcaaaccttatagatcatgaggtggtaactgaatcatcatcatcagctgtgcctcaaaccgagaactataaaaggtggcttcgtgtctccatagacgtaatctttgtcctcttttgccagccactagctacaattctgggtagattgtactatgaaaatggaggaaatagcacatatgtggtaacacttcttcaactcattggcttccctgtactggttctgttccgcttcttttctcg

SEQ ID NO: 120239 - DNA, 1033 bp, Arabidopsis thaliana
  unsure (1)..(1033): unsure at all n locations
cgagccttgaaacttttgattggtccgtctgcagtaccggtccggaattcccgggtcgacccacgcgtccgcttctggagattgctcaggttcctgatgaacatgtcaatgagttcaaatcaattgagaagttcaagatattcaacacaaacaacctatgggttaacttgaaggccatcaaaaagcttgtggaagctgatgcacttaaaatggagatcattccaaacccaaaggaagttgatggagtcaaagttcttcaactggaaactgcagccggtgctgcgataaggttctttgacaacgctatcggtgttaatgtacctcgctcacggttcttgccagtgaaggcaagttcagacttgctgctcgtccagtctgatctctacaccttagttgatggctttgtcactcgaaacaaagctagaactaacccctcgaacccgtcaattgaattgggacccgagttcaagaaggtggctactttcttgagccggtttaagtccattcctagtatagtcgagctcgacagccttaaagtgtctggtgatgtctggtttggctcttccattgttctcaagggcaaggtgactgtggcggcaaaatccggtgtgaagcttgaaattccggacagggccgtggtcgagaacaagaacatcaatggtccagaagacctctgaataaaacaaattcaagtcttcttccctctctcatggaagacacatcttgatactcctttaattggtgtgaaaagatcacaagtggcacagcaaagcaagtttatgaagaaagaataaataatgtttctttttctttttgcagcttagcaaagtcttttcctctttggactttattttaattttgctctttgaattttcccaaaacatcacatttatatgttcgattatatttgggttctatccacaatcatttttctttttgattaanaaaaanaattnnnannnnnnnattnntnnnnnnnnnnnnnnnnnnnnnnnnnnnnnnnnnnnnnnnnnnnnnnnnnnnnnnnnnnnnn

SEQ ID NO: 120240 - DNA, 1208 bp, Arabidopsis thaliana
  unsure (1)..(1208): unsure at all n locations
acggtcaaatgttgacattcacacttttaaccagagcaaatatccccgtgttgtggcagatgagtttgtgccatggcccagcaagggaaagaccgacaaggagggctggtatcctcccggtcatggtgatgtattcccagccctcatgaacagtggaaagctcgatactttcttatcacagggtaaggaatatgtgtttgttgccaattcagacaacttgggtgccatcgttgacttaacaatcctgaagcacttggtccagaacaagaacgaatactgcatggaggttacacccaaaaccttagctgatgtaaaggggggaactctcatttcttatgaaggcaaagtccagcttctggagattgctcaggttcctgatgaacatgtcaatgagttcaaatcaattgagaagttcaagatattcaacacaaacaacctatgggtgaacttgaaggccatcaaaaagcttgtggaagctgatgcacttaaaatggagatcattccaaacccaaaggaagttgatggagtcaaagttcttcagctggaaactgcagctggtgctgcgataaggttttttgataatgcgattggtgtgaatgtacctcggtcacggttcttgccagtgaaggcaacttcagacttgcctcttgttcaatcggatctgtacacactcgtagatggctttgtcacaagaagcaaagctagagcaaaccccgcaaacccagcgatcgagttgggacccgaattcaaaaaggtagcgagtttccttagccggttcaagtccatcccgagtatagttgagctcgatagtctttaaggtctcaggtgatgtttggtttggctccggcgttgttctcaagggcaaagtgacagtaaaggcaaacgccgggactaaacttgaaatccctgacaatgccgtgctcgagaataaggacatcaacggtccagaggatctgtgaaaaaacttaaaagacttactttgatgcgtcttcttctgtttttcacttctcttgtaaatgagagcacttttgatatgaaacctctttcatgtgaaaagacacaagaataacgagagttgaatatgtttttggcagtttaatttaatccctccaaaaaaaaaaagggcagccactctagaggatccaagctgacggacgcgtgcaaacgaagtnnnnnnnnnnnnnnnnnnnnnnnnnnnnaacgggaat

SEQ ID NO: 120241 - DNA, 667 bp, Arabidopsis thaliana
  unsure (1)..(667): unsure at all n locations
tgnccccaccngggantcggnaatttcggngacnnctgcccgaagttttgnancatggggaattcccggccggtntccngtgaggcacttcagcttctcttgtcatcggatctttcncnctcgtnatggctttgcacangaacaaggttggacaaaccccacaaccccagcgatcgagttgggacccgaattcaaaaaggtagcgagttcccttagccggttcaagtccatcccgagtatagttgagctcgatagtctttaaggtctcaggtgatgtttggtttggctccggcgttgttctcaagggcaaagtgccagtaaaggcaaacgccgggactaaacttgaaatccctgacaatgccgggctcgagaataaggacatcaacggtccagaggatctgtgaaaaaacttaaaagacttactttgaggcgtcttcttctgtttttcacttctcttgtaaatgagagcacttttgatatgaaacctctttcatgtgaaaagacccaagaataacgagagttgaatatgtttttggcagttttttttaaaaaaaaaaaaaaaaaaaaaaaaaaaaaaaaaannccccaaaaaaaaaaaaaagggcggccgctctagaggatccaagcttacgtacgcgtgcatgcgacgtcaagaatcttctatagt

SEQ ID NO: 120242 - DNA, 519 bp, Arabidopsis thaliana
  unsure (1)..(519): unsure at all n locations
nnnnnnnnnnnnnnnnnnnnnnnnnnnnnnnnnnnnnnnnnnnnnnnnnnnnnnnnnnnnnnnnnnnnnnctcaacaatggtgtttgaagcattcgaagtcggcacagtcccattcaattccgatggttggggaccaccagatgcttccgacacttcctccaccagcgtcgcggcggcgaatctcctcccaaacgtccccttcgcttccttctcacgatccgaaaaactcggacgcgttgctgattggactcgagctctctcaaatccatcagctcgtcctcacaccggatccaaatcagatccatcagcgatcttcgatttctcagcttttgcagtagatgaaggatttggtctaacaaactcaggtggaaacgccgacgaagacgccgctttccgattagtcgacggaaaaccaccgccgcgtcctaaattcggacctaaatggagattcaatcaataccattaccgaaatcagcttcctcaacgtcgtgatgaagaagttgagctaagaaacgtga

SEQ ID NO: 120243 - DNA, 1220 bp, Arabidopsis thaliana
  unsure (1)..(1220): unsure at all n locations
acgactcactatttggaaagctggtccgcctgcaggtaccggtccggaattcccgggtcgatccacgcgtgcgcccacgcgtccggaggtccagtcattttggtccttatgagtggtggaccaatcgatgtaaccttcgctaagaatgatcctcgtgttgctgccatcatttgggctgggtatccgggtcaagcgggtggagctgccatcgccaatatcatctttggtgctgctaatcccggaggaaaactaccaatgacatggtatccacaagattacgtggccaaagtgccaatgacggtaatggccatgagagcatccggtaattatccaggaaggacatacagattctacaaaggtccagtagtatttccatttgggttcggtttaagttacactaccttcactcatagtttggccaaaagcccattggcccaactatcagtttcactctccaatctcaactctgccaataccattctcaactcttcatcacactccatcaaagtgtctcacaccaactgcaattcatttccgaaaatgccccttcacgtcgaagtatcaaacacaggtgaattcgatggaacacacacggtgtttgtatttgctgagccgccgataaacggaataaaaggattgggtgtgaacaaacaattgatagcgttcgagaaggttcatgtcatggcaggggcaaaacagaccgttcaagttgatgttgatgcttgcaagcatcttggtgtagtggatgagtatggaaagaggagaatcccaatgggtgagcataagctgcacattggtgaccttaaacatactattttggtccaaccgcaactttgacggacgcataaaaaaaccaacaaataaggaaagcattttaacaaagtggagtgtttcctcttatttatataatatagagagataggtttattttcttatgaaattattactcaagaaagtatgaatttgtaaagaaccaccaaagggttgcttcttggttgtgtcttttttcctttaatttttttttggaccaaaggtattgtaacttgtggctcccaacataagaaatacaaggagcccttgtaaaatgctgaaactaaagataaatgataaatttgatatataaaggatttttagagtnnnnnnnncttttgggnnnnnnnnnnnnnnnnnnnnnnnnnnnnnnnnnnnnnnnnnnnnnnnnnnnnnnnnnnnnnnnnnnn

SEQ ID NO: 120244 - DNA, 1131 bp, Arabidopsis thaliana
atgttctccagctacatcgactactatagggaagctggtcgcctgcaggtaccggccggattccgggtcgcccccccgccgagggaaccaaggatttggtgcagcggaggcagcggcgcgtgaagccgacgcgacggttcttgtgatgggattagatcagtcgatagaggcagagacacgagatcgaaccgggcttctcttaccgggttatcaacaagacctagtgacccgtgtagctcaagcttctagaggtccagtcattttggtccttatgagtggtggaccaatcgatgtaaccttcgctaagaatgatcctcgtgttgctgccatcatttgggctgggtatccgggtcaagcgggtggagctgccatcgccaatatcatctttggtgctgctaatcccggaggaaaactaccaatgacatggtatccacaagattacgtggccaaagtgccaatgacggtaatggccatgagagcatccggtaattatccaggaaggacatacagattctacaaaggtccagtagtatttccatgttgggttcggtttaagttacactaccttcactcatagtttggccaaaagcccattggcccaactatccagtttcactctccagtctcacctctgccaataccattctcaactcttcatcacactccatcaaagtgtctcacaccaactgcaattcatttccggacaaatgccccttcacgtcgaagtatcaaacacaggtgaattcgatggaacacacacggtgtttgtatttgctgagccgccgataaacggaataaaaggattgggtgtgaacaaacaattgataccgttcgagaaggttcatgtcatggcaggggcaaaacagaccgttcaagttgatgttgatgcttgcaagcatcttggtgtagtggatgagtatggaaagaggagaatcccaatgggtgagcataagctgcacattggtgaccttaaacatactattttggtccaaccgcaactttgacggacgcattaaaaaacccaccaataaggaaagccttttaaccaaaaaaaaaaaaaagggcggccgctctagaggatcccagcttacgtacgcgtgcatgcgacgtcatagtcttctatatgtcact

SEQ ID NO: 120245 - DNA, 1255 bp, Arabidopsis thaliana
  unsure (1)..(1255): unsure at all n locations
acggcgcatgcacgcgtacgtaagctcggaatctctatagcggctccccacgccccaaggaaaagtagcgagtgtaatgtgttcgtacaaccaagtcaatggaaagcccacatgtgctgatgaaaatctcttaaagaacactattcgtggtcaatggcgtctcaatgggtacattgtctcagattgtgactctgttgatgttttcttcaaccaacaacattacactagcactccggaagaagccgccgccagatccattaaagccggtttggacttggactgcgggccgtttttggcgattttcacggaaggtgcagtgaagaaaggattgttaacggagaatgacatcaatttagcacttgctaatacattaacagtccaaatgagacttggtatgtttgatggtaaccttgggccgtacgctaatcttgggccaagagatgtttgtactccggcccataaacatttagctcttgaagcagcccatcaagggattgttcttctcaaaaactctgctcgctctcttccactctcccccagacgccaccgcaccgtcgccgtgattggtccaaactccgacgtcactgagactatgatcggcaactatgcagggaaagcatgcgcctatacgtcgccgttgcaagggatttcaagatacgcgaggacacttcaccaagctggctgtgccggcgtggcttgcaaagggaaccaaggatttggtgcagcggaggcagcggcgcgtgaagccgacgcgacggttcttgtgatgggattagatcagtcgatagaggcagagacacgagatcgaaccgggcttctcttaccgggttatcaacaagacctagtgacccgtgtagctcaagcttctagaggtccagtcattttggtccttatgagtggtggaccaatcgatgtaaccttcgctaagaatgatcctcgtgttgctgccatcatttgggctgggtatccgggtcaagcgggtggagctgccatcgccaatatcatctttggtgctgctaatcccggagggaaactaccaatgacatggtatccacaaggtttccgtggcccaaagtgccattaacggtaatggccattaagggatccggtaattttccaggggggccattcaggtttttcaaagggccctgagttttccatttgggtcggttaagtanactccctnacttaaaggtttgccaaacccntttgnccacntttagtttcttccanttaaattttnaaatccttttna

SEQ ID NO: 120246 - DNA, 968 bp, Arabidopsis thaliana
acccctagcgtccgcccacgcgtccgaaagatctctataaataccatcattcactttctatcacatgaaaactaaaaaacacaaacatcacatgtatacacacatatagttacaaacacacatacacaaaacacagatatataaaaatgtcttgttataataaagcactattgatcggcaacaaagtcgtcgttatacttgtattcctcttatgtttggttcactcgtcagagtcacttcgaccactgtttgcatgtgatccagcaaacgggttaacccggacgctccggttctgtcgggccaatgtaccgatccatgtgagagttcaagatttgctcggaaggctcacgttgcaggagaagatccgcaacctcgtcaacaatgctgccgccgtaccacgtctcggtattggaggctatgagtggtggtccgaggctctccacggcatttccgacgttggtccaggcgctaagttcggtggtgcttttcccggtgccaccagcttccctcaggtcatcaccaccgcagcttctttcaaccagtctctatgggaagagatcggacgggtggtgtctgatgaggcaagagctatgtacaatggtggcgtggccggtctgacatattggagtccgaatgtgaatatcttgagggacccgcggtggggccgaggccaagaaactcccggagaagatcctatcgttgccgcaaaatatgccgccagctacgtccggggacttcagggtactgctgccggtaaccgccttaaagtcgccgcatgttgcaaacattacactgcttatgatcttgataattggaatggcgtcgaccgtttccacttcaacgctaaggtaaatcttcttcacatattatatatatctaatatcgtatatagtaagaaaatattttgcaatttattatcaaatttatataaccaattttgcatgttttgtttcaaagtttgtatgcat

SEQ ID NO: 120247 - DNA, 566 bp, Arabidopsis thaliana
  unsure (1)..(566): unsure at all n locations
ggagtccgaatgtgaatatcttgagggacccgcggtggggccgaggccaagaaactcccggagaagatcctatcgttgccgcaaaatatgccgccagctacgtccggggacttcagggtactgctgccggtaaccgccttaaagtcgccgcatgttgcaaacattacactgcttatgatcttgataattggaatggcgtcgaccgtttccacttcaacgctaaggtcacccaacaagatttagaggacacatacaacgtgccattcaaatcatgtgtttacgaaggaaaagtagcgagtgtaatgtgttcgtacaaccaagtcaatggaaagcccacatgtgctgatgaaaatctcttaaagaacactattcgtggtcaatggcgtctcaatgggtacattgtctcagattgtgactctgttgatgttttcttcaaccaacaacattacactagcactccggaagaagcccgccgccagatcccttaaaagcccgggtttgggacttgggcttgcgggcccgtttttttgggggtttttcacnggnagggtcccagttangaaagg

SEQ ID NO: 120248 - DNA, 675 bp, Arabidopsis thaliana
  unsure (1)..(675): unsure at all n locations
accacgcgtccgcccacgcgtccgcctccgaatctagggtttttgtctctagcctcctcaagctttgcaaacaatcatggcgacccagatcagcaagaagagaaagttcgtagccgatggtgtgttttacgctgaactcaatgaggttctaaccagagagcttgctgaggatggttactctggtgttgaggttcgcgtcactcctatgcgtactgagatcatcattagagccactcgtactcaaaacgttctcggtgagaagggaaggaggattagggaattgacatctcttgtacaaaagagattcaaatttcctcaggacagtgttgagctttatgctgagaaggttgctaacagaggtctttgtgctattgctcaggctgagtctcttcgttacaagcttcttggtggtcttgctgttcgtagggcgtgctatggtgttttaaggtttgttatggagagtggagctaaaggatgcgaagtcaattgtgagtggaaaactccgtgctgcacgtgctaagtcgatgaagttcaaggatggttacatggttcccccaggtcagccaccaaggaatccattgatccccagtgaggatgcnccctaaanaaggggcnctggccaangngaacatcctactgggcccagggaanaagccgtgancatcctatnttnct

SEQ ID NO: 120249 - DNA, 1027 bp, Arabidopsis thaliana
gtgcactatacaagagcttgacgtcgcatgcacgcgtacgtaagctcggaattcggctcgagtgtcgacccagatcagcaagaagagaaagttcgtagccgatggtgtgttttacgctgaactcaatgaggttctaaccagagagcttgctgaggatggttactctggtgttgaggttcgcgtcactcctatgcgtactgagatcatcattagagccactcgtactcaaaacgttctcggtgagaagggaaggaggattagggaattgacatctcttgtacaaaagagattcaaatttcctcaggacagtgttgagctttatgctgagaaggttgctaacagaggtctttgtgctattgctcaggctgagtctcttccttacaagcttcttggtggtcttgctgttcgtagggcgtgctatggtgttttaaggtttgttatggagagtggagctaaaggatgccaactcattgtgagtggaaaactccgtgctgcacgtgctaagtcgatgaagttcaaggatggttacatggtttcctcaggtcagccaaccaaggaatacattgatgctgcagttaggcatgttcttcttagacagggtgtgcttggtctcaaggtgaagatcatgcttgactgggaccccaagggcaaacaaggaccgatgacaccattgcctgatgttgtgatcatccatacaccgaaagaagatgatgtatacattgcacctgctcaggttgttactcaagctgcttttgtaccggaagctccattaaccaccacagattatccagcaatgccagttgcttagagagccttttcgttttctggtttaaaacccaatggggatggttctttttttgggacagtactagttttctcatgttattctaagttaatacttaaagttctggaggttgaattacatcaaggatatgaatgtatgtttttcgttatcttttgtttaaattttatttatctattaacgatttgtctttttttaattagaaaatttgtgtttatcgacacc

SEQ ID NO: 120250 - DNA, 475 bp, Arabidopsis thaliana
aacgaatctgctcctttagtcatcttctcttttgagaaaagatagatcttcttcaccttcttcattgatctcagatcccgatcccgtctccttatcttccgccggcgacttcttcatttttctcttctacctaccacctcttaatcattctctctccccccgcagatctagcgaatcgaattcgaatccttaagtagtagtggaatcatggcgctaagcatgcgaaaagcgatcggagttgttaaggatcagactagtatcggcatagcgaaggtagctagcaacatggctccagatctggaagttgcgatcgtgaaagctacaagccacgacgatgatcaatctagtgacaagtatatccgcgagatccttagcttaacttcactctcccgtggctacgttcacgcctgtgtcacctttgtttcacgccgtctaaaaagacgccgggctggatcgttgttctcaggctcttatg

SEQ ID NO: 120251 - DNA, 427 bp, Arabidopsis thaliana
gcacgcgtcagcattattttgttaacaaaaaaaaagaagaattatctggcaaagtgtttaatttccgagaaagttgaagcagagaagcagaaagtttcagaattctcttttctccaagtttaacgcgtttttagctcaaagctcacacacacgaccactctattcctcctttaacctttgtgtttgtcaatttgtgtttcctcttttgtcgactcatttctcgattcaatctcgattttttttttttttgtttttatggaaatctaatgaactttttttatggatttgatctgttaaagtttcgattaagaagatagtggtttaggtttacggttttgtaattgatttattatctgtaatgggttgtgaggtttcaaagttatctgcactttgttgtgtttcagagtctggaagatcgaatcctgat

SEQ ID NO: 120252 - DNA, 424 bp, Arabidopsis thaliana
ttcggacgcgtgggggaaaagagagagatgaggaagttgaatccgcttctgaaacgaggcttgaaggctattgaaaatggtgatttgttgaagatcctccaaagtgaaattcgtcacgaaatctcccatcctcgtttccagggcgttgagaccggttctctaggagatttcaaattggattgggatttcaccggaaagccaagatattgttctgaagagacagtttgattcacgcgagaaggttgtggtctctgctttattgcaaccagaacctatagaactagaagatgatttagtgtttcctagggaagctcatgccaaagtttgtatcaaaaagcctggtctcagctctatcttgcagtttcattgccgggtttacgaatcaggatctggatcttctcatttcgacatcgagagcgcctac

SEQ ID NO: 120253 - DNA, 857 bp, Arabidopsis thaliana
  unsure (1)..(857): unsure at all n locations
cggaanttcccgggtgcgacgcgcatcgcgtccggtgtatctgaccttccacctgccgctctttgaaaatcactcgccgtgtctctctaagcttcttcttcactgtgaaaacctcagatcgcaaatatgcacgcaccggtactcgttctgagcgattcgttgaagcgtgaatctggaagtaaggttcatcatggtaatatccaagcttccaaggctgttgctgatatcattcgtacaacattgggtcctcgttctatgttgaagatgcttcttgatgctggtggagggattgttgttactaatgatgggaatgctattcttcgtgagctagatgtcgctcatcctgcagctaagtcaatgattgagttgagccgtacgcaagatgaagaagttggtgatgggacaacgtctgttattgttctagctggtgaaatgcttcacgttgcagaagcgtttcttgagaagaattaccatcccacagtcatatgccgagcttacatcaaggctctcgaagattctattgctgttcttgacaaaattgctatgtcaattgatatcaatgaccgttcacaagtgctagggttagtcaagagctgcatagggacaaagttcactagccaatttggagatcttattgcggatttggctattgatgccactactactgttggtgttgatcttggacaaggtttgagggaggtagacattaaaaagtacatcaaggttgagaaagttcctggtggtcagttcgaggactctgaggttcttaaaggagttatgtttaacaaagatgttgttgctcctggtaaaatgaaaagaaagattgtcaacccacggattaatcctcttgactgtcc

SEQ ID NO: 120254 - DNA, 788 bp, Arabidopsis thaliana
ctgcaggtacggtctggaattcccgggtcgaaattaaaatggaaggcttaacattgatagtagtgatgatgtcaagctttatgttgggagggcaaggtcagcagataagcacgccatgcacctcctccatgatctctaccttcactccatgtctcaacttcatcaccggaagcagcggcggttccgtcactcccaccgccggctgctgcgactccttgaagacgttgaccaacactggcatgggctgtgcttgcctcatcctcactgctaacgtcccgctgcctactggcttcatcaatcggactctggcgcttgctctacctcgagcctgcaaaatgggcggtgtacctattcaatgtcaagctgcggggactcctctaccagctccaggtcaggttccatttttgattgctccaccacctcaggtgtctgcttttagcccgggagcgtccaaggcggcggggacaacaccaacacaggcacctgcaccggatactcccgcggatggaccaacgggacccacaactaaatcaggaattcgacccgtagatcagcccatgcaacccaccggcctcgctcaatcttctacttctccatttctcccgttgcttttcatatctcttatcctgttgaacttataagcccaatcgacgtgtaaagtctttaacctgttatgcatgtgttgtcagatattttcattaaaaaaaaaaaaaaaaaaaaagggcggccgctctagaggatccaagcttacgtacgcgtgcatgcgacgtcatgctgttctatagtgt

SEQ ID NO: 120255 - DNA, 654 bp, Arabidopsis thaliana
  unsure (1)..(654): unsure at all n locations
nnnnnnnnnnnnnnnnnnnnnnnnnnnnnnnnnnnnnnnnnnnnnnnnnnnnnnnnnnnnnnnnnnnnnnnnnnnnnnnnnnnccacgcgtccgccgccattagagtcactggtgctagcagcagtagacgaagcagtcagaccaaatccaaggctgctcctactcccatcgataccaaggcctctaccaaacgccgaaccggctccatcccctgcggcaagcgtaccgattttggctactccaaagacttccacgatcactacaccatcggcaagttgctcggccatggtcaattcggctacacctacgtcgccatccacagacccaatggagatcgcgtcgccgtcaaaagactcgataagtctaagatggttcttcctattgctgttgaggatgtcaagcgtgaggttcagattcttattgctctctctggccacgagaatgttgttcagtttcacaatgcctttgaggatgacgattacgtctatattgttatggagtgagtctcctttcctcatttcttatagtctatccttcatgtatcggtggcattcacattttactcttgcctttcttctaggttgtgcgaaggaggcgaattgctggataggatattatccaagaaaggtaatcggtactccgagaagatgcag

SEQ ID NO: 120256 - DNA, 456 bp, Arabidopsis thaliana
aatcttttttttggttttaaaaagaaagttgggatttttgaagcgatcttgtttctctaccccggccgctgctatcttcacttccgcagacgtgggcaatataccaaagacgaagaacgctctcttcaacccgaatccgcctgctctatcttcgtcttcttgttggctctgcaattcgcaggccaagcagatcatagaactgagaatcagggaaggctcgaatcaggggcttcttcgtgtacatgctctgtttaacaacgaggaggcatcacgtgaaagtgaagataagaatgggtttggtttgctacctgcggatattttctctttgcctcaggagaagtttggaagtaatgcaagtggcgaaaaggatagtgaaaatataattgatgtagagacatctcttgcgggtcctcatggtggaggaactcgagctgggctctttagaaactccatttc

SEQ ID NO: 120257 - DNA, 633 bp, Arabidopsis thaliana
ccggctggaaaaccggggggcgccacgcgtccgcttcctttgatcagtaaaaaaagtctccgccttcttcttctctttcctctttcccctaattgatcaatcatgcttcttcatttctagttctctcttcctgactcatttccctcattagatcttcttctccactaaacccataattgaaagaagctctttttttgcttacattgaagttaaaaaatcatcacttgttttgtttttgaagaaacacacataaagtttgtctttttacttctcaaatttggttgttttcactcaatttcaatcttgctttctgattcagattctgggttttcttcagaattcccagagaagttgttggaattgaatttttcacttttttgttcataaaagttctagtctttttagatgaacatggacaaggaaacagagcaaaccctaaattacttacctttgggtcagagcgatccctttggcaatggcaatgaaggaacaattggagatttccttggaagatactgcaacaaccctcaggagatttcaccgttaactctacaatccttctctctgaattctcagatctccgagaatttcccaatctctggtggaatcagattccctccatatccaggtcaa

SEQ ID NO: 120258 - DNA, 480 bp, Arabidopsis thaliana
ataccaaaacacgagagatgtttgtggaggaagtgatggagttggtggagcttaaacctcttagaaactctatagttggtcttcctggtgtagatggtctttcaacagaacagaggaagaggcttactatagcagttgaattggtagctaatccatcaataatcttcatggacgagccaacatctggtcttgatgcaagagctgctgccattgttatgcgtactgttaggaatactgttgatacaggaagaactgttgtttgtacaattcaccaacctagcatcgacattttcgaatccttcgatgagttgctgttgatgaaacgaggaggacaagttatatatgctggaacactaggacatcactcacaaaaactcgttgaatactttgaggctattgaaggggttccaaagatcaaggacggatacaatcctgcgacgtggatgcttgacgtcactactccttcaatggagtcacaaa

SEQ ID NO: 120259 - DNA, 1754 bp, Arabidopsis thaliana
  unsure (1)..(1754): unsure at all n locations
ctacgacgaaggatgactccgtccacgttcttcttcactgtttgacaataagctccaattttcagacttttcatttcaaacttgtgggtctcattttcctctggcctatataaatccactatcctccacttctgtctttcatcatcattccacataaacaaaatatcttcttgctcattattcatcatcaatctactactccgtaaactttgcttcctctgtttgtattagctcagaagagatatgggaagtactccgactgatttacccggtgaggatgtcgccgataacagatccggcgtcggcggtggtatttctgacgtctacggtgaggattccgccaccttggaccagcttgtcaccccttgggttacctctgtcgctagtggctacacattgatgcgtgatccgagatacaacaagggacttgcgtttactgataaagaaagagatgctcattacttaactggtcttcttccccctgtgattttgagtcaggatgttcaggagaggaaggtgatgcacaatctccgtcagtacactgttcctctgcagcgttacatggccctgatggatcttcaggaaaggaacgagaggttgttctacaagcttttgattgataacgttgaggagttgcttccagttgtgtacacaccaacagttggtgaggcttgccagaagtatgggagcattttcaggaagccacagggtctctacatcagtttgaacgagaagggcaagattcttgaagttttgaagaactggccccagagaggaatccaagttattgttgttactgatggtgagcggattctcggtctgggagatcttggttgccagggaatgggaattccagtggggaaactttctctttacaccgctttgggaggaatccgtccatcagcttgtcttccaatcaccattgatgtgggtacaaacaatgagaagttgctaaatgatgaattctacatcggtcttaaacagcgaagagcaactggccaggaatatgctgaattcctgcacgaattcatgtgcgctgtaaagcagaactatggagagaaagtgttggttcagtttgaagattttgcaaaccacaatgcgtttgaccttttgtctaagtacagtgatagccatcttgtcttcaatgacgatatccagggtactgcatccgtggtgcttgctgggcttattgccgctcagaaggtgcttggtaaaaaactggctgaccataccttcctgttcttgggtgccggagaggctggaaccggtatcgctgagctaattgctcttaagatttcgaaagagactggagctcccatcactgagacccggaagaagatttggcttgtggactccaagggactgattgttagctcacgcaaagaatctcttcagcacttcaagcagccatgggcacatgagcacaaacctgtgaaggacctcattggtgctgttaatgcaatcaagccaaccgttctcattggaacatccggtgtgggtcagactttcacaaaagaagttgtcgaggccatggctaccaacaacgagaaaccgttgattcttgctctctcaaaccctacttctcaagctgagtgtcttgttgaaaggttncaacatggccaagggncgtgaatcttttggagtgnagccntttntccngtttnncggtggaaanctatttcctggcaggaanattntanatttccngggttggcttggttccagctnggattggccgnttaatccccngtttc

SEQ ID NO: 120260 - DNA, 1016 bp, Arabidopsis thaliana
  unsure (1)..(1016): unsure at all n locations
tatacgactcctatagggaaagctggtacgcctgcaggtaccggtccggatttccctggtcgacccacgcgtccggtctcatatgacatctaaatgtgattcatgtcctcactcctgattatacaacaaaattataatttggttttcatgctgctcctcgaatctaatcatatattgtgcttaaaaaaagggtcgtgcaatctttggaagtggaagcccatttgatcctgttgtgtacgatggcaaaacctacttgcctggccaggttcgtgctatttcaacaacttcttctctctcaactttgtacatctgacaatcttagagctcacatcatatttccactatcctacttaacttcaggcaaacaattgctacattttccctggtctgggtcttggtttgatcatgtctggggcatttcgtgtccgtgatgacatgctcctcgcagcttgtaagtaaaaataaacttcagaaaatcaaacatggatactgataaagacactcaaagattctcaatggcatctctctctcatgttntcaacagctgaagctttggccgcacaagtgacagaagagcattaccccaatggtctgatctacccgccatcctcaaacatcagagagatctctgctaacattgcagcctggggtcgccgcaaaacctatgacctcggttagtggaatgaaactgtctaactctttaatgagacttgctgactctctaattcaagtctaaatccatgtatttgggtgangattggcgtcaaacctgcccctgcaaggatcttgtcaagtttgcagagagcagcatgtacagccctgtgtacagaaactaccgttaaaaaagttttgttgaagaaacctgcagattatactattcacaacccttgatagtttcttaaggcttgtatttaagttttttgtttgtttgtttgttgtttgttttctcttctcccttatgatgctgtatgtgaactctctctcaaacaaagctgataaataataaattgttacat

SEQ ID NO: 120261 - DNA, 950 bp, Arabidopsis thaliana
  unsure (1)..(950): unsure at all n locations
cggaagaagatttggcttgtggactccaagggactgtttgttagctcacgcaaagaatctcttcagcacttcaagcagccatgggcacatgagcacaaacctgtgaaggacctcattggtgctgttaatgcaatcaagccaaccgttctcattggaacatccggtgtgggtcagactttcacaaaagaagttgtcgaggccatggctaccaacaacgagaaaccgttgattcttgctctctcaaaccctacttctcaagctgagtgtactgctgaacaggcttacacatggaccaagggtcgtgcaatctttggaagtggaagcccatttgatcctgttgtgtacgatggcaaaacctacttgcctggccaggcaaacaattgctacattttccctggtctgggtcttggtttgatcatgtctggggcaattcgtgtccgtgatgacatgctcctcgcagcttctgaagcattggccgcacaagtgacagaagagcattacgccaatggtctgatctacccgccattctcaaacatcagagagatctctgctaacattgcagcctgtgtcgccgccaaaacctatgacctcggattggcgtcgaacctgccacgtgcaaaggatcttgtcaagtttgcagagagcagcatgtacagccctgtgtacagaaactaccgttaaaaaagttttgttgaagaaacctgcagattatactattcacaacccttgatagtttcttaaggcttgtatttaagttttttgtttgtttgtttgttgtttgttttctcttctacattatgatgctgtttgtgaactctctctctgtctttgctgataaataataaattgttactaatataaaaaaaaaaaaaaaaaaaagnnnnnnnnnnnnnnnnnnnnnnnnnnnnnnnnnnnnnnnnnnnnnnnnnnnnnnnnnnnnnnnnnnnnnn

SEQ ID NO: 120262 - DNA, 534 bp, Arabidopsis thaliana
  unsure (1)..(534): unsure at all n locations
gagaggctggaaccggaatcgctgagctaattgctcttaaaatttcgaaagagactggaaaaccaatcgatgagacccggaagaagatttggcttgtggactccaagggactgattgttagcgaacgcaaagaatcgcttcaacatttcaagcagccatgggcgcatgaccacaagcctgtcaaggagctcttggcagctgttaatgcaatcaagccaactgttcttattggaacctctggtgtgggtaagactttcacaaaggaagtagtggaggccatggctaccttgaacgagaaaccattgattcttgcactctcaaacccaacttctcaagccgagtgcacggcggaagaagctttacacatggaccaagggtcggtgcaattctttgcaagtgggagcccgtttgacccctgttcaggttggggtggaaaaaatttaacgcttggcccggaaaaaacttntaaaatttncccngggtttggnnttgggttaacantncngggncntttgttccccngnaaaanttttt

SEQ ID NO: 120263 - DNA, 476 bp, Arabidopsis thaliana
atacccgataatctcttctatgtttggtagagatatcttcgcaaagtcttatctttccttaccgtgttccgtgttttttgatgatttatgtgaacaagattaagcagagacatcaacgattatgaagtacgttttggtgacacgaggagtggtgagtggtcctggcaaacgtgtcactgctagtagcattggacttctccttcaagcatgtggtcttcgtgtcacttccattaaaattgatccttatcttaacactgatgctggaacaatgtctccgtttgagcatggagaagtatttgtattggatgatggtggagaggtggatttggaccttggaaactatgaacgatttttagacagtacattgacccgtgacaacaatataactactggaaagatataccagtcagttattgacaaggaaaggaagggggactacctcggaagaactgtacaggttgttcctcatgttactg

SEQ ID NO: 120264 - DNA, 572 bp, Arabidopsis thaliana
aacactcactcactcacttatttccattacctctctcactaaaaatcaaacttttctctgtctcactctctccaaaaacagaggaaggagaacaaaccaagaactcaagctcccctgctcttctcatctttcttcttcgttttctattttctttcttctttattctttgattcttttgaaatgaatcatctttacaaaaacccatttcgcatttatgaaattagtttccatttctgcgcgagtctactcttgtgtttcttactcttctctgctcaagctgttgcaggtggtggaggtggtggtcactcttgggatggaatcgtggtgactcaggcgaactatcaggcactccaagctatcaaacacgaactcattgacttcaccggagttctcaaaagctggaacaactctgcctcctctcaagtttgctccggctgggctggaatcaaatgcctccgaggtcaagtggtcgccattcagctcccttggaagggacttggcggtactatctctgagaagattggacagcttggaagtctcagaaaacttagcctccacaacagtgttatcgc

SEQ ID NO: 120265 - DNA, 518 bp, Arabidopsis thaliana
  unsure (1)..(518): unsure at all n locations
nnnnnnnnnnnnnnnnnnnnnnnnnnnnnnnnnnnnnnnnnnnnnnnnnnnnnnnnnnnnnnnnnnnnnccacgcgtccggccatttcaagccttatgcaggagccatttcgttcagtaccacttatatggatagttcatgaagatattcttgcaaatcggttacctgtttaccaaaggatgggccagaattctcttatctcccactggagaagtgcttttgcgagagcagatgtggttgtctttccacagtttaccctgccgatgttgcatagcgttcttgatgatgggaacttcgttgtgattccagaatctgtagttgatgtttgggctgcggaaagctacagtgaaacccatacaaaacaaaatctaagggaaattaacgaatttggtgaggatgacgtgatcatcttggtgcttgggagctccttcttttatgatgagttttcttgggataatgccgtggcaatgcacatgttgggaccacttttaacacgatatgggaggagaaaagataca

SEQ ID NO: 120266 - DNA, 594 bp, Arabidopsis thaliana
cactctttgggactcacttagggaattctggtacgccagaatgtaccggtccggaattcccgggttgacccaggcgtccgtataaatatttctctgcttttaatttccaatttgctctgattcattcacaaataacaatcctctcttcgtttttgtttttcttttggatccaaagctctcttaaatctgtaaatcaacaatggccgccaccactgagaatctccctcaactcaaatccgccgtcgatggccttactgagatgagtgagagtgagaagagcggattcatcagcctggtttcacgttacctgagcggtgaggcacaacacattgagtggagtaagatccagactcctaccgatgaaatcgttgttccctacgagaaaatgacccctgtctcccaagatgttgccgagaccaagaatctgttggacaaacttgttgtgttgaagcttaatggaggtcttggaacaacaatgggatgcactggcccgaagtccgttatcgaagttcgtgatggtttgacatttcttgatctgattgttattcaaattgagaatttcaacaacaagttttgttgtatggttccgttagt

SEQ ID NO: 120267 - DNA, 745 bp, Arabidopsis thaliana
  unsure (1)..(745): unsure at all n locations
tgatactccagctccnnnnnnnnnnnnnnnnnnnnnnnnnnnnnnnnnnnnnnnnnnnnnnnnnnnnnnnnnnnnntacccacgcgtgcgcgcacgcgtacggtttctggttgtagaagtccatacactcttcggcagtgggaaagaacttcagatacaacagaagactgcatatcataagccctgtccttgccatgccagccttacagtgaacaaccacaaacgatgtgtggatggaaaaggacttgtgctacccagccaaattagatatgtgaaatactttgaaagaattttgacctacttcaacggtgaaaaccaaccaggccgtaggtgtatgcttaggggattccggctccataggtgtccctattggattaggccatccatcactatttcagatcacaatggtgttctctttaccacgaaaaagcatcctcggaccaaggatctctcgcctgaagacttttggttcagtgccccaaagaaaggggttatggtctttgccttacctggagagccaggtctaacagaattggctggggacttcaaaatccaatttcatgaccggcaaggagatttctactgctggttaaacacgacaatgatggaaaatagagtgatcctaaaaaccagtgagcttgatgggtttgacaagaggaagctaccatcgcctggatttatggttgaagatgttctagctgatataaatgcaacaatccttacgaaccctagttctgaaacagca

SEQ ID NO: 120268 - DNA, 465 bp, Arabidopsis thaliana
  unsure (1)..(465): unsure at all n locations
cggacgcgtccgcccacgcgtccgctttgtcccactctctctctttctctttcttgtaccaaaagctttttgaatctccaagattatagcaaaaccaaagataaaatactaacttaaaagatttctgaaaataatgagttgcaatggttgtcgagttctacgaaaaggttgcagtgagaattgcatcctccgtccatgtattcaatggatcgaatcacctgaagctcaaggccacgcccccgtcttcgtcgctaagttcttcggccgtgccggtctaatgtctttcatctccgccgtaccggaatctcaatgccctgctttgtttcagtctttgctatacgaagcttgtgggagaactgtgaatccggtgaacggagccgtcggatttattgtggacggggaattggaatgttttgtcaaagcggcggttnagacgggtgctttcgtgggtngttctttaaaacc

SEQ ID NO: 120269 - DNA, 479 bp, Arabidopsis thaliana
cactttttcaaattgtcgtctaaagtctctaaaaccaccatcgaagtcttgacagagagaattcgaatcggacagagaatttcttccgtagtttttcttgtaagcgaaaaagaagtttagttagctcgtgtgagagaagggtgtaatgagctgttttggttggtgtgggagtgaggattttcgcaacgctactgacactggcccaaggccagcgcataacccagcaggttacaatggaggccactaccaaagagctgatccacccatgaaccagcctgttattcccatgcagcctatttctgtaccagccattccagtggatgagctgagagatataactgataactatggttcaaagaccttgatcggcgacggttcttatggaagagcgttttatggtgttcttaaaagcggtggtgcagctgccatcaagaaacttgactctagtaagcagccagatcaagaatttctttcccaga

SEQ ID NO: 120270 - DNA, 801 bp, Arabidopsis thaliana
ctctacgacttacttagggaacgctggtacgcctgcaggtaccggtccggaattcccgggtcgacccacgcgtccggtcacaaaacaaaactcgctgcaaataaatacctttgtttacctcttcttctccttcactcacaacatctcaatttcattctctcttctctctccaatttcacaacaatgggagtcaaaagtttcgttgaaggtgggattgcctctgtaatcgccggttgctctactcaccctctcgatctaatcaaggttcgtcttcagcttcacggtgaagcaccttccaccaccaccgtcactctcctccgtccagctctcgctttccccaattcttctcctgcagctttcctggaaacgacttcttcagtccccaaagtaggaccgatctcactcggaatcaacatagtcaaatcggaaggcgccgccgcgttattctcaggagtctccgctacacttctccgtcagacgttatattccaccaccaggatgggtctatacgaagtgctaaaaaaaaaaggccggcccttgttcgggaaatttaatttgagtaagaaaactgggcagggatattccctggtggaaatcgaccccccttgaaatcacccgcccggcaatggttaaatgcaaccgccgggggttacctttaacgaacggctacctccccgcgagtggagcccatcctggaccctggtatgggaaaggtcacaactttgggcgaggtccgggtcaccataaaccccaatatgtgcacggcgtttttgcgcctccccctttaagaagggttttgga

SEQ ID NO: 120271 - DNA, 1204 bp, Arabidopsis thaliana
ttaggtcacactatagaagatctatgacgtcgcacgcacgcgtacgtaagctcggaattcggctcgagctcaatttcattctctcttctctctccaatttcacaacaagtgggagtctaaagtttcgttgaaggtgggattgcctctgtaatcgccggctgctctactcaccctctcgatctaatcaaggttcgtcttcagcttcacggtgaagcaccttccaccaccaccgtcactctcctccgtccagctctcgctttccccaattcttctcctgcagctttcctggaaacgacttcttcagtccccaaagtaggaccgatctcactcggaatcaacatagtcaaatcggaaggcgccgccgcgttattctcaggagtctccgctacacttctccgtcagacgttatattccaccaccaggatgggtctatacgaagtgcttaagaacaaatggactgatcctgagtcagggaagttgaatctgagtaggaagatcggtgcagggctagtcgctggtggaatcggagccgccgttggaaatccagctgacgtggcgatggttaggatgcaagctgacgggaggttacctttagcgcaacgtcgtaactacgccggagtaggagacgcaatcaggagcatggttaagggagaaggcgtaacgagcttgtggcgaggctcggcgttgacgattatccgagcgatgattgtgacggcggctcagctagcgtcttacgatcagttcaaggaagggatattggagaatggtgtgatgaatgatgggctagggactcacgtggtagcgagttttgcggcggggtttgttgcttcggttgcgtctaatccggtggatgtgataaagacgagagtgatgaatatgaaggtgggagcgtacgacggcgcgtgggattgtgcggtgaagacggttaaagcggaaggagccatggctctttataaaggctttgttcctacagtttgtaggcaaggtcctttcactgttgttctcttcgttacgttggagcaagttaggaagctgcttcgagatttttgataccattcttttattgatgatgatgatggcgactgtttatattgatttattcatttttgaaatagtgaacacaagaaggaactaggaagagggggattcaatatattttttgttcaagcattgttgttaaatacaattcaattttagtttctat

SEQ ID NO: 120272 - DNA, 443 bp, Arabidopsis thaliana
cttcttctctcttcctcatatttattactctctctttcacaaacacacagaaaataaataaataaaattaattaatgtgagaaaatcaattcaaaaatttggacatacgtatcatctgagagaagaagggtttggtgaataccggcgggtggaaccgacggcgatggcgaagaccggtgttttcgattcggatccgacggcgattgctaaagccaaggaactgaagcgtgagatgaagaagttgctgattaagatcgatgacgaagatgatttgggtgttcagacgattgatcagttacaggacgctttgtctgcgttgagagaagcgacgatgaggaagatggcgaaatcttcctcgttagagatgctcgagactgtgtcttgtcctgaggagtttcgttgtcctctctctaatgagcttatgagggattccgtcgttttgg

SEQ ID NO: 120273 - DNA, 429 bp, Arabidopsis thaliana
cttaaaaagagctctgctttgagatcttagccattaagttctcttgatgatgtctggttcaagattagcctctagactaataataatcttctcaataatctccacatctttcttcaccgttgaatcgattcgactattccctgattcattcgacgatgcatcttcagatttaatggaagctccagcatatcaaaacggtcttgattgctctgttttagccaaaaacagactcttgttagcttgtgatccatcagctgttcatatagctatgactctagatccagcttacttgcgtggcacggtatctgcagtacattccatcctcaaacacacttcttgccctgaaaacatcttcttccacttcattgcttcgggtacaagtcagggttccctcgccaagaccctatcctctgtttttccttccttgag

SEQ ID NO: 120274 - DNA, 512 bp, Arabidopsis thaliana
agctctatacgactcacttattaagggaaggttgtacccctggaggtcccggcccggatttccgggttcaaccaagccttccgccaagccttccgggaaagctttcgctgcactcgctgtggggtgcgtcctctggcctctggtagctggccatggatgggttaccaatccacaacctagaggttacaccggtactcaggatggtgctagccaaactgctgcctgtggtattgcaggaacataccctcaagttgtttctctgaccaacggagattacttgaacgtttcttggacaatcggaggcggacacgatggaaatggagttggaccaaacacttgcagattcgcttggtctctttccgatacctctacttccgatttcaatagccacgttctcattgacggcctcaactgctcagctggaaacaaattcaaatctttccaagtcaacactgcagtgactactccatctactgcttacttgcaatttagatggtccgctggtgatggtg

SEQ ID NO: 120275 - DNA, 365 bp, Arabidopsis thaliana
gagaaatcttctgagcgaaattctgacaaaagagatgatggaatgggataatcagcgacaacccaataaccatcactcttctaatcttcaagggatcgacgttaatggcggctccggcgccggaggacgaatgtacgtgaaggtgatgaccgatgagcagtatgaaactctcaggaaacagattgctatttacggcaccatttgtgagcgtcttgttgagatgcataaaactctcactgctcaacaagatcttgcaggagggagaatgggacgactatatgcagacccaatgatgtcatctttaggtcataagatgactgcttgacaaaggtggactcctacgccagtccagctttagattcttg

SEQ ID NO: 120276 - DNA, 633 bp, Arabidopsis thaliana
ccttgttgtactctcaaattcttgggtcgttctgagtcgtctccgcgttaaatcttttccctttttgatcctttcttcctttcttcttcttcttcgcattgatttggtcctccttcctcttctattctattcattaagaacctaatcttcatcttctccatcttcttcttcacggactccacttcgctcatccaggaaggtttattagtagtaaccaatccaagtgttccttttgtttgaagcaacaagctttgtgatattatcctgagagacaatgtttggtttaaggaaatcaccggcaaatcttcccaagcataactcagtcgacctcaagtcttccaagccaaatcctttcgattcagatgatgaatctgacaacaaacatacccttaacccttctaagaggactacctctgaaccctctttggctgatatgacaaacccttttggtggtgagagagttcagaaaggagatagtagttcatccaaacagtcattgttttcgaactccaaataccagtacaagaacaatttccgtgattctggtggtattgaaaaccagtcggttcaggagcttgaaggttatgctgtgtacaaggctgaagagactacgaaatctgtacaaggttgttt

SEQ ID NO: 120277 - DNA, 514 bp, Arabidopsis thaliana
gccaaagctgttaactttttctttttggccatttcctatttctcccttcgtctccatcaagcaaccctctctctctctctctctctatcatcatcatcgcagaggagacgatcttacgcgacgaatccttgagagattgagagggacaagcgagttttgacccaaggattgttgacggtctatattgaacaagtaaacaaggatgcgtaagtggatctgttgtacatgtcaaatagaagactcaaatgaagagcaacaactgaaaagttcacagcagcaatctgatgcaaatcataagaattcaaaaccagcacctgttgcaaaacatgaggttaagaaggaagctcttcccatcgaggtccctcccttgtctttggatgaggtcaaggaaaagactgaaaattttggatccaaggcactgattggtgaagggtcttatgggagagtatattatgcgacactaaatgatggtgtggcggttgctctgaagaaacttgatgtcgcaacctgaagc

SEQ ID NO: 120278 - DNA, 425 bp, Arabidopsis thaliana
accacgcgtccgtaactttttctttttgggcatttcctatttctcccttcgtctccatcaagcaaccctctctctctctctctctctatcatcatcatcgcagaggagacgatcttacgcgacgaatccttgagagattgagagggacaagcgagttttgtaggtgtctcagaccggacccaaggattgttgacggtctatattgaacaagtaaacaaggatgcgtaagtggatctgttgtacatgtcaaatagaagactcaaatgaagagcaacaactgaaaagttcacagcagcaatctgatgcaaatcataagaattcaaaaccagcacctgttgcaaaacatgaggttaagaaggaagctcttcccatcgaggtccctcccttgtctttggatgaggtcaaggaaaagactgaaaattttg

SEQ ID NO: 120279 - DNA, 996 bp, Arabidopsis thaliana
  unsure (1)..(996): unsure at all n locations
nnnnnnnnnnnataccactcactaagggaaagacggtacgcctgcaggtaccggtccggaattcccgtgtcgacccacgctgatctgtaaagccattatcactaccaatccaaaagagcttttattaatacaccttactcgtgaccggattcgcagagttcacgagcttccgagtcaaaaacactctaaaacaaaaccatgactttgttccatagactcgatctcatcgatccgtacacgtgtacaccactcatcgtccgtgaaacctccattgttgaaccttcatcattgttcctagggtttccttccttcatcgacgaagacattgaagatctcttcgagttttcatcacctaatcctctcgatctattcgaaaccgtgacggatctggttaagattaagaaatctccgtcgtcttgcaagtacaaggtgattcgtcggagattagagccggagtatccattgaagtatctttgtgaccgtgtttctgatttggaatcaaagtttgatagattgggtagtcctaagagtgataggatgtatacattgacgaaggagataaagggaagtggtgagaggaagtataaatgggaggcggagattcaaggaccgttggagaggatgtataagttggaagctgagattgaaggttcgggagagaggaagtatagatggacgacggagattaaaggagggaagatggatgaggaagggttaaagttagctgctttgaagaaggagaaggcgaaagctatagctattgctgctgctgaagcggagaagaagatgaataagaataagaagaagagttataattggacgacggaggtgaagagtgagagagagatgggtgaggtttcgcatacttatatcatcaaggctactactggaggaaaaaaaaaaaaaaaaaaaaaaagggcggcgtctagagattcagctnnnnnnnnnnnnnnnnnnnnnnnnnnnnnnnnnnnnnnnnnnnnnnnnnnnnnnnnn

SEQ ID NO: 120280 - DNA, 553 bp, Arabidopsis thaliana
  unsure (1)..(553): unsure at all n locations
cnnnnnnnnnnnnnnnnnnnnnnnnnnnnnnnnnnnnnnnnnnnnnnnnnnnnnnnnnnnnnnnnnccacgcgtccggaaaatttcagatgaaaactttggaattagctttacctccatctccaccgtctttagttccttcttttaactacaattccaccgcacgaagcgtcgggaatgatgtcagaaccaacttcgatgttcaactttttctaaggaaacctaaacaccaaaaatcagaacctgtcgtcgttattcaacaacctcagattcaaccgcaaaatccaagttctcgttgttctacttctgatattctcagactaatggattctctttctttaccaggaaacgaagatatttactcttgtcttgccaaagaatcagccagagaaaacgatcaacgtggagctcacgagctacaagtgcatatcatgaagtctagtattagacccacgatcacttttatcaatcgtcttcttttgatgcatgtttcgtgtgggcgtttagatattacacgccagatgttcgatagaatgcctcacagagattttcat

SEQ ID NO: 120281 - DNA, 731 bp, Arabidopsis thaliana
gtatctccgtggatcaatcgcagccgttcattctgttcttcgccacgcgtcttgtccagagaacgtcttcttccatttcatcgctgctgagtttgactctgcgagtcctcgtgttctgagtcaactcgtgaggtcgacttttccttcgttgaactttaaagtctacatttttagggaagatacggtgatcaatctcatatcttcttcgattagactagctttggagaatccgttgaactatgctcggaactatctcggagatattcttgatcgaagtgttgaacgagtcatttatcttgactcggatgttataactgtggatgatatcacaaagctttggaacacggttttgaccgggtcacgagtcatcggagctccggagtattgtcacgcgaacttcgctcggtatttcacttccggggtctggtcagacccggctttaccgggtctaatctcgggtcaaaagccttgctatttcaacacaggagtgatggtgatggatcttgttagatggagagaagggaattacagagagaagttagagcaatggatgcaattgcagaagaagatgagaatctacgatcttggatcattaccaccgtttcttttggtgtttgcgggtaatgttgaagctattgagcatagagggaaccaacatggtttaggaggagacattttacgaagaagtttttggtcatttgcattcttgttctgtgagcttgtttgcattg

SEQ ID NO: 120282 - DNA, 1301 bp, Arabidopsis thaliana
  unsure (1)..(1301): unsure at all n locations
nnnnnnnnnnnnnnnnnnnnnnnnnnnnnnnnnnnnnnnnnnnnnnnnnnnnnnnnnnngtccgaccacgcgtccgcccacgcgtccgctgtaacattaccaaaacgaaaccttccttgtggattcccacttctttcttctgttttcttcttcctcttctttaaattggatgttttgggcaagaaacagagagaaacacgttaatttgagagtttgtcattgaatatttggtttgcaatggaaagagattttctgggtttgagcgacaagcagtatctaagtaataacgttaagcatgaggttaacgatgatgctgtcgaagaacgagggttaagtacgaaggcagctagagaatgggggaagtcaaaggtttttgctacttcaagtttcatgccttcttcagatttccaggaggctaaggcgtttccgggtgcataccagtggggatcagtttctgcggccaatgttttccgcagatgccaatttggtggtgcgtttcaaaacgcgacgccgcttttactaggcggttcagttcctttaccaactcatcctctcttgtcccgagtggcttcctccggatcatctcctcagctcacaatcttttatggcggaactataagcgtctttaatgacatatctcccgataaggctcaagccatcatgttatgcgccgggaacggtttgaaaggtgaaactgnagatagcaaaccggttcgagaagctgaaagaatgtgtagggacacacccgttgctgcgactaatgcaatgagcatgatcgaatcattcaatgcagctcctcgtaacatgattccttcagtccctcaagctcggaaagcatccttggctcggttcttggagaagcgcaaagagaggcttatgagtgcaatgccatacaagaagatgcttcttgatttgtcgaccggagaatccagtggaatgaattactcttctacttctcctacataaaacctacactttttttttttttttttacaatggtaatttgtaattgtaatcattagattatgattatatagttaccatttatattcttacgagcaggagaagacgttagggcgtctctgtatttgatcattgtttgtaatgctttggtctgtttattgtaggattacattataactttaagaactaacagatatatgtttgtcatggactcatgtctgtcaagaatttaatatcaaataaaattcactataaaaaaaaaaaaaaaaaagnnnnnnnnnnnnnnnnnnnnnnnnnnnnnnnnnnnnnnnnnnnnnnnnnnnnnnnnnnnnnnnnnn

SEQ ID NO: 120283 - DNA, 982 bp, Arabidopsis thaliana
  unsure (1)..(982): unsure at all n locations
cnnnnnnnnnnnnnnnnnnnnnnnnnnnnnnnnnnnnnnnnnnnnnnnnnnnnnnnnnnnnnnnnnnnnnnnccacgcgtccgcggacgcgtgggcggacgcgtggggtttgaaaggtgaaactggagatagcaaaccggttcgagaagctgaaagaatgtatggaaaacaaatccataacactgctgctacctcatcaagctctgccactcacactgataatttctcaaggtgtagggacacacccgttgctgcgactaatgcaatgagcatgatcgaatcattcaatgcagctcctcgtaacatgattccttcaggtatgtgtgtctaatatcaacatcaaaacaaaatataatcaagatttttgcttcctcaaatcatatgtctaaactcgaaaattgcttttttccagtccctcaagctcggaaagcatccttggctcggttcttggagaagcgcaaagagaggtttgattttggattttttttctttatagaaaattttgaggtttttcaattaattaaaaacaatcttttgtgggggcggccttatgagggccatccaaccaagcaaaggttttgggttttcgcccggagattcagtggaagaaatatttttcaattctcaaacaaaaacctacaccttttttttttttttttacaatgggaatttgcaattgtaatcattagattatgattatatagtcaccatttttattcttaccagcagtagaacacgttagggcgtctccccattcgaccattgtttgtaatgctgtggtctgttaattgtaggattgcattatacctttaagagctaacgagatatatgtttgtcatggactcatgtctgtcaagaatttaatatcgaataacattcactataatttttttccgcccaaagaggcctcaaacccctaggtcagccgctctagaggatcccagctcacgcacgcgtgcatgccacgtcaaagtgttgtaga

SEQ ID NO: 120284 - DNA, 541 bp, Arabidopsis thaliana
  unsure (1)..(541): unsure at all n locations
ggtttgattttgtattttttttctttatagaaaattttgaggtttttcaattgaatctaaaagaattgatgttgttggtgcaggcttatgagtgcaatgccatccaagaagatgcttcttgatttgtcgaccggagaatccagtggaatgaattactcttctacttctcctacataaaacctacacttttttttttttttttcacaatggtaatttgtaattgtaatcattagattatgattatatagttaccatttatattcttacgagcaggagaagacgttagggcgtctctgtatttgatcattgtttgtaatgctttggtctgtttattgtaggattccattataactttaagaactaacagatatatgtttgtcatggactcatgtctgtcaagaatttaatatcaaataaaattcactataatttttttaaaaaaaaaaaaaaaaaaaacacaaagnnnnnnnnnnnnnnnnnnnnnnnnnnnnnnnnnnnnnnnnnnnnnnnnnnnnnnnnnnnnnnnnnnnnnnnnnnncat

SEQ ID NO: 120285 - DNA, 530 bp, Arabidopsis thaliana
ctcactatagggaaagctggtacgcctgcaggtaccggtccggaattcccgggtcgacccacgcgtcccaatcgatgcagtttctggcttccgaagaagaaaagatcatgcgcgaatactcgaatcgagagttctatgttttgtggaaaccatagccagagattggaaggtcaatggattccatgccctattgatccttctcagagaatctcgaatggcatgtaaagagatgtcctttacttaaacaaactgtagaattgtctggtcaacgattttatcagaagggtattaatgctgggaacgacgaagaagaagaaaagatgggatcttgttctcttgttacttcagagatgaagagaaatctgctctatagtatgagtgtttctaagtttcatcagcttattaagaaaattgaggatgttcatggcggtatttgtaaagatatcgaagattcgtatttgtcacctgaagcttgtaacatatggtttaaataggagatagataggaaattaccatttcaagagaaacat

SEQ ID NO: 120286 - DNA, 1893 bp, Arabidopsis thaliana
tacaactcattttagggaaagctggtccgcctgcaggtaccggtccggatttcccgggtcgacccacgcgtccgttcaagagaacaacttcttaaccacgaatcttcagagagagatttcaggaaacaaaatggtgaagatctgttgtattggagctggatatgtaggaggaccaacaatggcagtgattgcattgaaatgtccagatattgaagtggcagttgttgatatctctgttcctagaatcaacgcttggaacagtgatcagcttccgatttacgagccaggtcttgacgatatcgttaagcaatgcagaggaaagaatcttttcttcagtactgatgtggagaaacatgttagagaagctgatattgtctttgtctctgttaacacaccgactaaaacgactggtcttggagctgggaaagctgctgatctcacttattgggagagtgctgcgcgtatgatcgcggatgtatcggtttctgacaagattgttgttgagaaatcgactgttccggttaaaacagctgaagctattgagaagattttgacacataacagtaaagggatcaagtttcagattctttcgaatcccgagttttttgctgaaggaaccgcgattaaggacctatttaatccggaccgtgttcttatcggagggcgggaaaccccagaagggtttaaagcggtgcagactctcaaggatgtgtatgcacactgggttcctgaaggccaaatcataacaaccaatctctggtctgctgagctgtccaagcttgcggcaaacgctttcttggctcaaaggatttcatcagtgaatgctatgtcggctctgtgtgaagccacaggcgcagatgttactcaagtgtcttacgctgttggtactgattcaagaatcggttccaaattcttgaacgctagtgttggattcggaggttcttgtttccagaaggacattctgaatctcgtctacatctgtcaatgcaacggacttccagaagtggcggaatactggaaacaagtgatcaagatcaacgattaccaaaagaaccggttcgtgaacagaatcgtgtcctctatgttcaacactgtctccaacaagaaggttgcgattcttggattcgcattcaagaaagacactggtgacacaagggaaacacctgccattgatgtgtgtaaaggtctattaggagacaaagcacagatcagtatctatgatcctcaagtcacagaggtaccagattcagagggatctctccatgaacaagttcgactgggaccatcctcttcacttgcagccaatgagcccaaccacagtgaaacaagtgaccgtgacttgggacggatacgaagctacaaaagacgcacacgcggtttgcgttttgactgagtgggacgagtttaagtcgttagattaccagaagatcttcgacaacatgcagaaaccggcttttatcttcgacggaagaaacattatgaatgttaacaagttaagagagattggtttcattgtttactccattggtaagccacttgacccatggctcaaggacatgcctgcctttgtctaatcacaaggcaaaacctggttgattcttgtttcttactttcattgtttgtgcttttttgctttcgctttcatataaattttagtctcaagattcgatttgtgaagtcttgaagagttgtttcttacattttacaatgtgtttcttatgctaagctcttataattttgtgtttcacattttgtcaaaagctcgtgtaattgttgtttccttagaaaaaagcaataaaggtttagtttttaaaaaaaaaaaaaaagggcggccgctctagaggatccaagcttacgtacgcgtgcatgcgacgtcatagctcgtctaagggt

SEQ ID NO: 120287 - DNA, 783 bp, Arabidopsis thaliana
  unsure (1)..(783): unsure at all n locations
gacgtctgtatcaaacaagaagattgcggttctcggtttcgcattcaagaaagacaccggtgacacaagggagactccagccatcgatgtgtgcaagggtcttttagaagacaaagcaaggctaagcatttacgacccacaagtgactgaggatcagatccagagggatttatccatgaacaagttcgactgggaccatcctctacatttgcagccaatgagcccaacaacagtgaaacaagtgaccgttacttgggacgcatacgaagcaactaaggacgctcacggtatctgcatcatgaccgagtgggatgagttcaagaaccttgatttccagaagatctttgacaacatgcagaaaccagctttcgtgttcgatggaagaaacattatgaatctgcaaaagctaagggagattggtttcattgtttactccattggtaagcctctcgacgactggctcaaggacatgcctgccgttgcctaatgatgttcattgctgactctttcgtcctccatcatttgtgcttttcttcttcttgtggtttgtctttaagacttgttatatttcttacaatatgtttgttatgttctctggtgtgtgttttgttttttttggtattactttcatatttttttggtcgaagaggacttgtattcgacaatgtcgcttcaattttggttgtctccttagaaactaaataaatattggtttataaaaaaacaaaaaatcnaaaaaaaaaggcggcgcgtctaaaggaacaagataacgtnnnnnnnnnn

SEQ ID NO: 120288 - DNA, 711 bp, Arabidopsis thaliana
  unsure (1)..(711): unsure at all n locations
ccggnncggaannccggcgccgacccacgcagtagcgcggtacgttcgctcgctcatctctgtctgaatctcacaagaagaagtgaaagatggtgaagatatgttgtattggagctgggtatgttggtggaccaacaatggcagtgattgcattgaaatgtccagacgttgaagtagcggttgttgatatctctgtaccacgtatcaacgcttggaacagtgacacgcttccgatttacgagcctggtcttgatgatgttgtgaagcaatgccgtggcaagaaccttttctttagtactgatgttgagaaacatgttagggaagctgatattgtgtttgtttctgtcaacacaccgactaagactagaggtcttggtgctggtaaagctgcggatcttacgtactgggagagcgctgcgcgtatgatcgctgatgtttcggtatcggataagattgtcgttgagaaatcgactgttccggttaaaacagctgaagctatttgtggaagattttgacacataaccagtaaaggggnttaaagtttcaanatntttcgaatncccgagttttttggcggaagggacccncgattaagggccntttttaatccgggcccggtttnntntncggngggggggaancccnnaagggtttnaaaccggntaaaacttcnaagnatttttttcnccttgggtncttaagccaaaaaaa

SEQ ID NO: 120289 - DNA, 974 bp, Arabidopsis thaliana
  unsure (1)..(974): unsure at all n locations
cgggaattaccggggtggcccacacgcgtccgaacaaattttaaaagagggatttacaggaaacaaattggtgaaaatctgttgtattggagctggatatgtaggaggaccaacaatggcagtgattgcattgaaatgtccagatattgaagtggcagttgttgatatctctgttcctagaatcaacgcttggaacagtgatcagcttccgatttacgagccaggtcttgacgatatcgttaagcaatgcagaggaaagaatcttttcttcagtactgatgtggagaaacatgttagagaagctgatattgcctttgtctctgttaacacaccgactaaaacgactggtcttggagctgggaaagctgctgatctcacttatttgggagagtgctgctcgtatgatccgcggatgtatcggtttctgacaagattgttgttgagaaatcgactgttcccggtgaagncaacttgaagntatttnggaggttttaatgcataacagtaaaggaatcaaggttcaggttctttcggatccggagtttcttcctgaaggaactcctatcgctgatctttttaaccctgaccgggttttgatcggagggcgagaaacacctgaaggattcaaagctgttcagacacttaaagaggtttatgctaattgggttcctgaaggtcagatcatcacaactaatctctggtctgctgagctttctaagttagctgcaaatgctttcttggctcagaggatttcatcagtcaatgccatgtctgcactttgtgaatccactggtgctgatgttactcaagtgtccttacggttgttgggtacctgatttcaagaatccggttccaaaattcttggancggttagtttttgggattccggagggttccttngtttnccagaaaggccaannctngaacntcgnntanaanctntcnaattnnaacgggcttncccaagnnggggg

SEQ ID NO: 120290 - DNA, 1030 bp, Arabidopsis thaliana
atccacctctctttctctcttaaatttcgttctgtctccggcgaagtcgccggcgggaagctaaaaggcaggttagaacgaattcccggcagacaatccaacaatgcgagggttattacgagcttcatcgcttcttctctgtggtgttattctgattcagctgcttgctgctcaaatccatgctcaaagtaaaaaacctaaaagtccatggccaacgctcactggtgatcctcccctcgcgtccgctcgtggtggattctctggattgttcccagattcgagttacgatgcttacaatttcgcaattctgacaagtgtaccagatgctgttctatggtgtgatgttcagctaaccaaagatgctcttggtatttgcttccctgatttaacaatgagaaattcttcatctattgaagctgtttaccctactcgacaaaaatcttacccggttaacggagttcctacttccggttggttcaccattgatttctccttgaaagatctcaaagatgttaacttgatccgaggtattttatctcggtcagaaaagttcgatggtaattctaacccgattatgacggttcaaagcgtatccacgcagatgaaaccatcattcttctggttaaatgttcagcacgatgcgttctacgcgcagcacaatttgagcatgagcagttttctggttgcagcttcaaaaactgttctcattgacttcatctcttcccctgaagtgaacttctttaagaaaattgctggtcggttcgggcgtaatggaccaagtcttgtgttccggtttcttggtcaagacgagttcgagccaacgacaaacagaacttacggctctatcttgagtaacttgacttttgtcaagacgtttgcttcagggattcttgtccccaagtcttacatattgccacttgatgaccagcagtacttgcttcctcatacatccttggttcaagatgctcacaaagcaggattagaagtttttgtgtcaggttttgcaaatgatattgatattgcacacgac

SEQ ID NO: 120291 - DNA, 530 bp, Arabidopsis thaliana
gcgactcactatagggaatagtctgtacgcctacaggtaccggtccgggaatttccggggtcgacccacgcgtgcgcttcgaataatttctaggggttttcttttctctaaagttttcatttttatttcaatgagagctcgaagaaggagaatatgggtttgagaactgataatattatggcttcgtttcgaggtggaatcggggtttctaatggctgagtcaactcggtgattctgtgttatagtcacgagcaaatataaaaaagtttgtaactttcttgtttttttaggtgtgtgtgttcagagaaaaggtcgaatcttttttcggtgtttgtaaaagggaaagttgtaatcttaaagtctgtttttctttcttgtgttttggtatttagctcataaaagccgaggagtaatataaaggataggttttgtctttgtgtgcccttttgagattgcatgaagaagaaaaccctctagtgtggtttgaaggaaacagaattcgatatttatgcggtaatgtgatttgtgaa

SEQ ID NO: 120292 - DNA, 396 bp, Arabidopsis thaliana
tacggctgcgagaagaaaacgagaggcaagggtcaggcataatatgctctctcactagcctaagaatttgtagaagcgaaaaccatggattagggtttttcagtttcctctttcaatcgattaacccacagaacaaagtatctcttaccttcgggtttagatattctcttcgtctccgtctatatatcatttctcaaagtcgacttacgaatttgactcaggagatatttcgtttgtgattttgttaaggctagcttcaattctattcagattaatcaatggattctcagatgctcgtggcgcttggactatcccttgttgggggattaagtacctctttaggtgcgctttttgtagttcttagcgagactcccaatatgaagatgcttggacttc

SEQ ID NO: 120293 - DNA, 427 bp, Arabidopsis thaliana
gtacaaactcgttaaatttgtacgactataatttgttttaaaacactcgttataatatattaaagtttcacccaaaccgagaaaagagagaatctgtgcatgttgctcagaaaatcttcaaagcgtaatctgggcttacgttagctctcacgaacccccaaggatcttctatatatgttttttcatttccccataaaatctttcattatctaaaaaatattattatcgtatcttttttcttctatatattcttcctcctcaatcttgattcttgtttcttgagtattctttgatgaatcgtgaaatgacgtcaagctttcttctcctgacgttcgccatatgtaaactgatcatagccgtgggtctaaacgtgggccccagtgagctcctccgcatcggagccatagatgtcgacggccacttcacc

SEQ ID NO: 120294 - DNA, 571 bp, Arabidopsis thaliana
  unsure (1)..(571): unsure at all n locations
agcgctctacgactcactatttggaaagctggaccgcctgcaggtaccggtccggaattcccgggtcgatccacgcgtccgctttgagattctccgattgcatctcaaaaaatctcagctatggctacctcctccgcttggaagctcgatgaccaccccaagctccccaagggtaagaccatcgccgtaatcgtcttagatggttggggtgaatctgcccctgatcagtacaactgtatccacaacgctccaactccagccatggattctcttaaacatggagctcctgatacttggactttgatcaaagctcacggtactgctgtaggacttcctagtgaagatgatatgggaaacagtgaggttggtcataatgctcttggtgctggtcgtatctttgctcaaggtgctaagctttgtgaccaagctcttgcttctggcaaaatctttgaaggtgaaggttttaaatacgtttctgaatctttcgagacgaatactttgcatcttggtggacttctcagtgacgggggagtccactctcggctcgtcaactacagtngttggttaaagg

SEQ ID NO: 120295 - DNA, 974 bp, Arabidopsis thaliana
  unsure (1)..(974): unsure at all n locations
nnnnnnnnnnnnnnnnnnnnnnnnnnnnnnnnnnnnnnnnnnnnnnnnnnnnnnnnnnnnnnccacgcgtccgcccacgcgtccgctcagcctctccttcttcgtttcctaaactcatttttcttcgctctctttagattctttttttctcatatctctccttgatcctctgttttttattctgaggttgtttttcggagaaggaatcacctaaaccctttcaaatctcttcttctaccaaatatatttttttggatgaaaaaaacttctaccaaattctcagattttatttccttgagggttttgtgttttttttgcatggtctagttgatttctgaaatttaagtatatcttgtttacgataatatagaaaaaaattattggtgtttttgtgtgtttataatttatcttgggtcaatgataatagtggacgacgagtcggtgtcttagggtttactttttgtaaagaaaattttcttgttgaattattggctttttgtgaattcgattttctcttatttatataaaacattattgaatttcaacgctattttgaaaattttatttttaatattcatgttgtattagaatctggaatgtcagaagaacgtgtgcaggaacaagaacttggggttggtgtaatagtttaaataaattcttacaaagaataaaaaaaaaatcaggttctctgcaccaaatttttaaaatcattatttaacatattttgctaaattctctaaaaacaaatttgataatgatgaaaattttgattagttctgtgttgtgtttggtgattgcttgaattaagtctgattgaattttaggggtatttgaggtttgtgtgtctttgagattattgtttaccaaaaaaaaagaaaaaanggagatggaaccagatacgagacaaagcctcaccggaaaacacctccaaaacagaggagctgatggaacaatagcaagaaagactgattttc

SEQ ID NO: 120296 - DNA, 669 bp, Arabidopsis thaliana
  unsure (1)..(669): unsure at all n locations
cnnnnnnnnnnnnnnnnnnnnnnnnnnnnnnnnnnnnnnnnnnnnnnnnnnnnnnnnnnnnnnnnnnnnnnnccacgcgtccggcttggttgtttaccgatagtgagacaagagtttaagacaggtgagaattgtatggagatggttaacttcatggtgaaaacacacaatgaaaggcttagtcgtttgctcgttgcgataaccgtaccgttactgtaccgtggcttccggtacagcctctttgatttcaatggtgaaattctccggaggatcaatgaaccatcactccatggatatactgatacaacgacttcttgctgcggaactggatcgagaaatgcatacgggtgcggttatagtaacgtgcatgctaagctctgcagctaccagaaatcatttttgttcttcgacgggcgtcacaacaccgagaaaaccgatgaagaagttgctaatctgttttattccggagacaaacatgtcgtctctccgatgaatataaaggatctcgtaggtaaagcagcgaccgatcttcttgcgcaagaaatctagaaatccccatcgtgttctgttctgtttctttgaaataagtaaatggttgttgttgtaaactgtaaacctctgtattccccttcatatatatatgatgataaagaaaaaattacccctttt

SEQ ID NO: 120297 - DNA, 678 bp, Arabidopsis thaliana
ttgaaatttcctctcttcttcttttgcttgagctttaggttttgagagcaaagaaaaacgaagacgcgtcaaaggtgcgtgaaatgtgtctattgcggcttgcttctggtttatgggtccctgcgacattttgagagtgttgtttggtttaggtgtctggtgtattgcttatataactgttgcaatctttgcgtcttttagaatctttcactgtatttgttaatttcaagagcttttgtggagaggttctgcttgcttgctacaatgggttacgcccagctagttattggtccagcaggcagtggaaagtcaacttattgctcgtctttgtatgaacattgtgaaactatcggtcgaacaatgcatgttgttaaccttgatcctgctgcggagatcttcaactatcctgtggctatggatatcagagaacttatttctttggaagatgtgatggaggatctaaagcttggtcctaatggtgcccttatgtattgcatggagtatcttgaggatagcttacatgattgggtggatgaagaattggagaactacagggatgacgattaccttatctttgattgtccaggccagatagagctgtttacacatgttcctgtgctcaagaactttgtggagcatttgaagcagaagaacttcaacgtctgtgttgtttatctg

SEQ ID NO: 120298 - DNA, 1780 bp, Arabidopsis thaliana
  unsure (1)..(1780): unsure at all n locations
gaaacagtggttgcttctttagtttctaatgaattgagattaggaatatgtgagctgatgtgttgctttgctatataggtactctctttaatcccaccatatgaagggaaatctgtgcttgaacttggagctggtattggtcgtttcactggtgaattggctcaaaaggctggtgaagttatcgctcttgacttcatcgaaagcgcgattcagaagaatgaaagtgttaatgggcattacaagaacatcaagtttatgtgtgctgatgtaacatctccagacttgaaaatcaaagatggatctatcgacttgattttctcaaactggttgctcatgtatctctctgataaagaggtggaactaatggcagagagaatgattggatgggtcaagccagggggatacattttcttcagagaatcttgcttccatcaatctggggacagcaagcgaaagtcaaaccccactcactaccgtgaacccagattctacacaaaggttttccaggaatgtcagacacgtgatgcttctggcaattcatttgagctctctatggttggctgcaaatgcattggggcttatgtgaagaacaagaagaatcagaatcagatttgctggatatggcaaaaagtcagcgtggagaatgacaaggatttccagcgtttcttggacaatgttcaatacaagtctagtgggatcttgcgctatgagcgtgtctttggggaaggatatgtgagcactggtggatttgagacaactaaagaatttgtggcgaagatggaccttaaaccgggacagaaagtcctagatgttggttgtggtatcggtggaggtgacttctacatggctgagaatttcgatgttcatgttgttggaatcgatctgtcggtcaacatgatctctttcgcactggagcgggccattggactcaaatgctcagtcgagtttgaagtcgctgattgcaccaccaaaacatatccccgataattcctttgatgtcatttacagccgtgacactattctgcacatccaagacaagccagctctattcaggacattcttcaagtggcttaaaccagggggtaaagttctcatcactgactattgcagaagtgctgaaactccgtctcctgaattcgcagagtacataaaacaaagaggatatgatctacatgatgttcaagcttacggacagatgctgaaagacgcaggctttgacgacgttatcgctgaggaccgtactgatcagtttgtacaagtcctcaggcgtgaattagaaaaagtggagaaagaaaaggaagaattcatcagcgacttctcagaagaggattacaatgacattgttggaggatggtcggcaaagcttgaaaggactgcatctggtgaacagaaatggggattattcatagccgacaagaagtaaaatccatgtttttatcccaaaactctggtgattcatttcccttcaataaaaccgttcctttggaggacaatatctgcttgtttactatcatggaactgcaaatcaaaagataaactcatgtgttgtttcgattcttactcgagtcgttgtgccacataaaacctgcattgctttgattttccattaaatatctgcataacattcaagggtaatcgatgttttttgttcttagtgtattcaagaacaaagttacatttatgacaaaaaaaaaaaaaaagnnnnnnnnnnnnnnnnnnnnnnnnnnnnnnnnnnnnnnnnnnnnnnnnnnnnnnnnnnnnnnnnnnnnnnnnnnnacat

SEQ ID NO: 120299 - DNA, 448 bp, Arabidopsis thaliana
cattcttgttttggttatatacaattggaacagaggaagagagagatatccagaaaagctactggatggagcattctagtgatttgactgttgaagctatgatgcttgactctaaagcttctgatcttgacaaagaagaacgtcctgaggtactctctttaatcccaccatatgaagggaaatctgtgcttgaacttggagctggtattggtcgtttcactggtgaattggctcaaaaggctggtgaagttatcgctcttgacttcatcgaaagcgcgattcagaagaatgaaagtgttaatgggcattacaagaacatcaagtttatgtgtgctgatgtaacatctccagacttgaaaatcaaagatggatctatcgacttgattttctcaaactggttgctcatgtatctctctgataaagaggtggaactaatggcagagagaat

SEQ ID NO: 120300 - DNA, 380 bp, Arabidopsis thaliana
ctcagatctgaaaccttatctgaattacatttccccgattcgacgttgtgcgaattgatgcagcagagaggacgatccgtcaaccgcagatcacgaagcttctctagatccagactcgccgtcgaaggccactgaattactctctcccctctcttggcagatcttcttcttcgttttttcccgacaaacgacatttccgaaatggctgcatcgtacgaagaagagcgtgatattcagaagaattactggatagagcattccgctgatctgactgttgaagctatgatgcttgactcgagagcttctgatctcgacaaggaagaacgtcctgaggtactctctttgctccctccatatgaaggcaaatcagtgttggaact

SEQ ID NO: 120301 - DNA, 548 bp, Arabidopsis thaliana
  unsure (1)..(548): unsure at all n locations
atacgactcactatagggaaagctggtacgcctgcaggtaccggtccggaattcccgggcccaaaatggtggatttggtactactggatctgccctgttgcatggaccgtgtatggattgatagtgtcgcagtacggtgatgtggagacacgtatccaagtccttggtggtgctcctgacttaaccgtcaagcaatacattgaggaccattatggtttccaatctgactttatgggaccagtggcggctgtactcatcgctttcaccgtcttcttcgccttcatcttcgccttctgcatcagaactctcaacttccagaccagataaaaccatctctcaaacaacaaagtctctttctttttttgtatcctctgtgttgtttatatgcactataagctttgtatgttctaaatatgtattgtagtgtcataacgaaatttttttgaatattttattaaaaaaaaaaaaaaaaaagggcggcccgctctagaggatccaagcttacgtacgcgtgcatgcgacgtcatagctcttcnnnnnnngtccta

SEQ ID NO: 120302 - DNA, 1574 bp, Arabidopsis thaliana
ctttatggatgagccaacttcagggctagactctagagcagcggctattgtgatgagggcggtaaggaacacagtggacactggaagaaccgtggtctgcaccattcatcagcctagcattgatatctttgaagcatttgatgaattgatgctgatgaagagaggaggacaagtgatttacgcgggtccattgggtcaaaactctcacaaggtggttgagtactttgaatctttccccggagtgtccaagattccagaaaagtataacccggccacttggatgctcgaagctagctcactcgccgctgagctaaagcttagtgttgactttgctgagttatacaatcaatcagcattgcaccagcgaaacaaagcgttggtaaaagaactaagtgtaccaccagcaggagcatcagatctttactttgctacacaattctcacaaaacacatggggacagttcaaatcatgcttatggaaacaatggtggacgtattggagatctccagactacaatcttgtccgtttcatcttcacattggcaacatctctcttgattggtacagtcttctggcaaatcggaggtaacaggtcgaacgcaggggatctaacaatggtgataggagcattgtatgccgcgattatcttcgtggggatcaacaactgttcaacagtacaaccgatggttgcagtggaaagaacagtgttctacagggaaagagcagcaggaatgtactcagccatgccatatgccatctctcaagtcacttgtgagcttccctatgtccttattcaaaccgtttactactcactcatcgtctacgccatggttggtttcgaatggaaagccgaaaagttcttctggttcgtcttcgttagctacttctcattcctctactggacttactacggcatgatgactgtttccctcacaccaaaccaacaagtcgcttcgattttcgcctcagcgttttacggtattttcaacctcttctctggtttcttcattccaagacccaaaatcccaaaatggtggatttggtactactggatctgccctgttgcatggaccgtgtatggattgatagtgtcccagtacggtgatgtggagacacgtatccaagtccttggtggtgctcctgacttaaccgtcaagcaatacattgagggccattatggtttccaatctgactttatgggaccagtggcggctgtactcatcgctttcaccgtcttcttcgccttcatcttcgccttctgcatcagaactctcaacttccagaccagataaaaccatctctcaaacaacaaagtctctttctttttttgtatcctctgtgttgtttatatgcactataagctttgtatgttctaaatatgtattgtagtgtcataacgaaatttttttgaatatttttatttattgtcttatagatgatgacgaatcggaatcaagtaatataattccacttttttttggggtttaagaaaaaaaaaaaaaaataaaaagaaaaaaaaaaaaaagggcggccgctttaaaggatcccagcttaaggaaggggggaatccacctc

SEQ ID NO: 120303 - DNA, 441 bp, Arabidopsis thaliana
cccacgcgtccgggagatctccagactacaatcttgtccgtttcatcttcacattggctacatctctcttgattggtacagtcttctggcaaatcggaggtaacaggtcgaacgcaggggatctaacaatggtgataggagcattgtatgccgcgattatcttcgtgggaatcaacaactgttcaacagtacaaccgatggttgcagtggaaagaacagtgttctacagagaaagagcagcaggaatgtactcagccatgccatatgccatctctcaagtcacttgtgagcttccctatgtccttattcaaaccgtttactactcaaccatggcgtacacgacaagttcttctggttcgtcttcgttagctacttctcattcctctactggacttactacggcatgatgactgtttccctcacaccaaaccaacaagtcgc

SEQ ID NO: 120304 - DNA, 772 bp, Arabidopsis thaliana
gtcgcctctgacacttcatctctgccgtcttacgaagattttgccagtgcgggaagcggcggagattgagagattagcgacgatggaggaaagcaaacagaactatgacctgacgccactaatagcgcctaacctggacagacacttggtgtttcctatattcgagttccttcaagagcgtcagctttaccctgatgagcagatcctgaagtctaaaatccagcttttgaaccagacgaacatggttgattacgccatggatattcacaagagtctctaccacactgaagacgctcctcaagaaatggtggagagaagaacagaggttgtcgctaggctcaaatctttggaggaggctgctgcaccactcgtgtcttttcttttgaaccctaacgctgtgcaggagctaagagctgacaagcagtacaatctccaaatgctcaaggaacgctacccagattggtccagaccagattgaggctttggaccagtacgccaagttgcagtttgaatgtggcaactattctggtgctgctgactatctttaccaggacaggaccctgtgctctaaccttgagaggagtttgagtgccttgcggcgaaagctcgcatctgaaatattgatgcagaactgggatattgctcttgaagagcttaaccctctcagagagattattagactcatagagtttttcatcgtccgttaaaccaggtgcagaacaggatttggttgatgcattggggtctgtatatcttttttaccatgataatg

SEQ ID NO: 120305 - DNA, 576 bp, Arabidopsis thaliana
  unsure (1)..(576): unsure at all n locations
cttccatcgtcgtcttctattttttcttctttcttcgatttcataccaaaacaagaactctctgttttcgacaaaaacgaaaccttgagatctattttgattgacttttaagaaagagagagatctttcttagaagattttgtctcgtcggcattgaagatccagggtttgtctttcgaaattcagagagaaaatgggtgatgaggcagagatcaaggaacatttaaagccacaagcttcatctgaaacaatggacaagaaacataatgtgaaagggaagaggttatggcagaaagtcaagtatcaattggtggagtttcattcattgcctgcttatttaagagacaatgagtacatcattggtcattaccgatccgaatggccgatcaaacagattcttctcagcatctttaccattcataatgagactttgaatgtttggacgcacttgattgggtttttcctgtttttggcgctcactatatacactgcaacgaaagtaccgagtgtcgtggatcttccattcggtttaacaccggttaccccgnttttnttgggggaaaanaantctnncca

SEQ ID NO: 120306 - DNA, 364 bp, Arabidopsis thaliana
acccacgcgtccgcggacgcgtgggttcaaaaacaaagtcgattaccctagaatccatgggcacgacatcttctacagcaattctcttcttcatccgaagatgaattcgtattgggcgaaacttccggtggttaaagctgcgatgcttgctcacccatttatggattgaagctttagagagaaaatgggtgatgaggcagagatcaaggaacatttaaagccacaagcttcatctgaaacaatagacaagaaacataatgtgaaagggaagaggttatggcagaaagtcaagtatcaattggtggagtttcattcattgcctgcttatttaagagacaatgagtacatcattggtcattaccga

SEQ ID NO: 120307 - DNA, 530 bp, Arabidopsis thaliana
  unsure (1)..(530): unsure at all n locations
cnnnnnnnnnnnnnnnnnnnnnnnnnnnnnnnnnnnnnnnnnnnnnnnnnnnnnnnnnnnnnnnnnnnnnnnccacgcgtccgcaatattttcagcagcgaaaatggcaaacatcagcgtagtgacgacagcgactaacaaccaggtgattctccgtaactacgtgagtggattccctaaagaatccgacctctacatcgccgcaaccaccgttgacttacgtgtacctcccggatccatggcggttctagtcaagaatctctacttatcttgcgatcctttcagccgcattcgcatggaaaaacccgacccttcgtcacctgcttccgtcgctcgcgcttactctatcggcaagccaatctctggatttggagtggctaaagcaatagattcatgtcatccaaattacaaaacaggagatttactttggggaagagttggatgggaagagtatagtgttattactccaactccttcttcacatttcaagattcatcacactgatgttccattatctttctacactggac

SEQ ID NO: 120308 - DNA, 457 bp, Arabidopsis thaliana
  unsure (1)..(457): unsure at all n locations
atttttcagcaccgaaaatggcaaacatcggcgtagcgacgacggcgactaacaaccaggtgagcctccgtgactacgtgagtggattccctaaacaatccgacctctacattgccgcaaccaccgttgacttacgtgtacctcccggatccatggcggttctagtcaagaatctctacttatcttgcgatcctcatagccgcactcgcatggggaagcctggatccctcgtccccggcttcaatggctcatgctttcactatcggcaagccaatctttgggttgggaggggctaaagcaatagattcagggcacccaaattacaaaacaggggatttactttggggaagagttggttgggagagtataggnntatncntccaactccttcttcanattttaagattcatcacacgggtgttcnntaatntttttacactgggacttntttgggant

SEQ ID NO: 120309 - DNA, 690 bp, Arabidopsis thaliana
  unsure (1)..(690): unsure at all n locations
cnnnnnnnnnnnnnnnnnnnnnnnnnnnnnnnnnnnnnnnnnnnnnnnnnnnnnnnnnnnnnnnnnnnnnccacgcgtccgcgtattttaaggattggcaaatgtggactatgaaccatcgaggcaacctatctcgaaacttgagtttgagtttgagaggaggaaattgactcgcgatgacgtgagggaactcatgtacagagagattttggagtatcatccacagatgttgcaagagtatctacaaggagaagagaacataaactctcattttctatacccaagcggagttgatcagttcaaacaagagtttgcccgactcgaagaacacaacgacgatgaagaggaacacaactccccaccacatcagagaaagtacacttcactccctagagaacgggtgtgctcatcagaagacgaaggttctgattcagttcatgctcaatcgtcttcagcttcagtggtgtttacacctccacagactccaaacacagcaactggcttatcatcacagaaggcgtcacaagtagataaagcagcaactccggtaaaacggtctgcatgtctaatgaggagtgatagtatctgtgcttcaacatgtgttggtgtctcctctgacagtgtcatgtcagaaaaatgttctcagttgttagcagcaacattgatatgtgtctgctatgtatcatgagt

SEQ ID NO: 120310 - DNA, 485 bp, Arabidopsis thaliana
agagaacgggtgtgctcatcagaagacgaaggttctgattcagttcatgctcaatcgtcttcagcttcagtggtgtttacacctccccagactccaaacacagcaactggcttatcatcccagaaggcgtctcaagtagacaaagcagcaactccggtaaaacggtctgcatgtctaatgaggagtgatagtatctgtgcttcaagatgtgttggtgtctcctctgcagtgtcatagtcagaaaaaaattgatttctcaagttgtttagcagcaaaccattgattgttgtgttctgcctattgtatcatgatgtctctcctgagtgttttcattgttgtaactctcttcttcttcttcttactctctgctcatattggaatctcgtgtgtaatggtttctcttggaacttgaaattcatatatactctataaaaaaaaaaaaaaggcgccgctctagagatccagctacgtacgcggcagcgcgt

SEQ ID NO: 120311 - DNA, 543 bp, Arabidopsis thaliana
  unsure (1)..(543): unsure at all n locations
ctcttatgcgactcactatanggaaagtctggtacgcctgcaggtaccggtccggaattcccgggtcgacccacgcgtccgcggacgcgtggggaaaagctaaccacaagaggaggagagaaactcgataacaaacaagagaaagagaaagcgagattctaaaatctaatctcgtgcttccaattcaaataattttgtctccttagcggatcgatcgtagattataaagctccgccgtcgcctccgccgcaatcgacggcggtgtctacgtcgctttcgtttcgtgcgtaacaggaggagcagcagcaaaataagtcagcttaagtaacgccgtctttgatttgacttgagataagtattttggtgatatggcattgatgatgtttccgcatttgctcgacgttgacgaaaagtaaattgctggcgaatttggagaaaccacatacagattgatgctctcttcagtcgacctcttttgtaaatttgttgaacctacggggtcgaaggtgtgtaccatatatgctataagaagattttaaagta

SEQ ID NO: 120312 - DNA, 372 bp, Arabidopsis thaliana
tcgtccacgcgtccggtgagttctgctgaagatgcttgtatccgcgtctggagctttactcctcaataagacttgacgtaaattataaagatctctggacaagtcctatcttgtctctttggaaagcttctactacttttgaaggctttttttgtgaatcttccgtttggccgtggctgtgttgatgtgtgtgtctgttttttttttttgtctgcatatcttttgtcaaaaatgaatgctctgttttggtctgaaactgagatcttgagtcagattttttttcattatcagaagattactgatacagaatgggacttgagattgtgctttctctcaatgatttttgggctctataatatttgttcttcttac

SEQ ID NO: 120313 - DNA, 374 bp, Arabidopsis thaliana
cccaagcgtccgaaaaccagagagattaaaatggaagacgatgaagcgacgaaacagcgaggaatacttgaagaagaagaagaaaattttactggaagaagagaagaaagtgaaaacgagtttccctcacatcatcctcctcctccgcctgatgagttgtttgacatttcgactacagttgatcctagctatcttatttcactgataaggaaactccttccaattgattcgggaagtgacgaacgacataatgatcatatgaatacggataatgtggttcaaggtgtagtagctatatctggaaatggggttgttgagacttccaatggtgatccagagagcatggacattggagataatcatgatgaatccac

SEQ ID NO: 120314 - DNA, 1188 bp, Arabidopsis thaliana
ctgcaggtaccggtccggatttcccgggtcgacccacgccgtccgaagcatactcatcctctgatttcgctggattcagctgttcaattccgcacaaagaagctgcattgcaatgttgtgatgaagttgatccattggcaaagtctataggagctgtgaacactatactaaggagaaaaagtgacggaaagttgttgggttacaacacagattgtattggttccatttctgctattgaggatggcctacgaagttcaggtgatccaagcagtgtaccttcttcttcttcgccattggccagtaaaacagtggtggttattggtgctggtggagcaggcaaggctcttgcttatggtgcaaaagaaaagggggccaaagttgtaattgctaatcgaacttacgaacgagcactagaactcgcagaagcaataggaggcaaagcgttatctctgacagatttagataactatcacccagaagatggcatggttttggcaaacacaacatctatgggtatgcaaccaaatgttgaggagactccaatttctaaggatgcattgaagcccctatcccctggtctttgatccggtatacactccgagaatcaccagactgttgagggaagcagaagaaagtggagccataactgtctcagggtcagagatgtttgtcaggcaggcttacgagcagtttgagatcttcaccggtttacccgctccaaaggaactcttctggcaaataatgtcaaagtactgagacatagcttaagtgtgtgtgtgtgtacttccatgaaacacccgtcgattcaataaagctttagattgccatttgtatgttccgagaatgtccttttttgaggccataagccgaatgactggttctctctttgtatttatatatatgtataaactattaagcctaacattaatcttttttaagtttctttgatttgatgagtctactagaaaaaagaagggttaagttgcatactagtcactttttaaaacttaattggaaaagtagtcactttactattcataatttgtaaaatagtcatttttcactgtttgattcgtacacttagtttgtacactatttttagtgtacagatgtatataaaaaatacacagcgtacactttacatttgcacactaaaagtgatgtacaatccaagtgtacgaatcaaac

SEQ ID NO: 120315 - DNA, 517 bp, Arabidopsis thaliana
  unsure (1)..(517): unsure at all n locations
cctgccccgancatggggccaccgttccctgcagttggtacttcccccccgaggtggcatggtttggcaacccccacatctttgggttgcacccaaatgttgnggggcccccatttcctagggatgcattgaagccctatgcactggtctttgatgcggtatacacctccgagaatcaccagactgttgagggaagcagaagaaagtggagccataactgtctcagggtcagagatgtttgtcaggcaggcttacgagcagtttgagatcttcaccggtttacccgctccaaaggaactctactggcaaataatgtcaaagtactgagacatagcttaagtgtgtgtgtgtgtacttccatgaaaagtcgtcgattcaataaagctttagattgccatttgtatgttccgagaatgtccttttttgaggccataagccgaatgactggttctctctttgtatttatatatatgtataaactattaagcctaacattaatcttttttaagtttctttg

SEQ ID NO: 120316 - DNA, 684 bp, Arabidopsis thaliana
  unsure (1)..(684): unsure at all n locations
tttggcaccttagattctagtaaagtttctgcgccaggtcaaccaacgatcaaggatctgttggatctttacaactttagaagaatttgccctgacacaaaggtatatggaattattggcaagcctgtcagccacagcacatcacctattgttcacaatcaagctttcaactcacttgattttaatggagtatatgtccacctgttagttgataatcttgtaagctttcttcatgcatactcatcctctgatttcgctggattcagctgtacaattccgcacaaagaagctgcattgcaatgttgtgatgaagttgatccattggcaaagtctataggagctgtgaacactatactaaggagaaaaagtgacggaaagttgttgggttacaacacagattgtattggttccatttctgctattgnggatggcctacggagttcaggtgatccnagcagtgtacctncttcttcttttgncatttgccantaaaanagtggtggttattggtgctngtngggcaaggcaaagntctttctttatggggcaaaaaggaaaaggggggcccaaatttttaatttcttaaccgnnnctttcggggcgggcccttggncttcccngaggcaatttggggggcaaaaagggtttttttttnccanattttgggaaccttttcncccccaa

SEQ ID NO: 120317 - DNA, 1016 bp, Arabidopsis thaliana
  unsure (1)..(1016): unsure at all n locations
ctaatacgacttacttagggaaagctggtacgcctgcaggtaccggtccggaattcccgggtcgacccacgcgagaaaacgaaaaaaaaagatggtaggaagaagaaaagctttactcttttctctctgtttcttcttcctctctcttccttccttctcttcccttccatccttccaaaccctattccccaattctcattcccttccttgtgcttctcccgtctcattccaacccgactccgactccgagtcactgctagaatccgaatttgaatccggatccgactccgagtcttcttcttccattactctaaacctcgaccacatcgatgctctctcctccaacaaaacacccgacgagctattcagctcccgtctccaacgtgactcccggcgcgtgaaatctatcgccacactcgccgctcaaatccccggaagaaacgtgactcacgcgccacgacccggtggattcagcagctcagtcgtctctggtctctctcaaggaagcggtgaatacttcacgcgcctcggtgtcggcactccggcgagatatgtttacatggtgctcgacaccggcagcgacatcgtctggctacaatgcgctccttgtcggagatgctactctcaatccgacccgatattcgacccgagaaaatccaagacctatgccacaatcccctgttcttcacctcactgccgccgattagactccgccggatgcaacacccgtcgtaagacttgtctctaccaagtctcttacggagatggttctttcaccgtcggcgatttctccaccgaaacgctaactttccggcgaaatcgcgttaaaggcgttgctctcggatgtggccacgacaacgaaggtctcttcgtccggagccgcccggtttattatggactcggtaaaggtaaattaattcgttccccgggtcaaaaccggtcaaccggtttaattaaaaattntcttactgtttagtcganagatccgcttcttcgaaaccttcctcggtcgtctt

SEQ ID NO: 120318 - DNA, 661 bp, Arabidopsis thaliana
  unsure (1)..(661): unsure at all n locations
aaaagtataattcaaacatttattattattattataggaattgaaagaaaattaaattttcaaaaagaccgcttacttgtttattatatacacagagaagagaacagtctcactcgccactttcctcgagaaaacgaaaaaaaaagatggtaggaagaagaaaagctttactcttttctctctgtttcttcttcctctctcttccttccttctcttcccttccatccttccaaaccctattccccaattctcattcccttccttgtgcttctcccgtctccttccaacccgactccgactccgagtcacggctagaatccgaatttgaatccgggatccgactccgagtcttcttcttgccatctacctctatatatcctcgtaccatcatcgatgcctnnctctcctccaacaattacatcctcatagatgctattcatgtctcccgtcttccaatcgtgactctccggcgcagtgtgatcatatcgccacacatcgtccgctcaaatccccggtaagaaacgtgtctcacgcgccacgacccggtggattcagcagctcagtcgtctctggtctctctcaaggaagcggcgaatacttcacgcgcctgggtgtctgtactccggcgagatatgtttacatggtgctcgacaccggcagc

SEQ ID NO: 120319 - DNA, 516 bp, Arabidopsis thaliana
  unsure (1)..(516): unsure at all n locations
nnnnnnnnnnnnnnnnnnnnnnnnnnnnnnnnnnnnnnnnnnnnnnnnnnnnnnnnnnnagtgatgagagaaatatcactggaccccgaaccagacagtttctgatcttcttctccttagaggatctctcggagaagattcaaaaccaagaacaatctcagtctctatctctctctctgggtgcatttagatggctggagttgtgcgattaacgacgacgtcggttcaagccattcgtgtctcctcgtccttcagctcctttgccaccgctcttaatcctctgcaaccttgcttacctccaaactcgaatctgaattccgacaagagattgcgtcttctctcatcttctccttcctgctcgtcttctcattaccacccatcttctggtctcggaagccatctcccccttagacgacccaagagccaagtggttcgtgtcaaggtagatgaaaatgtagccgagacagagccaccgatatggtgggagaggaatgctccagacatggtcgatattca

SEQ ID NO: 120320 - DNA, 709 bp, Arabidopsis thaliana
  unsure (1)..(709): unsure at all n locations
ccnnnnnnnnnnnnnnnnnnnnnnnnnnnnnnnnnnnnnnnnnnnnnnnnnnnnnnnnnnnnnnnnnnnnnccacgcgtccgatttaattagaacccccaaaatctcttcacaactgtaaaaccccaatcacctctttacatgtgacttccttattactctcttcttcttattttcctcctcttcttcttcgctctagtttcccccaacaatcgccatggcagcttcgtctctcaatctcctcctcattctctctcttctcactttcatttctctccagagatctgaatctctttccgataatccatctctcactcttctacccgacggattcgactggccgatctctcactccgatgaattcgatatcatcgacggtgaagaaagcttcgaagttacggaggaagacgacggcgtaacagatcgacggtcattgtactggcggaggacgaagtattacatatcgtacggtgcattgtcggcgaatagagtgccatgtcctcccagatctggaagatcgtactacactcataactggttcagagctagaggccccggtcaaccggaaagccgnggtggtggcgatactcggtgcggggatngntgaagnaagnttaaacncatggggatttcgaattttgcaacatgggtatatanggnggtgnattgaaggcgnngttgttnggggggnatcntgaacccgggggggc

SEQ ID NO: 120321 - DNA, 763 bp, Arabidopsis thaliana
cttcccgcggggggggggggggcgcgccggggggggagagaatcccgggggacaacccccactgatttgggggaaagccggtgcgccttcaggtaccggtcccgaattcccttttccacccgggcgtccgaaatgatctaacaggagaaggaaatattgaaagtatgctctctgtggaaatgggtctaaaggagctaacttctttaaaggttgaagttgccattactattacattagcccagctaaggttggccaatactactcgactgtctgatatcgagttaaaatcaccaggtggtcctaagattacggagacacttgaattgagtcaagaagagtctgaggatgttctcttcaaggaggcttggctcacgtacttctggagaagagcacaatcccttggcatagaagtggacactgcgagagaacgtcttagattttggatcagcaggagcgcacattctccatcttcacatgacgccatggaagttgagcaaggactaacagagctaagaaagctgcggatagaacgtagattgtgggaagcctccaggtccagccagtaagtagtgaccttggggacctcgggatcccagaacagtcttgctaccacagctttaacagtactgtatatcgtacatgctttcttctcgtgtggttggggtactttgcagtcagaaaaatgtttccagttttgtaaaccgaagaattgtattacacgccctacttttgacatataaaaaatccacggttttcccgtcct

SEQ ID NO: 120322 - DNA, 524 bp, Arabidopsis thaliana
  unsure (1)..(524): unsure at all n locations
aacagaaagaccaagaagacgactgcttcctccaatggttacgtcgtgaatacggcgccattaaaacgctgcgttttatcgtcgtcacctccttttcctttgcctaattcccctaagtcatcgtctcttgaacggttcctgccattaatgtcgaactcttcctaaaccctttttgttcacatttccttctctttctcttcctccgtctctctctgaaaaaccctaattgactcgttgcgattgagatggatccttgtccattcatccgtcttacaatcgggaacctagctttgaaagttccgttagcggcgaagacaacgagctccgtcgtgcatccgtcgtcttctccttgtttttgtaaaatcaaactcaaaaacttcccgncgcaaaccgccgcaatcccgtacattcctttggagacgncttagtttccggagatccaaaaccctaggcggcacgntttatcttagcagntncgntaattaaaggttaggttccagatctatatttaacttcnaggcttt

SEQ ID NO: 120323 - DNA, 533 bp, Arabidopsis thaliana
  unsure (1)..(533): unsure at all n locations
nnnnnnnnnnnnnnnnnnnnnnnnnnnnnnnnnnnnnnnnnnnnnnnnnnnnnnnnnnnnnnnnnnnnnnccacgcgtccggagagaatcaaaaatcaaaatgtcttctcctactgcgactaagtacgacgtctttctgagtttcagaggactcgacactcgtcgcaacttcatcagttttctctacaaagaactcgttcgaaggaaaattcgaactttcaaagacgacaaggagctcgagaatggccggaggatttctccggagctcaaacgcgccatcgaggagtcgaaattcgccgtcgttgtggtctctgtgaactacgctgcgtctccttggtgtctcgatgagcttgtgaagattatggatttcgaaaacaagggttccatcaccgtgatgcctatcttctacggcgtggatccttgtcatttgaggaggcagatcggagatgtcgctgaacagtttaagaagcacgaggctagagaagaagatcatgagaaagtagcttcgtggagacgagcattgaccagtttag

SEQ ID NO: 120324 - DNA, 670 bp, Arabidopsis thaliana
tgcgtccaaattttgatctttgttcttctcaaagcgaatatgggtgtcatggtttctgccgtatccacatctcctattgatggccagaaaccaggaacttctggtcttcgtaagaaggtgaaagtgttcaagcaacccaattatctagagaattttgtccaagcaacattcaatgctcttacggcggagaaagttaaaggtgccacacttgtggtctctggtgatggtcgttattactcaaaggatgctgttcagatcataattaagatggcagcagctaatggtgtacgacgtgtgtgggttggtaaaaacactctgttatcaactcctgctgtatcagctgtgattcgtgaaagatcaggggctgatggatcgaaagcaactggagcatttatcttaacagcaagccacaatcctggtggccctactgaggattttggaatcaaatacaatatggaaaatggaggacctgctcctgaatcaatcactgataaaatttacgagaacactaagacaatcaaggagtacccaatagcacaagatctgcccaatgttgatatttctgctgttggtgtaaccagttttgaaggacctgaaggaaaatttgatgttgaagtttttgatcccgcagatgactacgttaaattaatgaagtcaatcttcgattttg

SEQ ID NO: 120325 - DNA, 1104 bp, Arabidopsis thaliana
cgtctctctctctctctctttcgcgtccgctcatcttcttcttatctccctccaaagacggcgactgtataatctatcatttcttcacagtaacgctttcatcggaagatctcgccggaaaaaaacttctctctgagatcagatctcttacgattctcagctcaatcttatcttttcctttgttgtgctgcttttcactctcttctgcgcgacgaatttggccttgttttttgtttgtttgtcgtatccgacgcggaggtattgagaaaccgtggcttaagacggaggaagaagatggaagctaacgggattgagaacttgacgaatccgaatcaggaaagagagtttataaggagacatcataagcatgagcttgtggataatcagtgtagctctacgcttgttaaacatatcaacgctcctgttcatattgtgtggtcacttgtgagaagatttgatcagccacagaagtataagccgtttatcagtagatgtgtggtgaaaggaaacatggagattggtacagtaagagaagttgatgtgaaatctggactaccagcaactagaagcactgagagattggagttacttgatgacaatgagcatattctcagtatcagaatcgttgggtggtgatcatagacttaaggacctattcttcaatcatctctcttcaccccgagactatagaaggaagaataggacacttgtgattgagtcatttgtggttgatgtaccagaaggaaccacaaaggatgagacttgttactttgttgaagctttaatcaaatgcaatcttaaatctttagctgatatctctgaacgtcttgcggttcaagacccgacagaatcgagagtctaaagatcaaaggagtaagaaactattgaatcagagaaattttggttgccatggatgaagctctcaaagggaaaaagagagagtgggtgagtttctttgaggatggacaaggcaaaaaaagtatcatcatttatccagttacataataagtttctcatttgctatttttggggtcatttcactttcaaaccctctttttaatttcatgtgtctaatttaatgaatgtgtttttggttttttcccc

SEQ ID NO: 120326 - DNA, 461 bp, Arabidopsis thaliana
gaccggaccggaatgccggcgctcgacccacccgtgacatctaatctccgtagacacttgagcgcaagtcgcctccgcttaaaccgcttcatctctacttcttcttcttatcaggcacatcgccgtgttgttgtcactggtctaggcatggtgactccacttggtagaggcgttgaaacaacgtggaggcgtttaattgatggagaatgtgggattagaggattgactcttgatgatctcaagatgaagtcttttgatgaagagacaaagttatatacttttgatcagctttcttctaaagttgctgcttttgtgccttatggatcaaaccctggtgaatttgatgaagccctttggctaaactctaaggcaggtgcgaattttatcggatatgctgtatgtgctgccgatgaagctttgagagatgcagagtgggtaccaacttgagaagaagaaaaaga

SEQ ID NO: 120327 - DNA, 488 bp, Arabidopsis thaliana
caacaatcacgcgtcttctcatttctagtttctcagcctcctcctccttctcttccttcttatatataaatatatccacaaaatcatctcttttgcttcgctgtttctctcattattccatctctcttatcgccgctacaaacgtttcttcttcaacctcgttcagagattatcctcccttcttttctcatcttacaaggaagttgggcagttaaagctgctgggatcaccagttttgtcaaaagtggagtgtgaagaatcttttatgtctgaacaggcttctctctttcaatcatctatccggcttttaggagagtactgtcctatatctaggaaaaagtccactcataaagttggtggtttgcgttttgaggaggacatcacgagctgtattggatttcagtttatgcaactgagtgattatcactgcctcttctgacatcccttgtttgtttacgtttgttgaatcaagatggctttgcaaaaca

SEQ ID NO: 120328 - DNA, 410 bp, Arabidopsis thaliana
gtttttgaatcaacagtcgcggcaaaaggtagatcgaagcagatctctcgctggaaaacgtcacattgaggtatctatcgccgccaatggtgaaggcactgcaaggcgcggctcagaatctaccggcggatgtcaaccaattgatcgatcagttagagcgtcactgtttggctcccgatggatctcttgttaccaaatctgtctactccgatctccaactcgcgagagaggagatgtctcgggagagacttcggtatttggaagctatggctatttattgtgaagctgtagctatggttgaagaatatcagcaagctatttcagtagctaaccatgggggaattcgtgatgttcaaggtctataccctcaacttggcttgaagaattctcctcaggtttatgagactcta

SEQ ID NO: 120329 - DNA, 436 bp, Arabidopsis thaliana
ctatctttctcctctgtttcatcaaactcttcatcagtgcttcttattttcttcaaagcttcaaatttctttttttccttcttgcaatggcaaaatcgaagaaaatttctacaggtcaaatatttggttgtgagagtctccttgggtgcattttccagagctggagccctcgccgtcgaaaaccctctttaccggaaaaggatcatcgggcaaaagataacttgtcttccaagtcatcaacaaccgttacaaaccctaaaatcctcccaagaaaatccaccgatacttcttctcaaccaaagaaatctgactcccagaaaccccaacaaaagccaaaaccagatgagaatcacccgcgaaaatcatcggaatccgccagaaaatcatctgattccgcaagaaaatcgatttcgtcaggctcatcaagaacagagag

SEQ ID NO: 120330 - DNA, 1022 bp, Arabidopsis thaliana
  unsure (1)..(1022): unsure at all n locations
nnnnnnnnnnnnnnnnnnnnnnnnnnnnnnnnnnnnnnnnnnnnnnnnnnggatagattttacaccaccgaagccgaaaaaatgccggcggcgaagaggactcccaaggttaaccgtaaccctgacctaatcaggggagttggaaaatattcgaggtctcagatgtaccacaagagaggtttgtgggctatcaaggccaagaacggtggcgttttccctcgtcacgatgctcagccaaaggtcgacgctccggttgagaagcctgccaagttttatccggcggaagacgtcaagaagccgcttgttaacagacgcaagcctaagcctaccaagctaaaagccagcatcactccaggaactgtgttgatcattcttgctggtagattcaagggtaagagagttgtcttcctcaagcaactttcttctggtttgcttcttgtaacaggaccattcaagattaatggtgttccattgagacgtgttaaccaagcctatgtgattggaacctccacaaagattgacatttctggagtcaacactgagaaattcgatgacaagtattttggaaaggttgctgagaagaagaagaagaaaacagaaggcgaattcttcgaagctgagaaagaggagaagaaggagatcccacaggagaagaaggaagaccagaaaaccgttgatgctgctctgatcaaatccattgaagctgtcccagagctcaaggtttaccttggagccaggttctcattgagtcaaggaatgaaaccacatgagcttgttttctagatttcgtattgtttctcaaattttaagaatatctgtttccctgagtattttcatctttaatcgtccttggatcttaaagactattttctctgattttatatatcaaattttcgagcgctcaagcttttntngnnannaaaaannnnnnnnnnnnnnnnnnnnacnnnagnnnnnnnnnnnnnnnnnnnnnnnnnnnnnnnnnnnnnnnnnnnnnnnnnnnnnnnnnnnnnnnnnnnnnn

SEQ ID NO: 120331 - DNA, 658 bp, Arabidopsis thaliana
acaagagattgatgtgttagctcatcaacaagtgaggaagattctatggggtggtcttggttactcagtggttcaaattggaatctttgttaggctaactttttgggagttttcttgggatgtgatggaaccaataacgtttttcactacagctactgggattattgtgggttatgcttatttcttgatgacttctagagatccaacgtatcaagatttcatgaaaaggttgtttctttccaggcagaggaagttgcttaagagtcataagtttgatgctgagaggtttaaagaactggagaacaagtggaagataacgtcttgctcttcttcttcgtgccacgctaatgcatcgattcggaatcgtgttggtgttgatcttgatttggaggattctttgcagagtcatcacagagattgattggttctaaccatttttcacttttgatgatattacttaaccagattttcttctctctggaggttgatcaagtttgattatttggtgttgattgatccaaagagttggagtagtcatggtgatttttatttgataatcttgagctactcttatttaaatcagctcatgtgttaatcttttctatggttaaggattttgacggattataatagtctagtaactatgattttggctctt

SEQ ID NO: 120332 - DNA, 503 bp, Arabidopsis thaliana
aatgttttaggtgacactatagaagagttatgacgtcgcatgcacgcgtacgtaagctcggaattcggctcgagcgagacgcttgggggagaataccttatgtggttgcgatgaagcataagcatggagcatgtggagccttacttaatccgtcctctgcagagccacttgtttggccatcaccattaaagttcatcagtgagcttaatgacgaggcgaaacttctcttagagcaggctttaatggaggctaacagggagagagagaaaaccatcctcaaaggaacagcttattccttaccatcaccctctttctctgacacggatgataacatgtccgaggtgagtgatacggaactgtgctgcatttgctttgagcaagtatgtacaattgaagttaaagactgtggtcaccaaatgtgtgcacaatgcacacttgcactgtgctgtcacaacaaaccaaacccaacgacctcaaccgtgactccaccggtctgtccgttc

SEQ ID NO: 120333 - DNA, 1279 bp, Arabidopsis thaliana
  unsure (1)..(1279): unsure at all n locations
cagnnnnnnnnnnnnnnnnnnnnnnnnnnnnnnnncacgcctgcaggtaccggtccggaattcccgggtcgacccacgcgtccgaaaagctctcacacaaccaccgttctccgtcacggtggcgctttattctctcatcggagcgcctcaccggtggcagacggtgtcgttgttcctctcctaaaacctccatcaatcaccatctctttacacagagctctaaccaaaatcttcgagagatggggcagagtatgagctgtggaagtcgaccggagcacggaatattcgcctctgtacagtgcggcgatatcatcactatccgtcgtgtgatggcgacggagcctagtctgttgaatcaaactactccttatgatcgtcactctgttcttcatgtcgctgctgctaatggtcagatcgagattttgtcattgcttttggaacgatttacgaatccagatttgttgaatcgtcacaagcagactccgttaatgttggctgcgatgtatggaagaatctcttgtgtgaagaagctagctgaagttggagctaatattttgatgtttgattctgtgaatcgaagaacatgtttgcattacgctgcttattatggacatgctaattgtgttcaagctattctctctgctgctcaatcaagtcctgttgctgtccattggggatatgcgagatttgtgaacataagagatgataaaggagcgactccgttgcatttagctgctcgacagagacgacctgaatgtgtgaatgttttgttggatagtggttctcttgtttgtgcatctactagtgtatatggttctccaggaagcacacctcttcatttagcagctagaagtggatctatagattgtgtcagaaagttgcttgcttggggtgctgatcgtcttcaacgagacgcttctgggagaataccttatgtggttgcgatgaagcataagcatggagcatgtggagccttacttaatccgtcctctgcagagccacttgtttggccatcaccattaaagttcatcagtgagcttaatgacgaggcgaaacttctcttagagcaggctttaatggaggctaacagggagagagagaaaaccatcctcaaaggaacagcttattccttaccatcaccctctttctctgacacggatgataacatgtccgaggtgagtgatactgaactgtgctgcatttgctttgagcaagtttgtacaattgaagttaaagactgtggtcaccaaatgtgtgcacattgcacactttcacctgt

SEQ ID NO: 120334 - DNA, 573 bp, Arabidopsis thaliana
  unsure (1)..(573): unsure at all n locations
nnnnnnnnnnnnnnnnnnnnnnnnnnnnnnnnnnnnnnnnnnnnnnnnnnnnnnnnnnnnnnnnnnnnnnnnnnnnnnnnnnccacgcgtccgcggacgcgtgggcggacgcgtgggtgctgccgctactcgtttcatatctccgtctccggctcgatccgccaagtagagtaagcagcaatgactaaaaagaagaatcctaatgttttcttggatgtatcaattggtggggatcccgttcaacggattgtcattgagctttttgctgatgttgtccccaagacagcggaaaacttccgtgccctctgcacaggtgaggcgggcgttggaaagtccactgggaagcctctacatttcaaaggatcatctttccatcgggttatcaaaggattcatggctcagggtggtgatttttccaatgggaatggcactggtggggagagcatctatggtggggaagttttcagatgagaactttagattggaccatgatggagctggagtcctttcaatggcaaattgtggcccaaataccaacgggtcccaatttgttatacgttttaaacgccaacc

SEQ ID NO: 120335 - DNA, 793 bp, Arabidopsis thaliana
  unsure (1)..(793): unsure at all n locations
ggaagctcttctttcctatgacccaaacctcagggagcctctgtgtgctcttcaaaagaagaagccaaaacacagatcatgagcatttgggacaaagctgagatcatcaaggtgagcgatgttgagcttgagtttctaactggaagcaacaagattgatgatgagaccgcgttgaccttgtggcatcccaacttgaagctgttgttagtcactcttggtgaaaagggctgtcggtattacaccaagactttcaaaggagccgttgaccctttccatgtgaacgctgtggacacaaccggagctggagattcctttgtcggtgctcttctaaaccagattgtcgatgatcgatccgttctcgaggacgaagagagattgaggaaagtgctgagattcgcaaatgcttgtggagcaatcacaacgaccaaaaaaggagccattccagctcttccctcagatgctgaagttcggagctttctcgaaaagaaatagaaacaaaacaactcaagcttctattacgtaatctgtttccgcgattatcttctctttttgtattcttgttttcggatggttgaatcgagaagagaaacaaattcggcattccgctctgtttttgtttctcttcttcaaatgtaatgatttagaaaagacgtatgttgcaatttaaggcttcacttgctaataaaatgataaggtttttccaagtttaacaaaaaaaaaaaaaaagnnnnnnnnnnnnnnnnnnnnnnnnnnnnnnnnnnnnnnnnnnnnnnnnnnnnnnnnnnnnnnnnnn

SEQ ID NO: 120336 - DNA, 1072 bp, Arabidopsis thaliana
  unsure (1)..(1072): unsure at all n locations
atgatattgccnnnnnnnnnnnnnnnnnnnnnnnnnnnnnnnnnnnnnnnnnnnnnnnnnnnnnnnnnnnnnnnnnnacgcgccacgcgtccgcctaacttaggttttatcaatctctcatttccaaccatggcttcctccgccgcccaaattcacatcctcggcggaatcggattccctacttcgtcttcttcctcctccaccaaaaacctcgacaacaaaaccaattccattccacgaagcgtcttcttcggcaacagaacaagtcctttcactactccaacctccgccttccttcgtatgggacgaagaaacaacaacgcttcccgatacaccgttggtccagtccgtgtggttaacgagaaagtcgtcggaatcgatttaggcacgacgaattcagctgttgctgctatggaaggaggtaaaccaacgattgtgactaacgctgaaggtcaaagaactacaccttctgttgtggcttatactaagagtaaagatagacttgttggtcagattgctaaacgtcaagctgttgttaatccggagaatactttcttctctgttaagaggtttattggtagaagaatgaatgaagttgctgaagagtctaagcaggtttcttatagagttattaaagatgagaatggtaatgttaagcttgattgtcctgctattggtaaacaatttgctgctgaggagatttctgctcaggttttgaggaagcttgtggatgatgcttcgagatttttgaatgataaagtaacgaaagctgtcatcactgtgcctgcttacttcaatgattcacaaaggacggctactaaagatgctggtcgtattgctggattggaagttcttaggattattaatgagcctactgctgcttctttggcttatgggtttgagaggaaaagcaatgaaactattcttgtttttgatcttggtggtggtacttttgatgtctcagtccttgaggttggtgacggtgtttttgaagtgctttcgacttctggtgatacacatttgggaggtgatgactttgacatgagagtcgttgattggcttgcttcaacct

SEQ ID NO: 120337 - DNA, 1093 bp, Arabidopsis thaliana
tacggctgcgagaagacgacagaaggggactcttgtcgtcgttggaagaagaggaagagagaggacaagagaatcataagaagaagacatagtcatgggagaggtgaaagtagacgacgatgcgattcttaaatccttcctcgccgaggtcggagaagttgagagagataacgaagtcggcaggattctctcatgcttcaagctgaatccgtttgagcatcttaacctctctttcgattcttccacggatgatgttaaaaggcagtacagaaagatttctttgatggttcatcctgataaatgcaaacatccacaagcacaggaggctttcggagcattggcaaaagcgcaacaactgctgctaaacgaccaagaaagagattatattcttacccaagtccatgctgcaaaagaagagcttaagatgaagagaaagaaacagttaaagaaagacaccgcctctaaaataaagtccttggttgatgagggaaagcatgagcacatatatgagcaatctgaggagtttcagaaggagctcaagttaaaggtccgagagatattaacagaccaagagtggcgtagaagaaaaatggcaatgagaatatcagaagaagaggggagactgaagaaggatgaagcagaacaaaaggagatatggaagaaaaagcgtgagcatgaagaacagtgggaaggaacaagagaaaaaagggtatcaagctggagagactttcagaaagcaggaaagaaggccaaaaaaggagagacgcgacctccaaaattgaagacagaggatccgaacaaatcatacgtccaaaggccggtcaagaaaggctgatctctgccttcatttgtttttgctgttgttgacattgatagatattggtcttctcgaggataatctcagactctctcttcttgtgtctgtgtttcttccctttgtacatcaccaacttcattcgtctttccaaatacatcagagacagggaagcgatatctcacttctcacaaaaaaaaaaaaaaagggcggccgctctagaggatccaagcttacgtacgcgtgcatgcgacgtcaaaatcttctataggtcaccta

SEQ ID NO: 120338 - DNA, 498 bp, Arabidopsis thaliana
  unsure (1)..(498): unsure at all n locations
ttttccgctttcttgtctctctccctttcctctttcgtctcctacgtgtttaaaccttgcaaaaaatcaagtcttttttggtgtttaaatcacccatttttgtcaatctgtttttcgagcaaaacaccaggaggaaaccaaaaagctagaggctttgtggagtgagaagaagagtctcagtgaaaacagaaagcagcatttgagattccactgttaatctttgaattaaaaatgagtgcagcagctacaatgcctatgccccgagaagcgtctaattacgatgagatctctatgcaacagagcatgctcttctctgatagtctcaaggatctgaagaatctgagaacacagttgtattcagcagctgagtatttcgaactatcctacacaaacgatgaacaaaaacagatagtcgtggagacactgaaagattatgcaataaaggctctggtgaatacagttgaccatttggggtctgttacatataaagtanatgac

SEQ ID NO: 120339 - DNA, 1137 bp, Arabidopsis thaliana
  unsure (1)..(1137): unsure at all n locations
tgatacttcnnnnnnnnnnnnnnnnnnnnnnnnnnnnnnnnnnnnnnnnnnnnnnnnnnnnnnnnnnnnnnnnnnnnnnnccacgcgtccgcccacgcgtccgcccacgcgtccgcccacgcgtccgcgattttcttgggaaaatttctgatttcgagaaaaaacaaaaatccgcaaactcgacgatgatcctgaagaaagtatggggatcggtgtggaaccgatcgaatagtggcaaggatttggtgaatcatcagagagcgatcgatgttcctcctctgttattgtcttcttcatcgtctcttggtgcgtttgatcagctaccgatggatattctagtccagatactgatgatgatggagccaaaagatgctgtgaaattgggcttaacgtgcaaagcctggaaatgcgtagctagtggtaatcgtctctggatattttatctccagtgttctcaagagccatgggactccattttcttcgctgaaactagtttgcgttctggttatcctctccgaatgatttctagtcaatcaggagagttgtcgtttatgcacatttatagtcagagggcacaagttcctggttctatcattattgatggtggttctggatattgtaagtttggttggagcaagtatgcgtctccttctggacgttctgctacttttttggaatttggtaacattgagtcaccgatttatgctagacttcaacagttctttgcaaccattttcaccaggatgcaggtaaagccctctatgcagccaatagtggtatcactacctctctgccattttgatgatactgaatcagccaaggcatcaaggcggcaacttaagactgctattttcaaatgtcttggttgacatgaacgtccctgcagtgtgtgcagttaatcaggctgtgttagctctatatgcagcacggcggacatctggaattgtngtcaacattggtttccaagtcatcaccattcttccgnttttacattggtaaggtgatncgncaggtaggtgnggaggcattgggttttggggcatttaaactnaanggggttccctaaggggnaggtncaggaacaacatttccctttaatnaatnncactgtnngnctntaaagggactttgtntnng

SEQ ID NO: 120340 - DNA, 1202 bp, Arabidopsis thaliana
  unsure (1)..(1202): unsure at all n locations
tgtaccccctccggtacccggcccgaatttcccgggtcaaccaacggtgccggggtctcccaaaaactcatctctcaccaccgtctcaaaccaagttcgatctaaaagccttttcctttagattctctccaacaacaaatctctttgaatcactcagtcatgtcggttttacttcctctctgtctgattatctccatgttcacctattcaaacgcagcgtattgtctttgcaaagaggggaacgagcaagtgcttcagaaggcaatagactacgcttgtggaaatggagctgactgtacccagatccaacccaccggagcttgttaccaacctaacaccgtcaaaaaccactgtgacgtcgccgtcaacagttactaccagaaaaaagcttcttccggtgccacctgtgactttaacggcgccgcctccccctctactacccctccgtcaactgcttcaaactgtttaactggttcaagctctagtggcactcctaccacaggaacaccaactactgggacaccaaccagtgggaccccgactaccggaactccgaccaccggaacccccaccactggaactccaaccagtgggactccaactagtggcttcccaaataccgggactccaaacacagggactaacactgggatgccaaattccaacgggatgccaacttcatcgtcatcttcggtgttcccggggactactcttggcccgactgggagcgggggactaggcgatccaaatgctggagagaagctgtctgttcgaactaacacagtggtcttcttattaaccggtgtagcagcaatgcttgtcatatgagggcttagaagtcacacgcggttatggttgtaattgagttgctgagagatcagatcttgccaacggctcatggttgatagagtcatcttttttttcactcgtctttctaggatttggacttaggttggccgagagacgtaatgctggtagtagctagtattttgggttatgtacaactttaactaagagctttacttttgtaaatccggaggatgagatgctcttttgtttcttatattctttttaatccgtttacttggatcaaaaaaattataaaagaaaaaaaaaaaaaaaaagnnnnnnnnnnnnnnnnnnnnnnnnnnnnnnnnnnnnnnnncacnnnnnnnnnnnnnnnnnnnnnnnnnnnnnnnnca

SEQ ID NO: 120341 - DNA, 815 bp, Arabidopsis thaliana
ttcgaaacacacttgcggtcttatctaaatcacaaaccaacaaaaagaaaaaatgggcttggtgccgatcatttgctttgggcatagtcttccttagttgtctcatcgccgtttatggccaaggtacgaggatcgggttctactcgactacgtgccctaatgccgagacaattgttcggaccactgtggcatctcactttggttcagatccaaaggttgcacccgggttactgagaatgcacaaccatgattgctttgtccaaggttgtgatggttcggtgcttttatcgggacctaactctgaaagaaccgctggcgcaaacgttaacctccatggttttgaggtcattgacgatgccaagaggagctcgaggcagcatgtcctggtgcggccgcttgtgctgatatcttggccttagcggctcgtgattcggtttctctcacaaacgggcaaggttggcatgttccaacaggacgtagagatggaagagtttccttggcatcgaacgttaacaatcttccttctccaagtgactctctagccattcaacaaaggaaattctccgcttttcgcctcaacactcgcgatctcgtcactcttgttgggaggaggacacacgatcggaacagctgcatgtgggtttatcacgaacaggatattcaactctagcggaaacacatcagatccaacaatggaccaaacatttgtaccacaacttcaaagactttttccccaaaacggcgacggatcatcacgtgttgatcttgacaccggaagtggaaacacttttgacacatcttatttcatcaatctc

SEQ ID NO: 120342 - DNA, 615 bp, Arabidopsis thaliana
tttaacccatccttctccttcctctaatttttttgtttcctgcccctggcccttccttactctctatatttttctcaattctccgatttgatccaacgatttcacagatctctgatctaaatggcatccaacggtgataaaggactgatcgttagcttcggcgagatgctaatcgatttcgtccctaccgaatcaggcgtctctctcgccgaagctcctggattcctcaaagctccaggcggtgctcccgctaacgtcgcaatcgctgtttctcgtctcggtggacgatctgctttcgtcggaaaacttggagacgacgagttcggtcatatgttggctgggattttgaggaagaacggtgttgatgatcaggggattaacttcgatactggagctagaactgctttagctttcgttacgttacgtgctgatggagatcgtgagtttatgttttaccgcaatcctagcgccgatatgcttcttcgtcctgatgaactcaatctcgacctcatcagatccgcgaaagtgtttcactatggatcaataagtttgatagtggagccgtgtaggtcagctcatttgaaggccatggaagtggcgaaagaagcaggagct

SEQ ID NO: 120343 - DNA, 433 bp, Arabidopsis thaliana
gtagtggtggtggcattaataatggcgtatgtggaagaaaggaacctagccgttagatcggctcaatcgctacaaacattcagtgttcaccgatcgattctctctctttcttcttccccattgctccttccttcgtacccctctctctgtcttttgaggtttccgggtcgggttggtgagaaaactccagcggcttaacggatcttccactggtagttttctgttcctcacaaggaaatcgaaaatttgataaagcgaaagtgaaaaaggcgtgtgttttctttgtaaaggctccaacttttttgatgaacagcttgtgcttgttgtgaaggttgttactttttgtgtattggaatttgggttttttctttatgttctgaggaggagaaaggaggaagctttcttgaattggattcaaatttgagctcatatg

SEQ ID NO: 120344 - DNA, 419 bp, Arabidopsis thaliana
accacgcgtccgcggcaaacttgagcttgacgctgcttcaaggctattcttctgctgaagaagaagaagcagaggagagagcttttggggattacgacaactccgacgaagatggggataatgatgttcggagatatgaatcgtcttctgtgtttgatttctctgcatctgcctcctccgctaaaaacgccggccttccttcagctgacgacgttttctctcagatttcagggccaccggagtttctaaacaaccgcacagaagcagataatgaagcttcagctagagatgcagaacatgcaaatcgtattagtcgcaaaaagaagaaagttaaaccaaaaggtgttgtcatggaagcaaaacctcaactagtaggaatccatgagagagtaagaaacgatattgatgcacccccatcc

SEQ ID NO: 120345 - DNA, 943 bp, Arabidopsis thaliana
gttattccagctctatacgactcacttatgggaaagctggtacgcctgcaggtaccggtccggaattcccgggtcttcccacgcgtccggtttgtgaagccacttgtttttaaggaagtggaaaaaactgaagggataccgaaaagggaaaggggtaatgtaggaggaggaaaagatgctaattttggaaatgtgggtgtaagaaaggaaacagaacggtgtttgagtcagactgaggttgagaaggaggcgtggaagctgcttcgtggtgccgtggtgaactactgtgggttccctgtggggactgtagcggctaatgatccaggggatacgcagactttgaactatgatcaagtgtttattcgtgattttgttccttcggcgtatgcgtttatgcttgatggagaaggggagattgttagaaactttctccttcatacattgcagttgcagagctgggagaaaacagtggactgtcacagccctggcccggggctaatgccagcgagttttaaagtgaaatctgcgccacttgagggaaatgatggttcatttgaggagtttttagatccagactttggtggatcagccattggacgtgttagccctgttgactctggtttgtggtggatcatattgctgagagcttatggaaagctcacgggtgactacacgttgcaagagagaattgatgttcaaacagggatcaagttgatactcaagctttgtctagccgacggttttgacatgttcccgactctacttgtcactgacggatcatgtatggttgatcgaagaatggggattcatgggcatccacttgaaatccaagcattattctactccgctctccgttgtgctcgagagatgcttattgtgaatgatggaaccaagagcttagttactgcagtcaacaatcgcctaagtgctttatcattccata

SEQ ID NO: 120346 - DNA, 1009 bp, Arabidopsis thaliana
  unsure (1)..(1009): unsure at all n locations
atttgttggaggtcaatggattgtgggaattattgacgagcttagaaaggcgtatgcagaagagtcttctgatagcggaccaatattgatagatacaaagactcgactccgtgatacacttccagctgagccacagaggaggaatggaaggcttcagctaatgctttacaagcttctatgggacactattgtgaaagaagggtttccaacgggaccttttttcgactacttttctttgaatcgcaattatgtcttatcccaagatgtcagagatcacattgctaatgcaggtatcaaagctcagacacttgaagagatagttaggtactatgaaaacacttttcagatgcttccgatagcaaataatcaactattactaaagtacgagtttcagaaggaccaatctataatagctgaaattagattcaaccatgatcatgaatgggtgatgagcaaatatagagaagtcattgagttctggagaaatgaacgagaagctgggtacactcctgaagaagaacgttggaaatgtcggtattgccaatttgctaagtcttgccctggaaacccgagtttcgaatctcctagcacaagctcaccaacaagagaggctcctcctttaccaagctaaaaagaagatgaaaagttgattctttcaccgaaagctgctaaatgctaacatatatgtttgtgttgtctttaatttccacatttgcttcccttaaattgcatagcagttaagtgattaaaccgtggtttgattagggttggttaggcgtaccaagattgatttgtaccgggatgccgcaatttgattattgtgtatcgtttccaacacacgctttgtatgtatcatcattgttggaatctctaaggtaatcgacaatagcatttttacgttctgtaaaaaagnnnnnnnnnnnnnnnnnnnnnnnnnnnnnnnnnnnnnnnnnnnnnnnnnnnnnnnnnnnnnnnnnnnnnnnnnnnnnnnnnnnnnnnnnnnnnnnnn

SEQ ID NO: 120347 - DNA, 1103 bp, Arabidopsis thaliana
  unsure (1)..(1103): unsure at all n locations
nnnnnnnnnnnnnnnnnnnnnnnnnnnnnnnnnnnnnnnnnnnnnnnnnnnnnnnnnnnnnnnnnnnnnccacgcgtccgctttgagattcctaagatatgtcttcacttgcagatttaatcaatctcgatctctccgattccactgaccagatcatcgccgagtacatatggattggtggatcgggcttggatatgagaagcaaagcaaggactttgcctggaccagtgacggatccatcgcagttaccgaaatggaactacgacggttcaagcaccggccaagctccgggcgatgacagtgaagtcatcatctaccctcaagctatcttcaaagaccccttcagaagaggcaacaacatccttgtgatgtgtgacgcatatacaccggcaggagagccgattccgacgaacaaaaggcatgcggcggctaagatctttgaagaccctagtgttgtcgccgaagaaacatggtacggaattgaacaagagtatacccttgttgcaaaaggatattaagtggccggtaggttggccggtcggcggtttcccaggtcctcagggaccgtactactgtgggagttggagcagacaaaagcctttgggaggggcaatcgttggttctcaatttacaaagcttgtttttacgccggattcaatgtcagtggggctaaccggcgaagttatgcctggccaatgggggttcaagtcggtcccaccgttggattcttcccccgttcaggtctgggttgctcgttacattcttgagaggatcacagaattggctggagttgttctgtctctagaccctaaaccaattccgggagattggaatggtgcaggggcacacacaaattacagtacgaagtcgatgagagaagatggagggtacgaggtgataaagaaagcaatagagaagctttgattgcgtcacaacggncacatttgctgcttttggtgaaggcaacgagcgtcgtctcaccggaaaaacatnnaacccnccggttatcaacaacttttntttaatgggggtntttggcaaaccnttgggggcatcgnttaggggttngggcgttnccactttagcaaggccttggaaaaaag

SEQ ID NO: 120348 - DNA, 803 bp, Arabidopsis thaliana
  unsure (1)..(803): unsure at all n locations
ccaatggggttttttccacaaggaattaaaggtttttgccccgaatttccaggttggcccaaaaagaaaatttttacctctgggttaagagggattcagaatttttttccggatcggaactcgtcagggtgtttttgttttttcaacctccaaatgttaaagggtattttccactacaagtttgaagccatctaaagctttgctggactggctatggaccgaaagcagcacaagaagggcgcagcacaagaggctgtgaagagaaggagacgtgcaactaagaagccttactcaaggtcgattgtcggtgctactttggaggttattcagaagaagcgagcagagaagcctgaagttcgtgatgccgctagagaagctgccctacgtgagatcaaggagagaatcaagaagaccaaggacgagaagaaggcaaagaaggtcgagtatgcatcaaagcaacagaagtcacaagtgaagggaaatatccccaagagtgctgcacccaaggctgctaagatgggtggtggtggaggcagacgttgaatggagctatagagtagcccactcttctctcttcacttatctttctttcttgttttgacattgttttgttttgtcagccattttttagttttgcaccagatctaatatattcagtttatgaaaactttttgtttggtaaaaaaaaaaaaaaaaaaaaaggccggacgctctagtggatccaagcttacgtacgcgtgcataagacgtcannnnnnnnnnnnnnnnnnnnnnnnnnnnnnnnnnnnnnnnnnacatatcat

SEQ ID NO: 120349 - DNA, 604 bp, Arabidopsis thaliana
  unsure (1)..(604): unsure at all n locations
aatacgactcaccttagggaaagctcgtacgcctgcaggtaccggtccggaattcccgggtcgacccacagctccgcggacgcgtcggaaagagtaatagcgcggcggagccatggttctcaagactgagctttgccgattcagtggccagaaaatttaccctggtagagggatcagatttatccgatcggactctcaggtgtttttgtttctcaactccaaatgtaagaggtatttccacaacaagttgaagccatctaagctttgctggactgctatgtaccgaaagcagcacaagaaggacgcagcacaagaggctgtgaagagaaggagacgtgcaactaagaagccttactcaaggtcgattgtcggtgctactttggaggttattcagaagaagcgagcagagaagcctgaagttcgtgatgccgctagagaagctgccctacgtgagatcaaggagagaatcaagaagaccaaggacgagaagaaggcaaagaaggtcgagttttcattaaagcaacaggagtcacaagttaagggaaattttcccaagggtccttcccccaaggttttaagatgggtgtgtggggcanncgttatc

SEQ ID NO: 120350 - DNA, 1037 bp, Arabidopsis thaliana
  unsure (1)..(1037): unsure at all n locations
cagcactaatacgactcactttagggaaagatcgtacgcctgcaggtaccggtccggaattcccgggtcgacccacgcgtccgcttagagagctttggagataacgagaacaagaaagaaagagaagattatatacatagaaaaggagagatcaaatggagtgggagaaatggtacttagatgcggttcttgtgccaagtgctttacttatgatgtttggttaccacatctatttgtggtataaggttcgaaccgatcctttctgcaccattgttggtacaaattcccgcgcccgtcgatcttgggtagcagccatcatgaaggacaacgagaagaagaacatcttagcggtacaaacactacgaaacacgataatgggagggacgttaatggcaaccacttgcatcctcctctgcgcaggtctcgctgccgttttaagcagtacttatagcatcaagaaacctttaaacgacgccgtatatggagctcatggtgacttcactgttgcactcaaatacgtaaccatcctcacaatcttcctcttcgccttcttctctcattctctctccattcgcttcatcaaccaagtcaacatccttattaacgctcctcaagaacctttttctgatgatttcggcgaaataggaagctttgtgactcccgagtatgtctctgaactactcgagaaagctttcttgctcaatacggtaggtaataggctgttctacatgggcttgcctttgatgctatggatctttgggcctgtgcttgtgttcttgagctctgctttgataatccctgttccttataacctcgacttcgggtttttgttgagcaataaagagaagggtaaagtcgattgcaatggaggttgtgatgacaacttctcgcctttattatctgttgatgtgaattgaaataatgataaagctgtttgttattaaaaaaaaaaaaaaaaaaaaaaggannnnnnnnnnnnnnnnnnnnnnnnnnnnnnnnnnnnnnnnnnnnnnnnnnnnnnnnnnnnnnnnnnnnnn

SEQ ID NO: 120351 - DNA, 539 bp, Arabidopsis thaliana
attttagggaaggctggtccgccggcaggtcccggtccggatttccggggtcgacccaggcgtccgttcttttttcttccgtttttccacacattgtctctacctttccctttttcagatttgaccctttgttttcaaaagaaacgatttttagtagccgccggggaatcaggagaatggtgtctccggagaatacgaactggcttagtgattaccctttgattgaaggtgctttctctgatcagaaccccactttcccttggcagatagatggctcagctactgtcagtgttgaagtggatggcttcctttgtgatgcagatgtgatcaaagaaccaagttcaaggaagaggatcaaaactgaatcttgcactggttctaactcgaaagcttgtagggagaaacaaagacgtgatagactaaatgacaagtttacggagttgagttccgtattggaacctgggagaactccaaaaacagacaaggttgctattatcaatgatgcaattcgcatggtgaatcaagcaagagatgaagcg

SEQ ID NO: 120352 - DNA, 656 bp, Arabidopsis thaliana
caaaaaaagattgaaaaggtaccattaagggttttcctccggtaaaggcgtaataaaccactaaaccctttttcaggggcccaatttaacttccggtgctcccttccaagtttctttggcggtaccgttcgcggtatgattccacacaagactaagggtgaagctaaagcactttgcccgcttgaaggtctttgaaggagttcctactccatatgacaagatcaagaggatggtcgttcctgatgctctcaaggtcttgaggctgcaggctggacacaaatactgtctgttgggtcgcctttcttctgaagtcgggtggaaccactacgacaccatcaaggagctggagaacaagagaaaggaaagagctcaagctgtttatgagagaaagaagcaacttagcaaactcagagctaaggccgagaaggttgctgaagagaagcttggatctcaattggatgttcttgcacccgtcaagtactgaattcaatcagtttatcgtatttgaatgtttttgcaagttttgctcagacattatactattatattacgaggttttgttgtatgcgaaaacgaaatacctgcagcccgggggatccactagttctagagcggccgccacggcggtggagctccagaatttgtaaacgttagtt

SEQ ID NO: 120353 - DNA, 974 bp, Arabidopsis thaliana
  unsure (1)..(974): unsure at all n locations
atgannnnnnnnnnnnnnnnnnnnnnnnnnnnnnnnnnnnnnnnnnagccgctcaagctctcaccacagtttgagaagcgaaaatggtgtcaggatcagggatatgctcgaagcgcgttgtcgtcgacgcgcgccaccacatgcttggccgtcttgcgtcgatcaccgctaaagagcttctcaatggccagaaagttgtcattgtccggtgcgaagagatttgcctctccggcggactcgttcgtcagaaaatgaagtacatgaggtttcttcgcaaacgtatgaacactaaaccttctcatggacctattcacttccgtgctccttccaaaatcttctggcgtactgttcgcggtatgattccacacaagacgaagcgtggagctgctgcattagcacgtctgaaggtatatgaaggtgttcctactccatatgacaagatcaagaggatggtcatccctgatgctctcaaggtgttgaggcttcaagctggtcacaaatactgtctattgggccgtctttcttctgaagttgggtggaaccattacgacaccatcaaggagctggagacaaagaggaaggagagagcccacgtggtttacgagcgaaagaagcaacttaacaaacttagagttaaggccgagaaggtcgctgaagagaagctcggagcacagctcgatattcttgcgccagttaagtactgagcttgtcagtagtagttttttttttttttggtaaggagcttgtcagtagtagtttgtcttggcatgttttgagccaacccaatacttttttactttttatcttttacttaggtcttgtatcgaaatttgtactcctaacattttatgcttgagttttatttattagattgtgtggctaaaaaaaaaaaaaaagnnnnnnnnnnnnnnnnnnnnnnnnnnnnnnnnnnnnnnnnnnnnnnnnnnnnnnnnnnnnnnnnnnnngtctcaatt

SEQ ID NO: 120354 - DNA, 1064 bp, Arabidopsis thaliana
  unsure (1)..(1064): unsure at all n locations
atgatcttnnnnnnnnnnnnnnnnnnnnnnnnnnnnnnnnnnnnnnnnnnnnnnnnnnnnnnnnnnnnnnnnnnnnnnnnnnnccacgcgtccgcggacgcgtgggcggacgcgtgggcggacgcgtgggcttttaatcaccccggagtagtaagcttgcggctgatcagagctgagtgaaaaatggtgtctggatcaggaatttgcgcgaagcgcgtggtggttgatgctcgtcaccacatgctaggtcgcttggcttcggttgtagcaaaggatctgctcaatggccagaatattgtggttgtccggtgcgaggagatttgtctctccggcggacttgttcgtcagaagatgaagtacatgaggtttctccgtaagcgtatgaacactaaaccttctcacggacctattcacttccgtgctccctccaagatcttctggcgtaccgttcgcggtatgattccacacaagactaagcgtggagctaatgcacttgcccgcttgaaggtctttgaaggagttcctactccatatgacaagatcaagaggatggtcgttcctgatgctctcaaggtcttgaggctgcaggctggacacaaatactgtctgttgggtcgcctttcttctgaagtcgggtggaaccactacgacaccatcaaggagctggagaacaagagaaaggaaagagctcaagctgtttatgagagaaagaagcaacttagcaaactcagagctaaggccgagaaggttgctgaagagaagcttggatctcaattggatgttcttgcacccgtcaagtactgaattcaatcagtttatcgtatttgaatgtttttgcaagttttgctcagacattatactattatattacgaggttttgttgtatgcgattttgacttagtttatttcttgaattcggcttttcttagtttatttcttgaattcgtcttttgtcatgcgcctcctccaaaacgtttcgtgatttatttttcctctgcataaaaaaaaacaaaaagggcggccgctctagaggatccaagcttacgtacgcgtgcgtgcgacgt

SEQ ID NO: 120355 - DNA, 570 bp, Arabidopsis thaliana
acgaagcagcatagatgatcctgcgaaagcgagtttcttcgagtcataccacacacctgtccccatccataacaccattgctacgaaattggggataaaagaatctccaatcaagatcaacagccagactaagtatgcagctttatctagaggagatggagaggtttacttgaggtttactcgcaaagcaagacccgaatcaatatggaatcacgctgctggctcaatcattgtttcagaagcaggagggaaagtgactgatgcagcagggaatccattggacttttcgaaagggaagtatcttgattacaagagaggaatcgtcgttacgacgcagaaactgttgccaaggcttttaacagcagtaagagaatcaattaaagaagaagaagaggaagaagaaaaagctgcttctctaaaacttcactaacacgcaactgtaatatacttattattgttgtctttgggtatactctgttgtctctgtgtttttcacagtctatttattgaaaaccagaaacaaaaaaaaaactcacctttgatatatataagaaacactaattctctttc

SEQ ID NO: 120356 - DNA, 779 bp, Arabidopsis thaliana
cccacgcgtccgaaaaagggtaaagcagcaaaaccctaataaaatcacaacaaattaacacaaaaaaaccagatcttaaaactctctctacccaccaagaggatcaaccagtctcttccccttcagattctcctttccacagtgaatggatcaacaagaccatggacagtctggagctatgaactatggcacaaacccataccaaaccaacccgatgagcaccactgctgctactgtagcaggaggtgcggcacaaccaggccagctggcgttccaccagatccatcagcagcagcagcagcaacagctggcacagcagcttcaagcattttgggagaaccaattcaaagagattgagaagactaccgatttcaagaaccacagccttccccttgcgagaatcaagaaaatcatgaaagcggatgaagatgtccgtatgatctcggctgaggcgcctgtcgtgtttgcaagggcctgtgagatgttcatcctggagctgacactcaggtcgtggaaccacactgaggagaataagaggcggacgttgcagaagaacgatattgctgctgctgtgactagaaccgatatttttgatttccttgtggatattgttccccgggaggatctccgagatgaagtcttgggaagtattccgaggggcactgtcccggaagctgctgctgctggttacccgtatggatacttgcctgcaggaactgctccaataggaaatccgggaatggttatgggtaatcccggtggtgcgtatccacctaatc

SEQ ID NO: 120357 - DNA, 518 bp, Arabidopsis thaliana
  unsure (1)..(518): unsure at all n locations
actnnnnnnnnnnnnnnnnnnnnnnnnnnnnnnnnnnnnnnnnnnnnnnnnnnnnnnnnnnnnnnnnnnnnnnnnnnccacgcgtccgatcacattaaccatcttcgtagcaactttactctcaatcggttttcttctaagcatagttctgatcttctctaccgttttcagtgttggaaagagaaaggaaaaggaatggagagacttccacaagtgaaagtaaaagagggggaagaaagattgataaatgaagaagtggtgaatgttacattaagaagaagtttgagattctactcaatacttcaatcacaagatggtttttggcctggtgattatggtggccctttgtttctcttgcctgctctggtgatcggcttatatgtgacggaagttttggatggaactttaactgcgcaacatcaaatcgagattcgtcgttatctctataaccatcagaacaaggatggaggatggggactacacgtagaagggaatagcaccatgttttgtacagtgct

SEQ ID NO: 120358 - DNA, 409 bp, Arabidopsis thaliana
aaagcagacttggtcttcttcttcctctttctctacttcatacataatttcatttctcaggtttctatatattttcttctccactttttataatttatccgcttgtctgctatctcttacattaaatctaaacctaaatcattagaatctctaatccagtttataatatacttttcatttttatcaatttttttttttctttttgtgtttggtgttggcatggctggtctcgatctaggcacaacttctcgctacgtccacaacgtcgatggtggcggcggcggacagttcaccaccgacaaccaccacgaagatgacggtggcgctggaggaaaccaccatcatcaccatcataatcataatcaccatcaaggtttagatttaatagcttctaatgataactctggac

SEQ ID NO: 120359 - DNA, 715 bp, Arabidopsis thaliana
tatagggacaagctggtacgcctgcaggtaccggtccggaattcccgggtcgacccacgcgtccggcgagagcatgtgttgcctaacttactgacttattcaactttgatcgatgggtactcgaaggggggtttgtataaagaggcaatggagatatttagggagtttaagagcgccggattaagagctgatgttgttttgtacagtgcattgattgatgcattgtgcaagaatgggttggtgggttctgctgtttctttgatcgatgagatgacaaaggaaggaattagtcctaatgttgtaacttataattccataatcgatgcctttggtcgttctgcaactatggacagatcagccgattatagcaatggtggatctttgcctttctcttcttctgctctgagtgcattgactgaaacagagggtaatcgggtaatacagttatttgggcagttaacaactgagagtaacaaccgaacgacgaaagattgtgaggagggtatgcaggagctctcctgtatattggaagttttccgcaaaatgcatcagctggaaattaaaccaaatgttgtaaccttttcagcgattctgaatgcttgcagtcggtgtaactcatttgaagtgctattgttctaaagggctaagctgttaatatagggtatggggtgtcatggctttatggccaaaaaaaatgtttggtcaactaaagttt

SEQ ID NO: 120360 - DNA, 800 bp, Arabidopsis thaliana
  unsure (1)..(800): unsure at all n locations
agagggtaatcgggtaatacagttatttgggcagttatcaactgagagtaacaaccgaacgacgaaagattgtgaggagggtatgcaggagctctcctgtatattggaagttttccgcaaaatgcatcagctggaaattaaaccaaatgttgtaaccttttcagcgattctgaatgcttgcagtcggtgtaactcatttgaagatgcatcaatgctactagaggagctcaggctgtttgataataaggtatatggtgttgttcatggacttctcatgggccagagagagaatgtatggctccaagctcagagcttatttgacaaagtaaatgaaatggatggttcgactgcttctgccttctacaatgccctaactgacatgctttggcactttggccagaaacgaggtgcagaactggtggcacttgagggaagatctaggcaagtttgggaaaacgtgtggtctgattcttgcttggacttacacctcatggtcttcttggagctgcacgtgcaatcggtccatgccgtggctactaaacatacgctcccattgtctatgaaggtcatgagttacctaaaagncttgagtaaaattnacctggctgggggggaaaccccagncnaaagtgggnttggaaaccgggggcacctaagaccgaccgggttnaagtncttttttaaggggaaatgggattncccccatcccncctggncaaaaatcnaaccatggggncgggtccacatccaaaccgggtnccggnggnaacaancttnggctnggggaancnnccnccctg

SEQ ID NO: 120361 - DNA, 521 bp, Arabidopsis thaliana
  unsure (1)..(521): unsure at all n locations
atgatttgccnnnnnnnnnnnnnnnnnnnnnnnnnnnnnnnnnnnnnnnnnnnnnnnnnnnnnnnnnnnnnnnnnnnnnnccacgcgtccgcccacgcgtccggggaaacaagggaaatatgatgaagtgaagaaagttttcactgagatgaagcgagagcatgtgttgcctaacttactgacttattcaactttgatcgatgggtactcgaaggggggtttgtataaagaggcaatggagatatttagggagtttaagagcgccggattaagagctgatgttgttttgtacagtgcattgattgatgcattgtgcaagaatgggttggtgggttctgctgtttctttgatcgatgagatgacaaaggaaggaattagtcctaatgttgtaacttataattccataatcgatgcctttggtcgttctgcaactatggacagatcagccgattatagcaatggtggatctttgcctttctcttcttctgctctgagtgcattgactgaaacagagggtaatc

SEQ ID NO: 120362 - DNA, 775 bp, Arabidopsis thaliana
  unsure (1)..(775): unsure at all n locations
atacgactcactttagggaaagctcgtacgcctgcaggtaccggtccggaattcccggaccgacccgggcttccgctcgtctacatttacactcggagcttagaccttccaatctaccggcggcgaaaatgggtttcaagaggtacgttgagatcgggagagtagcacttgtgaactacggagaagatcatggaaagctcgtcgttatcgtcgacgttgttgaccagaacagagctttggtggatgcccctgatatggagaggatccagatgaacttcaagaggttgtctcttaccgatattgtcattgacatcaaccgtgtgccaaagaagaaggctttgatcgaggcaatggaaaaggctgatgtgaagaacaagtgggagaaaagctcatggggtaggaagcttatcgtgcagaaacgtagggctaaccttaacgactttgataggttcaagatcatgttggccaagatcaagaaagctggtgttgtcaggcaagagcttgcaaaactcaagaaggagatcactgcctgatcaaatattatctacaattctgttgtctttcttttttgattttggattcggaaattagtgtttttggaactatcaatatcagtatgtgctcaattatcagacattattcaagtttgaaaccttgtttgcaaaactcaaagaaaaaaagaaaatttaagnnnnnnnnnnnnnnnnnnnnnnnnnnnnnnnnnnnnnnnnnnnnnnnnnnnnnnnnngttcctagtaacgaaatccatccgggg

SEQ ID NO: 120363 - DNA, 686 bp, Arabidopsis thaliana
aaagatgttatgaaaaagcaagaagagcttcctgtgtgtaaagaaggagacttgataatggatcaattagtggagctaaccagcaaaggatgtggttgtttgcttgtggttgatgaacattctcgtttgatcggtacgtcctcccatggggatctccgtcggcctctcaaggctagtggagaagcaatattccaactcagtgttggagaaatgtgcaccaggaagccgaggacaattggaccggaaccaatggcagttgaagctatgaagaagatggaatcaccgccatcgcctgtacagtttctaccagtggtcaatgaagacaacacattgattggaattgtaacattgcatggtttggtttcagctggtctctgaacacgaaggtgcctctatattgagttttatatagttgattcttttacagaaacccaaatcgagaatattggtgtaatttgattgattttcaccgccagtgaattgtattgtgtctagtagtacttcatgtattgtccatcatttactcaaagatgtgtatagagtataagaagatttcttgtatctttgtcctgccttaccttcattttcttctactaaaaaaaaaaaaaaaaaaaaaaaagggcggccgctctagaggatccaagcttacgtacgcgtgcatgcgacgtcatagctcaacgatagtt

SEQ ID NO: 120364 - DNA, 707 bp, Arabidopsis thaliana
cgtaggacgtcgcaacaccctatagtgagtcgtattaaccacagaaaggggctgtcgctcgtctacatttacactcggagcttagaccttccaatctaccggcggcgaaaatgggtttcaagaggtacgttgagatcgggagagtagcacttgtgaactacggagaagatcatggaaagctcgtcgttatcgtcgacgttgttgaccagaacagagctttggtggatgcccctgatatggagaggatccagatgaacttcaagaggttgtctcttaccgatattgtcattggcatcaaccgtgtgccaaagaggaaggctttgatcgaggcaatggaaaaggttgatgtaaaaacaaatgggagaaaagcttatggggtagggagcttatcgtgcagaaacgtagggctaaccttaagggctttgataggttcaagatcatgttggccaagatcaagatatttggtgttgtcaggcaagagcttgcaaccccccagaaggagatccctgcctgatcaaatattatttacaagtctggtgtctttcttttttgattttggattcggaaattagtgtttttggaactatcaatatcagtatgtggtcaattatcagacattattcaagtttggtattattaaaaaggcccgaaaccatagagcgaccgctctagaggatccaagcttacgtacgcgtgcgtgcgacgtc

SEQ ID NO: 120365 - DNA, 502 bp, Arabidopsis thaliana
cgactcactttagggaaagcacgtacgcctgcaggtaccggtccggaattcccgggtcgccccacgcgcccgcaaaatctgagaacaaggtctgcttcgattgtagtgcgaagaatccaacttgggcatcggttacatatgggattttcctctgcatcgattgttcagctactcaccggaatcttggtgttcatatcagcttcgtcagatcaacgaatttagactctgggagcccggagcagctcaggacaatgatgtttggtggtaacaaccgtgctcaggttttcttcaagcaacatggatggactgatggtggcaaaattgaagctaagtatacttcaagagccgctgatttggatcggcagaattcttgctaaagaagttcgccgaagcgattgcggaagacacgaattccggtctttgtgagatgtgggggggggggctggtaagagtggccgagagaggggatggggggcggagggcggttggctggagggcgggg

SEQ ID NO: 120366 - DNA, 923 bp, Arabidopsis thaliana
acccgtcaaaaaaaaaacaagttttcttctttttacactcaagaatataaattccctgttctccagatcttttctcaagaaaatttaaagctttaacttaagaaagcttgaacctttctcttccaaccacatcttccttctttttatcctctagctcaacttagaaagaatagaataaagtggcaaaaccgaaagtgaaccaacttgtagtaaattaatagttatgggttcgaaacctaatgccatgaagaatgtggtggctatggcggcagtttctgctctgttccttctagggtttcttgtttgctctgtttctggttctgtctcttacgatagcagagccattaccatcaatggcaaaagaagaatccttatctctggatctattcactaccccagaagtactcctgagatgtggccagatctaattcggaaagcaaaggaaggaggcttagatgtgattcagacttatgtgttctggaatgggcatgagccatctcctggaaaatattatttcgagggcaactatgatttggttaagtttgtcaagttggtccaacaatctggactctatcttcatctaaggattggtccttatgtctgtgctgaatggaacttcggaggatttcctgtttggcttaagtacattccagggattagcttcagaacagataacggtcccttcaaggctcacatgcaaagattcaccacgaagattgttaacatgatgaaagctgagaggctttttgaattctaaggcggttctataattctcttttagatataaaattaatatttaccatattatttattatcttgttgcaccgttcctttcattcaccaactttgctttcttatttttctgttttttctaatctatctttatatctttatttctattatcaattctatatctttttctt

SEQ ID NO: 120367 - DNA, 908 bp, Arabidopsis thaliana
  unsure (1)..(908): unsure at all n locations
cagcactatacgactcactctatggaaagctcgtacgcctgcaggtaccggtccggaattcccgggcccaaagcacatttacaatgcgggcccggacaaaagatcaccaccgtgaagtttgctagtttcgggacacctgaagggacttgtggtagttaccgtcaaggaagctgtcacgcccatcactcctatgacgctttcaacaaactttgtgttgggcagaactggtgttctgtaactgtagcaccggagatgtttggtggagatccgtgtccaaatgtgatgaagaaactcgcggtggaagccgtttgtgcttaaatgaaagcagacgcaacagcaatcaaaagactgtaaaggtggttacttacgcattcttacaggtttctgatggtattagtatgttttatgaagacaacagaagaagttggtatttttctagctccttattttatcacggtggaagttgtacaaagggacgcagcacgccgttcaacaatttgcagagttgtgatttatatgtaaataagcttgggaagggtttgttattgtaacccaagaaagaagatgaagaagaagaagaagcacattgagactggagaatctaagtccatgtgtagattcttttggtaggagcaaaactgggattagtttattctctgagttttgctttgaacgtgtttgttgttgctgttgttgtagtcgatactattagatgagacattctctgcaattatctcattgctaaatttatgtaatggtttttctttctttctatggaatgaagcatatcagtcttgaagtaaaaaaaaaaaaaaaaagaaacaaaagnnnnnnnnnnnnnnnnnnnnnnnnnnnnnnnnnnnnnnnnnnnnnnnnnnnnnnnnnnnnnnnntgcaacccgnnnnntt

SEQ ID NO: 120368 - DNA, 652 bp, Arabidopsis thaliana
  unsure (1)..(652): unsure at all n locations
gcccccnnccccatgccctncacaaccttnnttgccaaccggttccgnaactnnncccccgggatttttggtggaacccngtcccnaaatgtgntgaggaaccccccggtggaacccgtttgtncntaaatgaaaccagccncaaccagcaatccaaaggcctggtaaaggtggtaccttacgcattcttaccagggtccctgatgggattaggtatgtttttatgccgaccaccaagaagaagttggggtttttctagctccttattttctcccggtggaggttgttcaaagggacgcagcacgccgttcaccaattttgcagagttgtgatttatatgtaaataagcttgggaagggtttgttattgtaacccgagaaagaagatgaagaagaagaagaagctctttgagactgcagaatctaagtccacccccacactcttttaggtaggagcaaaactgggattagtttattctctgagttttgctttgaacgtgtttgttgttcctgttgttgtagtcgatactattagatgagacattctctgcaattatctcagtgctaaatttatgtaaaaaaaaaaaaaacaaacaccaagggcggccgctctataggatccaagcttacgtacgcgtgcatgctacgtcata

SEQ ID NO: 120369 - DNA, 1238 bp, Arabidopsis thaliana
  unsure (1)..(1238): unsure at all n locations
ttaggtacaactatagaagagtctatgacgtcgcctgcacgcgtacgtaagctcggaattcggctcgagggccatgctatgcatgtgtttatcaatggtcaattatctggatctgcatatggtagtttagactctcctaagctaacttttcggaaaggtgtgaatctaagagctggtttcaacaaaattgcgatactaagcattgctgttggtctcccgaatgtgggtccacattttgagacatggaatgctggagttttgggtccagtttcattgaacggtctcaatgggggacggagagatctatcatggcagaaatggacttataaggttggtcttaaaggagagtctctgagtcttcattcacttagtggtagctcatcggttgagtgggcagaaggtgcatttgttgcacagaagcaaccacttacttggtacaagacgactttctctgctccagctggagattcgccattggctgtagacatgggaagcatgggaaaaggtcaaatatggataaatgggcagagcctgggacgtcactggcctgcatataaagcagttggttcttgcagcgagtgttcttataccggaacattcagagaggacaagtgcttaagaaactgtggagaggcttctcaaagatggtaccatgtcccaaggtcgtggctaaaaccaagtggcaatctattggttgtctttgaggaatggggaggagacccgaacggaatcacgttggtcagaagagaagtggacagtgtatgtgcagatatctatgaatggcaatcaacgctggtgaactaccaattgcatgcttctggaaaagttaataaaccattgcatcccaaagcacatttacaatgcgggcccggacaaaagatcaccaccgtgaagtttgctagtttcgggacacctgaagggacttgtggtagttaccgtcaaggaagctgtcacgcccatcactcctatgaccggctttcaaccaaactttggtgtttgggcagaaccttggtgttctgtaactgtagccccccgcaggagttgtttggtggagatccgtgtccaaatgtgatgaagaaactcgcgggtggaagccgtttgtgnttaaatgnaagcagacgnaaccagcaattcaaaaggctttaaaggtgggtacttnngggnttttttnccaggtttntgatgganttgggatnttttttgtnggcaacccanaggngntngggntttttnntggg

SEQ ID NO: 120370 - DNA, 1684 bp, Arabidopsis thaliana
  unsure (1)..(1684): unsure at all n locations
atacgactcactttagggaaagctcgtacgcctgcaggtaccggtccggaattcccgggtcgacccacgcgtccgcttgtttgctctgtttctggttctgtctcttacgatagcagagccattaccatcaatggcaaaagaagaatccttatctctggatctattcactaccccagaagtactcctgagatgtggccagatctaattcggaaagcaaaggatggaggcttagatgtgattcagacttatgtgttctggaatgggcatgagccatctcctggaaaatattatttcgagggcaactatgatttggttaagtttgtcaagttggtccaacaatctggactctatcttcatctaaggattggtccttatgtctgtgctgaatggaacttcggaggatttcctgtttggcttaagtacattccagggattagcttcagaacagataacggtcctttcaaggctcaaatgcaaagattcaccacgaagattgttaacatgatgaaagctgagaggctttttgaatctcaaggcggtcctataattctctctcagattgaaaatgaatatggaccaatggagtatgagcttggtgcaccgggccggtcatacaccaactgggcagctaagatggcggtggggctaggcactggtgtcccttgggtcatgtgcaaacaagacgatgctcccgaccccattatcaatgcttgcaatggcttctactgtgattacttctccccaaacaaggcttacaagcctaaaatgtggaccgaagcctggactggatggtttacaaagtttggaggcccagttccttaccgcccagctgaagatatggccttttccgttgcaaggtttatccaaaagggtggatctttcatcaactactatatgtatcatggtggaacaaactttggtcgaactgctggtggtccgtttatcgcaactagctatgattatgatgctcctcttgacgaatatggacttgaaaggcagcctaagtgggggcacttgaaagatttgcatagagcaattaagctgtgtgaaccagctttagtatcaggagagcccacaagaatgcctctcggaaactatcaagaggctcatgtgtacaaatcaaaatctggagcttgttctgcattcttagcaaattataatccaaaatcttacgccaaagtttctttcgggaacaatcactacaatctccctccgtggtctataagtattctcccagactgcaaaaacacagtttacaacacagccagggttggtgctcaaacttctaggatgaaaatggttcgggttcctgttcatggtggtttatcttggcaagcatacaatgaagacccatcaacttacatcgatgagtcattcacaatggtcggattagtggagcagataaacactacacgagacacttcggattacctgtggtacatgactgatgttaaagttgatgccaatgaaggatttttgaggaatggagatttgccgactcttactgtcctatcagctgggccatgctatgcatgtcgtttatcaactggtcaattatctggatctgcatatgggaggtttagactctcctaaggttaactttccgggaaaggttnttaantntaagggctgggtttcaaccaaatttcnggtantaaggatttnntgttgggttnccccaatt

SEQ ID NO: 120371 - DNA, 440 bp, Arabidopsis thaliana
atttcattaaatattagtattcatttataatgcacatgcgttgattggtgttacttcttttcatgatctttttttgtttgattattttactctgttctgactcttagaatagtattcaatcatataagcaattcttcaatgtgttctgttgctgaagtcaacgacaaaccatgtggatcatttatgtgttcagtcactttctttttgcattttgataacttgtttaatttatggtttgctctttgctagatcaatgcttgcaatggcttctactgtgattacttctccccaaacaaggcttacaagcctaaaatgtggaccgaagcctggactggatggtttacaaagtttggaggcccagttccttaccgcccagctgaagatatggccttttccgttgcatggtttatccaaaagggtggatctttcatcaactacta

SEQ ID NO: 120372 - DNA, 422 bp, Arabidopsis thaliana
tatcggaatgatttttgaggaatggagatttgccgactcttactgttctatcagctggccatgctatgcatgtgtttatcaatggtcaattatctggatctgcatatggtagtttagactctcctaagctaacttttcggaaaggtgtgaatctaagagctggtttcaacaaaattgcgatactaagcattgctgttggtctcccgaatgtgggtccacattttgagacatggaatgctggagttttgggtccagtttcattgaacggtctcaatgggggacggagagatctatcatggcagaaatggacttataacgttggtcttaaaggagagtctctgagtcgtcattcacttagtggtagctcatcggttgagtgggcagaaggtgcatttgttgcacagaagcaaccacttacttgg

SEQ ID NO: 120373 - DNA, 423 bp, Arabidopsis thaliana
  unsure (1)..(423): unsure at all n locations
aaaacaaaaccaactcagacgaatgtaattttttcttcttgagtgaattgttgtaaaaaaatgatgatcggagaatctcatcgtggttttaatccaacggttcatattcctccatggccactttctgaagatctaacggtgtctgatatttacggaagtccagacggaggaagtagtatgatggaagctttggctgagttacaacgttatcttccgtcaaacgaaccggatccggattcagatccggatctctcgggtccggattcaccaatcgatgcttatacatgcgatcattttcggatgtatgagtttaaagtgagacgttgtgctcgtggccggagccatgattggaccgggagtgtccttacggtcatcccgggggaaaaagctcgccgtcgtgntccctcggaagtttcattaatt

SEQ ID NO: 120374 - DNA, 725 bp, Arabidopsis thaliana
gccgggacgcctgcaggtaccggtccggttattcccggggggacccacgcgtccgtacggctgcgagaagacgacagaagggggaagctaagtccgagtagtcacttaaccggagatcggagactcatcgttgcaacaacaacaaatttcagaagatccgaagacgaaacgatgcctataagtgcgacaatggtcggagctttgctgggtctcggtacccagatgtactccaacgccctccgcaagctcccttatatgcgtcatccgtgggagcatgtggtgggtatgggacttggtgctgtgtttgcgaaccagctcgtgaaatgggatgtgaagcttaaggaagatcttgatgtgatgctcgctaaggctagagctgctaatgagcgccgttactttgatgaagatcgggattaattttgcgtgatctttgaagtcttcagaaaagaaatatcttcccctgaactcatctcaagtgcttgttttgtctgatctttcctgtataagcgtttcttctccttctctttgacttcagctctggaggttcttttcattcactgttttcgaatatgaacctaaagatttgtgttttcacaatctgaatctgtttgtatctggttaataatggcgaaatgataaaccttgcaatccaacccccgtgaaaaaaaaaaaaaaagaaaaccccgccgctctaaaggatccaagcttacgtacgcgtgcatgcg

SEQ ID NO: 120375 - DNA, 524 bp, Arabidopsis thaliana
  unsure (1)..(524): unsure at all n locations
atcaacttcttcttttctctctctaaatttctcagagtatctaatctctctctcttctctcgttccatattatcatgcgtttcataattcagtaaattttttgaaatctgatctgttctttctgaagcttttgagagaataataaaaaatggaatctggtttctccggcggtggtggtgggtcggatttttacggcggtggtggtggtagatctatacctggaggtccaggaactgttatcaacgtcggtaacaataatcctcagacgacgtatagaaaccagattcctggaatcttctttgatcagatcggaaacagagtcgccggcggtaatggattctccgggaaaaggactttagcagattttcaagcggctcagcaacatcaacaacaacaacaacaacaaccgttttatagcaagagnttnacgntttttttcaaggctttnagcccgaattntcaggatttaattccgcgcgtgttncnnngggggnatnantagtttttggggctggcaccncgtc

SEQ ID NO: 120376 - DNA, 780 bp, Arabidopsis thaliana
  unsure (1)..(780): unsure at all n locations
cccccccttccgggcgacggcatcgattagcttggtgtccaattcgcggccgcctctgctccatctcctcctcagatttagggatttttgcttccaatttaacaaacaaaccaagagctattctttcgttctttattctctccgtcttgtaaagtagttttagcagtgagatacatacaaatggagacttccatggggaaacccagcttcttacggaatataatggttcgcgtgcttctctttggtgttcttatcatcgctgtgagatttgcttatgttgtcaccatcaccggtgaatcatgcaatcgcggcgacttctgcttcttctctctccctgagaatctcaactttgtcatctccggtgctgcctccggctcttctgctatcgacgccatcagatctacttcccctggggatgatctctacaccaccagggattggatcaaatccgttcagttttactcctccatcttccaggatctgatcgccgacggttatctatcgcctgaatcgaagacgctttgtgtagagacggcgattggacaagaggttcactcgctcagagagattggggtgaagaactccgtcgggatctctaagaaagcttctaggccgttggtggttagaggcgaaggacatgcttttccctttgaggataacgctttcgattttgtattctccggtggtgaccgccttgggaagtcgttgaagcagttggaaattcgccgatgagattttattgggctcacttgaaaccccggnaggttttccngggtgggt

SEQ ID NO: 120377 - DNA, 643 bp, Arabidopsis thaliana
  unsure (1)..(643): unsure at all n locations
gggcacggccccccctcgtggtcgacggtatcgataagcttgatatcgaattcgcggccgccgaacacctccgcgaactatgcgcttcttttgcccttatcctccaactacttgtcggatctgcaattcttcttgtcaattcccaaccctaatcggagctaatcacacctctgctcgtttctcttctcgttagtctctgctccatctcctcctcagatttagggatatttgcttccaatttaacaaacaaaccaagagctattctttcgttctttattctctccgtcttgtaaagtagttttagcagtgagatacatacaaatggagacttccatggggaaacccagcttcttacggaatataatgggtcgcgtgcttctctttggtggtccttatcaatcgttgtgagatttgcttaatggttggcaaccaatcaccggggaatcatgcaaatcgcggcggcttcctgcttccttctctctcccctgagaacctcaactttggcatccccggggggtggcctccggggncttcnnggaaangnggggcatcaananaaattnccccggggggggngttcnanncccccaggggggtggggnaaaaccggnaaggttaaccccccaacttcaagggnnagncg

SEQ ID NO: 120378 - DNA, 716 bp, Arabidopsis thaliana
  unsure (1)..(716): unsure at all n locations
nnnnnnnnnnnnnnnnnnnnnnnnnnnnnnnnnnnnnnnnnnnnnnnnnnnnnnnnnnngattcctctcaatctctctttcttcttctttttctctcgctccaaattccatgtctgtgtctctttcctcctccgccgtataattcgccggaaaaattatctccctttgattttcgaacacctccgcgaactatgcgcttcttttgcccttatcctccaactacttgtcggatctgcaattcttcttgtcaattcccaaccctaatcggagctaatcacacctctgctcgtttctcttctcgttagtctctgctccatctcctcctcagatttagggatatttgcttccaatttaacaaacaaaccaagagctattctttcgttctttattctctccgtcttgtaaagtagttttagcagtgagatacatacaaatggagacttccatggggaaacccagcttcttacggaatataatggttcgcgtgcttctctttggtgttcttatcatcgttgtgagatttgcttatgttgtcaccatcaccggtgaatcatgcaatcgcggcgacttctgcttcttctctctccctgagantctcaacttttgtaacatccggtgctgcntccgnncttctgcntatcggnggccataagatttnccttcccccnggggggngannttttaaaaccacccnggggttgnttnaaaanccgntc

SEQ ID NO: 120379 - DNA, 1207 bp, Arabidopsis thaliana
  unsure (1)..(1207): unsure at all n locations
nnnnnnnnnnnnnnnnnnnnnnnnnnnnnnnnnnnnnnnnnnnnnnnnnnnnnnnnnnnnnnnnnnnnnnnacgcccacgcgtccgctcagtcaccaaagaaaacaaaatcatgtctcgatttgctatcttagtaaccttggcacttgccattgccactgtttcggtggttatagctcaagtccctccggagaaacaattcagagtcgtcaacgaaggagaattcggtgaatacatcactgagtacgacgcaagttacagattcatcgaatcatcaaaccagagcttcttcacatcaccattccagctcttgttttacaacactacccctagcgcctacatcttagctctccgagtcggactcaggcgtgacgagtctaccatgcgttggatatgggacgcgaatcgcaacaaccccgtcggagaaaacgctacactctcactcggccgtaacggcaacctcgtcctcgctgaagctgacggacgagtcaagtggcagactaacacagccaacaaaggcgtcaccggattccaaatcttgcccaatggaaacatggtgctacacgacaaacatggaaaattcgtttggcagagtttcgatcatcccaccgatacactcctcgtcggccaatccctaaaagttaacggagttaacaaactcgttagccgtacatctgatatgaacggctccgatggtccgacagcatggtgttggacacaaaggctaaccatgtacgtaacaaaccggtacgccgtagttacggcggatggcggtcacgactccgcgtaccgtacgttcgccgttacaagagaattcgataatttaacggagccgtcagcttacgagcttctcttagaacccgcaccacaacccgctacgaacccgggtaataaccgccggttactccaagtcagaccaatcggaagcggaggaggaactttaaatctgaacaaaatcaattacaacggaacgatttcgtatctaagactcggatctgacgggagtctcaaggcttactcgtatttcccagcagctacgtatctcaaatgggaagagagatgctcattcttatccacttactttctncggcaaagaaagttgaccgcgcttagcggcgaatacagatactgccatcgtgggatgtgcaacgcatgtcctacaccaaaaggaataactcacatgagtgataaatgcgcaccacctaaaa

SEQ ID NO: 120380 - DNA, 530 bp, Arabidopsis thaliana
ctaccactccactctttccgtctctctctctttttctctctatatacgtcgccattgttgttgcattcgaagcttttatagaagaagtaatctctctttttctctatttctctgtattactttctcttttttttttcgtgatggagaaaaacacaccggtgaggaaaccacacatgtcgacggcggatctactcacttggccggagaatcaaccgtttgagtctcccgccgccgtatcttctcgctccgccgccagatcgcaccagccgtcggatggaataagcaaagtcgtatttggaggacaagttacagatgaagaagttgagagcttgaacaagaggaagccttgttcaaattacaagatgaaagagatcacagggagtggaatattctctgtgtatgaagaaaatgatgattctgagttagcaagtgctaattccgccacatacggcagatcaagaactttccagcaaccaccagcagcaattatgagtcacatttcatttggagaagaagagattgttacaccg

SEQ ID NO: 120381 - DNA, 1132 bp, Arabidopsis thaliana
  unsure (1)..(1132): unsure at all n locations
atgatcctgnnnnnnnnnnnnnnnnnnnnnnnnnnnnnnnnnnnnnnnnnnnnnnnnnnnnnnnnnnnnnnggcaattggtaccacgcgtccgcccacgcgtccgtctgcatggagtgcccgagaagcagctattgaacatgataagctactgaaggatgctatagatgaaatccctaacacaaatgatgggggtagtggtgttgtagagatcaattctatttcagctatttttttcgtagttcttgcttcgggattcctggtgattctttacaagcttatgtcttattggtttgtggagcttcttgtggtcgttttctgcattggtggtgttgagggtttgcaaacttgcctcgtcgcgttactatcaagatggttccaacgtgctgcagatacttatgtaaaagtccctttccttggacctatctcttacctcactcttgcagtttctcctttctgcattgtctttgctgttctatgggctgtataccgaggtcactcctttgcttggattggccaagatgttcttggtatcgcattgatcataactgtactacagattgttcatgtcccaaatcttaaggtcgggacagttcttctcagctgtgccttcttgtacgatatcttctgggtgtttgtctccaagaagttgttccacgaaagcgtaatgattgtcgtagctcgaggtgataagagtggagaagatggcatcccgatgctactgaagattccgcggatgttcgatccgtggggaggctacagcattattggatttggtgatattcttttgcccggtttgctaatcgcatttgctctcagatatgactggctagctaacaagactcttagaaccggctattttatatgggcaatggttgcctatggattaggtcttttaattacttacgtggctttgaacctaatggatggacacggccaaccagcattgctatacattgtccctttcacacttggaaccatgttaacgcttggctcgaaaaagagacggtcttttgattcctatgggccaaaggggaccngaaagggttnncctaccatgnccggnttaacagtgttttggaatggcggcctgccaaaaatnaacctgggntttccggaaaaaaaanggggcc

SEQ ID NO: 120382 - DNA, 519 bp, Arabidopsis thaliana
accggctattttatatgggcaatggttgcctatggattaggtcttttaattacttacgtggctttgaacctaatggatggacccggccaaccagcattgctatacattgtccctttcacacttggaaccatgttaacgctggctcgaaaaagagacgatctttggattctatggaccaaaggagaaccagaaagagcttgtcctcaccatgtccggcttgaacagtgttttgagaaatgagacgacctggccaaaaaatgcaacactgagatatttacagggaaaaaaaaaaaaaggctttgggggttgtaacgtaagttgtaagattaattttctcttcaaatcctttttttaatcttaagttgtttatgttacttacttacatcatcattattgaagaagaatccatgatcgtcgttctttgtctaaaaaaaaaaaaaaaaaaaaaaaaaaagggcgaccgctctagaggatccaagcttacgtacgcgtgcgtgcgacgtcatagctcttctatag

SEQ ID NO: 120383 - DNA, 1478 bp, Arabidopsis thaliana
  unsure (1)..(1478): unsure at all n locations
ggtagcaactggtccaatctttgaacttaagaaaaacgtttcattcttgttttatgtgtgattgttgttctgtttttgatttgagaaacaaaaacgatggagagcacgaagattgctccttcattcgatcgtgccagtgagcttaaagctttcgatgagacgaagactggtgtgaaaggactcgttgactctggaatctcaaagattccacgcattttccatcactcatctgtcgaactagcaaaccctaaaccacttccctcggacctgctacatctcaagacgatcccaacgatcgatctcggaggacgggacttccaggacgcgattaagcacaagaacgcgattgaagggattaaagaagcagctgccaagtggggtttcttccaagtgatcaaccatggagtttcgctcgagcttcttgagaagatgaaagatggagttcgtgactttcatgagcaacctcctgaagtgaggaaagatttgtacagccgcgatttcggcagaaagtttatctatttaagtaatttcgatctctacactgctgcagctgcgaattggagagacacattctattgttacatggctccagatcctccagaaccacaggatctgccagagatttgtagggatgttatgatggaatactcaaagcaagtgatgattttgggtgaatttctgtttgagcttttgtcagaagcactagggttgaaccctaatcacctcaaggacatggagtgcttaaagggtttgcgcatgctttgccactacttcccaccgtgtccggagcctgacctaacttttggcacaagtaagcactccgacggctcttttcttaccgtccttctaccagataacatagaagggcttcaggtttgtcgtgagggatactggttcgatgttcctcatgttcccggcgctctcatcatcaacatcggagatcttctgcagcttataacaaacgacaagttcatcagtttgaagcatagagtattggcgaacagagccacaagagctcgagtctctgtcgcatgtttcttccatacccacgtaaaaccaaatcctagagtgtacggacccattaaagagcttgtgtccgaagaaaatcctccaaagtacagagagaccaccatcagagattacgctacttacttcaatggcaaaggacttggcgggacctctgctttgctggattttaaagtatgaatcatgccgagctactactttctcacagatatacgacatgacattatatgtaacatgttggagatgtgtgaaccaaatgtggaatttatgtattgaacattgtcatcaaggtttggtccaaataaagtgtaatcggatatggttaatcaattggattacgcacaaaaaaaaaaaaaaaaaagggcgagccgctctagaggatccaagcttacgtacgcgnnnnnnnnnnnnnnnnnnnnnnnnnnnnnnnnnnnnnnnnnnnnnnnnnnnnn

SEQ ID NO: 120384 - DNA, 467 bp, Arabidopsis thaliana
  unsure (1)..(467): unsure at all n locations
cggacgcgtgggctttgaacttgcgaaaaatgtttcattcttgctctgtgattcgagaagctttggctggggagaccacgaagattgctccttcattcgatcgtgccagtgagcttaaagctttcgatgagaccaagacgggtgtgaaaggactcgtcgactccggaatctcacaggattccacgcatcttccatcactcatctgtcgaacttgcaaaccctgaaccacttccctcggacctgctacatctcaagacgatcccaacgatcgatctcggaggacgggtcttccaggacgcgcttaagcacaagaacgcgattgaaggggattaaagaagcaagctgccaagtggggtttctttccaaagtgcatcaacccatgggtgtttnngcttcggagctttnttttaggaagnttgaaaagnttggagttccgttnactttaaatgggnaaacctcctnnaagg

SEQ ID NO: 120385 - DNA, 1000 bp, Arabidopsis thaliana
atgatactccaggctttattccactcactttaagggaagcttgtacccctgccaggacccggcccgaatttccgggtccacccacgccttccggttaaccaacctcttgagtggaggaagaattggaccagccgcaattccggcgaaaggttattcatattaagtaattccaacctttacactgctgcagctgcaaattgaagagaccatcctatgtgtacatgcttccagatcctccagaaccacaggatctgccagagatttgtagggatgttatatggaatattcaaagcaagtgatgaattggggtaaatttctcttcgagcttttatcagaagctctagggttgaaacctaatcacccaatgacatggactgctctaagggtttgctcatgctctcccactactacccaccgtgtccagagcctgacttaactttaggcacaagtcagcactccgacaactcttttctcactgtccttcttcccgatcagatcgaagggcttcaggttcgtcgtgaagggcactggttcgatgttcctcatgtttccggcgctctcatcatcaacatcggagatcttttacagcttataacaaacgacaaattcatcagtttggagcacagagtattggcgaacagagcaacaagagctcgagtgtctgtcgcatgtttctttaccactggagtaagaccgaatcctagaatgtacggaccgattagagagcttgtgtctgaagaaaatcctccaaagtacagagagaccacaattaaagactacgctacttacttcaatgccaaaggacttgacgggacctctgctttgctccattttaagatatgaaacatggtgagctactactgtttcacacatatacgacatgaccatatatttaataattcatttgcagaaaaaaaatacttcaaaaaaaaaaaaaaaaggccgtccactgtatccaagcctaggtacgcgtgcgtgcgaagtcatgctgttctatagt

SEQ ID NO: 120386 - DNA, 334 bp, Arabidopsis thaliana
cccacgcgtccggcccttttttttttttttttttttttttttttttttttttttagtcaataacaaataatttcattacatactgattaaagcggacgcgtgggaaaacgataaggagagcacgaagattgctccttcattcgatcccgccagtgagcttaaagcgtccgttgagacgaagactggtgcgaaacgactcgttgactctggaatctcaaagattccacgcattttccatcactcatctgtcgaactagcaaaccctaaaccacttccctcggacctgctacatctcaagacgatcccaacgatcgatctcggaggacgggacttc

SEQ ID NO: 120387 - DNA, 531 bp, Arabidopsis thaliana
tcgtgggtcgacgcaagactctatactgattcgagataacgacagaaggggacttgagtgttgactgttgaccgcgacgaatccgtcggaaaccggaatcaccatggattttcctccgacgaagcttgattatcatgtagacatgttcaatcttcagtctcattccagatttctctccttatttaaggcgcaagatggacgcatagctctaatactagaatcaacggtgtttcatccacaaggtggtggccagccgtcagacaccggtttaattgttttctccggttcggatttgaaattttccgttcaagatgttcgatcgaaagacggaattgttctccattacggagttttcgaaggttcgaatcctgaaagtggaattgatagtgagaaagggaaagaagtttacttaactgttgatgaatcaaggcgtaaactcaattccaggttgcactcagctggacacttgctagatatgtgtatgcagaaagttgggttaggacatttggagcctggaaaagggtaccattt

SEQ ID NO: 120388 - DNA, 561 bp, Arabidopsis thaliana
tgctggtgatccgccgctccatgcgactcactattgggaaagctggtacgcctgcaggtaccggtccggaattcccgggtcgacccacgcgtccggttaatcgtagcaaagaactacactcagtggtgaaaatggagaatcaagagcctgatatcgagaaattgcctcgagacgatgttcctgatagagaaccagaccataagaagctcaagatttcgaccaccggccaggaaactgattcctcggctgttaccaccggcggaagcaatgtcgctgagcgtagagcgccgaaatacagacgccggaaagtcgcaatcgtgtttgcgttctgcggagtagggtatcagggaatgcaaaagaatcccggcgccaaaaccattgaaggcgagctcgaagaggctttgttccatgccggagcagtacctgatgctgatcgggacaaaccaagaaattacgaatgggcacgatccgctagaactgataaaggagtgagtgcggtgggacaagtggtttctggtcgtttctatgttgatccgcctggatttgtggagcggctcaatt

SEQ ID NO: 120389 - DNA, 588 bp, Arabidopsis thaliana
atcaacttcagatcctttcaccagcaacacaagttattttcaaaagatgatgccaaattctagatcggcgacaataactccgacgacagaatcaaccaccacaacaacaacaacaacaacgactctaacgacgtcgtattggtgttacagttgtacacgattcatcagcgtttgggaagatcaagacgcaaacgctggagtcttatgtccttattgcaacggtggattcatcgaagagattgaagattcttctaattccaccgtcgcggcgattccggcttcgactccggaagttagatcggttgaggaaacacatagatctataattagacgtcgtagatctaatcgccggacgtcctttaatccggtaatcgtcttacacggcggaggaggaggaggagccggtgagagagttgagaacgaagaaggtgacggagctactagagaacgacgagcttatgagttttattacgatgatggatctggttcaggtctaagacctcttcctgattctgtatctgagatcttgatgggatctggattcgaacggttacttgaacaattgagtcagatcgaagcgtcaggtaa

SEQ ID NO: 120390 - DNA, 1255 bp, Arabidopsis thaliana
  unsure (1)..(1255): unsure at all n locations
nnnnnnnnnnnnnnnnnnnnnnnnnnnnnnnnnnnnnnnnnnnnnnnnnnnnnnnnnnnnnnnnnccacgcgtccgcttgtttcttcatcatcacctacttcaatcaaaaaacattccaactttcttctcaatttcattccaggatagtattatgtgcagtggaccaaagagcaatctctgctcttcaagaaccttaacagaaatcgaatcaaggcaaaaggaagaagaaacaatgcttctcctcgaattcgctgcttgtgatgatcttgactcgttcaagagagaggttgaagagaaagggcttgatttggatgagtcagggttatggtattgcagacgtgtcggttctaagaagatgggtcttgaagaaagaacacctttaatggttgcagctatgtatggaagcataaaggttttgactttcatcgtttccactggaaaatctgatgtgaacagagcttgtggtgaagagagagttactccgcttcactgtgctgttgctggctgttctgtgaatatgattgaagtcatcaatgtcttgcttgatgcttctgctttggttaactctgttgatgctaatgggaatcaacctttggatgtgtttgttcgagtttcgaggtttgtggctagtccgaggaggaaagcggttgagttgttgctgagaggaggaggtgttggaggattgatcgatgaggcggttgaagaagagatcaagattgtctctaagtatccagctgatgcttctttaccggatataaacgaaggggtttatggaagtgatgagtttaggatgtatagctttaaggttaagccatgttctagggcttattctcatgattggaccgagtgtgcttttgttcatccgggagaaaatgcgaggaggagagatccgaggaagtatccttacacttgtgtcccctgtcccgagttccgtaaaggatcatgcccgaaaggagattcttgcgagtatgctcacggggttttcgagtcgtggcttcaccccgcgcagtataaaacccggctttgtaaagatgaaacgggttgtgcaaggaaagtttgtttctttgctcataaacgcgaagagatgagacctgttaatgcttcaactggctctgccgtggctcagtctccgtttagcagcttggagatgatgccagggttgtctcctcttgcttattcttcaggagtttcgactcctccggtttctccaatggctaatggtgttccttcctttccaagaaacggcggatcatg

SEQ ID NO: 120391 - DNA, 551 bp, Arabidopsis thaliana
  unsure (1)..(551): unsure at all n locations
ccgaatttctcaacttctctgattcgtctttctcctctgtctctgactcttcgcgaaaaccctaattagctttgtggtcttgttgttttcgccatggaagacgacggcaagagcagccccaagttaccgatccctggaaagagaaatatactaatcaccagtgctttgccttacgtcaacaacgttcctcatctcggaaacatcatcggatgtgttctgagcgctgatgtgtatgctagatactgtcgtctccgtggctataatgcgatttacatatgtggaaccgatgaatatgggactgcaactgagaccaaagctttggaggagaattgcacccccaaggaaatctgtgacaagtaccatgccattcataaagaagtttatgactggtttggtataagttttgacaagtttgggcgaacttcaactccagaacagactgcaggtgtgccaagcaatttccacaagttgtggggcacaaagtggctttncagannanaccatgnangnanctttcnngggancatncaanagttcttgntggccggntt

SEQ ID NO: 120392 - DNA, 1035 bp, Arabidopsis thaliana
  unsure (1)..(1035): unsure at all n locations
ctaaaaactataaaaacatgaaaataatatttttcagcagctaatcaacttgttttctctagcgagcgacattttggaaggaagcattccattagcttttttgctgtctccagaaaataaattttcaatctttcgtcggaaaaaagaagaagaagaagcagagctgggtttagttttttcacgagaagcaaagagatcaataagtcagtgagcttttttctcgtttctgacgatggcggttgcgccggcaagagctcgttcagactatgattacctcatcaagcttcttctcatcggcgatagcggtgtggggaagagttgtttgttacttcgattctcagatgatactttcactacaagtttcattactaccattggtattgacttcaagataagaactgttgaacttgatgggaagcgtatcaaattgcagatttgggacactggtggtcaagaacgtttcagacctatcacttactgcgttttacagggggagcgatggggattttggcttgtctacgatgtgaccggatgaaatatttttttaaccaatgtttaggaaactgggtctgaagaaacaattggagtcaagcattgcccttcaagatttattggtgcaaaccaaaaacttatttgggttttgggtttaactaaaaagactcgggatactgtggtattgggataagtccaataaagcgtggtttggttttctccaaccatagccataaagcggggacccataatcctcttttggtgccttggatatcatagcctcttggtgagaatatctcacagtatttcttcttgtgggagacacgtagtttggtccaaaataaaacccacaaacccttcttagttgtgaagcaaaaaatgtgggtttntatcaactggggccacaatatgtcgcaccgcagctactcttctaatatctcctgagcacattgtagcctggaaccatccgtaacattggatattggtatataatgcccccgaagggggttactaaaggaactttctttaaaaccaaaagattat

SEQ ID NO: 120393 - DNA, 731 bp, Arabidopsis thaliana
  unsure (1)..(731): unsure at all n locations
tctnnnnnnnnnnnnnnnnnnnnnnnnnnnnnnnnnnnnnnnnnnnnnnnnnnnnnnnnnnnnnnnnccacgcgtccgcccacgcgtccgctttcctttctttttggctgtctccggcgagaagagattttccgggggaaaatagcaaaagctcggttttagtttctgtttagaaagaggatacagaatagtgattactaacatcttctccgatggcggttgcgccggcaagagctcgttcagactatgattatctcatcaagcttctcctcatcggtgatagcggtgtgggaaaaagttgcttgttactgcgtttttcggatgatactttcaccacgagtttcattactaccattggaatcgacttcaagataagaacagtcgaacttgatgggaagcgtatcaaattgcagatatgggacactgctggacaagaacgttttagaactataaccacagcatattacagaggagcgatgggtatattactcgtctatgatgtaacagatgagtcatcattcaacaacattaggaactggatgaaaaacattgagcagcatgcgtccgatagtgtcaacaagataattgtcggtaacaaagccggcctgggccgaagccaaagggcggtcccacctcaaaaggacaagccctcgctggtgggtattggagcaaattctttggccggcgaaaacaaccngatnccggcggtccttcnnngaanntaaaaagtc

SEQ ID NO: 120394 - DNA, 601 bp, Arabidopsis thaliana
  unsure (1)..(601): unsure at all n locations
cccaggcgtccgcccacgcgtacgaaactgattaatcaatgttctcttaaagattaagagagccaaaacgaagcaaattaatctgccttcaatggcttcttcagcagcagccatcgtctccggttctccatttcgttcttcaccattaatccataaccatcatgcttctcgttatgctcctggatccatctccgtcgtatctctcccccgtcaagtttcccgccgtggcctctccgttaaatcggggttgatcgagccagacggaggaaaactcatgaacctcgtagtcgaagaatcacggcggcgcgtgatgaaacacgaggcggagacggttccggcaaggatcaagctgaaccgtgtggatctagagtgggtacatgtgcttagcgaaggctgggcaagtcctctcaaaggtttcatgagacagtcagagttcctccaaacacttcattttaactcgttccggcttcgaagacggctccgtcgtcaacatgtcggttccgatcgtcctcgttatcggcggcggtcaaaagtttcgttttcgggggttcaaaccaggtaaaaattctttttccttgggttgggaaatccattnncgatt

SEQ ID NO: 120395 - DNA, 721 bp, Arabidopsis thaliana
  unsure (1)..(721): unsure at all n locations
cagagttcctccaaacacttcattttaactcgttccggctcgaagacggctccgtcgtcaacatgtcggttccgatcgtcctcgctatcgacgacgatcagaagtttcgtatcggggattccaaccgagtcacgctcgttgactcggttggtaatcccatcgcgattctcaacgatattgagatttacaagcatccgaaagaagaacgaatcgcgagaacatggggaaccacggctcgtgggcttccttatgcggaagaagcaatcaccaaagctggaaactggttgattggaggtgatttacaagttttggagccgatcaagtacaatgatggtttagaccggtttcgtttatctccgtcgcagctgcgggaggagtttataaggcgcggtgcggacgcggttttcgcgttccagcttaggaacccggtgcataatggtcatgcgcttcttatgacggatactcgtagaagacttcttgagatgggttacaaaaaccctgtcttgttgttgaatccacttggtgggtttactaaggctgatgatgtacctctcagctggcgtatgagacaacacgagaaggtgttggaggatggtgtactggatccagagacccacctgtaggctctatctttccccatcttccgatgctattacgctggcccaactnagggttcaattggaatnccaaaagctangatncaacccnnggnntnaatttt

SEQ ID NO: 120396 - DNA, 420 bp, Arabidopsis thaliana
gcgtccgacgaaactagccagagagatgacgagcaagattctagttatcggagctacaggtctcatcggaaaagtcctcgtagaggaaagcgccaagtctggccacgccactttcgctctggttagagaagcctctctctccgatcccgttaaggcccaactcgttgagagattcaaagatctcggcgttaccatactctacggaagtttaagtgataaagagagcttagtgaaggcgattaaacaagtcgatgtcgtgatatcagctgttggtcggtttcaaactgaaattcttaatcaaaccaatatcatcgatgccatcaaagaatctggaaatgttaagagattcttaccgtcggaatttggtaatgacgtggatcgtacggtagccattgagccaacgctatcagagttcatcac

SEQ ID NO: 120397 - DNA, 867 bp, Arabidopsis thaliana
agaaggaagcttcaaaatgaagctaaagatttctctaatcgctccgattcttcttctcgtctcattcttcttcgccgtggaatctaagtgcaggactagctgtcctttagctctagcttcgtactatctcgagaacggaacaacactctccgtcagcaaccaaaacctcaattcttcaatcgcgccttacgatcaaatcaatttcgatccaatcctcaggtacaacagtaacattaaagacaaagatagaatccagatgggctctagggttcttgtacctttcccttgcgaatgtcaacctggtgatttcctagggcacaatttcagctacagtgttcgacaggaagatacttacgaaagagtcgcgattagtaattacgcgaatctcacgacgatggagtcgttacaggcgaggaatccttttccggcgactaacatacctctctctgcgacgcttaatgtattggtgaattgttcttgtggtgatgagagtgtttcgaaagattttggtttgtttgttacgtatccgcttcgtcctgaagacagtctcagttctattgcgagatcgtccggtgtatcggcggatattctgcagagatataatcccggtgttaattttaactccgggaatggaatcgtttatgtgcctggaagagatccaaatggtgcatttccaccattcaaatcaagtaaacaagatggtgttggtgctggagttattgctggtatagttataggagtgattgtggctttgttgttgatcttgtttatcgtatattatgcttaccggaagaataagtcgaagggtgattcgttttcttcttctattccgttgtctactaaggctgatcatgcttcttctactag

SEQ ID NO: 120398 - DNA, 571 bp, Arabidopsis thaliana
gtaaattcacaacaaaaccaaaaaaaaaaaaagagaagaagaattagcttacgtgttcatcacatctgcattacgcgcaaacgaaacagattcaaattctccggcgaagttttcttattcatcaatcaatctctggattcatcaatcatgccagagatcgagattgccgccggcagcggcgacaacaacgacgccttattcggtaaatatgagctcggaaagcttctcggatgcggcgcattcgccaaagtcttccacgcacgtgatcgtcgtaccggccaaagcgtcgccgtgaaaatcctcaacaagaaaaaactcctcacaaatccagctctagccaacaacatcaaacgcgagatctcaatcatgagaagattatcgcatccaaacatcgtcaagctccacgaagtaatggcgacaaaatcaaagatcttcttcgcaatggagtttgttaaaggaggagaactattcaacaaaatctcaaaacatggacgtcgtagcgaagattcaagccggagatatttccagcaactgatctccgccgttggttattgccacgctcgcggtgttt

SEQ ID NO: 120399 - DNA, 401 bp, Arabidopsis thaliana
atctctctgctcccaaattcagaaaaaaaggaacgatttttatttccggtgaatgagaattttctctcgaatttgatcgatcacatatttcatctgtgtgttttcattttgaggatgccagcaacggaatatcaaagatcattcgggaggtcttttctgaatttacggcgagacacggcggtgaactcggttgagtcaacgacggttacccccgagttgactcagatggaagcagagcttgtttcgtttcagagaaaagttgctgagaggtttatcgatctcaatgcgtctagttgtgaagatctactgtctctcgaatgggttgggaagcttcttgattcgtttctatcttgtcaagaagagtttcgttccatagtcatcaatcatcgttcgatgattac

SEQ ID NO: 120400 - DNA, 795 bp, Arabidopsis thaliana
acggacgcttgggccgccacttaaggccgtctcctccgcaatctccgtaaccaaaaccaccggcatcgcctgatggggagaactaaggagcaggcaacattaactcggtatccaccctgtcctaggaatcctgctaaattcaatgatataaacaaagcactccaggaaaaaggatatggtaaggctctgaaaagaaaaccttggacgggtgtgacatgccctgtctgtcttgaggttcctcacaactcggtcgtcctcctttgttcatcttaccacaaaggatgccgtccgtacatgtgtgccacgggaaaccgtttctcaaattgtctagagcagtacaaaaaggcatatgccaaggatgagaaaagtgacaaaccgccagagctattgtgcccgctttgtaggggtcaggtgaaaggctggaccgttgtggaaaaggaacgtaagtatctgaattctaagaaaaggtcatgcatgaacgacgagtgtttgttttatggaagctatagacagctcaagaagcatgttaaggagaaccatccgagagccaagccaagagccatagaccctgtgctggaggcgaaatggaagaagcttgaggttgatagggagaggagtgatgtaatcagcacagtcatgtcgtcaacacctggggctatggtatttggagactatgtgattgagccatacaatggttatgatcatcaagatgacagtgacgattacagtgattcgtcggatgaccaaatggaaggtggggtatttcagcttggaacattcgaactgggccgtctt

SEQ ID NO: 120401 - DNA, 506 bp, Arabidopsis thaliana
  unsure (1)..(506): unsure at all n locations
nnnnnnnnnnnnnnnnnnnnnnnnnnnnnnnnnnnnnnnnnnnnnnnnnnnnnnnnnnnnnnnnnnnnnnnnnnnnnnnnaaccacgcgttcgcccacgcgtccgtgagattccgattcgaagatgtcgtcgtcttctccgagtggaagcggtagtgatttgactgagagaagagggatccctgccgccaaattcatccaagatgtggagacttatctctctcagtctggtctcgatcctaactctgctctcgcctttcaccaagaaaggcttcagcaatataaagttggtgagatgaagcttcttgctcaacaaagggatcttcaggctaaaatcccagatattgaaaagtgtttagaggttgttgctactttggaagcaaagaagggtactggtgaggcgctcttagctgattttgaggcgtctgaaggaatatattcacgggcctgcattgaagacacagactcagtgtgtttgtggttgggagctaatgtcatgctggaata

SEQ ID NO: 120402 - DNA, 373 bp, Arabidopsis thaliana
  unsure (1)..(373): unsure at all n locations
cccacgcgtccgcaaaaccaagtcgaagcttttaaaaccctaaatccccaaatcgggaactgagattccgattcgaagatgtcgtcgtcttctccgagtggaagcggtagtgatttgactgagagaagagggatccctgccgccaaattcatccaagatgtggagacttatctctctcagtctggtctcgatcctaactctgcgctctcgcctttcaccaagaaaggcttcagcaatataaagttgttgagatgaagcttcttgctcaacaaagggatcttcaggctaaaatcccagatattgaaaagtgtttagaggttgttgctactttggaagcanagaagggtactggtgaggcgctcttagctgattt

SEQ ID NO: 120403 - DNA, 857 bp, Arabidopsis thaliana
  unsure (1)..(857): unsure at all n locations
gatatcgccnnnnnnnnnnnnnnnnnnnnnnnnnnnnnnnnnnnnnnnnnnnnnnnnnnnnnnnnnnnnnnnnngcagcttccacgcgtccgcaagctcaccgatcgattcttccaatgctcttctaattcgtaagtaattttccagatccaacctttctcagattcgctctttcccgagaaaatttgaagaaacagagattcatcattttctcttcctctcaaaaatcagatctgcaaaactctcagatcactcatgggtttgatttcaaaccctacccgtttgattctcgtcgccaccatcttcttcctcgtttcttcaatctccggtcaggattctgtcgttgagaacaatgagagacaagaatctgaaggatctggtaaagagcttggtcgtcgtggaatggttggtactgaacgaattggagttgatactgttgtagacaatattggtgctcttggtttgaatctagaccttgatgctactgctcctagtgtatttgatgctttgttttcgagtttctcgatgatacttgtcaccgagattggggatgaaacttttataatagcggcattgatggctatgcgacatcctaaagctactggtttatctggtgcactctcagctttgtttgttatgactatactttctactggacttggtaggatagtgccaaacttgatatcgaggaagcacaccaatagtgctgctacagtgctctatgcattttttgggttgcgactactctacattgcttggagggctactgattcaaagtcaaatcagaagaaagaaatggaggaagttgaagagaagctcgagtcaggtcagggaagacacccttcgtcgttattcta

SEQ ID NO: 120404 - DNA, 778 bp, Arabidopsis thaliana
  unsure (1)..(778): unsure at all n locations
tgcnnnnnnnnnnnnnnnnnnnnnnnnnnnnnnnnnnnnnnnnnnnnnnnnnnnnnnnnnnnnnnnnnnnnnnnnnnnnnccacgcgtccgattacatcttcaaaaccgtacagatctctgtttcggagcagcttcttcacacgctcaagctcaccgatcgattcttccaatgctcttctaattcatctgcaaaactctcagatcactcatgggtttgatttcaaaccctacccgtttgattctcgtcgccaccatcttcttcctcgtttcttcaatctccggtcaggattctgtcgttgagaacaatgagagacaagaatctgaaggatctggtaaagagcttggtcgtcgtggaatggttggtactgaacgaattggagttgatactgttgtagacaatattggtgctcttggtttgaatctagaccttgatgctactgctcctagtgtatttgatgctttgttttcgagtttctcgatgatacttgtcaccgagattgggggttgaaacttttataataagcggcattgatggctatgcgccaccctaaagctactgttttatctggtgcactctcagctttgtttggtatgactatactntctactggacttggtaggatagtgccaactngatatcgaggaagcacaccaatagtgctgctacagtgctctattgcattttttgggttggcgactactctacattgcttggaagtctactgattcaaggtcaatcagaagaaagaatggaggaagttgagagaagctcgagtc

SEQ ID NO: 120405 - DNA, 790 bp, Arabidopsis thaliana
gccggccactcccgggtcgacccacgcgtccggcgaaatcgcttgaccactcaagacgagaaaaacgctaacaagtcccatagtttgtgtttattggacttctttcctctcatcttctccagcagaaacaaaaaaagctgaaagatgtggttttttggatcgaaaggagcatctggattctcgtctcgttcaactgcagaggaagtcacacatggtgttgatgggactggtctcactgccatagtcacaggagcatcaagtggtataggagtagagacagcgcgtgttctttcactgcgtggtgtgcatgtggttatggcggtgaggaacactgactctggtgctaaagttaaggaagatattgtcaagcaagtcccctggagctaaactcgatgtcatggagttaggtctcagctcaatgcaaatctcgtcaggcaaatttgccgtctgaggacaaaatcctactgggccttccactcaacctctcggtcaacaattgccggggttatggcatgtcctttcatgcctctctaaggacaacatcgggcttgcatgtcgcaccccaatcattttgggtcatttatctgttggactaaaccttcctgcctagaatgccaactgaaggaaccccaattacgggtgcaaaatccaaaacccaagaaagggacagtaaatttgtttccaaacccttaccccgttcaaggaaagctctccatttcggatatcctctcgtaatccaccagcaaagggcaagttcctcgccgttcttggaacttaagcatcccacaat

SEQ ID NO: 120406 - DNA, 595 bp, Arabidopsis thaliana
  unsure (1)..(595): unsure at all n locations
ggaagagcctcttgttttcgagaaatgggatgctgattttgcaactggggcatacaggcagcaagtggaagtcttagctcagcaccaggtgagattaattagtgcatctaccatgtcctgcatttcagcttggtcacgtatttacttatgtttgtagttaatggaagatttggaaaatgaagctagagagagggaagcggcagaggtggctgaaatggttttgacacagaacgaaagtgctcatgtactgaagcctaagaagaagaaaaaggcgaagaaagccaaatataaatccctgaagaaaggatcactggctgccgaatcaaaacatgtgaagtcagttgtgaaaattgaagattctactgatgatgataatgaagaattcggctatgtgagtagcagtgactcggatatggttacaccgctttcgcggatgcatatgaagggcaagaaaagagaaagagtagaaaggagaagaggagaaggagtaaaaaaaaaaaaaaaaaggnnnnnnnnnnnnnnnnnnnnnnnnnnnnnnnnnnnnnnnnnnnnnnnnnnnnnnnnnnnnnnnnnnnnnnnnnnnnnnnnnnnnnnn

SEQ ID NO: 120407 - DNA, 837 bp, Arabidopsis thaliana
  unsure (1)..(837): unsure at all n locations
nnnnnnnnnnnnnnnnnnnnnnnnnnnnnnnnnnnnnnnnnnnnnnnnnnnnnnnnnnnnnnnnnnnnnnnnnnnnnnccacgcgtccgcggacgcgtgggtcttccccagatcctcctctctcttcttcactcttttaacggacacttttcactgatctattcactcactcaaatcgccgccggagctaaatcaatcaacaatgacgtcgacctacacgagattcgataccgtatttctcttttctaggttcgccggcgctaagtattcgccgttattgccgtctccgtcgtttactttatctacttccggcattcatatcagaaccaaaccgaattctcgttttcactcgattatagcatcctcctcatcttcatctgtagtcgccggaactgatagcattgagattaaatcgttgccgacgaagcctattgaaggacaaaagactggaactagcggactccggaagaaggtgaaagttttcatggaagataattatttagccaactggattcaggcattggttaattcattgccacttgaggattataagaatgcaacgttggttttaggaggtgatgggcggtactttaacaaaaaagcttacagatcattatcaaaattggtgctgggaatggagttggccaattttagttggaaaggaggcattttgtaaccccagcggtttccgctgtattcaggaaagaaaggaaatggaggattcatatgagtgcagccatatcctggtggcctgatatgactggggttcaagttcattacagcagggtcagcctgctccggaccttactgacaaaatatggaatacccttcatctct

SEQ ID NO: 120408 - DNA, 496 bp, Arabidopsis thaliana
gcgtcccaaaagttccattctttttcacaaagccattgtgctgttttctccatttggatcaaaatggttgctgagaacaataaaaacaaggacgtaacactctctgcatcaatggacaacaacaacaacaacatcaaaggaactaacattcatcttgaggttcatcaaaaggaaccagctttggtcaaacctgaatccgagacacgaaagggcctttacttcttgtcgaatcttgaccagaacatcgccgtgattgttcgtacaatctactgtttcaaatccgaggagagagggaacgaggaagcagtccaagtgatcaagaaagctctgagtcaagttcttgttcattactatcctctcgctggacgcctcaccatcagtcctgaaggtaaactcacagttgactgtaccgaagaaggagttgtgtttgtggaagcagaagcaaactgtaaaatggatgagaatggtgacattaccaaacccgatcctgaaactc

SEQ ID NO: 120409 - DNA, 1137 bp, Arabidopsis thaliana
acgatattaatgaggaagaactgcgaccttacttctcattgccaaaggttatggatgcgttattcggtctagctaagacactatccgcgcgtcctgttgtgccagcagacggtgtagcgccggtctggaacagcgatgttaggttctactgtgtcaaagattcttctggaaatccaactgcttatttctactttgatccctactctcgcccttcagaaaagagagacggcgcttggatggatgaagttttttctcgtagccgagtcatggcccagaagggttcctccgttagactccctgttgctcaaatggtctgcaaccaaactccacctgttggtgacaagccaagccttatgacattccgtgaggtagagacagtatttcatgaatttggacatgctcttcagcacatgcttacgaagcaggatgaggggctagttgctggtatccggaatatcgagtgggacgcggttgaattaccgtcacagtttatggagaactggtgctaccacagggacactttaatgagcattgctaagcattacgaaacaggagaaacactcccagaggaagtatacaagaaactcctggccgcaagaacattccgtgcagggtcctttaagcctccggcagttgaaatttcccagttgttgatcttgagctgcacacaaaaatccgctcccaggaggaccagaggcccatcctatgccgtagatcaaaagggtatcagtaaaaaccccaaagttatcccctccacttcctgaggcatagatttcctctgtagcttccagtcacaatctttgcccgggggatatgcagctggatattacagttacaagtgggcagaagttttgtctgctgatgcattttcagcatttgaagacgctggactagacgacatcaaggctgttaaagaaacaggacagagattcagaaacaccaatacttggcacctggaggaagggaaaccgccccttagggtgttggttgagtttaggggccgagaaccttcacccgagcccctcctcagacacaagggaccctgggctgcctctgctcctgcttaacccttatataaccctcacaacatttggaaactttgaaagacatttataagatggaaaatcaacttttctt

SEQ ID NO: 120410 - DNA, 518 bp, Arabidopsis thaliana
gataccccagctcttattccacttaattttagggaaggtggtacccctggcaggaccgggcccggatttccgggtccgcacccagccttccgaaggcttgaaaaatttcttagttcctaaaccactttttggggataaatttatctctaagctgctggattttctttaatatgcaggagttggtcagactgacggtgtaacggaccgggaaaagccaaacgtgagacaaacgctggtcacggcttatgatacattgctagccccacaagtcaaaacttgtatcgaagtgtcacattttcctcaagacaacgcgcgtttcgtgaaaacgcgagtaaacggcggtggaataacaacatgtattgcaacatggtttagccaactctgcattctcctccacagacttttaaaagaacggcgtcacgaatcctttgacttacttcgcattttccaagtcgtcgcggcttcgatcctttgtggtctcatgtggtggcactctgattatcgagacgtacatgacc

SEQ ID NO: 120411 - DNA, 743 bp, Arabidopsis thaliana
  unsure (1)..(743): unsure at all n locations
nnnnnnnnnnnnnnnnnnnnnnnnnnnnnnnnnnnnnnnnnnnnnnnnnnnnnnnnnnnnnnnnnnccacgcgtccgcccacgcgtccgacgaatattcaaaaaaaaaaatttcttttctctttctaacaccacagatttcgcaatcgtgttttgatctgattcttccaggattctcccggtggcggagagaagaaacaaaggaaacccagaaagcatttttctcaatggcgtcgactacacgagaaaagtttgtatctttcataaacaacagatggctcgtcttcgtggctgccatgtggatacagtcttgtgctggcatcggttatttgttcggaagcatttctccggttatcaaaagctccttaaactataatcagaaggagctttccagacttggagtcgccaaggatctcggtgatagtgtcggattcatcgccggtactctctctgagatcttgcctctttgggccgctcttcttgttggcgccgttcagaacctcatcggttacggatgggtttggcttatcgtcaccggtcgagccccgattcttcctctatgggctatgtgtgttctcatattcgttgggaacaatggcgagacctacttcaatactggagcattagtctctggtgttcaaaactttcccaagagcagaggtccagtggtgggtattctcaagggttttgctgggctaggtggtgcgatcatctctcagatatatacaatgatccactcatcta

SEQ ID NO: 120412 - DNA, 431 bp, Arabidopsis thaliana
gatcatattaaaattatcgtaattaacaaactaaacaggaatcgcatatctgcaatagtaactatttcacagattggttttatcttttctatgtcttgtccttttttgtccaatttaagaccataaaaggagaaaatcgtgtgaaagacaagacagatagacagacacgaatattcagacgcagaaaatttcttttctctttcgaacaccacagatttcgcaatcgtgttttgatctgattcttccaggattctcccggtggcggagagaagaaacagtggaaacccagaaagcatttttctcaatggcgtcgactacacgagaaaagtttgtagctttcataaacaacagatggctcgtcttcgtggctgccatgtggatacagtcttgtgctgggatcggttatttgttcggaagcatttctccggtta

SEQ ID NO: 120413 - DNA, 568 bp, Arabidopsis thaliana
  unsure (1)..(568): unsure at all n locations
cccaggcgtccgaaaagaccgagagaaaatggcgaaaccgttgggaacaaccggtgaatttttccggcgaagggatgagtggaggaagcatccgatgctatcgaatcaaatgagacacgcacttccaggtatcggaatcggtgttggtgccttctgcgtttacctcgtcggtgaacagatctatagcaaactcatggctccttcttctcaatcatcgcatcagaaacaacccgctccatctcactgagagaatcattagattgtttcgatgatgaaaaccgtggcagataaagagctgatggattcacaatttgctgttttttttgtttcttggattgtctcaataagctgtgaatgaaagacaaagactctgatctctatgttgaatgttataatcttgtatgacagtttccagtacatggtttcgttatgtgatttctttgctttatagtagttcttctcagatgacactggagaataaagattgcctcttatgtgatnnnnnnnnnnnnnnnnnnnnnnnnnnnnnnnnnnnnnnnnnnnnnnnnnnnnnnnnnnnnnnnnnnnn

SEQ ID NO: 120414 - DNA, 702 bp, Arabidopsis thaliana
  unsure (1)..(702): unsure at all n locations
gcgtccgataattgttaggctcaggagaattgaccttttgaatttttcatacggttaaaaaattcttctatatataaaggtgctttgaatattttgtagtctctgtatgttcaaaaccgtttaacaataacaacaacaaaaagcttccttttttgttttttgagttttcgtcgatcgattggtttaaatcctgtcgtatcaatttgttctcgattctccgcgaccatgcaaatttagggtcttcgttttgtttgatgggcgcgaatatctcgggaggttcaccggagtttgaccggaacgatgacgtttactcgaggaaactcagattggtggatttacctgagaattgtgtagcgttgattatgacacggcttgatccacctgagatttgccggcttgctcgtctcaacaggatgttccgtcgcgcttcctcagctgatttcatttgggaatcaaagttgcctgcgaattatcgtgttattgcacacaaggtgttcgatgaaattaccctgacggaattaataaaggaagatctttatgcaaagcttagccagcctaaccttttcgacggtggcacaaaggattttgggtaggtaaaaacacggggcgccttttggttaccaattcctctaggccnaaggtactgaatgnnnccgggaacgggcaaccacngtgacnggcngcaccgcatgtaaananggc

SEQ ID NO: 120415 - DNA, 535 bp, Arabidopsis thaliana
tccatacgactcactttagggaaagctggtacgcctgcaggtaccggtccggaattcccgggtctacccacgcgtccgctctctctctctctatctttctctcttcaccatttctttatcttccatggaagaacagtcttcaacaacaaactaaaaacatgtttctaaagttgtttcttctcttatctttggtctccttctcacactcagactcttcttccacagtttcttgtcctaacggcacagacttccatcaactaaccacagtttttcgttacgtctccggtttcaactcttcctggttctcctcaaactgctccgccgttatcactcacgtcgttcttccgtcaagaaaactaaacggcaccgtttcttggaaccctatacgtaatctcacgcgcttacgtgttcttgatctctccaacaactctctcgatggttctcttcccacttggctctggtctatgccaggtcttgtctccgttaatctctctcggaaccggtttggtggctctatacgagtgattccagttaa

SEQ ID NO: 120416 - DNA, 562 bp, Arabidopsis thaliana
  unsure (1)..(562): unsure at all n locations
agtattctnnnnnnnnnnnnnnnnnnnnnnnnnnnnnnnnnnnnnnnnnnnnnnnnnnnnnnnnnnnnnnnnnnnnnnnnnnccacgcgtccgccaaaccaaattttgtcaatctaatttatcttctcctctcccggagaagaaggaaacttacaatttacaaagaacgagcttcaataaaaatttccaaagaaattaccgtcggcgaatcgttaggctcgagaagaatcaccaaattccaaggggagagagactgaattttcttttgattcacgtaacaacaacgctcagagactatgtcgtcggaggtgaaacagctgatcgtcgttgctgaaggcaccgccgctttgggtccttattggcaaaccatcgtctccgactatctcgagaaaatcatcaggtctttctgtggcagtgagttaaatggagagaggaaccctgtttctactgttgagctatcactggtgatcttcaattctcatggttcatattgtgcttgcttggtacaacggagtggctggacagggatgttgatattttcttgcattggctttcttccata

SEQ ID NO: 120417 - DNA, 584 bp, Arabidopsis thaliana
  unsure (1)..(584): unsure at all n locations
nnnnnnnnnnnnnnnnnnnnnnnnnnnnnnnnnnnnnnnnnnnnnnnnnnnnnnnnnnnnnnnnnnnnnnnnnnnccacgcgtccgcccacgcgtccgcggacgcgtgggtgatgaaccaacagcagcaacaacaacaacaacaacaagctgtagctcatggtggctatggcggtggtcacggtggcgacatgtaccatccgatgatgtacgctcggccttatcctgcagttaattatgctcaccctccaccaatgccgcctcctcactcggattcttatactcatatgttcagcgatgagaatccaggtagttgtagtattatgtgatcatcttttgtaatgttatttagaatatggacatgtatgcttgtcttagtcttatgtttttttttttggggatgtccttatcttttttactttggaggattggaaacaaaatgtgctttaattttgttagtggaatgatgtttataatatctcgatttcggaaaaaaaaaaaaaaaaggttggccgnnnnnnnnnnnnnnnnnnnnnnnnnnnnnnnnnnnnnnnnnnnnnnnnnnnnnnnnnnnnnnnnnnnnca

SEQ ID NO: 120418 - DNA, 516 bp, Arabidopsis thaliana
  unsure (1)..(516): unsure at all n locations
cagctcnnnnnnnnnnnnnnnnnnnnnnnnnnnnnnnnnnnnnnnnngcgtccgggagaattaagatttttaactttaaacgagagtttcgtttatttactcaaaaatttacttctgaaatctctatttgaatttcggggaaaaaaatcctaagtaagggaatgcagagagatggtcggagtatcgccggtgaagactaagctgtgtgatcggtttaaccgatccgtcggcggcaggaattgccaccggaaacacgtcgaggacgggtgatccagttttctaaactctcgtctctcgaattcttcgaagatatcgaaaaactgtaaatcttttttttcttctacttttttacaaaattctctaatcatcgttgtaaagtaaaaaaccatggtcggagcaaaaccggtggagaatggatctgacggtggtagtagtacggggctgcttcacggccgttacgagctagggcgtcttctaggtcacggaacattcgcgaaggtgtaccacgctcgtaac

SEQ ID NO: 120419 - DNA, 1911 bp, Arabidopsis thaliana
  unsure (1)..(1911): unsure at all n locations
nnnnnnnnnnnnnnnnnnnnnnnnnnnnnnaggacgaagctacgcacgcctgcagatgctgggcacccaatacagcggtcgacccacgcgtccgccaaaacggaaagtcccaacgatcccattttactccttttcaccacctctagtagcagagagagagagagagtatggcgattacggtgccgagacggcaactcttcatcggcggtcaatggactgagcccgttctccgtaaaactctccctgttgtcaatcccgccaccgaagacatcatcggttatattccagctgcaacttctgaagatgtggagcttgctgtggaagctgctaggaaagcatttactaggaacaacggaaaggattgggctagagcaactggtgctgttcgtgccaaatacttgcgcgctattgcagctaaggtaatagagaggaagtctgaactagctaatcttgaggctattgattgcggtaaacctctagatgaagcagcatgggacatggatgatgttgctggatgttttgaatattatgctgacctagctgaaggcttggatgcaaagcagaagactcctctttctcttccgatggatacttttaagggttatattctcaaggaacccattggcgtagttggcatgattactccatggaactatccgttattgatggctgtctggaaagtcgctccttcacttgctgctgggtgcacggctatactgaaaccttcagagttggcctccctgacatgtttggagctcgctgatatttgccgcgaggtgggtctaccacctggtgttcttaatattctgactggtttaggaactgaagcaggtgctccactggcatcgcatccacatgttgacaagattgtattcactggaagcacaacaactggaagcagcattatgacttccgctgccaaattggtgaaaccagtttccttggagcttgggggtaaaagccctatcattgtctttgatgatgtcgatattgataaagctgtggaatggactatgtttggttgtttctggacgaatgggcagatttgtagtgccacatctcgacttcttgtgcatgaaaggattgctgacgagtttttggacaagctggtaaagtggaccaagaacattaagatttcagatccttttgaagaaggctgtaggcttggtcctgttgtcagtaaaggacagtacgagagagttctaaagtttgtctcaaacgctaggaatgaaggtgcaactgttctttgtggaggagttcgtcctgagcatttaaagaagggatactttgttgaacctgcgattgtttcaaatgtgactacttcaagtggaaatctggagagaggaagtctttggtcctgctctgtgtgtgaaaacattctccaccgaggatgaggcaattcagcttgcaaatgactctcaatatggattagcaggcgcagtattatcaaatgatctggagcggtgtgatcgtgttagtaaggctttccaggcgggaatagtgtgggtcaactgctctcagccatgcttctgccaagctccatggggtggaaccaaacgcagtggatttggccgtgaattgggagaatggggacttgagaactacttgagtgtgaagcaggtgactcagtatatctctgatgaaccatggggatggtacaaacctccttccaagctctgagacaaacactagttcctgatatttccttaaaacatgtactcatgagaatataccaataaagcaagagacccttctgtaagagaaatggtattgctactttaaattcttgaaaaaaatgaaaaataagatgagataaaaattcttaaaaaaaaaaaaaaagaaaagnnnnnnnnnnnnnnnnnnnnnnnnnnnnnnnnnnnnnnnnnnnnnnnnnnnnnnnnnnnnnnnnnn

SEQ ID NO: 120420 - DNA, 494 bp, Arabidopsis thaliana
cgagaagctgaatcatcaatggctctggatgcattcttcttcatcgtctctctatttcttctgtttccgtcaccatccgcgtcagaatccactactcagttttgtagtgcagggagagagaatggtgtgggatcttgtggggtttcatcgacgaggattttgattaaaggaggtactgttgtcaatgcacaccatcaagaacttgctgatgtttatgtggaaaatggtattattgtcgctgtgcagccaaacattaaggttggggatgaagtcactgtcctcgatgctactggaaagtttgtcatgccaggaggaattgacccccacacgcacctcgccatggaatttatgggtaccgagactattgatgatttcttcagtggtcaggcagcggcattagctggtggaacaactatgcatatagactttgttatacctgtcaatgggaatctggtggctgggtttgaagcctatgaaaacaaatctagagaatc

SEQ ID NO: 120421 - DNA, 515 bp, Arabidopsis thaliana
ttaggtgaactatagaagatctatgacgtcgcatgcacgcgtacgtaagctcggaattcggctcgagagaaactcactcctgacctctcgcatggcgtctctagactctctagtcatctttcttttttctactctttttgtcactatcgtgagctcggaaacgccgtgcccgaatttcaagtcgatcatcagtttcggcgattcgattgcggacacgggaaacttggttggtctctctgatcgtaaccagcttcctgtgactgcgtttccaccgtacggagaaaccttcttccaccacccaaccggtcgttcctgcgatggccgcatcatcatggactttatcgctgaatttgtggggcttccttatgtgcctccgtactttggatctaaaaatagaaactttgataagggtgttaatttcgcggtagccggagcaacggcactgaaaagttcctttcttaagaagagaggaattcaaccacacaccaacgttagtttaggagttcagctaaaga

SEQ ID NO: 120422 - DNA, 526 bp, Arabidopsis thaliana
ctaatttgaccaatctagggtttctagtcacttgaagcttctcttaaaaaacctgtctcactcctcgtcaacctcttcctctcccgctgtcgccaagattgaatcttttttcagttgtggcttcaccggataataaggaattcagtaagagataagttcatcctgacaacatggagaccaagaatgagaattctgatgtttcacgggcagaggagtttaaaagtcaggccaacgaagcttttaaaggtcacaaatactccagtgctattgatctatatacaaaagctattgaactcaacagcaacaacgctgtgtattgggcaaatcgtgcatttgctcacacaaaactggaggaatatggcagtgcaatacaggatgcatcgaaggccattgaagttgattcaagatactctaagggctattacaggcgtggtgctgcgtatcttgccatgggaaaatttaaggatgccttgaaggacttccaacatgtaaaaaggctttctcctaatgaccctgatgccacaag

SEQ ID NO: 120423 - DNA, 471 bp, Arabidopsis thaliana
tgctcttgcaaacaaagagacattaatcgcatgtggtcctttcgtgcttccgcttgccaacgaacggaatgtaaagattggttggggcagattcagaacattctgccatatttcagtgtattcaaggtttgcctgaaggcgctctgcgcaagataatcttgactgcatctggtggagcttttagggattggcctgtcgaaaagctaaaggaagttaaagtagcggatgcgttgaagcatccaaactggaacatgggaaagaaaatcactgtggactctgctacgcttttcaacaagggtcttgaggtcattgaagcgcattatttgtttggagctgagtatgacgatatagagattgtcattcatccgcaaagtatcatacattccatgattgaaacacaggaatcttgctgaaacattactaactaaattagtatttttccggttttacaaaaataactgtataacatgt

SEQ ID NO: 120424 - DNA, 761 bp, Arabidopsis thaliana
ccacgactcactatagggaaagctggcacgcctgcaggtaccggtccggaattcccgggtcgacccaacaacaatctcttctctctcctctccttctcttcgtcgtctccggcgaagaggaatcttcttctctcttcgctccaggacaatctccgtcgtttcgcatccagcgcttctctttaccgtcaacatctccggaatcaacaacaacaacatcagcaacaacagcaatcgcgcgtgaaagaaaaatcagaaacgctggctcagaagatcggtaaatctatccggcgtgccggtgcgccgtcgaaagctagggtttacgctgatgtcaacgttgttagacctaaggactattgggattacgagtcccttgctgttcaatggggtgtacaggatgattatgaggtggtgaggaaggtaggaaggggaaaatacagtgaggtctttgaaggcattcatgctactgataacgagaaatgtgttatcaagattttgaagcctgtgaagaagaagaagatttagagagagattaagattctgcagaacctctgcggtgggcctaatattggaaaattgctcgacattgttagagatcagcagtctaagacccccaacttgatatttggacatgtgaacaataaagatttcaaaagttctctattcaacttttttcagactatgaatgttccgatatttaccattttttgaaactttcttaaagggccggtttgggattttcttggccacttttcaccgtggga

SEQ ID NO: 120425 - DNA, 1093 bp, Arabidopsis thaliana
  unsure (1)..(1093): unsure at all n locations
cgagctcactagtgagctcccaancngacnggtccgattaagattctgcagaacctctgcggtgggcctaatattgtaaaattgctcgacattgttagagatcagcagtctaagacgcccagcttgatatttgaacatgtgaacaataaagatttcaaagttctctatccaactctctcagactatgatgttcgatattacatttttgaacttctaaaggcgttggatttctgccattcacgtggaatcatgcacagagatgtgaaaccacataatgtcatgattgatcacgagcagcgaaaacttcgtttaattgactggggtttggcagaattctatcatcctggggaagaatacaatgtccgtgttgcttcaaggtactttaagggtccagagctgctggtggatttacagggctatgattatcccttagacctatggagtcttgggtggatgtttgctggaatggtattccgcagggagccgtccttttatggccaggacaccttgatgatcaattggtcaaaattgcgaaggtgcttggcacagatgaactcaacgcctacctaaacaaataccgtatagagttggaccctaatctaacatccctcgtgggcagacatagccggaagccatggacaaagttcatcaattctgaaaaccagcacttagcagttcctgaggctgttgattttgtggacaagttgctgagatatgatcaccaagaaaggccaacagctaaagaagcaatggcgcatccatatttctatccgattagaaatgcagagagcagccgtacgccgcgcagccagtgatctcgaaaacatttgcttgttcaatcttctgatttttcatttctttacggattcaaatttgttataaatcgatctgtcattgtttcattctctcaagtgtgcgtgtgttactgttttgctctttctcagtgtttcattcaactcatttgaattttattatataaaaaaaaatatcccccaggcggggttccaaaaaaaaaaaaaagggcggccgctttaaaggattccagcttacggaagggggcaagccacgtcaagtatctttaaaagtcgcctaa

SEQ ID NO: 120426 - DNA, 608 bp, Arabidopsis thaliana
  unsure (1)..(608): unsure at all n locations
cgcgtccgaatggccttaaggccttgtactggattcacaatctcctctcttcgcaacgcttccgccgccaacaacaatctcttctctctcctctccttctcttcgtcgtctccggcgaagaggaatcttcttctctcttcgctccaggacaatctccgtcgtttcgcatccagcgcttctctttaccgtcaacatctccggaatcaacaacaacaacatcagcaacaacagcaatcgcgcgtgaaagaaaaatcagaaacgctggctcagaagatcggtaaatctatccggcgtgccggtgcgccgtcgaaagctagggtttacgctgatgtcaacgttgttagacctaagggactattgggattacgagtcccttgctgttcaatggggtgtacaggatgattatgagggtggtgaggaaggtaggaaggggaaatacagtgagggctttgaaggcattcatgctactgttaccgggatttgtggtatcaagattttgaagcctgtaagaagaagaaggttnagggggggnttagnttctnananccnttcgggggccaatttgnaaatgcccnnttttaggnncnnnntaanncccctttnttnaa

SEQ ID NO: 120427 - DNA, 405 bp, Arabidopsis thaliana
  unsure (1)..(405): unsure at all n locations
ctgtgaagaagaagaagcttaagagagagattaagattctgctgaacctctgcggtgggcctaatattgtaaaagggctcgacattgttagagatcagcagtctaagacgcccagcttgatatttgaacatgtgaacaataaagatttcaaagttctctatccaactctctcagactatgatgttcgatattacatttttgaacttctaaaggcgttggatttctgccattcacgtggaatcatgcacagagatgtgcaaccacataatgtcatgattgatcacgagcagcgaaaactttcgtttaattgactggggtttggcagaattctatcatcctgggnnaggatacaatgtccgngttgctntcanggtactttaaagggtccagagcttcttggtngga

SEQ ID NO: 120428 - DNA, 817 bp, Arabidopsis thaliana
acgactcactttagggaaagctgctacgcctgcaggtaccggtccggaattcccgggtcgacccacgcgtccgcccaggcgtccgtgtctctcttcttcaatccatgtcttcaacacaagaagcgtctgttactgatttgcccgtgaagagacctagagaagcagaggaggacaataacggcggcgccatggaaacagagaacggtggaggagagataaaggagccttcttgtatgtcctctattattcctggatggttctctgagattagtcctatgtggccaggagaagcacattctctcaaggtagagaagattctattccaagggaaatcagattaccaggatgttattgttttccagtctgcaacatatggaaaggttttggttttggatggagtgattcaactcactgagagagatgaatgtgcgtatcaagaaatgatcactcatcttcctttgtgctctatctccaaccccaaaaaggtactggtgattggaggaggagatggaggagtcctgagggaagtggcacgtcatagttctgttgagcagattgacatttgtgaaatagataaaatggtggttgatgtggctaagcagtatttccctaatgtagcagttggatacgaggatcctcgtgtcaacctcatcattggcgatggtgttgctttcttgaacaacgctgctgaacgaacctatgatgcagttattggtgattcatctgatccaatcggtccagctgaagagctattttgagaaacctttctttgggtcagggaatagagctcttcgtcctggtggagttgtgtgcacac

SEQ ID NO: 120429 - DNA, 671 bp, Arabidopsis thaliana
  unsure (1)..(671): unsure at all n locations
tgannnnnnnnnnnnnnnnnnnnnnnnnnnnnnnnnnnnnnnnnnnnnnnnnnnnnnnnnnnnnnnnnnnnnnnnnnnnnnccacgcgtccgaaaaaaatgaaatgatattttcagttgtacgctcttctcttccttatatcttccgcttcacttcacaccaaaatcaccacctctcacaaaccctagttcctcctctctctcatttctcggagatattcaccagagcaataaccatggacgctaaagaaacctctgccaccgatttgaaaagaccgagagaagaggatgataacggcggcgccgctaccatggagacggagaacggagatcagaaaaaggaacctgcttgtttctccactgttattcctgggtggttctctgaaatgagtcctatgtggccaggagaggcacactcattgaaggttgagaaagttttgtttcaagggaaatcagattatcaggatgttattgttttccagtctgcaacatatggaaaagttttggttttggatggagtaatccaacttacggagagagatgaatgtgcttatcaggaaatgatcactcatcttcctttgtgttctatccctaaccctaagaaggttttggtcattggaggaggagatgggggtgtcctgcnggaagtgcacgccatgcttctattgagca

SEQ ID NO: 120430 - DNA, 524 bp, Arabidopsis thaliana
caaaaagaaaatgattttataacagtcgaatcgtacggcagatatttggtggcccctcctcttatatgagatcatagtcaacaagagaacaaagccacagagagagagagacactaaaaccctaatctcttactcactgtctctcttcttcaatccatgtcttcaacacaagaagcgtctgttactgatttgcccgtgaagagacctagagaagcagaggaggacaataacggcggcgccatggaaacagagaacggtggaggagagataaaggagccttcttgtatgtcctctattattcctggatggttctctgagattagtcctatgtggccaggagaagcacattctctcaaggtagagaagattctattccaagggaaatcagattaccaggatgttattgttttccagtctgcaacatatggaaaggttttggttttggatggagtgattcaactcactgagagagatgaatggtgcgtatcaagaaatgatcactcatcttcctttgtgctctatct

SEQ ID NO: 120431 - DNA, 543 bp, Arabidopsis thaliana
  unsure (1)..(543): unsure at all n locations
nnnnnnnnnnnnnnnnnnnnnnnnnnnnnnnnnnnnnnnnnnnnnnnnnnnnnnnnnnnnnnnnnnnnnccacgcgtccggaacggtgtcgctgctgctctcttccctcacaggtttttcattacgagttcagttattgatctcactattgttggcttagaccttgttgatggagactcaagttcccagagccaacttcaacaacaaccacattacctgaagacatgttccaaaccaaacctggatctagggagtgtggtgtacctcttaggctatgccaatcagaatgaactcaagatcggcgagggaaagttagttgtagctaccgacaatctcatcaaactctcaactgatgaaatgatttggagtcctggatctgctggatttgatgttcaagggaatcttgcattcatgatttgtgatccgaggaaactatcgacatcaccaacctcaacctcggcatcttcctcttcttctttgaagaaagataacaacaagacactgatgatgcactttggtataccaataccagtaatatgtgac

SEQ ID NO: 120432 - DNA, 742 bp, Arabidopsis thaliana
  unsure (1)..(742): unsure at all n locations
gacttntttgaccctgacccnttcgacttccnaagagcttaagtgaggccctgggccaaaagcncccttngtggngaggtgcaggccggttctcaacatgccntgagttaaggcctctacggttatcccttnggggatggatcctgggtttaancntttcccagctgncgttgttaangcattgncccacactggaggttgtgaataagacccttgaagcgtattacgacgcatgggacaagtacatcgatgcttgggtcgtcatcaaaatccaggacccaagttatgtataccggtggcgtcttcaggcggaaatcgccatgaggcaggatggccaagctgggatgtcggatgaggaggtgaatgactttgtgtcgcggtatttgccggcgtataaggcctatcttccaaccctttacgcggaagggccaagcggctcagacccagaccgtgtccttgcgatagatatcgatgaagaaaggaacccgatactcgcaaactaatgcgatgctgtctccattgcctttatagtatatcatcattgtatgtaaaagagagtaacattacgttcttcttccttctatttgacattctttttcctacactatactttcacataaatacatattcttttcttggaaaaaaaaaaaaaaaaaaaaaacaaaaaagcggccgctctagaggatccaagcttacgtacgcgtgcatgcgacgtcaagactcttctatagtgtgtcctaat

SEQ ID NO: 120433 - DNA, 1348 bp, Arabidopsis thaliana
gacgcctgcaggtaccggtccggaattcccgtgtcgacccacgcgtccgctctgcttgagagagtcagagagtcaagagagaaaaggggtcgagaatggcggtcgcaatatctgggagtagtttgatatcgtcgactcttcagcattataataatcggatttatatccgagattatccgattccgtgtcactcttctaatccaatttgcaattcttttaatttcaaaagacgttcgttctctccttcttcccccaaatttaacgaccatgtcgttaacccttcctcttcttatttatcctccaagctttctccaattcgaacccattcctctttcgctgcgtgtggctgctcctggattcaagacaattcaatggttcatgattatgctacaacaactaatgggacgtccaagcgttgctcggcgttaccaacaacaaacacagtggatgtctcttcggtgtcagatctttttgaattcatatgctcgggtcctctcgtaaacaagattggtatcactcctcaaagagttggccagtctattgacaaatggttactctacggctcacaactttgtagactgtttcagcttaatgagcttaagcttacaattcctcagaaagctaggctataccactactacatacccgtttttatttggtgcgaagatcagattgctttgcataattccaagtttaaagatggagatgatgtacctcctttagtgattggatttagcgctcctcaaggatgtggcaaggctacacttgtgtttgcacttgattatcttttcaagacaacaaaaaagaagtcagcgacgatatccgtagacgatttttacttgactgcagaaggccaggctgaattgagaaaaaagaatccaggaaatgcacttctagagtatcgtggaaatgcaggaagtcatgatctgaaactttctgttgaaacactagaagccctgtcgaaactgaccaaagaaggcttaaagatgaaggtacctaggtacaataagtctgcctatagtgggagaggtgacagggccgattcatcaacatggcctgaagttgaaggacctctatcggttattctctttgagggatggatgcttggttttaagcctcttccagctgacgttgttaaagcagttgacccacagctggaggttgtgaataagaaccttgaagcgtattacgacgcatgggacaagtacatcgatgcttgggtcgtcatcaaaatccaggacccaagttatgtataccggtggcgtcttcaggcggaaatcgccatgaggcaggatggccaagctgggatgtcggatgaggaggtgaatgactttgtgtcgcggtattt

SEQ ID NO: 120434 - DNA, 593 bp, Arabidopsis thaliana
ccggaatcttcgggtcgatccacgcgtccgctggtaaacgcctccaaatataatctcttttcttttcctcgcttccttctaatttttgagcgtgtggctgctcctggattcaagacaattcaatggttcatgattatgctacaacaactaatgggacgtccaagcgttgctcggcgttaccaacaacaaacacagtggatgtctcttcggtgtcagatctttttgaattcatatgctcgggtcctctcgtaaacaagattggtatcactcctcaaagagttggccagtctattgacaaatggttactctacggctcacaactttgtagactgtttcagcttaatgagcttaagcttacaattcctcagaaagctaggctataccactactacatacccgtttttatttgggtgcgaagtccagattgcttttgcataattccaagtttaaagatggggggtgatgtacctcctttagtgattggatttagcgctcctcaaggatgtggcaagactacacttgtgtttgcacttgattatcttttcaagacaacaaacaagaagtcagcgacgatatccgtagacgatttttac

SEQ ID NO: 120435 - DNA, 526 bp, Arabidopsis thaliana
  unsure (1)..(526): unsure at all n locations
nnnnnnnnnnnnnnnnnnnnnnnnnnnnnnnnnnnnnnnnnnnnnnnnnnnnnnnnnnnnnnnnnnnnnccacgcgtccgctccgactgagtagtcaccaagtgaatatgcttctttcatccctatggatccaagcaacttctaccgacaatacccctgaaaattttgaggccatggccagcacatatcaaatcactttactgttttcactagcaaagagatcaaatcacatggctctggtgcagtgttttcagctggcattctctcttcgaaatctctcattgaatcaagatggaggtatgcagcactctcgtagaagatctatcttcacttttgcatcatatatgctcattttcggtgccaagatttccaatattctggagctagttccaattatcaaagaatctttaactgcccaaatggttgatccttatcttgtgctggaaggagatatcagactgcgtgctgtatgttctggatttccacaggaagaaacgtatggatctgacaaagatgatagtgctgc

SEQ ID NO: 120436 - DNA, 543 bp, Arabidopsis thaliana
  unsure (1)..(543): unsure at all n locations
nnnnnnnnnnnnnnnnnnnnnnnnnnnnnnnnnnnnnnnnnnnnnnnnnnnnnnnnnnnnnnnnnnnnnnccacgcgtccgcaagacactcgtaaaagagttcttgaacttcacaaaacaattgtcagattttcaagaaaaactttataaaacaaaaaacatttcattctttctctctctctctctcactgctcaatgatctcgttttctcactaaaccaactcgtttcttcttactttctttaactcggatctacaaaaaaccatgtcggaaactaacacaaccgatgccaagactgttccagcagaagcagagaagaagaaagaacagagtttaccattctttaaactcttttctttcgctgataaatttgattatctcttaatggttcgtgggttctcttggtgccattggtcatggctcttccatgcctgtcttcttttactctttggtcaaatgggtaatggatttggtaaaaaccaaatggatttacatcaaatggttcatgaagtctctagatattctctatatttcgtctacttg

SEQ ID NO: 120437 - DNA, 511 bp, Arabidopsis thaliana
acagaccaaaattttcacgtttcttacatgtacatatatatagtaaaacaaatctctgaagacacacaagagaatcaagaacaatgaaaaatttaaccagtttcgtaattgttatcttactacaaagcttattgtttcatgtatatggtcgtcatcaaagttcttcgaagaacattttagtagattcatctccatttccttctgatttcctctttggtacagcttcttccgcttaccagtatgaaggtgcgttcttgactgatggaaaaagtttgaacaattgggatgtctttacgcataaaaatcctgggaaaatacttgacaagaacaatgcagatagagctgtggaccaatataatcgatttttggaggacatccaattaatgtcttttcttggagggaacagttattggttttcaatttcttggtgtagaatcttacctagaggaagatttggagagattaattatttggggataaagtattacaacatatttatcgatgctctcat

SEQ ID NO: 120438 - DNA, 738 bp, Arabidopsis thaliana
  unsure (1)..(738): unsure at all n locations
acgcgtccgggaattgtttgtggttgggctcctcaagttgaaatcctagcccataaagctgtgggaggattcgtatctcattgtggttggaactcgatattggagagtttgggtttcggcgttccaatcgccacgtggccgatgtacgcggaacaacaactaaacgcgttcacgatggtgaaggagcttggtttagccttggagatgcggttggattacgtgtcggaagatggagatatagtgaaagctgatgagatcgcaggaaccgttagatctttaatggacggtgtggatgtgccgaagagtaaagtgaaggagattgctgacgcgggaaaagaagctgtggacggtggatcttcgtttcttgcggttaaaagattcatcggtgacttgatcgacggcgtttctataagtaagtagaaatgcgtcgttttcatgtaattgggcatgtggcgaccatgtttctgttcagattcctttttcctttgtttctttttttttaaatcgtaattaccatattattttaataaaagaagactaagtcttcttctcagaagtttgaactttcgcaattccatgtgtttgtaactttgtaggaatccatgattccatatttgcttccatgttgttgtatttctaatgtaatttaaggataaaaaaaaaaaaaaaaagnnnnnnnnnnnnnnnnnnnnnnnnnnnnnnnnnnnnnnnnnnnnnnnnnnnnnnnnnnnnnnnnnn

SEQ ID NO: 120439 - DNA, 751 bp, Arabidopsis thaliana
  unsure (1)..(751): unsure at all n locations
gaaataaacgacgaggcttttttttattttataaagctccttcaccggtaaaagccttggtcctcatgaaaccgggaagcccaagtacttacttccaccatcaaatcgtcaaaccatttgcaaccatcgatggtggtcatgtcacgagtaagcttctactcttctttcttgctactactgttagaggtcgttgtcgctagcagcgagtttgatgatgaaggaagaacatcgttcagtccaaccacggctataatcatgatcgtactcgttagtgttttcttcgcacttggatgtatctccgtctacatgaggaggtgtctccagcacgctctggggatggacagcggtggtggtccaggaaactggcttaacgtgaggcaaacgacggagcctgggctagacgcgtctgttatagaaacgtttccaacgtttccttactctacagtgaagacgttgaggatcggtaaagaagctttggagtgtcccgtttgtctcaacgagttcgaggacgacgaaacgctgcgtttgattcctcagtgttgtcacgtgtttcatcctggttgcattgatgcctggctccgttctcagaccacatgtcctcttttgccgagccaatctcgttcctgtaccgggtgagtctgttttttcggagatacccggttttagcttggggaaaccggtcanaactttttnagaacggccgttnatgnnaccggnaaagggtttaancttaacntanngggnggttatt

SEQ ID NO: 120440 - DNA, 527 bp, Arabidopsis thaliana
  unsure (1)..(527): unsure at all n locations
cnnnnnnnnnnnnnnnnnnnnnnnnnnnnnnnnnnnnnnnnnnnnnnnnnnnnnnnnnnnnnnnnnnnnncgccacgcgtcagaaaatggatcagttcaaaggtgagcctcgtctacccaagttcgccgtccccaagcgctacgatctccgcctcaatcccgatctcatcgcctgcaccttcactggaactgtagccatcgatctcgacatagtcgccgatactcgtttcatcgttctcaacgcagctgatctctccgtcaacgatgcctccgtttccttcactcctccttcctcctctaaggcgcttgcagctccaaaagttgtcttgtttgaggaggatgagattctcgtgcttgagtttggtgagattcttccccatggagtgggagttctgaaacttggtttcaatggagtactaaatgacaaaatgaagggattctacagaagtacttatgaacataacggtgagaagaagaatatggcagttacccagtttgaaccagctgatgctaggagatgctttcca

SEQ ID NO: 120441 - DNA, 446 bp, Arabidopsis thaliana
aaaacacacaagaaaataaagatactacaaagtatacgacaacttctttttttgtttgtagtaataattatagccaaaaatatagacagacaaaatggagagaaagcctcttgaacttgagtcgacggataaccaccagaatccttcctccgccgtatacggtggctctgttacggcggttgactctgttgaagaagatgttcagaatcagaagaaagtcgtttatagaggctggaaagtcatgccctttattattggaaatgagacatttgagaagcttgggatcattggaacactatcaaaccttctggtttatttaactgcagtcttcaacctgaagagtattacagctgcaaccatcattaacgcctttagtggcacaattaatttcggaactttcgttgctgcttttctctgtgacacttacttcggtcgatacaagactc

SEQ ID NO: 120442 - DNA, 1039 bp, Arabidopsis thaliana
  unsure (1)..(1039): unsure at all n locations
cgtctgcagtaccggtccttaattcccgggtcgacccacgcgtccggtcaagtcttggatttagtcgcaacctgaagccatcaagattttcttctgggatatcttcatctctacaaaatggcaatgcaagaagtgtgcaacccatcaaggccacggctacagaagtgccatctgcagttcgaaggtcaagtagcagtggaaagacaaaggttgggatcaacggttttggtcggattggaaggttggtcctccgcattgcaacatcaagggatgatattgaggttgtagcagtgaatgacccattcattgatgccaagtacatggcttacatgttgaagtatgattctactcatggaaatttcaagggaagcatcaatgtcattgatgattctactttggagatcaatgggaagaaggtcaatgttgtcagcaagagagatccatctgagatcccatgggctgatcttggagctgattatgttgttgggtcttccggtgtattcaccaccctgtcaaaggcggcctcccatttgaagggcggtgccaagaaagttataatttctgccccttctgctgacgcacctatgtttgttgttggagtaaacgagcacacataccaaccaaacatggatatagtctccaatgcaagttgtaccaccaattgtcttgcccctcttgccaaggtggtgcatgaggaatttggtattcttgaaggcttgatgacaactgtccacgcaactacagctactcagaaaactgttgatgggccatcaatgaaggactggagaggaggtcggggcgctagtcaaaacatcattcctagctcaaccggcgccgcgaaggctgtaggtaaagttcttccagacctgaatgggaactttacggggattggccttccgtgtaccaacatcgattntttctttgggngggttaaacttttgggctttgaaagggnccctttnacgggngtttttaagggcccctttaagnntncctnaaagggcccctttaaaggntttttngggncnnaaaggtnnag

SEQ ID NO: 120443 - DNA, 527 bp, Arabidopsis thaliana
  unsure (1)..(527): unsure at all n locations
cccacgcgtccggtttgtctatattttgggttggctctacacctactctcagaagtcataagccaagcaaagggggttttagggtttttgaccgcgagccagatctctttcttttgtttctcccacttccgaatcaatggccttctcttctctcctcagatctgccgcctcctacacggttgccgctcctcgccctgactttttctcgtcgccggcgtctgatcattctaaggtgttgtcaagtcttggatttagtcgcaacctgaagccatcaagattttcttctgggatatcttcatctctacaaaatggcaatgcaagaagtgtgcaacccatcaaggccacggctacagaagtgccatctgcagttcgaaggtcaagtagcagtggaaagacaaaggttgggatcaacggttttggtcggattggaaggttggtcctccgcattgcaacatcaagggatgattttgaggttgtagcagtgaatgcccctttaatttgtgccaaggaanagggtttananttgg

SEQ ID NO: 120444 - DNA, 704 bp, Arabidopsis thaliana
  unsure (1)..(704): unsure at all n locations
taaaaattctatgacgtcgcatgcacccgtccgtaagctcggaattcggctcgagcactcaaacgaacattttcgtggctccagagctacactcaaaagccattcagcggaaggggttaggatttttggcggcgagatctctctgtttctggtagcttagcaatggccttatcttctctcctcagatctgccgccacttccgccgcagctcctcgtgtcgagctttatccatcgtcatcgtacaatcattctcaggtcacgtcaagtcttggattcagtcatagcctgacctcgtctagattttctggtgctgcagtttcaaccggaaaatacaatgcgaagagggttcaacccatcaaggccacagctacggaagcacctcctgctgttcataggtcaaggagcagtggaaagacaaaggttgggatcaacggttttggtcgaattggaagattggtcctccgcatcgcaacctttagggatgatatcgaggttntagcagtcaacgatccattcatagatnccaagtacatggcttacatgttcaagtatgattctactcatggaaattacaaaggnacttttcaattgtaattaatggttcaacttttggggtcaatngaaacaaagtcaaagttntcagcaagngngacccngctgaaatnccgtgggnttatcttggngcttngtatnttgttnagnct

SEQ ID NO: 120445 - DNA, 1140 bp, Arabidopsis thaliana
  unsure (1)..(1140): unsure at all n locations
ccactttctcatccgatctcttcaccttgtttaaccatatactcatcagcctctctcgcgaaaccccaaaaagcaaaccagacatgattcaagacaagtctaaaggtgcaaagcaaacgcttctagagcggccatggttcctcgctgtggctctagctggtcttataggtggcgcaatgctcatcacaagcttcatccgagctacggacaacaccttgtcactctgctccacggctaagaacacagctgcgtctatagccaaatacacagccaccccaatccaactccaatccatcgtccactacgccacttcacacaccgtccctcaacaatctttcgaggagatctcgatctctttaaacgtcctcaaggagcgtctcccttgtaactttctagtctttggcctcggccgcgactccctcatgtgggcctccctcaatccaggtggcacaactgtgttcttggaagaggatcctgagtggatagaggccgtcctcaaggacgccccatccctcagggcccaccatgttcagtaccggacccacctttctgaggccggccgccttctctcgacttacaagaacgaacccatgtgtttaccagctaaagctttcccgatccgctacaacgaaaagtgtcccttggcgttgacttctctccctgatgagttctatgataccgagtgggatctgatcatggtggacgcaccaaaagggtacttcccagaggcgccaggaaggatggcggcgatattttcctcggccatcatggcacgtaaccggaaaggtgatggcacgactcacgtcttccttcatgacgttaaccgcaaagtggagaacgcttttgccaatggagttcctttgtgagaagtataaggtcaactccgtaggtaggctctggcacttcgagatacctaacgccgctaacatgaccgaccagcctggtgaccggttttgctagagtgcgccaaatattcgttcttcgatacttcttttaattggagcaccgcatagttcgatctgagtttaaaaatcgttattaaaatataaactatatccagaggcttctcattaaaataaattatgtattctatcgttattactctttgtttcataatgttttaagaggcctngnttctnc

SEQ ID NO: 120446 - DNA, 863 bp, Arabidopsis thaliana
actcgtgggtcgacgcaagcctctatactgattcgaaataacgacggacgggcacccaccaaagcatcacataacactcacacacacactttctcttctcttattttctcagttcttttaactcttttctctacatatattcaaatggccaccatcgaggttgaacaagtgactccagtagcagctgagaacatcgaggtgccaccaccaaaggctgtggagtcggaggaagtcaccaccgtctccgagtctcttccagctccggtaacagaatctcaagcgcctgtcgaagtaacaactaaagatttggtcgtggaagagacagagaaaccaatcgaagaaacagaggaagctcaagttgaaactccggaggttgtggagatcaagaaagatgaagaagctccggttgaaactccggtggttgtggaggatgagagcaaaacagaggaagttgtagaggcgaagaaagaggaagaagtagaagaaaagaagacagaggaagctccagtggttgtggaggaagagaagaagccagaggcagaggaggagaaacccgccgtggaagcctccgtgacagctccagtggagaaggctgatgagtaaatgtgaagaaaaaaactgtcttttgaaagacaaaagaagaagaaaatgttagcaagtaatttatttgctactttaagtactttgtgtcttgttatgtttttgagtctatgactcttcttgcttttggttttttaatcttcttaagtactattttcaatggttatcatttttaataagatatacattattttataaaaaaaaaaaaaaatagaggatccaagcttacgtacgcgtgcatgcgacgtcagagctgttctata

SEQ ID NO: 120447 - DNA, 651 bp, Arabidopsis thaliana
  unsure (1)..(651): unsure at all n locations
acataacactcacacacacactttctcttctcttattttctcagttcttttaactcttttctctacctatattcaaatggccaccgtcgaggttgaacaagtgactccagtagcagctgagaacatcgaggtgccaccaccaaaggctgtggagtcggaggaagtcaccaccgtctccgagtctcttccagctccggtaacagaatctcaagcgcctgtcgaagtaacaactaaagatttggtcgtggaagagacagagaaaccaatcgaagaaacagaggaagctcaagttgaaactccggaggtttgtggagatcaaggaaagatgaaggagctccggttgaaactccggtggtttgtggcaggatgagagcaaaaacagaggaagttgtagaggccgagaaagagggagaagtaggaggaaagaaggcagagggagctccagtggttgtgggggaagaaggaagaagccacagccagagggggggaacccccccgtggaanctcccgtgacagctcctgtgggnaaggttgttggtaattttnagaaaaaactgcttttnaagccnaaagagagaaatnttccagaatttttccacttagacttgggcctgaaaggttttgncaagnccccttnntttggggngggat

SEQ ID NO: 120448 - DNA, 645 bp, Arabidopsis thaliana
  unsure (1)..(645): unsure at all n locations
ctttnccnttgtttccccaacctngnanttcccctnncttaaggggnccaaanncttgncnntncncccccggttccngncncttttggaccttgttgncnccccccgggcttccaggaatttcncgcccgcgtctcttcccagctcccggtaccagatcncaaccccctgtncgaagttacaacttaagatttggtcgttggaagagccagagaaccaatcgaagaaccagaggaagcctcaagttgaaactccggaggttgtggagatcaagaaagatgaagaagctccggttgaaactccggtggttgtggaggatgagagcaaaacagaggaagttgtagaggcgaagaaagaggaagaagtagaagaaaagaagacagaggaagctccagtggttgtggaggaagagaagaagccagaggcagaggaggagaaacccgccgtggaagcctccgtgacagctccagtggagaaggctgatgagtaaatgtgaagaaaaaaactgtcttttgaaagacaaaagaaggaggaaatgttagcaagtaaattttatttgcctactttaaggaccttggggctcgttgtgtttgttttttgaggcctattacccctncnttgccttttnggttttttaaaacccnc

SEQ ID NO: 120449 - DNA, 755 bp, Arabidopsis thaliana
  unsure (1)..(755): unsure at all n locations
gtttaccnattttttttgggttacaaancccccnttccccttnnaccctcggggcccccccccaaaggnttttggcncgggggacccccccccntttccgnnttttttcccngcccccgtnaccanattttcaaccccccttnccgaagttaccaccttaaggttttngcccntggaagagcccngggaaccccnattcgaagganccngggggaacccttcaagttgaaacccccggagtttttggagatncaaggaaagttgaagannccccgnttgaaactcccgttggttgtggaggatgagagcaaaacagaggaagttgtagaggcgaagaaagaggaagaagtagaagaaaacaactcagaggaagctccagtggttgtggaggaacagaacaagccagaggcagaggaggagaaacccgccgtggaagcctccgtgacagctccagtggagaaggctgatgagtaaatgtcaagaaaaaacctgtcttttgaaagtcaaaacaagaagaaaatgttagccagtaatttatttgctactttaaggactttgtgtcttgttatgtttttgagtctatgactcttcttgcttttggttttttaatcttcttaaggactattttcaatggttatcatttttaataagatacacattattttaaaaaaaaaaaaaaaaaacaaacccatagagcggccgctctagaggatccaagcttacgtacgcgtgcgtgcgacgtcataatcttctaa

SEQ ID NO: 120450 - DNA, 467 bp, Arabidopsis thaliana
  unsure (1)..(467): unsure at all n locations
agtctcttccagctccggtaacagaatctcaagcgcctgtcgaagtaacaactaaagatttggtcgtggaagagacagagaaaccaatcgaagaaacagaggaagctcaagttgaaactccggaggttgtggagatcaagaaagatgaagaagctccggttgaaactccggtggttgtggaggatgagagcaaaacagaggaagttgtagaggcgaagaaagaggaagaagtagaagaaaagaagacagaggaagctccagtggttgtggaggaagagaagaagccagaggcagaggaggagaaacccgccgtgggaagccttccgtgacagcttccatttggcgaaggcttgttgggtaaatttttgggaaaaaacctttttttttttaaaggcccaaatgggggggggaaattttttgccatgtatttttttttcctccctttaaggtccttttntggncnttgt

SEQ ID NO: 120451 - DNA, 550 bp, Arabidopsis thaliana
  unsure (1)..(550): unsure at all n locations
tgttaacaaagaaaactgagaaaggttttcttataagatcccattcttgtagcaaaaacccagaagaacaaactttcgaagaagacgactaatcaattcatctgattatggagagactacagagaatcttcggagctggtggcggtttaggtcacgcatcgcctgattctccgactctcgatacatcggagcaggtttacatctcttctctcgctctcctcaagatgcttaagcacggaagagctggtgttcctatggaagtcatgggattgatgcttggagagtttgtggatgaatacactgttagggttgtggatgtttttgcgatgcctcagagtggtactggtgttagtgttgaagctgttgatcatgttttccagactaatatgctcgacatgcttaaacagaccggaagaccttagatggtggttggttggtatcattcacaatcctggtttccgggctgcttggcttttcctnggggttgacaattaaattactnaaccagnagttttttaagncttttnaatcaagcgggcttgtagcaant

SEQ ID NO: 120452 - DNA, 447 bp, Arabidopsis thaliana
actattttagctacggtcagcttttctctagcgtcggggcctcgatctcttgatttgagcttttcttaggtctgtctctctctgtacactctctccgccgtcgtatctcgccgtcgatttcaatttttccgacgatatgaagctcaccgttaaaactctcaagggcagtcattttgaaattagggttttaccctccgatacgataatggcggtgaagaagaatatagaagattcacaaggaaaagacaattatccatgtgggcagcaattgttgattcacaatggaaaagttttgaaagatgaaactagcctggtggagaacaaagttacggaggaaggatttctcgtcgttatgcttagcaagagcaaatctggaggttcagctggtcaggcttcggttcagacttcttctgtttcacagcctgtttccgctaccacatcttcgac

SEQ ID NO: 120453 - DNA, 931 bp, Arabidopsis thaliana
gatctccagctctcatgcgactcatattgggaaagctggtacgcctgcaggtaccggtccggaattcccgggtcgacccacgcgtccgcttgtttagtcaaacttgaagaagaaaaaaaatctttttaaagagctttgaagatccatggcgatgtctcatgtccagcctatgctactcctcctcgtatcactcttcttcttaccggctttgcgtggcgccatagatttcgaatactgcgccaaaaatggaaacgattacggaaccgtcactagcattgtggtctctccatctgttgggcctcacgaaaacccaaccatcactataaatttattcggttctgcaagcaaaaacatccccgcgggaacccttgtgtacgtagcctttagagatggggaatttaccggccttttaaaaacttacaacctttgtgatgtgagtgcatgtaacaatgaagctgagattgaagctggcaccaactttgagttaactctttccgacgttctttatgttggttatgatgaggaaatcaagtactcggtatctttgcgccgaaagaccttagaggaggaggatccaataataaaaatgtgtgtcgacttcaaagtacctgccccagctcccgcatttgtctctatttagtcaagttggctgatgaaaagatgtttccaagtctctcttgattatatgagtctctctcgcaactttgcttttccttttccccttttgtgttgtccaacaaataaattaaaatcttggaccgatatcgatagcgatatgaacaagcaatcgagcatgtcttttcttcgatttactggttgatattaatcaaaaataaagtttttaaaaaaaaaaacaaagggcggccgctctagaggatccaagcttacgtacgcgtgcaggcgacgtcaagatcttctaagggtgtcctaa

SEQ ID NO: 120454 - DNA, 423 bp, Arabidopsis thaliana
attcccgggcccgatcgttggcctcctgtttccgttttactcgacatcgttccgacgacttttgacctggaatcgacgcagtgacttcaattcaactattgcacttggtttgttggcaatggacaaaggagcacctcctagtatttttgtgaatgatgggtcattcatggaaagattcagacagcttcaacaggagaaagataaagacaaggataaggttgtccaagttgaggattctaagccggtgaagattatatcaaatcccaaacctgctgctaataaaatttccattggattaaagcccaatgatgcccagaagaaaggtggtaagcttgctttcagcttgaagcaaaagtctaagcttcttgcacctcctgtgaagcttggtacagaagaagatgaggatgatgaggatgttaaaca

SEQ ID NO: 120455 - DNA, 1289 bp, Arabidopsis thaliana
  unsure (1)..(1289): unsure at all n locations
acccacgcgtccgcccacgcgtccgccagatctgaacctcttccctttcctcgaaaatccttctaacatcatcatccatggcttcctctgatttcgatggaatccttttgggaatgggaaacccactcctcgacgtctctgccgtcgtcgaccaacagtttctcgacaaatacgacatcaaattgaacaatgcgattctcgcagaggacaaacatttgcccatgtacgatgaaatgagccagaagttcaatgttgaatacattgctggaggtgctacccagaactcaatcaaagtggcccagtggatgcttcaagttcctggggcaaccagttacatgggatccattggaaaggacaaatacggagaggcaatgaagaaggatgctacagcagctggtgtctatgtccactattacgaagatgaggcaacacctaccggaacttgcggtgtctgtgttcttggtggagaaagatcgctcattgccaatctttctgctgctaattgctacaaggttgaacacttgaagaagcctgagaactgggctctggttgagaaggccaagttttattacattgctggattcttcctcacggtatcaccagaatccattcagttggtacgtgaacatgctgctgcaaacaacaaggtgttcacgatgaacctttctgctccattcatctgtgaattcttcaaagatgttcaggagaagtgcctgccgtacatggactatatttttggcaatgagaccgaggcaagaaccttctccagggttcacggctgggagactgatgatgttgagcaaatagccatcaagatgtcccagttacccaaagcctctggaacatacaagaggactactgtgattacacagggcgctgatcctgtggttgtcgctgaggatggaaaggtgaagaaatatccagtcattcctctcccaaaggagaagctggttgacaccaacggtgcaggtgatgcattttgtgggagggtttctgtcccagctggtgcacgagaaatcgattgaggaatgcgtgaaggctggatgctatgcgtcgaacgtggtgatccaaagatctggctgcacttaccctgagaagcccgactttaactaaacaattgggttaccctcagttttgtgatatcttccaaataaaacaacctttgaattattattgcttgagtgtactttttaccacttttaaaaaaaaaaaaaaagnnnnnnnnnnnnnnnnnnnnnnnnnnnnnnnnnnnnnnnnnnnnnnnnnnnnnnnnnnnnnnnnnnnnncta

SEQ ID NO: 120456 - DNA, 560 bp, Arabidopsis thaliana
  unsure (1)..(560): unsure at all n locations
nnnnnnnnnnnnnnnnnnnnnnnnnnnnnnnnnnnnnnnnnnnnnnnnnnnnnnnnnnnnnnnnnnccacgcgtccggcaagacgcttcactcagcagcagtaactaaacttgcctccaaaaaccaatcccagatctgaatctcaacctaaacctcagattcatcatcatggcttcttcttctaactacgatggaatccttctcggtatgggtaacccactcctcgatatctctgccgtcgtcgacgacgaatttctcaccaaatacgacatcaagttgaacaatgcgattctcgcggaagacaaacatttgcccatgtatgatgagatgagtagcaagttcaatgttgaatacattgccggaggtgctactcagaactcaatcaaagtggctcagtggatgcttcaaattcctggggcaaccagttacatgggatccattggaaaggacaaatatggagaggccatgaagaaggatgctacagcagctggtgttaatgttcactattatgaagatgagtcggcacctactggaacttgtggtgtctgtgttgttggtgg

SEQ ID NO: 120457 - DNA, 471 bp, Arabidopsis thaliana
gatcctgtggttgtcgctgaggatggaaaagtgaagaagtacccagtcatccctctccccaaagaaaagcttgttgacaccaacggtgcaggtgatgcatttgtgggaagggtttctgtcccagctggtgcacggaaaggggattgaagagtgtgtgagggcaggatgctacgcgtcaaacgtagtgatccagaggtctggttgcacttaccctgagaaaccagacttcaactaaatctagaagtcgcacaaatcatccttttagttttatctctgaatgagattttggtgattattattatacgacccaaataaactctatgttgttttcttgtatcaccttttgaggctttaagctattattgagtgtgtgttttggcttggttttattgtacctttttatgattaataaatattattactatactaggccgagtatgatattccaaatgtcaaaatgttcataacttg

SEQ ID NO: 120458 - DNA, 531 bp, Arabidopsis thaliana
accacgcgtccgcccacgcgtccgcccacgcgtccgcacagcttttcgttacgttaatcaccagctccatcgtcccgatctccaccttcaccacaattcctcctccgatgacgtcactcccggagccgggatgggtcatttcaccgtcgacgacgaagacaacaacaacaaccatcaaggtcttgacttagcctctggtggaggatcaggaagctctggaggaggaggaggtcacggcgggggaggagacgtcgttggtcgtcgtccacgtggcagaccaccgggatccaagaacaaaccgaaacctccggtaattatcacgcgcgagagcgcaaacactctaagagctcacattcttgaagtaacaaacggctgcgatgttttcgactgcgttgcgacttatgctcgtcggagacagcgagggatctgcgttctgagcggtctcggaacggtcacgaacgtcagcatacgtcagccatctgcggctggagcggctgtgacgctacacggaacgatcgagattctttctct

SEQ ID NO: 120459 - DNA, 550 bp, Arabidopsis thaliana
gaatccgtcgcatctcgattcaaagctattgtataatttcgtcttcttcttccatggaataacgtgtttaggcgtgtatcacatggttctttctttgtgtgacacaaaaccaacataaagcttccatacgatttagacattgtcgatcgctattgtaagatctggtctgggtcctcgattttggtgaggattgtcgggtggaacaaaactctttcttaaaggctctgcagaaattaattctctgctctggctggatctgatagtgattttacagattgttcaggtcagaaatgggcaatccgggatcagacacagagagaaacaagggaaatgtggtctcaagtgtgtttgatcctgcacttctctcgattcgtttggattttccccagaaactccaaactcgtcttaagtcccagctgaagaatttgacagatgataagcatgggattggttcttcatggaggcaagataaaggaaactcatcgatctccatgcaaattgatctggagaaacagttagattgttggagggaaaacccttcgtggactga

SEQ ID NO: 120460 - DNA, 491 bp, Arabidopsis thaliana
catatccatagctatgtgatgcttcttcaagcttaaagattttgtgtatcctcgttcttgtaatggaaatctacaccatgaaaacgaattttcttgtactggctttgtctttgtgtatccttctttcaagcttccatgaggtttcttgtcaggatgatggtagtggtttgagtaatttggatctaatagaacgtgattatcaagatagtgtcaatgctcttcaaggcaaggacgatgaagatcagtctgcaaagatacagagtgaaaaccagaataacactacagtgactgataagaacactatttctctatctctatcagatgaatctgaggttggatctgttagtgatgaaagcgttggacgttcgagtctgttggattaaatcaaacttgaattcgaagctcatcacaatagtattaaccaagctggatctgatggtgtcaaggctgaatccaaggatgatgatgaagaattatctgctcatagacag

SEQ ID NO: 120461 - DNA, 535 bp, Arabidopsis thaliana
  unsure (1)..(535): unsure at all n locations
nnnnnnnnnnnnnnnnnnnnnnnnnnnnnnnnnnnnnnnnnnnnnnnnnnnnnnnnnnnnnnnnccacgcgtccggccgtttcatcaacaactctctcctgtaaacgaaacaaagaaatggctggacaaaagcaagagcttcccgtctccggcgaacctttagccgtcgagagtccgatgaccaacaagaagaagaagaaaagcaagaagaacaaacatacagaggaaaatcatgaagtcgaagaagtgcctcaagaggtcactaatggtgtagaggaagagttgagtaataaagagaagaagaagaaacgtaagagagaggagaaagagtctgagaagaataagaagaaggatgtcccggagaagaagcttgaagctgaggatttaggagaaggagagagtgaacaacagaaggttgttgtgactgggaaaggtgtggaagaagcaaagtacgcagctttgaagacttttgctgaatcgaatttgccggagaatgttttagattgttgtaagactttcgagaagccgtctccga

SEQ ID NO: 120462 - DNA, 1289 bp, Arabidopsis thaliana
  unsure (1)..(1289): unsure at all n locations
nnnnnnnnnnnnnnnnnnnnnnnnnnnnnnnnnnnnnnnnnnnnnnnnnnnnnnnnnnnnnnnnnnnnnnnccacgcgtccgcggacgcgtgggcggacgcgtgggacatgctttaggaacatataaaagcttggtgttttatctcgaagcttgcgaatctggaagtatctttgaagggcttcttcctgagggtttgaacatctatgccacaactgcatcaaacgccgaagaaagcagttggggtacctattgccctggagaggaacccagtcctccaccggagtatgaaacttgtttaggtgacttgtacagtgttgcttggatggaagatagtggtatgcacaatttacagactgagactctgcaccagcaatatgaacttgtgaaaaggaggactgcacctgttgggtactcttatggttctcatgtcatgcaatatggcgatgtaggaattagcaaggataatctcgatctttatatgggaacaaaccctgccaatgacaattttacctttgcggatgcgaattcactaaagccaccttcaagagttacaaaccagcgtgatgcagatcttgttcatttttgggaaaagtaccgaaaagcaccagaaggttcagcaagaaaaacagaagctcagaagcaagtacttgaagccatgtctcacagacttcatattgacaatagcgtgatactcgtcggaaaaatcttgtttggcatttcgagaggtcctgaagtgctaaacaaagtacggtctgctgggcaacctctagtcgatgactggaactgccttaaaaatcaggtgagagctttcgagaggcactgtggatcgctgtctcagtacggtatcaagcacatgaggtcttttgcaaacatctgcaatgcagggattcaaatggagcaaatggaggaggcagcttcacaggcttgtaccacactgccaactggtccttggagctcgcttaaccgtggattcagtgcatagaaaccctaaaccgtcttcgcatttgtttataccaccaatccccaaatattcctatttcgatttgttatgattaaatcagtattctctctgtatatctcagtatcatttccgtcgtcagtgtgtaatttcaaattatgtatttgccatgtacagaagcttgtagaactaaagttgaatgtatagaaggtttgtatattatgatgtaaaaaaaaaaaaaaagcacgccccctctagaggatccaagcttacgtacgcgtgcatgcgacgtcataactcttctatagtnnnnnnnnnnnnnnnnnnnna

SEQ ID NO: 120463 - DNA, 592 bp, Arabidopsis thaliana
  unsure (1)..(592): unsure at all n locations
acccacgcgtccgcccacgcgtccgcccacgcgtccgattttatttgatagcccggcgattaaaaagattcctatcatcatcactcgccggctaatggccacaacgatgacacgtgtctccgtcggcgtcgtcctctttgttctcttagtctcgctggttgccgtctccgccgcgagaagcggtcctgatgatgttatcaaactcccttcgcaggcttctcgcttcttccgtcctgctgaaaacgacgacgattctaactccggtactaggtgggctgttctagtcgccggatctagcggatattggaattacaggcatcaggctgatatatgccatgcctatcaacttctgaggaaaggtggattgaaagaggagaatattgtggtattcatgtatgatgatattgctaacaattacgagaatccaaggcctggaaccattatcaacagccctcatggaaaagatgtctatcaaggagttccaagggttatactggaggtgtgtccatgttgnaaacctttttctggntcctggggaaactcttaagggaagtggagtttggaagggccaanncaattaaatccaggcctc

SEQ ID NO: 120464 - DNA, 582 bp, Arabidopsis thaliana
  unsure (1)..(582): unsure at all n locations
atgatctnnnnnnnnnnnnnnnnnnnnnnnnnnnnnnnnnnnnnnnnnnnnnnnnnnnnnnnnnnnnnnnnnnnnnnnnnnccacgcgtgcgcgagaatccaaggcctggaaccattatcaacagccctcatggaaaagatgtctatcaaggagttcccaaggattatactggagatgatgtcaatgttgataatctatttgctgtgatccttggagacaaaactgctgttaaagggggaagtgggaaggttgtggatagtggtcctaatgatcatatcttcatattctacagtgaccatggtggtcctggagttcttgggatgccaacttctccttacctatatgcaaatgatctcaatgatgtcttgaagaagaaacatgctttaggaacatataaaagcttggtgttttatctcgaagcttgcgaatctggaagtatctttgaagggcttcttcctgagggtttgaacatctatgccacaactgcatcaaacgccgaagaaagcagttggggtacctatttgcccctggtgagggacccantccttcacccgnngnttgaaacctnnttnnggtggact

SEQ ID NO: 120465 - DNA, 430 bp, Arabidopsis thaliana
  unsure (1)..(430): unsure at all n locations
tttcagcccttgngggctttttgcaaccatcngcattgccggggttccaaatggggccaattggnggaggcacttcacaggcttgtccccacactgccaactggtccttgggggctcgcttaaccgtggattcagtgcatagaaaccctaaaccgtcttcgcatttgtttataccaccaatccccaaatattcctatttcgatttgttatgattaaatcagtattctctctgtatatctcagtatcatttccgtcgtcagtgtgtaatttcaaattatgtatttgccatgtacagaagcttgtagaactaaagttgaatgtatagaaggtttgtatattatgatgtaaacttgggagttgtcaatctcatggatggtttactttttgtagcagaaacagcagaagaaaatagtaaaaagagaattttatt

SEQ ID NO: 120466 - DNA, 475 bp, Arabidopsis thaliana
  unsure (1)..(475): unsure at all n locations
cgcgcttggctgggtttcgtgtgatttcgttttggatatggttgttcggattcttgttaccatgattcggctatagtgtttgtcgcctctgattgtctcaagcatcgttctttactgatttttagatagctctgagatctgtctctgcgattcgtcggatttgaattcgtttttttttttgggtagctcttggatttcttcttctagggtttccaagaggatagagaaaatgcgggtgtcctctgagatactccttctttctttggttccggcgttgactttttatcattctggtttaagttctaatcggttgaaacctcttcaaaagagtgattggcgtggtaatcttagttaaacaacaatttctcttgttttttgtttctccgatcttttcagatcttttcaattttctcctcgggttccgttttgttttcaggatttcccaagcccggggaagcnaatcgaggnngaacaa

SEQ ID NO: 120467 - DNA, 517 bp, Arabidopsis thaliana
  unsure (1)..(517): unsure at all n locations
tgcgactcatattgggaatagtctggtacgcctgaaggtaccggtccggaattcccgggtcgacccacgcgtccgcggacgcgtgggttcgtcatcatcagatggagattctcgtggacctttagaagccaatggtgttcttaaggggaaagatcagaaacctcttggatctattcacgttccttctcctaatttcgatatggtttactctgtgttatctcaacgaggctattaccctgactcacctgataaggagaatcaagacacttactgcatcaaaacagagcttcaaggtaacccgaatgttcatttcttcggtgtctttgatggtcacggtgtgttgggtacgcagtgttcgaattttgttaaggagaaggttggggaaatgttgtctgaagaccaactcttcttgagatcccgagaaagctacagtctgctttttgagggtaatgaagagtacacnatagggaatcgacgatcgatgagtggactactgccttacggttcttgtgttggg

SEQ ID NO: 120468 - DNA, 406 bp, Arabidopsis thaliana
aagacgcgtccgcccacgcgtccgcaaatctcaaatttgtttggagactctcaaatgtatccttctctcgacgatgatttcgtctctgatttgttttgcttcgatcaaagcaatggagcagaacttgatgattacacacagtttggtgtaaatttgcagactgatcaagaggatacctttccagattttgtgtcatatggtgtgaatttgcagcaggagccagatgaagtctttagtattggagcttctcaattggatttgtcctcgtataatggagttttgtcgctagagccagaacaggtggggcaacaagattgtgaagttgtgcaggaagaagaagtagagatcaattctggttcatctggtggagctggttaagggaagaacaggaacatttagatgacga

SEQ ID NO: 120469 - DNA, 534 bp, Arabidopsis thaliana
  unsure (1)..(534): unsure at all n locations
ctcaaatgtatccttctctcgacgatgatttcgtctctgatttgttttgcttcgatcaaagggggaaaggttgtgtcttttgatgataatttgacgaaccctaatgtatctgaaagctgttaaattgaataggagaagaagtagctttatggatgttgttgtttatatttactcctattgatggatgtgaatctttttggtcatgatgactcttgtagcaatggagcagaacttgatgattacacacagtttggtgtaaatttgcagactgatcaagaggatacctttccagattttntgtcatatggtgtgaatttgcagcaggagccagatgaagtctttagtaattggagcttctcaattggatttngtccnccggataatggagtttttgtcggtaggagccagancagggtggggcaaccaaggnttttaaaggttgtccaggagnaggatgttgggnncaattcctgggnncaacntggnggggctttaaggnagncccggnccttttnngttccggnttncccaaaa

SEQ ID NO: 120470 - DNA, 647 bp, Arabidopsis thaliana
  unsure (1)..(647): unsure at all n locations
gttctccnnnnnnnnnnnnnnnnnnnnnnnnnnnnnnnnnnnnnnnnnnnnnnnnnnnnnnnnnnnnnnnnnnnnnnccacgcgtccgcaagggcagttttttcttgatattcctttcaactttcctgagtatgtgactcctgcggtaaagaaaatctcaaaaagagaaaagatttacttgagtgttaatgctggtactggaacagaagttctctgcaaaggatgcagtcatcaactaaaggagaaattgcggagtgcagggaagttgaggtttgcatatgaagcagatgttttgaagtggtcgaacactgactttagcttttcttatacggcctcctcaagtaatatagttggtggacttttccttcaatctgcgcctgttcacgatgttgatcagagggacatattttctttctatctttttccaggaaagcagcaaaaaactaaggcattcaagcgggaggtagtagttgttgttgacataagtaaaagtatgactggaaaacctctcgaggatgtaaaaaatgcgatatctacagctctatctaagcttgatcctggagattctttcaatattatcactttcagcaatgatactgctctattttcgacatcaatggagtcagtcacttctgatgctgttgaaa

SEQ ID NO: 120471 - DNA, 784 bp, Arabidopsis thaliana
tttcctttgtcactttcacaatctcccaacagagatccttcccatggcgttcgaagaattcccacctctaatcgccgaccagctccactacttactcaatcactcacctgattccatcaagatcgcaaacgtgtggtctggtaacaaaattaatcccaagattctcgatcgctttactctcgtgataccttactgtctagagacaatcaaatgggatgttatttacaattcagagtatgcaatggatcctccagatttcgtatttggaccagacgacgaagattttgtgccgtgtaagtgtagcgctattgctcctgatgatgatcagatatcatcactggagaaggctttgtctgagtgggatcacgaggactccactcggttacttgttatcattcaaggattgagggatcaatatgtggcctaccaaagaaggcgtgtgggtcaagttgatgatgatcgagttaagtttgagattagcaccgtcttaactcgcaagggaattgaaatgcaaatggcttcaggagttgacaagccagaggaagtcaagtttgcagtacctcttgtgatggctatgaacataaacaaaatggtggttggctgcccttggaagcatcagcagaagatttatcttcaggtagtatacccgattcttcggaaatatgaagcagcaccgtcagcacctcgtttgaaattagtatcatattatgatttaaaatcgctattctctgttgaggatgttaaactttctccatggatggacgggatgtgcttggctgaatat

SEQ ID NO: 120472 - DNA, 877 bp, Arabidopsis thaliana
caatggaggaagctcaccagctggagtcgagatccgatgacctaagtcaacggagaagcggcgggagatggaggaagcaggattttttcccggaattctcttttcagagcttctctacctacaaatcagctctctccgccacttgtccacgcctcgccgatcgtcttctctctcgctcttccgatgcgtacgagctcgatgcagcccgccgcgaaagcgagaaccctatgcgtcgttgtctcacttggtgggacttgctctggcttagctttggttctgttgttggttcgggtgtgttcgtgatcacgggtcacgaggctcgagttggagctggtcctgctgttgttctctcctacgctatctctggtgtctctgcattgctctcagttccctgttatgctgagtttggagttgagattcctgtcgctggaggttctttctcttatcttagggttgaattgggggattttattgcctttattgctgctgggaatattcttcttgaggctatggttggtgctgctggattagggaggtcatggtcttcgtatctagctagtttggtcaagaatgattctgattattttcggattaaagtcgattcctttgctaaagggtttgatcttttggatccggttgctgttgcagtgcttttagttgctaatggtattgccatgactggaacaaagaggacttcttggttgaatttgattacttccatggtcactgtttgtattattgtgtttatcgcccgtgtggggtttcctcattcaaaaacctcaatttggggtccttttctccctatggaccaaagggttgggggcaatctgctgcaagtgtctaccgggcatacactctggtttatattgggggctaa

SEQ ID NO: 120473 - DNA, 1124 bp, Arabidopsis thaliana
atacgactcactctagggaaagccggtacgcctgcaggtaccggtccggaattcccgggtcgacccacgcgtccgggcttatgggtccggtttatgtcggaaccggttgtctcttccgaagaatcgcgctttatggattcaatccgcctcgaagcaaggacttttccccaagttgctggagttgttgttcccctcgtagcaagaagaagaatattcctgaagaaaaccgagctctgcgtatgagtgattatgatgacgaagagatgaatctctctctagtcccgaagaagttcggtaactcaacattcctcattgattcaattcccgttgctgagttccaaggccggcctctcgcggaccaccctgcggttaaaatcgggcgtccaccgggtgcactcaccattcctcgagatcttcttgatgcatcgactgtagcagatgccattgctgttatctcttgctggtacgaggataaaactgagtggggatcacgtatcggatggatctacggctcagtcactgaagatgttgtcacaggttatagaatgcataaccgaggctggatatcggtttactgtgtgacgaaacgggatgctttccgtggcacagctcctattaacttgacggataggcttcaccaggttctccgtagggctactggctcggtggagatctttttctcccgtaacacccctctctcgcaagctcgaaaatgaatatactccagagaattgcctactcatacgtcgggatctacccgttcacatcgatcttcctcatcgatactgtttcctaccagcgctctccctcttctctggtcagttcatcgtccagacgctcaacgtcactttcctagtctaccttctcatcatctccatcactctctgcttactggccctcctcgagatcaaatggtcaggaatctcactcgaggaatggtggagaaacgatcagttttggctcattggaggaacaagtgctcatctcgcagctgtgcttcaaggtttgctcaaagttgtagcaggagtcgaaatctccttcacgctcacgagtaaatccggaggagatgatatagacgacgagtttgcggatttgtacatggtgaaatggacttcacttatgat

SEQ ID NO: 120474 - DNA, 912 bp, Arabidopsis thaliana
  unsure (1)..(912): unsure at all n locations
gggaaagctggtcncctgcaggtaccggccggaattccgggtcgaccacgcgtccggcgaagccattttccgttccatcaagtctcttagccagagtgatggaagatggcgctacagctccaacaatcccgaatcaagcacttttgctgctggcttagcctatgaaacgcttgctggagtgatttcattagcaccttcagagtttggatccatctttgatccagtcggtgaagaccggtatcctgaagctttctgacagtatccaaaaatatgatgatgggacattttattttgatgagaagtctgttgatgcaagtcaaggcccgatctcaacaactgcatcagttattagagggctcacgtcatttgcagcttcagaatccacaggattgaaccttccaggtgataagatagctggtctggccaaattctttctgggtgttggaattcctggtgatgccaaggacttcttcaaccaaatagatgcactagcttgtttggaagacaacaagttttctgttccactcatcttgtctcttccatccactgtcatttcattgacaaagaaagagcctctgaaggttaaagttagcactgtactgggttcgaaggcaccagctcttagtgtgaagcttacacaagctctaagttctaagtcactggattcatctgtaattaataaccaggagcttaagtttgacgctgacagtgcaacgtacttcctggactcctttcccaagaactttgacattggaaaatatacttttgtatgtaagattgtgctggatgaatcagcacatgagaaagtatacataactgaagctcaaacaaaagtgcctatagctgccacaggagctattagcattgaaaatgcagaaattgctgtacttgacagtgacattggaagcgttg

SEQ ID NO: 120475 - DNA, 737 bp, Arabidopsis thaliana
gatcgatcctaggcttacctcaaacctcagtctccgttgactactgagactcgtcgacctctgatccgcttcttcgactatacggatctacttccgatcttgatgatggccggaggtaacgtacggtttctggttttgatactcgccgtagcaatttgcggtgctgcttctgttttccagccgatctcagactctcaccgatctgcggctctggatgtcttcgtaccagtcgatggatcatacaaaagcttggaggaggcatatgaagcattaaagactttggagattcttggaattgataaaaagtctgatcttagctcaaagacttgtgagaatgtggttaaagttcttcagtcgtcttcttctactcttaaggatgcattttatgcgttaaacgttaatgggattctaaaatgcaaaattggtgaagctggtcctaaggacattgtttctcaacttcaagctggtgttaaagatgcgaagctattgcttgatttctattattctgtcagaggcttggtgctggctaaggagcaatttcctggaactcatataagtcttggagatgccgaagccattttccgttccatcaagtctcttagccagagtgatggaagatggcgctacagttccaacaatcccgaatcaagcacttttgctgctggcttagcctatgaaacgcttgctggagtgatttcattagcaccttcagagtttgatccatctttgatccagtc

SEQ ID NO: 120476 - DNA, 729 bp, Arabidopsis thaliana
  unsure (1)..(729): unsure at all n locations
ggtgaaacgtgaagctgatccaagtggttcagccgcaagtgaggtttaaggccttagagcgtgtgtcacaagacagcgagtcacaagtctcaacctatacgagatacaaagaacacaagagctcctcctcgatggacggtccgtgggtcgattcttccttctctgatccgtgcagagatgttagcctattacagcaagaagagggaaattcatcatcctcgtcgaggagactgttagatgatcttactgatgtggagattgagtaatgaattgtatatattcttttattcaatctacaaacacaacagtatttaccaacatatcaactttcaaaattgaatcggtattacgctgtgaaatttctctgttggattgatgagtttaatttactatatacaatatagtcttttgacgagactacacaaaccaaaaacttgcccntacatattttcagaactcgaaagcattgttgatctgaatggagaaagaaggtcgagcaacgtttggaagaggagtatcagctctaacaactattcctgttcgtccaatgttcccattccacttagaccgaccaaaggaaacagatgcaaatgttgaaggatgagctgtgaatgcgcnncaccatatcanattggtattancatccacgacggataacttcgggtttaatccgggggtgctccnccaatgagggccncccaagtgatgcnggtcacatgcccggccacg

SEQ ID NO: 120477 - DNA, 1755 bp, Arabidopsis thaliana
  unsure (1)..(1755): unsure at all n locations
ttctgcccaatgatccgtcaaagttgaattttctcagctctcactctctttttctctctctttacttctactgtatcaagaagctccgttttgcttagccatagtgcgtctagggtttggttggtgggaagaaggttccgatcatggcgtcggtgtcgtcgtcggatcaaggacctaagacagaagcaggatgtagcggcggaggaggaggagagagctcggagacagtggcggcgagtgatcagatgttgttgtatagaggttttaagaaggcgaagaaggagagaggttgtacagctaaggagcgtattagtaaaatgcctccgtgcactgctgggaaaaggagttccatataccggggagtcaccagacatagatggacaggtcgttatgaagctcacctttgggataagagtacctggaaccaaaaccagaacaagaagggaaaacaagtttatctaggagcatatgatgatgaagaggctgctgctagagcttacgaccttgctgccttaaaatattggggtcctgggacacttataaattttccggtgactgattataccagggatttagaagaaatgcaaaatctctcaagggaagaataccttgcatctttacgttagaaaagcagcggtttctctaggggaatagcgaaatatcgtggacttcaaagccgatgggacgcatcagccagtcgtatgcctggacctgatacttcagtaacattcattacggggcaggtgatgatcgtggaacagaaggtgactttctaggtagcttttgtctggaaagaaagattgatctaacaggatacataaagtggtggggagccaacaagaaccgtcaaccagaatcttcatcaaaagcatcagaggatgcaaacgtcgaagatgctggtactgagcttaaaacactggaacacacatcccatgcaacagaaccatacaaggcgccaaaccttggcgtcctttgtggaactcagagaaaagaaaaagaaatatcatcaccatcaagctcttctgctttaagcatcttgtctcagtcgcctgccttcaagagcctagaggagaaagtgttgaagatccaagaaagctgcaataatgaaaacgatgagaatgcaaaccgtaacatcatcaatatggagaagaataacggcaaggcaatagagaaaccagttgtgagtcatggagttgctttaggcggtgctgctgctttgtctcttcagaaaagcatgtacccacttacctctctcttaacggctccattgctcaccaactacaatacattggatcctcttgcagaccctattctctggacaccatttcttccttcaggatcctctcttacttcagaggtgacaaagacagagaccagctgttccacgtacagctacctcccacaagagaaatgagccgttccctttagactttatgtatgtcagattctccttttttgagatgaattcgtcgacttgacatctctttgtctcttttatggagaaaaagttgggaaaagtgtgacaatggtctgaagcaggaatgtacaggttttgttagtggttgtgtttttttttttccagtgtggaatatagaatcatgatattttgtgtaaaacagaaaaaagttatcattatagtatagaagtttgctcttaaaaaaaaaaaaaaaaaaagggcggccgctctagaggatccaagcttacgtacgcgtgcatgggacgtcatagtaattctatagtgtnnnnnnnnnnnnn

SEQ ID NO: 120478 - DNA, 1337 bp, Arabidopsis thaliana
  unsure (1)..(1337): unsure at all n locations
caagcatcnnnnnnnnnnnnnnnnnnnnnnnnnnnnnnnnnnnnnnnnnnnnnnnnnnnnnnnnnggactggaccacgcgtccgctggagagtggtttagcttttttgtaccgtacatcttcttcccagaaacatggctgaggcttctgatttgttggaatggcctaagaaggataaccgtcgttttctccatgttgtctaccgcgttggtgatcttgatcgcaccattgagttttacactgaggtctttggtatgaagctgttgaggaaaagagatatccctgaggagaagtattctaatgcttttcttggttttggacctgaaacatctaactttgttgtggagctcacatataactatggtgttagctcatatgatattggaactggctttgggcattttgccatttcaactcaagatgtttccaaactggttgagaacgtccgtgccaagggtggaaatgtgactagggaacctggtccagtcaaaggtggaggcagtgtcattgcgtttgtgaaggaccctgatggctacacttttgagctcatccagagaggtccaactcctgaacctttctgccaagtcatgcttcgtgttggtgatctcgaccgtgccatcaaattctatgaaaaggccctcgggatgagactcttgagaaagattgagagacctgagtacaagtacaccataggcatgatggggtatgctgaagaatacgagtcgatagttttggagctgacctataactacgacgtgactgagtacacaaagggcaatgcatatgcacagattgcaataggcacagatgatgtgtacaaaagcggtgaagttattaagatagtcaaccaagagctaggaggaaagatcactagagaagccggacctcttcctggactcggcaccaagattgtctcattccttgatccagatggctggaaaacggttttggtggacaacaaagattttctcaaggaactggaatgagaagagcgatgaatgaaggtcgagatcacaaaaccataataataaaaatgtgatcataaaataaaaggaagacttagagtttgatctaaaataagaagatgtggtttagtttgtgtcgtgctatgtgtgtgtgctcgtttcttttgtctttgagcttaaaagttaaaactctagtctatatggacctgaataaaaatatttccaccaccttgaggttttggtgtttgcggttatggacggtttattgaatgtaatattttcgtacaaaaaaaaaaaaaaaaaaaaagggcggccgctctagaggatccaagcttacgtacgcgtgcatgcgacgtcaagactcttctatagt

SEQ ID NO: 120479 - DNA, 418 bp, Arabidopsis thaliana
  unsure (1)..(418): unsure at all n locations
ccagtttccatcttttttgaaccntctcgatataaagctcctattcaattcccatctctatcttcttcctcttcatcttcctcttctctcagatcactggaagctctagctcgatttctcacaatccgccatgaactcacaagcttgtcttcttcttcagaaacagcttaaagatctttgtaagcatcctgtagatggattctctgctggtttagttgatgagaagaatatattcgaatggagcgtaactattattggacctcctgatactctcgatgaaggaggattttccgatgccatgatgtcattcccacgaaactatccgaatagcccacctacgggcgcggtttacgtcagatatttggcatcctaacggtttagccccgatgggccgggttttgtaatacctnttctacaa

SEQ ID NO: 120480 - DNA, 605 bp, Arabidopsis thaliana
ggttgactttcttgctctcgatgggaaagctccaacatggatctcatgagtgcgagttgacctcgcgggggatcgtcgcaaacgggatctgcaacatctgcttcaaagatgaacctgttgaattcgcctgtgacccttgcaatttcgatctctgcaaagcttgcgcagatcttccccagaaaatgtcacaccatcttcatccggagcaccctctagaatttcgtataggcgaagatgatcagaagactaaacacatggtgtgcgtcgtgtgcggaaacatgtcttctggagccagatactattacgagtgtagcaagtgtgagatctacctcgatgtgggctgtgcacttcagaagaacatagcgacgagttgggaagccaaagaaatgctccattacagccatgaacacttacttaaaaggtgtaggccaggaccagattccaaagactcttgccttctctgtgagcaacctctctccttcactgcaatatgttacggttgcgttcattggtacttgttttttcacgagcgttgccttgatctaccaaccgagattcaacatcccgtgcattctatgcaccctctcaaacgccttaattatata

SEQ ID NO: 120481 - DNA, 398 bp, Arabidopsis thaliana
tgcttcttgaagagtcccagagtttcaaagtcacaagcagacagctctctgcatccttgacaacaagacctacaacacatgctttgaatagtatgatcactttattacatctatggatcctgagacttatagggcagtggttatgggtaaggttcaagagtttgaaaaggttatggaggagaatgaaattcctgttcttgatcaggtcacttttcaggggaatacgattctgcatcttgcagctatttatggtcatgaccacctagtgcggcgtatccttgcctatgagctaaacattcttagaaattggaaacgtggcttaaattgcaacttcgtcccaagtttctctcattatcagactcttttggtgagacgaaactacaagggagaccttgctc

SEQ ID NO: 120482 - DNA, 640 bp, Arabidopsis thaliana
  unsure (1)..(640): unsure at all n locations
nnnnnnnnnnnnnnnnnnnnnnnnnnnnnnnnnnnnnnnnnnnnnnnnnnnnnnnnnnnnnnnnnnnnnnnnnnnnnnnnnnccacgcgtccgcgtttgttcccaaatcatcaaaccctaattttctgttaatttcaattagcttagttcgtcgttactccagagaagtcgaaatgatgggctcagagaatgccgatggattcgaagaaactaatctcaatgcgcaaagggatgatatggagaatctcgacctaggagtagatggtggtgaccatcctctgaagataagcgatgtcaacggtgatacatcgaactctggttaccgtagcgccatgtcaacactctccaacgtccgtgacccgctctcgccgccaccgaccgttatgattccagctgattctgatccactccttgcgccatcctcctacgaagatttccgcagcagcttcagctctaagccgatcagcagcgataactcctacatcgagcctccgtcgtatgcagatgttatcttcagtccctttgatgagaactcagatagcgagattaacggtaccgaggataatagccttcatagtcaattctcagattcactatcgagatctccttcttcttcaagctctgattacatcaagatcac

SEQ ID NO: 120483 - DNA, 741 bp, Arabidopsis thaliana
  unsure (1)..(741): unsure at all n locations
agtgttgccattgtnaagccgacggatgaagagccgtttgcacctaacaaccctaaaggctttgttgggaaagcccttgggcaacctggattgaagtcttcggtgcgagttggggaaacggggtttagagaagttgctgcttatctccttgattatggtcgctttgctaatgtccctccaactgctcttgtgaagataactcattctgtattcaatgtcaacgatggggtgaaggggaacaagcctcgggagaagaagctggttagtaagattgcttctttccagaagtttgtggctcatgatttcgatgcaagtgatcatggtacttcaagcttccctgtaacttctgtgcaccgcattggtattttggacataaggatcttcaacacagaccgtcatggtgggaatcttttggtgaagaagctcgatggagttggtatgtttggtcaagtggagcttattccaatagaccatggcctctgcctgccagaaacacttgaggatccttattttgagtggattcattggcctcaggcatcattaccattctctgatgaagaggttgactacatacaaagtcttgatccagtgaaagactgtgacatgcttagaagggaacttccaatgattagagaggcgtgtcttcgggttcttgttctctgtactattttccttaatgaagcttctgcatatggtctgtgtcttgccgagattggcgagatgatgactcgggaatttcgt

SEQ ID NO: 120484 - DNA, 571 bp, Arabidopsis thaliana
  unsure (1)..(571): unsure at all n locations
nnnnnnnnnnnnnnnnnnnnnnnnnnnnnnnnnnnnnnnnnnnnnnnnnnnnnnnnnnnnnnnnnnnnnnnccacgcgtgcgaacaatatcaatgtctttcagatcatgccatctcgttcacataatgcacctggtgacctaagttatgagtgggaatcttctcatgtgcatctcttcaaactgcatagagggatcacttcagctattgtccaggacatttgctttagtcagcagagtcagtgggttgctattatttcatccaagggtacttgccatatatttgttttaaactcttctggtagcgacgctgcgtttcaaccttgcgagggtgaggagcctacccgactaccagcttcatccttgccatggtggtttactcaatcgttgtcaagtaatcagcagtctttatcgccaccaacagctgttgccctttctgttgtaagcagaataaagtatagcagttttgggtggcttaacacagtaagcaatgctactactgctgctactggaaaaagtttttgtaccatcaggttgccgtggcttgctgttttcataaatctgtcactcatg

SEQ ID NO: 120485 - DNA, 594 bp, Arabidopsis thaliana
  unsure (1)..(594): unsure at all n locations
atgatatcgccggcannnnnnnnnnnnnnnnnnnnnnnnnnnnnnnnnnnnnnnnnnnnnnnnnnnnnnnnnnnnnctcctcccacgcgtccgggaatttggggattagcttgggaaacttcgccggagattcatacgtcgtcgtcgtctttagtatctgtatcgtcaatggcgttgctgaagtctttcatcgatgttggctcagactcgcacttccctatccagaatctcccttatggtgtcttcaaaccggaatcgaactcaactcctcgtcctgccgtcgctatcggcgatttggttctggacctctccgctatctctgaagctgggcttttcgatggtctgatccttaaggacgcagattgctttcttcagcctaatttgaataagttcttggccatgggacggcctgcgtggaaggaagcgcgttctacgctgcaaagaatcttgtcatctaatgaacctatcttgcgagacaatgatgttttgaggagaaaatcattccatcagatgagtaaagtggaaatgattgttcctatggtgattggggactatacagacttctttgcatctatgcatcacgcgaagaactgc

SEQ ID NO: 120486 - DNA, 651 bp, Arabidopsis thaliana
  unsure (1)..(651): unsure at all n locations
nnnnnnnnnnnnnnnnnnnnnnnnnnnnnnnnnnnnnnnnncaggtaccggtcctggattcccgggtcgacccacgcgtccgacaaacacaaacacacacaccaaaaaaaacacagaccttaaaaaaataaaaatggttgatatggattggaagaggaagatggtatcatcagatttaccaaactcacctaagctttcttcaaagcttcacgtaactattccatcaccgttcaaaatcgtccctgtttcatctccgatctcatgttcagcacctgctctttgctctgcttacgagctttaccttcgtctccctgagctaagaaagctctggtcatctcgtgattttcctcaatggacatcagagccgattctcaaaccagctcttcaagctttggagatcagtttcagattagttttcgccgtttgttctgatactagaccgtacatcaaccaccgtgaatgggaaccggaggctagattctctcatcacgaagcagatccagcttgtagcagcgatctgcgaagatgaagaagaagaaggtatttcagcggaggctccggtcggcggtggacggagttcgttgagtttgttaccgcagctagctacgtggaggggataaaagggtttttggggaagaagggcnttntntt

SEQ ID NO: 120487 - DNA, 921 bp, Arabidopsis thaliana
atgattctccagctccctacgactcactattgggaaagctggcacgcctgcaggtaccggtccggaattcccgggtatttgtataattttacaaagatgggtttcaaactcatctctctcctccttctttttcttccacttctaacagtcacaatcttgtcgggagtcgagcaggcctttgcttccgacaaggcactcctcgtgaccggccgcaacatcacggctgacggtggaaggtcgtcactgagagggaagaagcagaggagagcatcaggatgtaacttgttccaaggccgatgggtgttcgatgcttcttaccctttctatgactcgtccaagtgtcctttcatcgacggcgagtttgactgtctcaagttcggccgaccagacaaacagttcctcaagtactcttggcaacctgaatcttgcaccatcccaaggttcgacggtggggcatttctgaggaaatacagaggaaaacgagtcatgttcgtcggagactcactgagtttaaacatgtgggaatcgttggcctgtatgatccatgcgtcggtaccaaacgccaagaccacttttctcaagcgtaccccactctctactctcactttccaggaatatggagtaacgttatatctatatagaacaccatacatagtagatatatccaaagagagagttgggcgtgtgcttaaccttggagctattgaaggaggtgctgatgcttggaaaaacatggacgttcttgtcttcaactcttggcattggtggactcacaaaggccaatctcaagggtgggattatattagagatgggtcgtctttggtgagagacatgaaccgtcttgacgctttctacaaaggactcagtacttgggctcgatgggttgatcaaaacgtcgatacggccaaaactcgagttttc

SEQ ID NO: 120488 - DNA, 938 bp, Arabidopsis thaliana
  unsure (1)..(938): unsure at all n locations
nnnnnnnnnnnnnnnnnnnnnnnnnnnnnnnnnnnnnnnnnnnnnnnnnnnnnnnnnnnnnnnnnnnnccacgcgtccgcccacgcgtccggaaaacttctcttttgtccccttgtcaacaaaaatctcccattcaacaaaatttcttcagcttctctccttcaaaaggtttttattctccttggtttgaacaagttacactgtagagagtgatttggctaaaagaagattgattcaggagctgtgtagtgtattgctggggtttttccaatgcaaacgtctcagaaacatcacagtgcggctggactgcacatgctgtatcctcaagtctactgttcacctcagtttcaagcgaaagacaacaaaggcttctctgatatcccgtccaaagaaaacttttttaccctcgaatcctccactgcttctggtagtcttccttcgtatgactctccttctgtgagcattacatctggccggagcccgttttctcctcagggctctcagtcttgcatctcggatctccatcattcccctgacaacgtctatggatcacctttgagtggggtgtcatctcttgcctatgatgaagctggagtcaagagtaagattcgggaacttgaggtctcgctgctgagtggtgatacaaaagttgaagaattctcaggttttagccccgctgctgggaagtcgtggaactgggatgaacttttggctttgactccacagttggacttgaaagaggtgctggtggaggctgctcgggcagtcgctgatggggatttcgctacagcgtatggattccttgatgtcttggaacagatggtgtcagtctcaggcagtccgatccaacggctaggcacttacattggcagaagggcttagagcgaggcttgtaggggtctgggtgcaatatatacaaatcccccttttgctttgat

SEQ ID NO: 120489 - DNA, 1748 bp, Arabidopsis thaliana
  unsure (1)..(1748): unsure at all n locations
ccacgcccacgcgtgcgtagcgggatcactgttgactttgaaaactgcttcatcttcctcctcttatgtcttttctcacgcctctcttacgatcttttcttcaggaaaacaaaagactcacgagctggctgtgctcttcctccgagccctccttcattaccaatcattggtcatcttcaccttatactctttgtcccaatccaccagtctttcaagaacatctcatctaaatatggacctctcctccacctccgcttctttaacttccccatagtcctcgtctcctcggcctcaacggcctacgagatcttcaaggcccaagacgtgaatgtctcctctcgccctccccctcctatcgaggagtctctcattttaggatcttccagcttcatcaacactccctatggagattactcgaagttcatgaagaagttcatggtccaaaagctgcttggaccacaagcactccaacggtcccgaaatatccgtgcagatgagctggaacggttctacaaaaccctgcttgataaggcgatgaagaagcagactgttgagattcgtaatgaagcaatgaagctcactaacaacaccatttgcaagatgattatggggaggagttgttcagaggagaacggtgaggctgagacagtcagaggcttggtgaccgagtcgattttcttgacaaagaaacatttcttgggagccatgtttcacaaaccacttaagaagctcgggatctcattattcgcaaaggaattgatgaatgtttccaacaggtttgatgagctactggagaagattcttgttgaacatgaagagaaattgcaggagcatcatcaaactagtgacatgttggatatgttgttggaagcttatggagacgaaaacgcagagtataagatcactagagaccaaatcaagtctttgttcgtggatctgttcagtgcaggcactgaagcctcggcgaacactatacagtggaccatggcggagatcattaagaatcctaagatttgtgagagactgagagaagaaattgattctgttgtagggaaaacaaggttggttcaagagactgatctaccaaatctcccttacttgcaagcaataggttaaagaagggctaagattgcatcctccgggaccagtggtaaggccggtcaaagagacatgtgaaatcaaaggattctacataccggagaagacaagactttttgttaatgtttatgcgataatgagagatcctgatttctgggaagaccctgaggagtttaagccagagaggtttttagcttcttcaagattaggggaagaggatgagaaaagagaggacatgctaaaatacattcctttcggtagcggaaggagagcttgtcctggatcacatctagcttataccgttgtaggaagtgtaattggaatgatggtgcaacactttgactggataatcaaaggagaaaaaatcaacatgaaggagggtggaacaatgaccttgaccatggctcaccctcttaagtgcactcctgttcctcgaaacctaaacacttaaacttcaagtctatagattcccaataattcttgacgtggagatgtgaacttgcttttgttgtttcaaataatatcatgattacacatgtttcctgaaaaaaaaaaaaaaaaaaaaaagnnnnnnnnnnnnnnnnnnnnnnnnnnnnnnnnnnnnnnnnnnnnnnnnnnnnnnnnnnnnnnnnnnnnnnnnnnnnnnnncg

SEQ ID NO: 120490 - DNA, 557 bp, Arabidopsis thaliana
  unsure (1)..(557): unsure at all n locations
atgatacttcnnnnnnnnnnnnnnnnnnnnnnnnnnnnnnnnnnnnnnnnnnnnnnnnnnnnnnnnnnnnnnnnnnnnnccacgcgtccggaaaagagaggacatgctaaaatacattcctttcggtagcggatggagagcttgtcctggatcacatctagcttataccgttgtaggaagtgtaattggaatgatggtgcaacactttgactggataatcaaaggagaaaaaatcaacatgaaggagggtggaacaatgaccttgaccatggctcaccctcttaagtgcactcctgttcctcgaaacctaaacacttaaacttcaagtctatagattcccaataattcttgacgtggagatgtgaacttgcttttgttgtttcaaataatatcatgattacacatgtttcctgatttctttgttaccttttgtttggttcagtttgctgtatgaaactgtatacatttcttaatgttcatcatcttatgtctctcnnnnnnnnnnnnnnnnnnnnnnnnnnnnnnnnnnnnnnnnnnnnnnnnnnnnnnnnnnnnnn

SEQ ID NO: 120491 - DNA, 590 bp, Arabidopsis thaliana
cagaatcataaccatgactataaccagaaccataactataaccaaaaccatagctataaccggaaaccaaaaccatcaaggcaacaaccccaagaagatgcatcgtcaaccatcttcgtccgattctgagaacataatgagcacacgagtcatcaccattgcacgtgaaaacaaacgtgcagtaatggagatcctacgatctcctcaaggcaacaataccggtggttcaggaacacattcctctagggtttcacacggcaccggagagaaaggacggagacttcaaagcagcagcagtagcagcagcgacgaaggagaaggtaagaagaaaacgacgaagaacgtccctaacaaaggcaatagtaacctcccaatgaaagcttttatgaatagtaacgttcagatgataaacaactccattgtctacaactcgacggcatctcatcatgatcccggcgttcatcttaaaatctcccggaaacctggctccgacaatggttttcatgtcagtgattacggtaataatggcggatacaccaactgatgaaagaagaaaaaaaactaaactaaaataaaaaaaaaggttttgg

SEQ ID NO: 120492 - DNA, 485 bp, Arabidopsis thaliana
cggacgcgtgggtaaaaataaaaagtgttgtcttttgacaaaatcatcaaaagggactcagatttgtgaaatcttgtctctttttctttatctgttttgtttttaacgattcgtaattctcctcaatttccgtgaaaccccttggaaaaacccatttctcgagagagagagagagaaggagagtgtaagaagaagaagaagaagaagaaggagatgggtgtggatttgaggcaagtggtggctggaatactcaccattaccatgtttgtgatgcttggacaaatgcttcatagagattactttgatgctgttcaggagaaagttcaaggagatgcacatgatattgaattccatggatcaaaagtagctgttgaagatggacttgttagagcctttgaggctgggactaaagggccttggatggaagatagtcatgaactcaaaccttgttggtcaatttctcaatctgatgaagcggtatcgtc

SEQ ID NO: 120493 - DNA, 478 bp, Arabidopsis thaliana
ctgagatttcgtatttgaggaagatagcttgtctctatctgccccacaaacacctctctttgttggactctctttttctttcttcttcccttagtctattttaactcagaaacctctgtttttttttgttagagagaaaggtaagaaatgggtgttgatttgaggcaagtagttgctggtattctcaccattaccatgtttgtgatgcttggacagatgcttcatagagattactttgattctcgtcaggagaaagctcagggagatgcacaagatattgaatttgaaggatctaaagtcgctgtgaaagatggtcttgtcggaaccgttgaaggcagtaaaggactttggatggaagataacactgatcttactccttgttggccaacattactatctgatgacgctgtatcatcctaaagggtatgttacattctcacttaccaatggtcctgagtaccatatctctcaaatcact

SEQ ID NO: 120494 - DNA, 438 bp, Arabidopsis thaliana
gtcaaaacctttctccagaatagtaggtttggagatgcaatgagggtgttaaaagaaatggcagaacatggaatcgcaccagacatattttgctacaattcccttataattggcctttcaaaagctaaaagaatggacgaagcaaggtcttttctggttgaaatggtcgagaacggattaaagcctaatgctttcacctatggggcttttatcagtggatatatagaggcaagtgaatttgcatctgcagataagtatgtgaaagagatgcgggaatgtggcgtacttccaaataaggttctttgcacgggtttgatcaatgagtattgcaaaaaggggaaagtaatagaggcgtgttcagcatatagatccatggttgaccaagggatcctgggggatgctaaaacatacactgttcttatgaatggtctttttaaa

SEQ ID NO: 120495 - DNA, 588 bp, Arabidopsis thaliana
  unsure (1)..(588): unsure at all n locations
nnnatgatctnnnnnnnnnnnnnnnnnnnnnnnnnnnnnnnnnnnnnnnnnnnnnnnnnnnnnnnnnnnnnnnnnnnnnnnnnccacgcgtccgccctttcataaccttgtaaaccattaagaggctttgctcaattacaagaagaagaaaaaatgcttgtcgacgggaaactcgtctgcgtcaccggagccggcggctacattgcttcttggatcgttaagttactcttagagagaggctacaccgttagaggaaccgtaaggaacccaactgatcccaagaacaaccatctcagagagcttcaaggagccaaggaaagactcactcttcacagtgcagatcttctcgactacgaagctctctgtgccacaatcgacggttgcgatggcgttttccacactgcctctccgatgaccgacgatcccgagacaatgttggagccggcggtgaacggagccaagttcgtgattgacgcagcggctaaagccaaggtcaagcgcgtggttttcacgtcatcaattggtgcagtttacatgaaccctaaccgtgacactcaagccattgttgacgaaaactgctggagtgat

SEQ ID NO: 120496 - DNA, 1327 bp, Arabidopsis thaliana
tgcagtaccggtccggaattcccgggtcgacccacgcgtccgctctctcgtcttcgtcttcttcttcttcaacgttcctctccaaaatcctcagaccaagaaatcatcatggccgtcgatctaatgcgtttccctaagatagatgatcaaacggctattcaggaagctgcatcgcaaggtttacaaagtatggaacatctgatccgtgtcctctctaaccgtcccgaacaacaacacaacgttgactgctccgagatcactgacttcaccgtttctaaattcaaaaccgtcatttctctccttaaccgtactggtcacgctcggttcagacgcggaccggttcactccacttcctctgccgcatctcagaaactacagagtcagatcgttaaaaatactcaacctgaggctccgattgtttctcagccagtgagaacaactacgaatcaccctcaaatcgttcctccaccgtctagtgtaacactcgatttctctaaaccaagcatcttcggcaccaaagctaagagcgccgagctggaattctccaaagaaaacttcagtgtttctttaaactcctcattcatgtcgtcggcgataaccggagacggcagcgtctccaatggaaaaatcttcctggcttctgctccgtcgcagcctgttaactcttccggaaaaccaccgttggctggtcatccttacagaaagagaatgtctcgagcctgagcactcagagagtttctccggaaaagtctccggctccgcctacggaaagtgccattgcaagaaaaggaaaaatcggatgaagagaaccgtgagagtaccggcgataagtgcaaaaatcgccgatattcccccggacgaatattcgtggaggaagtacggacaaaaaccgatcaagggctcaccacacccacgtggttactacaagtgcagtacattcagaggatgtccagcgaggaaacacgtggaacgagcattagatgatccagcgatgcttattgtgacatacgaaggagagcaccgtcataaccaatccgcgatgcaggagaatatttcttcctcaggcattaatgatttagtgtttgcctcggcttgacttttttttgcactatttgttttttgattttttgaggactttagatggattgaaatttgtaaatttttttattaagaaatcaatttaaatagagaaaaattagtggtggtgccaaaaaaaaaaaaaaaaaaaaaaaaaaaaaaaaaaaaaaaaagggcggccgctctagaggatccaagcttacgtacgcgtgcatgcgaggtcatagctcgtcaagatgtgaacagagtg

SEQ ID NO: 120497 - DNA, 482 bp, Arabidopsis thaliana
cccacgcgtccgaaaacacacaaatggaaggaagagtcaacgctctgtcaaacataaacgatctcgaacttcacaatttcttggtcgatccaaacttcgatcagttcataaacctcataagaggagatcatcaaaccattgacgaaaacccagttcttgatttcgatcttggtccattacaaaacagcccctgtttcatagacgagaaccagttcatcccaacacctgtcgatgacctcttcgacgaattgcctgacttagactccaacgttgctgaatcattccgtagcttcgacggtgatagtgttagagccggtggtgaagaagatgaagaagattacaacgacggtgatgattcttcagccactactacgaataatgatgggacccgtaagacgaagactgatcggtctaggactttgatctctgagagaagaaggagagggcgtatgaaggataagctttatgcattgagatctctt

SEQ ID NO: 120498 - DNA, 495 bp, Arabidopsis thaliana
cccacgcgtccgcggacgcgtgggccgaaactttctctgctctctctctctaatgtctcgatcaacaaagcttcttgttatcttcttcacatggataacagctctatccatgtcgaaaccaatcttcgtatcatccgataacatgaatttcacattcaaatccttcacaatccgtaacctcacattccgcggagattcacatctccgaaacggtgtcgttgggctcacaagagagctacgtgttcccgatacaagctccggtacagtaatctacaacaatccgatccgtttctacgatccggattcaaacaccacggcgtctttctccactcacttctccttcaccgttcaaaacttaaacccagatccaacctccgtcggtgacggactcgctttcttcctctctcacgacaacgatactttaggaagtcccggtggttacttaggtctcgtcaattcctctcagccgatgaagaatcgattcgtcgctatcga

SEQ ID NO: 120499 - DNA, 548 bp, Arabidopsis thaliana
ctctatacgactcatatagggaaagctggtacgcctgcaggtaccggtccggaattcccgggtcgacccacgcgtgcgcccacgcgtccgcggacgcgtgggttgacagctattaaggcagatccgtctagagttatggattacatcaacaggctggacaactttgatggacctgcagttggagaagtcgcagttgaagcccaattatatgaggaagcatttgctatcttcaagaagttcaacttaaatgttcaggctgtcaatgtattgctggataatgtcaggagcattgagcgtgcagttgagtttgcattccgggtcgaagaagattctgtttggagccaagtcgctaaggcgcaactcagggaaggactagtcagtgatgcaattgagtcctttatccgtgctgatgatgccactcatttcttggaggtcatacgtgtctctgaagatactgatgtctatgatgacttggtcaaataccttctgatggttagacagaaggtgaaggaacccaaggttggatagtgagctcatctatgcatatg

SEQ ID NO: 120500 - DNA, 729 bp, Arabidopsis thaliana
cgcctgcagtgtaccggtccggaattcccgctgcgacccacgcgtacacccacgcgtccgctttttctccggagctctgactcttcttctctccggatccaaaaatgaatcgtctcttttctctcttctccatagctctgatcgctttcctctgcctccaccatcatgttctcgcttcttcctctaaaaacccctctggggagggggctgaagacgacgatgggtcagaagattccactgagcttcaccactctctccggcctcctcttctgactcagtctgagtcaacggttctggatctggacccatctcccgattctggttctactcctgcatctaaatctggtcctcccactcagaccgtgaagccttcgtcctccatctccttcgattactgggatgaagatgagttcgaaggattgccggaagacgagaaatctacggagtctccggttttttccgatgacgcctcctctcctgccgatccacagacgccggatcttgagtctgcttcagaaactccagatactgacattccgaagaagatgcaatcgtacactgtggagatcgtttgcgtctctatattgattggttacgctatcaattacttcactggtaaacgtgaaaatgagaacctcgctttggcttgggcttccaaatttggtcttaaagatacgatttttgagaagaacttcagtttgcttggagttggtgaaggagaagactctc

SEQ ID NO: 120501 - DNA, 514 bp, Arabidopsis thaliana
ggtggtggtggccaagcaaggcttaggctatagcacgacgactcaaccagctaattaacaagttttaaactttttctccggagctctgactcttcttctctccggatccaaaaatgaatcgtctcttttctctcttctccatagctctgatcgctttcctctgcctccaccatcatgttctcgcttcttcctcttccgacttcgaaggtttcgatgctgaagacgacgatgtttcagaagattccactgagcttcaccactctctccgtcctcctcttctgactcagtctgagtcaacggttctggatctggacccatctcccgattctgattctactcctgcatctaaatctgatcctcccactcagaccgtgaagccttcgtcctccatctccttcgattactgggatgaagatgagttcgaaggattgccggaggacgagaaatctacggagtctccggttttttccgatacccccctctttcttgccaaaccaagaggccggatgttgag

SEQ ID NO: 120502 - DNA, 911 bp, Arabidopsis thaliana
  unsure (1)..(911): unsure at all n locations
cagctannnnnnnnnnnnnnnnnnnnnnnnnnnnnnnnnnnnnnnnnnnnnnnnnnnnnnnntcccggggcgcccacgcgtccggtgcgagatctctccaacgaaaaaatggcttgtagactcttttgggcttctagggttgcttctcatctaaggatctccgttgctcaacgagggttttcttccgtggttttgaaggatttgaaatatgctgattcacatgaatgggtgaagattgacgggaataaagcaacctttggtataacggatcacgcgcaggaccatttaggagatgtggtctatgtggagttacctgatgtaggacattcggtgtcacaagggaagagttttggagcagttgaaagtgtgaaagcaactagcgatatcaattctccagtctcgggtaaggtggttgaagtcaatgaggagctgaccgagtcccctggattggtgaactctagcccgtatgaacaaggatggatcataaaagttgagctgagtgatgcaggcgaggcagagaagctgatggattcagacaagtactctaagttctgcgaagaagaagacgccaagcactgagctttttctattttttccagcatccttctccaagcttccaccgcaacacagattgttgttttctcaatcgaggatcaaaacgagatttctccatctttgtcccttggactgaaaattcccatctctcgttctcctttttttcttttcatgtttttcttttaatgaaatgaaattgtttgaataatggtagagaataatgagctttggcgttgaaattgattggatctttcatggaaaaaaaaaacaaaagggcgaccgctctagaggatccaagcttacgtacgcgtgcgtgcgacgtcatactcttctatagtgcacctnnnnnnnnnttc

SEQ ID NO: 120503 - DNA, 580 bp, Arabidopsis thaliana
  unsure (1)..(580): unsure at all n locations
atgatactgccnngaaacttttgacaacttgtagtattaagatccaacttcaaaccaacggcaattgcattttcagctaaaaccacgcgtcccatcacttccccaagttgctgcacttgatcgttcaactctactcaaagctttcgacgagactaaaaccggcgtgaaaggccttatcgacgccggaatcacagagattccttcgatatttcgtgcacctccggctactttaacaagtccaaaaccaccttcctcctctgatttctccatccccacaatcgatctcaaaggaggtggcacggactcgatcacgcggcggagcttggtggagaagatcggagacgcggcagagaaatggggatttttccaggtgatcaaccacgggatcccgatggatgtgttggagaagatgatagatgggattcgtgagtttcacgagcaagacactgaagtgaagaaagggttttactctcgagatccagctagtaagatggtatacagcagcaacttcgatctgtttagctcaccggcggcgaattggagagatacacttggttgttatacagcaccagatcccccg

SEQ ID NO: 120504 - DNA, 765 bp, Arabidopsis thaliana
ccaacgcgtccgctctatactttgcgtccgtctctaaacttctctctttctttttttctcaaagcttttttccttctccctaaacgatgaagattttcgtgaagactctcagtggttcgaacttcgagatcgaagtaaaacctgcagataaggtttctgatgttaaaacggctatagaaactgttaaaggtgcagaataccctgctgctaagcagatgctgatccaccaaggaaaggttctaaaggatgagaccacattggaagagaacaatgttgttgagaacagtttcattgttatcatgttgtccaagaccaaggcttctccaagtggggcatcaaccgcatctgcaccagcacctagtgctacacagccacagacagtagctacacctcaggtttctgctcctactgcctcagttccagttcctacaagtggaactgcaaccgctgcagctccagctactgctgcttcggttcagacagatgtgtatggtcaagcagcatcaaaccttggtgctggaactactttagagtccactgttcagcaaattcttgatttggttgaggtaggtgggacccggacactgctgttcggctctgagagcttctttcacaattcttaaaagagttgtggaatccctgaactggggtttccctggttcaagcttgaaatccccccccagttgtgttcaagccccctattttctgtgggggaaacacaggctccccccattttcttttttgtggcccactagcccctaaacc

SEQ ID NO: 120505 - DNA, 637 bp, Arabidopsis thaliana
cttttaacagaatcttctttatctgaaaatatctaaagaaaatggtattgaactttagagataagtcctgcatttttctggcaattctttgttgtttatcattgagttgtatagtaaaagcatcagtctcttatgatcgtaaagctgtgatcatcaatggacaaagaagaatccttctctccggttccattcactatccacgaagcacccctgagatgtggcctggcctaatacagaaagccaaagaaggaggcttggatgttattgagacttatgttttttggaatggccatgaaccttctcctggacaatattattttggagacaggtatgatttggttaagttcatcaagttggtgcaccaagctggtctctatgttaatctcagaattggcccttatgtttgtgctgaatggaattttgggggatttccggtttggctcaaatttgtacccggtatggcttttaggaccgataatgaacctttcaaggctgcaatgaataaattcactgaaaagattgtatggatgatgaaagcagaacagttggttcaaactcaatgaggacccatcattcttgcacagattgagaatgaatatggaccagtggaatgggaaataggagcaccgggaaaggc

SEQ ID NO: 120506 - DNA, 466 bp, Arabidopsis thaliana
cccacgcgtccggatgaagaagaaagcacgtgtcttaagtgataaagattttaatcctgagtttttccaaagactagaaagaaggcaatccgtggaagtagtagttcctcgtagatgtaaaaacaatgatgaggaagaatcaggactcgatgatctcaatgccatgggatcttcaaatcgcctcaagaacacccaagcagatgataaacaggtaaaaggtaggtttgatgggaacggatcacaagcaaggacatctggtgatgataaggctggtgttgtaaacggaaaagagacacctggacatcacgctcctgtctccaatactgataaccaatctgaaggatccttcacaagtaatagaggaaattggtcagccatccagaggcagttgttgcagctagagagacaacaaacaaatcttatgaacatgctccaagagtttattggtggctcacatgacagtatg

SEQ ID NO: 120507 - DNA, 423 bp, Arabidopsis thaliana
attttgggatttagggtttcgcgatttggaagcggattcatggtgagtttcttgttagtgggcgtaattccagagaaattttggtatctatgattcatgactgcgcgattcatcttctcgaattgaaacagagagtagttgggtcggaatagctttcaacactgtagcagttgtagcattgtcttttgtgatgtattcgctgattctccatggaagaaggttggtccaatcgcagagatgcttgagtttggctgtttcagtgcaaaatgcatttgttttgtccaattccttctcttctgctagagctgctgatgtgagcattagagatggtcgaaaagggaagaactttacagtctcttacctcgttgattcattgggtttatctaaaaagctcgctgaatccatctcaaggaaagttagctt

SEQ ID NO: 120508 - DNA, 1064 bp, Arabidopsis thaliana
  unsure (1)..(1064): unsure at all n locations
atgannnnnnnnnnnnnnnnnnnnnnnnnnnnnnnnnnnnnnnnnnnnnnnnnnnnnnnnnnnnnnnnnnnnnnnnnnnnnnccacgcgtccgcggacgcgtgggatcagcttcaagcttaagagagcttcgaaagcgaaagcgacgatttcttctccatcgtgagagcaaatctccagagccgttttctcttcttcttcttcctcctcgcgccgtctctgaaactccatcatcgtatcaatcaaattgcttcctcctccaaattgaaaaacaatggaattggattcggagaacaaattgttgaagacgggtttggttatagtggcgacacttgttatagccaaactcatcttctctttcttcacttctgattctaagaagaagcgtcttcctcctactcttaaagcttggcctccattggttggaagtcttatcaaattcttgaaaggacctattattatgcttagagaggaataccctaagcttggaagtgtgtttactgttaatcttgttcacaaaaagattacttttcttattggtcctgaagtctctgctcattttttcaaagcttctgaatctgatcttagtcagcaggaagtgtatcagttcaatgtccctacttttggtcctggagttgttttcgatgttgattattctgttcgtcaggagcagtttcggttcttcactgaggcacttagagttaacaagttgaagggttatgtggatatgatggttactgaagctgaggattacttctctaaatggggagagagtggtgaagttgatattaaggttgagctagagaggctcatcatcttgactgcaagtagatgtttactgggtcgagaagttcgtgatcagctttttgatgatgtctctgctttgttccatgaccttgacaatggaatgctttccatcagagttctcttcccatatctcccaattccagctgaccgccgtcgtgaccgtgcccgataaaagctttcggagattttcgcaaaaatcattgagttcgagaaaaccctctggaaaaacacagaaccacctgctgcagtgtttcatcg

SEQ ID NO: 120509 - DNA, 879 bp, Arabidopsis thaliana
  unsure (1)..(879): unsure at all n locations
agcgtgtaccaatctctcccgctctgtctctctctctctctttcctccatctctctgtgttcttcttacagacaccgagaatggcggatcctgatctgtcttctcctttgatccaccatcaatcctccgatcaacctgaagttgttatctctatcgccgacgacgacgacgacgagtcaggactcaatcttcttccagccgttgttgaccctcgtgtttcacgaggttttgagtttgaccatcttaatccttatggctttctcagcgagtcagagcctccggttctcggtccgacgacggtggatccattccggaacaatacacctggagttagcggattgtacgaagcgattaagctcgtgatttgtcttccgattgctctgattagacttgttctctttgctgctagcttagctgttggttacttggctacaaaattggcacttgctggctggaaagataaagagaaccctatgcctctttggagatgcagaatcatgtggattactcggatctgtaccagatgtatcctcttctcttttggctatcagtggataagaaggaaagggaaaccctcggagagagattgcnccgattgtngtatcaaatcatgtttctnatattgaaccaatcttctacttctatgaattatcaccgnccattgttgcatcggagtcacatgattcacttccatttgttggaactattatcagggcaatgcaggtgntatatgtnataggatctcacaggcatcaaggaggatgctntcatgaaataaggggaaggttnctcggtggnttcccggnttcggtnttcccgagggccccgctatnggaagtcttnttcntncactngggttttncccgggnccctttaacc

SEQ ID NO: 120510 - DNA, 633 bp, Arabidopsis thaliana
  unsure (1)..(633): unsure at all n locations
tatacgttcactatagggaaagctggtacgcctgcaggtaccggtccggaattcccgggtcgacccacgcgtccggtctgaagtagttcagatgcttgaaggagatggattagctgagagatgggctgcttcacatgaccattcacatttctaccatgccaacatgtcttacaggactattacctctactgatggcaacaaccaaaccaaacatctgtttggctcctcaggatttgaagatgaagatgataatcaagcgttagattcattcgccatggaactatctggtccaaggtagtaaatcttggacacagaaagaaacagatataatatccccatgacttcaatttttgtttttgagatgatatagacatgtaaatggttatcaaacctttgaaaaaattgagattctgggtctaatggttaatattttggatgtatatattaaggtttttttaaatgtgttggttttggtctgttatccaaatttgtaaaatttgaggtcctgtgaaagcaatttttggtcaaactctgagattcatgtcttattatcaaaaaatttaccgaccaacaacttaatgatatgttgacctgtaaaaaaaaacnnnantnnnnnnnnnnnnnnnnnnnnnn

SEQ ID NO: 120511 - DNA, 663 bp, Arabidopsis thaliana
agctgcaagagggttgttttatctacacgagcaatgcgatcccaagattattcaccgagatgtcaaggcagcaaacattctcctagatgagtattttgaagcagttgttggggattttggactagcaaagctactcaaccacgaggattcacatgtcacaaccgcggttagaggaactgttggtcacattgcacctgagtatctctccaccggtcagtcatctgagaaaaccgatgtctttgggttcggtatacttttgctagagctcatcacaggaatgagagctctcgagtttggcaagtctgttagccagaaaggagctatgctagaatgggtgaggaagctacacaaggaaatgaaagtagaggagctagtagaccgagaactggggacaacctacgatagaatagaagttggagagatgctacaagtggcactgctctgcactcagtttcttccagctcacagacccaaaatgtctgaagtagttcagatgcttgaaggagatggattagctgagagatgggctgcttcacatgaccattcacatttctaccatgccaacatgtcttacaggactattacctctactgatggcaacaaccaaataaacatctgtttggctcctcaggatttgaagatgaagatgataatcagcgttag

SEQ ID NO: 120512 - DNA, 498 bp, Arabidopsis thaliana
  unsure (1)..(498): unsure at all n locations
ctnnnnnnnnnnnnnnnnnnnnnnnnnnnnnnnnnnnnnnnnnnnnnnnnnnnnnnnnnnnnnnnnccacgcgtccgtttactaatcgtttcttcattttctctctaggagctaggtgggaaaaagattcaaccttgtcttagaaaaagaaaaccaaagctaatctttttcttttgtacctctctttcaaggattaacaaaacaaatcgatgaagcccgggttttagtacctaaacatctctttgtctcgtctttgaaaacccccccaagtagatccaacatcattcatatctctctctctatctctgcataagctacggagcgatgtcggcgtgcatcaatggcttatgcagagccgtgactgtctctcttcttcttcttcttctttctttctctttttcctcagcttgctccaatggaaattgccagctgctggattcatgctcctcggctactgattgtgtctctggtttatactgtggagactgtcctgccgtt

SEQ ID NO: 120513 - DNA, 612 bp, Arabidopsis thaliana
  unsure (1)..(612): unsure at all n locations
nnnnnnnnnnnnnnnnnnnnnnnnnnnnnnnnnnnnnnnnnnnnnnnnnnnnnnnnnnnnnnnnnnnnnnnccacgcgtccgctttcccgaagcggatctcttcgtctgtgtgatcggaggatctgcaagagttccttacccatacaaactcagagagagactgagagatattcgttacgcaatttattatggcttctgtaagcaaatcgaatcatctcgaagaagatgatgatgctgaagaagaggtgcaacatttcgatgatttcactctagcttcttcctgggaaaggttcatctcagacattgaagcaacttgtcgtcaatggttagctgatggtcccaaaaacctggtggaaaagggtgctgttgcagtggaggattcaaagaatctgtttacggtcaaacacgaacttaagaatgttgcaaagagctattgtatggagttctactttcaaattgataataatggtagccaacaagctggaattggtaattggaacagtaattcacatgatctccagctttgctttggggtgaaggattttctgttgattgctccacaaagtgccagtggggtgcttcttgatacaccagagtctagcaagcttctg

SEQ ID NO: 120514 - DNA, 516 bp, Arabidopsis thaliana
  unsure (1)..(516): unsure at all n locations
ttccggcttnttcgggctctnactgctcctgacttccctgttctaggntttacgtnccccattaaggctctgtcaaaagcttttcccagngattttacttgccctgcagatcccaactttgacttgagctccaccatcaaattccccgtcaattggaatctctggattcaaagggaaatggtagcaagacagttacaaggaaccagtgaccaattgttggtgaggacggtgaggcggtttacacagtcagcgtggaaacaccaccagggtttaacattcaagtgacgccagaaaaactccaatttacaaaagatggtgagaagttgacataccaggtgatagtgtctgctactgcttcacttaagcaagatgtatttggggctcttacttggtctaatgccaagtacaaggtcagaagcccaattgtaattagtagcgagagtagccgcacaaactgagataaaatggtataaagttcagcatgaatatggaataataaaaattaatgaaccgatg

SEQ ID NO: 120515 - DNA, 455 bp, Arabidopsis thaliana
gcaaaacacataacacaatgggggcaccaatggcctctttccttgtcttagcattctcccttgcttttgtctctcaaaccaccgcaaattacttctactcttcccctccaccaccggttaagcattactctcctcctcctgtttacaagtccccaccaccaccggttaagcactactcgcctcctcccgtttacaagtccccaccaccaccggttaagcactactcgcctcctccggtttacaagtctcccccaccaccggttaagtactactcccctcctccggtttacaagtctcccccaccaccggtttacaagtctcccccaccaccggttaagcactactcccctcctccggtttacaagccactccccaccaccacccaagaagcactacgaatacaaatctccttctccttcggtccattactcttcacctacgggataccattcttc

SEQ ID NO: 120516 - DNA, 810 bp, Arabidopsis thaliana
  unsure (1)..(810): unsure at all n locations
tgatactccagctctcnnnnnnnnnnnnnnnnnnnnnnnnnnnnnnnnnnnnnnnnnnnnnnnnnnnnnnnnnnnnnnnccacgcgtgcggttttcccggcggcggctagataatactggtttctgccagcaagatcgaaggagataaacttcgtaatcaaaaagtctccttctgataaaaagatgtcagaaaacacaaaagtcgaagcgaagagagtgttcataggagcaggatgcaacagagtcgtcaataacgtctcttggggagcttctggtcttgtctctttcggtgcccaaaacgccgttgctgttttctgccctaagactgcccagattcttacaacgctcccaggtcataaagcttctgtgaattgcactcattggttacccacttccaagtttgccttcaaagccaagaaattggaccggcaatatctgctatcaggtgattcagatggtatcatcatcctctgggaactatctactcttaataacgatcaacagtggagacatgtactacaactaccactgtctcacaagaaaggtgtaacttgtatcaccgcttatatggtttctgaaaccgatgcaatgtttgcttcagcttcttctgatggagttgtgaatgtctgggatgtttcttttccgtctcagcctagtgaggaatgtaaagtggtgtgtctggactctatctgtgttgacactaaagcaattgtaacgctttcattagcggaattgcctcaaaatcctggtcgatttgcccttgctttgggcggattggacaacaaaatcaaactttactctggagaaaga

SEQ ID NO: 120517 - DNA, 555 bp, Arabidopsis thaliana
ggtgagactcactgttacccccagtgaagaaggtatcctcaaaattgtcggtgtaaggtgggagttgtctggttccatcgtaggtgtgcattacttccaatctgtgtctgtcaaggcaaaaactgcgagaggaagaaggaaaaacaaacttacacccactgatgccttgaaatttttagtcatcaagagtctacccaggcttgagggttcaattgatcatctgcctgagaaattgtatgctggagatttacgttatcttgttttagagttaagaaataagtcagaatccccaacaaagaatcttaaaatgaagattagccatccaagatttgtaagtcctggaaatcatgaagaagagctgacaaccgaatttccagattgcttaaagaagggcgatgaacataatattgttcagcgtgaaagtaatagaacaagtagtgtatttgcatttccaaaggatgtatcactgcaaggagacagatcattaacgtggcctctttggcttcgagctgccatcccaggaacaatatctttgtattttacgatatactatga

SEQ ID NO: 120518 - DNA, 1003 bp, Arabidopsis thaliana
  unsure (1)..(1003): unsure at all n locations
cnnnnnnnnnnnnnnnnnnnnnnnnnnnnnnnnnnnnnnnnnnnnnnnnnnnnnnnnnnnnnnnnnnnnnnnccacgggtccgagccctttctcttttctctctctctctatatattgctaaacaaaaccctacttattctaaaaatggaagccacgatcttcgagaaaagaagaagctcgttatcaagcatagcggtgcacaaacagtcatactcgataaccaaatcaaagccaaggggccgtataattcacatatttgctcccgagatcatcaagaccgacgttgccaacttccgtgagctcgtccaaagcctcaccggcaaaccagacgaccagagaacttccaaggcaaaacctagaagagatatgcatcgtcttcatcgtcaagtccaagacatgatcaacacggagaaactaagagaacccgagcattgtgatcaagagttctgcttaaacgcagaagagctctcgatgacttggaacggtaataatggcgctggtgaaagctctgcagggttcttgaatggtttgggagatttcgaagggtttattcaagaacttggtgaatttccttatttgcccttgtcctccaatgatgcttctgcttcttttaactcctcttcttcctctcatttacatggtggatcagttttctcagatcaattcgcttaactcggtctctcaaaggatgtgtaacctttttcatcttttattttgtttactaggtttttgtggaaatgaatttttaatttattacttttttttttgtttgtttagtatgaggctaattgatttaatgaaattagctgagactccttttatttctcccttaaggtctttatgatttgtccattgtcttcaaaatgtaatgtacactgataaatgttgtgtctagcttttgcaagaaaaaaaaaaaaagnnnnnnnnnnnnnnnnnnnnnnnnnnnnnnnnnnnnnnnnnnnnnnnnnnnnnnnnnnnnnnnnnnnnnnnnnnnnnnnnnnn

SEQ ID NO: 120519 - DNA, 821 bp, Arabidopsis thaliana
  unsure (1)..(821): unsure at all n locations
taatacgactcaattagggaaagacggtacgcctgcaggtaccggtccggaattcccgggtcgacccacgcgtccagtaaacacataaagagatctatagagagagagagagtagagataaaaggtgatgaatagaggtgtgttggagagttcgccggttcagcagctgatggcagccggaaaccctaattggtggaacgtaagcggcggcatgaggccaccaccaccgttgatgggtcatcagcaggcgccgttgccaccacatatgactcctaataacaattatctccgaccacggatgatgcccactcccttcccgcacttcttgccatctccggcgacttcttcttcttcctcttcttcttcaccgtctttgcctaataaccctaatctctcttcttggcttgaaagcaatgatctccctcctgagtcttggagccttagccaacttcttttgggtggattgatgatgggagaggaagagagattggagatgatgaaccatcataatcatcatgatgaacaacaacaccatggttttcaagggaagataagattggagaattgggaagaacaagtgttaagccaccaacaagcttccatggtggctgttgacatcaaacaagagggtaacattaacaacaacaatggctatgtcatatcttccccgaactcacctcctaacaaatcttgtgttacaacaactaccacaacaaacctgttatgaatgaatgagaacagattacatcttcntggaatttccccnttacccnatttccagttgnaaagggccattttaatggattaaggttccntncccc

SEQ ID NO: 120520 - DNA, 765 bp, Arabidopsis thaliana
  unsure (1)..(765): unsure at all n locations
cctggaggaaccaaatccagaaaaggttcactctagcaagctagcgtgaagagagtaatgggcatcacgagactagcccatcaatcccaagctatatgcaagcaactaaatcggcgaaagcaaagctaaggcttcaaggctcaccaaagtctgcggagcaagatggaactgagaaagccactgttcccagacgtcactctctaccatctccaggtaatggtaggatcacttctcactctccaagaacaacgagactcgcaaactcaggtgacaaaaccgggaataagaaggagaaacctcttctgtcgtcccgagaaggaaacgccaagacaactccagcagagcggaagaggtgattggttccagcggaaagtgaagcctttatcgttcttgattctatagcagcgacaataccaaacatgaagaatgcaaccatcttatctatttaaaagctagagattatgagtctgtgattgtgttttgtgtgtttatgttggccaagtgttatgttggcggctaagtttctacaattgtgagtgtgtcccgagccgataaagttacatcacaaggctttttggatcatcttcttcttctggtttttcgttacattactttgattacttttgaagatctaaactttttatgtttatatgaatctgtgattattttctccaaaaaaaaaaaaaaagggcggccgctctagaggatccaagcttacgtacgcggtcatgccacgtcaaagctcttctatnnnnnnnnnnnnnn

SEQ ID NO: 120521 - DNA, 388 bp, Arabidopsis thaliana
ttactccgacaagtgccgtgtaattcctcgccctcggctactcttttctcttcttgcctctcgtctccgccgctgattcagctgccgccgacaaaggaatatggaagaaaaagatgtgtatacgcaagatggaactgttgatattcacaaaaatcctgcaaacaaggagaaaaccggaaattggaaagcttgccgcttcattctcggaaatgagtgctgtgaaagattggcctactatggcatgggcactaaccttgtgaattatcttgagagccgtctgaatcaaggcaatgctacggctgcaaataacgtcacgaattggtctggaacatgttatataactcctttgattggagcctttatagctgatgcttaccttggacgatat

SEQ ID NO: 120522 - DNA, 1017 bp, Arabidopsis thaliana
acttcttcttcctcgcaactctttcactctgttttacactcacattctcacatatatataacacagactagctctaatcaccaaatgagaaaccaaagcttctaaattcagtttcaatggcgatcattaaaccaaaccgagatctcaaaccggacggtgtcacagtcgtgactcgtgaagtctgggcggagaatctcgaatcagaatttgaactaatcagcgaaatcatcgacgattatccatttatctcaatggacacagaatttcccggcgtgattttcaaatccgatctccggtttacgaatcccgacgatctttatactcttcttaaagctaacgtcgacgctctcagcttaatccaagtcggtctcactctctctgatgttaacggtaacctcccagacctcggtgacgatcttcaccgaggattcatctgggagtttaatttccgtgacttcgacgtggcgcgtgacgcacacgcgcctgattcgatcgagttgcttcgtcggcaaggtatcgattttgagcggaattgtcgcgacggtgttgagtcggagaggtttgcggagctgatgatgtcgtcggggcttgtttgtaatgaggaagtgagctgggtgacgtttcagagcgcgtatgatttcggttacttgatgaagattctcacgcgccgagaattgcccggcgcgttgggggagtttaagcgcgtgatgagagtgttgtttggggagcgtgtgtatgatgtgaagcatatgatgaagttttgtgaaaggagattgtttggtggtttggaccgggttgcaaggacgcttgaggttaaccgggcggttgggaaatgtcatcaagctggttcggatagtttgcttacgtggcatgcgtttcagaggatgagggatttgtattttgttcaagatgggccggagaaacatgctggggttttgtatgggcttgaggtttttttagggggttcctttttttttttattccaattccatttaattaactcattttttttttaaa

SEQ ID NO: 120523 - DNA, 1383 bp, Arabidopsis thaliana
  unsure (1)..(1383): unsure at all n locations
tgcggcactgggccggaatttccggtcgactccacccctccgcacagagttaaattgagtttgtgtctcgtaacttatcctgtgagcgaaaatggtgaaagcaactaaggcagagaagaagatcgcctacgataccaagctatgtcagcttatcgatgagtacacccagatcttggtcgttgcggccgataacgtcggatcaactcagcttcagaacatcagaaagggtcttcgtggagactccgtcgtgcttatggggaagaacactatgatgaagcgttccgttaggattcactctgagaacaccggaaacactgcaatcctgaatctgcttcctctccttcagggaaacgttggtttgatctttaccaaaggtgacctcaaggaagtgagcgaggaggttgctaagtacaaggttggtgcccctgctcgtgtgggtttggtggctccaattgatgtggttgtccaacctggcaacactggtctcgacccatcccaaacatctttcttccaggtgcttaacatcccaaccaagattaacaagggtaccgtcgaaatcatcaccccagttgagcttatcaagcaaggtgacaaggtcgggtcttctgaggctgcgcttctagccaagcttggcatcaggccgttctcatatggtcttgttgtccagtctgtctatgacaatggctcagtcttcagcccagaggttcttgatcttactgaagaccaacttgtggagaagtttgcttctggtatctccatggtcacttccttggctcttgctgtgtcgtaccctacccttgctgctgcaccgcatatgttcatcaatgcgtacaagaatgccttggctattgctgttgccactgagtacaccttccctcaagcagagaaggtcaaggaatacttgaaggatccaagcaagtttgctgttgcttcagtagctgcggtgtctgctgatgcaggtggtggtgccccagctgctgctaaggtagaggagaaggaagagtccgacgaagaagactatggaggtgatttcggtttgttcgatgaagagtagattttgtcggttaagatcttacctttttgtcgtggattataagtgttgctttgtttttagtatgttggacctcaattttcttggttttagccaatccagttttatgttactactgtcttttattttttggaaagatttcgttttcttatggttgctttaatatttttcaataatgtctggacgatgaatttgcaatttatctatccgtcgagaaagttaagagcttcttatacatgaaaaaaaaaaaaaagnnnnnnnnnnnnnnnnnnnnnnnnnnnnnnnnnnnnnnnnnnnnnnnnnnnnnnnnnnnnnnnnnnnnnnnngatcaa

SEQ ID NO: 120524 - DNA, 658 bp, Arabidopsis thaliana
  unsure (1)..(658): unsure at all n locations
gccgtccaaggcttgtcccagcntcatgcaatgcccnnttcaccccaggntcttgantncctaagcccactttgnaaagtttgctctggatccccatgtcactccttggctctgctgtgtcgtacccctacccttgctgctccaccgcatatgttcatcaatccgtacaagaatgccttggctattgccgcgcccccgctgagtacaccttccctcaagcagagaaggtcaaggaatacttgaaggatccaagcaagtttgctgttgcttcagtagctgcggtgtctgctgatgcaggtggtggtgccccagctgctgctaaggtagaggagaaggaagagtccgacgaagaagactatggaggtgatttcggtttgttcgatgaagagtagattttgtcggttaagatcttacctttttgtcgtggattataagtgttgctttgtttttagtatgttggacctcaatttttttggttttagccaatccagttttatgttactactgtcttttattttttggaaagatttcgttttcttatggttggaaaaaaaaaaaaaaaacacaaaaaacaaagggcggccgctctagaggatccaagcttacgtacgcgtgcaggcgacgtcatagctcttctatagtttgtcctaaanaaccg

SEQ ID NO: 120525 - DNA, 1144 bp, Arabidopsis thaliana
  unsure (1)..(1144): unsure at all n locations
tgatactctcnnnnnnnnnnnnnnnnnnnnnnnnnnnnnnnnnnnnnnnnnnnnnnnnnnnnnnnnnnnnnnnnnnnnnnnccacgcgtccggtccaccaaggacggtaagacctttgtcgattgcttgcgcgatgccaacatcgtccctggcatcaaagttgacaagggcttgtctcccctagccggttccaacgaagagtcttggtgccaaggcttggatggattggcctcacgctctgctgagtactacaagcaaggcgctcgttttgccaagtggaggacagtggtgagtgttccctgcggtccttcagcactggctgtgaaggaagctgcgtgggggctggctcgctatgcagccatctctcaggataatggtcttgtccccattgtggagccagagatccttctggacggggaccacccaatagagaggactctggaggtggcagagaaagtgtggtcagaggtgttcttctacttggcacagaacaacgtcatgtttgagggcattctgttgaagccgagcatggtcaccccaggcgctgagcacaagaacaaggcctctcccgagaccgttgcagatttcacgctcaccatgctgaaaaggagggttcctccggctgtcccagggatcatgtttctgtcaggaggacaatcagaggcagaggccacactgaacctgaacgccatgaaccagagcccaaacccatggcatgtgtccttctcatacgcacgtgccctgcagaactccgtgctcagaacatggcaaggcaagccggagaagattgaggcctcgcagaagggcactgtttggtgagggcaaaggccaactcactggcccagctcggcaaatactcagccgagggagagaacgaggatgcccaagaaaggaatgtttgtcaagggttacacctactgatttgttaatttcagagatcgtaataaggattaaggaccattgttgtcttttgtttttttttcccctttttgttttgtctccgaagaaaaaaacagtcccgagtccacgctcatatcatatatgtatgtgagcaacgtgttaacatcctcttaaatctatatttcctctcagccaaagaaaaagtaaaagcggggnnnnnnnnnnnnnnnnnnnnnnnnnnnnn

SEQ ID NO: 120526 - DNA, 632 bp, Arabidopsis thaliana
ttcccacgcgtccgccgtcttcatcttcttcctctctctcacgcagctgctttgattaactcttcaggtccagcttaagagttttgtgaagatggtcttagtgctatacgagacagcggcggggtttgccctctttaaagttaaagatgaaggaaagatggctaacgtcgaggatttgtgtaaagagttcgacactccagactcagcacgaaagatggttaagctaaaagcttttgagaagtttgacaatacatctgaagctctcgaagctgtggctaaattgctggagggagctccaagcaaaggtctgcgcaagtttttgaaagctaattgtcaaggtgaaaccttggctgtggctgattcaaagcttgggaatgttatcaaggagaaactgaaaattgattgcattcacaacaatgctgttatggagcttctacgtggtgttagaagtcagtttactgaactcatatctgggttgggtgatcaagacttggctcctatgagcttgggtctgtctcacagtctcgccagatataagctaaagtttagttctgacaaggtggataccatgattatccaagctattggtctgcttgatgatcttgacatagagctgaacacatacgccatga

SEQ ID NO: 120527 - DNA, 615 bp, Arabidopsis thaliana
  unsure (1)..(615): unsure at all n locations
nnnnnnnnnnnnnnnnnnnnnnnnnnnnnnnnnnnnnnnnnnnnnnnnnnnnnnnnnnnnnnnnnnnnnnccacgcgtccggtcgagatcgcttctctccccgttgccgtccgtccccaccgctgagtgatagatcgaaacagagaaacacacacggcgaagaagatttcaccatattttgtctaagtggattctgttgagagagagagatggctatgtctcaggtggtgaacacgtacccgctttcgaactacagcttcggaactaaggaacccaagctggaaaaggacacctccgtcgccgaccggctcgctcgtatgaaaatcaactatatgaaagagggcatgaggactagcgttgaagggattctactggtgcaagaacacaaccatcctcatatacttctgctacaaattggtaacacattctgcaaacttccaggtggacgcctgaagcctggtgaaaatgaagctgatggtctgaaaagaaagctgaccagtaaacttggaggcaattcggctgctcttgtacctgactggacggtaggagaatgtgttgcgacatggtggcgtccaaactttgaaaccatgatgtacccgtattgccctcctcaca

SEQ ID NO: 120528 - DNA, 591 bp, Arabidopsis thaliana
  unsure (1)..(591): unsure at all n locations
aacccatacaaaaaaagtcgaatccaaatctctctctccggcgatctcatccatggcggaaggcggcgaagattcccagcggttgaagaaaattgcggcggctgccttcgactacgaaaacgacgctcgatgggccgattactggtccaatatcctcatccctcctcacatggcttctcgtcccgaggtcgtcgaccatttcaagcgcaaattctaccaacgctacatcgatcctgatcttgttgtggagcctatgtcgacttcatcttcgtcttcacaatctgccaggccaactgctacatctgcatcttcaactgcatcttctaatgcaaatgaacaagttcgttcacggaactcaggatcgggttcctcgaacctcttgggccatctgctacggcttggtgcaaccccaagttcaatgcgctgggatgggcagccggttcagttttcagtnatgcttggntttttgtanaggtttnttggagtntnccnttnaatccaaagncnttaaatngggttttggtttttttatggnctaatncaanttanntcctaaactcctnnnggggcaggatgattaaggtaatttta

SEQ ID NO: 120529 - DNA, 629 bp, Arabidopsis thaliana
  unsure (1)..(629): unsure at all n locations
cgttcacggaactnaggatcggttcctcgaacctntgggccatctncnacgactggtgcaccccaagtccaatgcgctgggatgagcagacgattcatttttnagtcaatgcttggnttttnttnatagctgtnctggcagtgctacctctaataccaaagaacctctcaaatagggcttatngtccctcgcgtccgggaactgcatgctcatctctatattccttatactccttatacgggaggccaagggcatggaatatgcaagggctgcaagtttattttcaatcaattgtggcagcaaaggatttcatctacttcatctactgccttacattcgtcacttcacatctctgtctcaagtttgctttgattcccatcttgtgccgggcacttgaacaagtagccaagttcttgaggcgtaactttggtcggtccactatatacagaaagtacttggaagacccttgtgtgtgggtggagtcaaacactactaccctcaacatcttgtcatcgcaggctgagatagccattggcttccttctgattatctctctgctctcatggcaacgtaacattatacagacgttcatgtactggcagctattgaagctgatgtatcaagcaccg

SEQ ID NO: 120530 - DNA, 415 bp, Arabidopsis thaliana
cccacgcgtccgcccacgcgtccgtaacactaagcaaaatccgtcacaggaacattgtcaggctatacagtttctgttaccaccaaggatcaaactcgaacctcttgcgctacgaatacatgtctcggggaagccttggcgagttacttcacggcgggaaatcacatagcatggattggccaactcggtttgctatcgcactcggtgcagcggaaggtctcgcttacttacatcatgattgtaaaccaagaatcattcaccgtgacatcaaatcgaataacattctcatcgatgagaatttcgaagcccatgttggagatttcgggttagcaaaagtcatcgacatgccactatcaaaatccgtctcagccgttgctggatcctacggttacatcgctcacgagtatgcatacac

SEQ ID NO: 120531 - DNA, 407 bp, Arabidopsis thaliana
cccacgcgtccgtgacggagaaggtgatcgtggtcaaaaccctagaattatggagagggactcagattctatcaaagatccgatctcagagccttcatggtttacccccaaaaagcttctctttgtgttttgtgttgtcaacttaatcaattatatagatcgaggagctatagcaagtaatggtatcaatgggagtcgtggttcttgcacttcgagtggtacatgttcatctggcagcggaatacagggagatttcaacttgagcaattttgaagatggagttctgtcatctgctttcatggttgggcttcttgttgcctctcctatatttgcttccttagctaagagtgttaatccgtttagacttatcggagttgggttgtcaatctggactctcgctgtgattg

SEQ ID NO: 120532 - DNA, 770 bp, Arabidopsis thaliana
  unsure (1)..(770): unsure at all n locations
cnnnnnnnnnnnnnnnnnnnnnnnnnnnnnnnnnnnnnnnnnnnnnnnnnnnnnnnnnnnnnnnnnnnnnnnccacgcgtccgttgtcttttctctgtctcaatctcttatttttaaatattcacatacttcaattttcatggtttttattttttttatctaaaattatataatatttgatagaacaaagagggggattcgcataacatcatcagagataatcgcaaatacacttcttcttcttctcgaaatctcagccgttcgtttgtgtgtcattggctctcaatcgaagaaaacttttagcttacaaaatctgctttgagtagtattgatttttcaattcatatggaaaatcctccattagaatctgagatcaaagaggatatgtctttgaagaatcatcctccagacaaggataaggacaaagacactatcatggaacaacctagtagtccacgtcatcggaaggttgttgctagatggttacctgatgaagcacagaggccaattatcgatgacgctcccgtattcactccatcactagaggagtttgtagatccacttgcgtatatcgagaagatacgtccactagcagagccgtatggtatctntcggatcatcccaccatcgncatgggaggctccttgccggcttaggggagagttntgggggcaggcaaagtttcctnctngggttnaancgtngncnnctttaaaaccgtngccgttnagagaaccncgggttgaaacgggaacggggnngaaacttgg

SEQ ID NO: 120533 - DNA, 620 bp, Arabidopsis thaliana
  unsure (1)..(620): unsure at all n locations
accacgcgtccgctcttttgtgagctcagatctgaccagagagaaagaaacaaccggagaagaagaagatgactgaccgagtcttcccagcttccaaaccaccaaccgccactaatggagctccaccagttggttccataccacctcctccagctccggcgactgtaaccagcaacggaacaacaaacggaatggctaatcagaaacctcaagtctacattccagctaaccgtccggtttaccgtccacagccttacagtcgccgtcatcaccaccaatctcgaccaagctgccgacgaatttgctgttgttgctgtttctggtcgattctgataattctgatcttagctctcatgactgcaatcgccgccaccgcgatgtacgtgcatctaccaccctcgtccgccgtcgttctccgtcccgtcaataagaatcagccgcgtgaacctaacangctcctctgattcctccgtctctcatctctcttccttcttcaacttcactctaatctcagagaatccaaaccaacanctctcttttctcttacggatccttttcaccgtcaccgttaatttcagctaaaatcccggttangatggctcggttaacggtaactgttt

SEQ ID NO: 120534 - DNA, 458 bp, Arabidopsis thaliana
gcctgcaggtaccggtccggaattcccgggtcgacccacgggtccgaggacagaccttccacctcgacttcaccaaaggtttccaatgcccatattgtttggtggtgatggcagttacatggctcctttctcacttcaaaatgacaacattcttaccagtctgatgagtcagcttggttcgcctactacttggtatagactggtggctggtgtaaatgctcaattacgtcttgttcgccgtgggcgtctgagatcaacatttcattctgttctgagatggttagaaactcatgctaatcccgctctggaaacacatggcatacgggttgatctggcctggttccagactacagcttgtggttactgccaatatggtctcttgattcatactgttgaggattgtgaaccaacatcacctcagtgtgtcagggaaacaacatggactggaatccagcccc

SEQ ID NO: 120535 - DNA, 738 bp, Arabidopsis thaliana
aaacgtctcgtcagcttgtcgataagcttgatatcgaattcgcggccgcttggtgtagacaaattcaaaccctaaccctagattgattgcgtacggagtttctctttggttaaaacccccacaaaaactgggagagcgatgaggaaagaggagattccagataaaagtcggactatcccgatcgatccgaatctgccgaaatgggtctgccaaaactgtcaccactcccttaccatcgtcggcgtcgattcctacgccggcaagttcttcaacgatccccctccgtccgctacgcagggctcatctatccatggagctaacagtgttcttggttcaacacgcatggacaactcttttgttgttttacctcgacataagcctcctcaaatctcagggcattcctccacgtcctcgcggggcgtcctcacctcagcctgatgctactcaatctggaaaggcgatggaggattcgtttgtagtggcctataggcctgagcctgtttctgattctggtggttctcacaatctgtctcttgaagtgggccaaaacggtcccttacattcaaatacttctggctttaatgcgactatcaatgtcttaactcgtgcttttgatattgctagaactcagacacatgttgaacagccattgtgcttagaatgcatgagggtattgtctgataaacttgaaaaaagagtccaggatgtgacgagggacgtggaagcatacgaagcatg

SEQ ID NO: 120536 - DNA, 534 bp, Arabidopsis thaliana
  unsure (1)..(534): unsure at all n locations
tacgctcaatnnnnnnnnnnnnnnnnnnnnnnnnnnnnnnnnnnnnnnnnnnnnnnnnnnnnnnnnnnnnnnnnnnnnncccacgcgtccgcccacgcgtccggggagagaaatctaaaattaggcggtgaatgatttagattagtaacaagcatcacacacacagattgtttggtgtagacaaattcaaaccctaaccctagattgattgcgtacggagtttctctttggttaaaacccccacaaaaactgggagagcgatgaggaaagaggagattccagataaaagtcggactatcccgatcgatccgaatctgccgaaatgggtctgccaaaactgtcaccactcccttaccatcgtcggcgtcgattcctacgccggcaagttcttcaacgatccccctccgtccgctacgcagggctcatctatccatggagctaacagtgttcttggttcaacacgcatggacaactcttttgttgttttacctcgacataagcctcctcaatctcagggcattcctccacgtcctc

SEQ ID NO: 120537 - DNA, 599 bp, Arabidopsis thaliana
  unsure (1)..(599): unsure at all n locations
ctcttacaaggagcgaaagagaaacactttccgacttgggtaaggaaaaagagtttgatgggttgttgtcaatccttgttttccggcgataacccacttgggaaagatggagttcagccgcaaccactatctcaaaacaatcacggcggagctacgacggctgataacggcggaagcggcggagctagtggtgtaggcggcggaggaggaggaggaggaatcccatctttctctgagttctctttcgctgaccttaaagcagctacaaacaactttagctcagacaacatcgtatcagaaagtggtgagaaagccccaaatcttgtctacaaaggccgacttcagaaccgtcgttggatcgctgtcaagaagtttactaagatggcttggcctgagcctaaacaatttgcggaagaagcatggggtgtggggaaattgaggcataatcgattagcgaatttgattggatattgttgtgatggagatgagaggcttcttgttgctgagttcatgcctaatgatactcttgctaagcatttgttccattgggaaaatcagacaattgagtgggctatgaggttgcgagtangatattacat

SEQ ID NO: 120538 - DNA, 520 bp, Arabidopsis thaliana
gtcaattcatcattagcttgaacaaatatctagaagccatgagcaataagttctctgtacggatgagatttaagatgcgttttgagggagaggattcccctgaaagaagaggggctggcacggttattggtgtgaaagactgctcccctcactggaaagactcaaaatggcgatgcttagaagttcattgggatgagcctgcatcgatttcaagacccaataaggtttcaccatgggaaattgaaccgtttgtaaattcagaaaacgttcccaaatcagttatgctgaagaacaaaaggccccgtcaagttagtgaagtatctgcacttgatgtaggcataacagcttcaaacctttggagctctgttttgacgcaaccccatgagtttgcacaatcgtgcatcacctcacagtggagttctcctcagcaatgtcatcgtgatgcaaatgaggatgctaagaaatctgactggctaaataactcttactctgtgtcaaatgtagcaaaagactcaacact

SEQ ID NO: 120539 - DNA, 669 bp, Arabidopsis thaliana
  unsure (1)..(669): unsure at all n locations
cnnnnnnnnnnnnnnnnnnnnnnnnnnnnnnnnnnnnnnnnnnnnnnnnnnnnnnnnnnnnnnnnnnnnnnnccacgcgtccggctttcgagaaagccttcgacattgcacagctcaatcctcacaaaaccttgttctttgacgacagtacccggaacatccaaaccgggaaagccgttggtctccatacagtcttggttggtaaatcagagaaaatagatggaagcgattacgcgttagaaagcattcacaacatgaaagaggcattccccgagttatggtcggaatccattatcaacaacaaagaaactgaaagaattgattacgcttcacagatctcgattgaaacttctgttcaagcttaactttatttagtactaaatatgatgatatttacatatcattgaatgtttcaataaaatatctatgtacctttttttgtcgtctatccatgtaccgtttatggttgattcgtatttatagtctataattgtattttaatcaccctcttttgtacatatcaataatgtgctagtaaaagatcctgtttattgccccatnnnnnnnnnnnnnnnnnnnnnnnnnnnnnnnnnnnnnnnnnnnnnnnnnnnnnnnnnnnnnnnnnnnnnnnnnnnnnnnnnnnnnnnnnnnnnnnnnnnnnnnnnnnnn

SEQ ID NO: 120540 - DNA, 805 bp, Arabidopsis thaliana
ggactcacaaaattaattcttcttctcttttcttttcttaaaagagctcaaaacacacgaccatctttccgctgtcttcttagcttcttatctaccgtaatcatgccaacatcagcaacagcggtggctccatcaactggatctgtccagaaaaaagatcaagactggcgtgcgattttgtctcccgagcaatttagagttctcagggaaaagggcacagagaaccgaggtaaaggagagtataccaaactgttcgacgacggaatctatagttgtgctggttgtgcaactcctctttataagtccaccactaagttcgactctggttgtggctggccttccttcttcgatgctatccctggtgccattaaacaaacgcccgaggcaggagggagaagaatggagatcacgtgcgcggcatgtgacggacatttaggtcatgttgtcaaaggagaaggttttcccacagcgaccgatgagcgccactgcgtcaacagtgtttctctcaagttctctgaaatttcctcccaataagtctatatagtccacattgatgaccactattgttggaccaagtcctctccttcaagaaaatttgaaaatcaagtcggattgtttgagattgtcatgttatgttccattcctagtcttgtgtgatatgctcgctccagtgattgttgtttgtcccttgtatggatatctttttaataattatattattgttatctttcaaaaaaaaaaaaaaaggacggccgctcgcgactagaaccggacgcgtgggtcgacccgggaattccggtccgga

SEQ ID NO: 120541 - DNA, 309 bp, Arabidopsis thaliana
agatccggatctttaatgtccccatcatcctcgtttcatcggcttcagttgcagacgaggtcttcaggatccacgacatgaacatctcctctcgcggtgctgctgcgatcgatgagtccctcgtgtttggatcttctggtgtcgtctacgctccctatggagattacttgaagttcgtgaagaagatcattgccactaagctgcttcgacctcaggtgttggagcggtcacgaggtcttcgtgctgaagagctacaacgactttacaacagaattcttgataaagcgaagatgaatgagaacgttgaga

SEQ ID NO: 120542 - DNA, 514 bp, Arabidopsis thaliana
  unsure (1)..(514): unsure at all n locations
nnnnnnnnnnnnnnnnnnnnnnnnnnnnnnnnnnnnnnnnnnnnnnnnnnnnnnnnncacttncactttcaggtcgcgttgcttcactctccattgcaaagagaggtctctgcgatttctgcaactcacccctgaaaccttcttaatttacttcaactgccgctatacctaaaaacttcatctttctcctctgagctatgataaagattgcagatttcactctcttcttctttatcttcgtcttctctccctcgttgcctctagctcaatctcagcttcccgatctcgacccacaagacaaagcttctttattgatattcagagtttcgattcacgacctaaatcgaagcttatcgacatggtacggctcatcgtgttctaactggacaggtctagcttgtcagaatccgaccggaaaagttctctccctcactttatccggtctgaatctctccagtcagattcacccatctctttgtaagctctcttctcttcaaagcttggacctttctca

SEQ ID NO: 120543 - DNA, 622 bp, Arabidopsis thaliana
  unsure (1)..(622): unsure at all n locations
nnnnnnnnnnnnnnnnnnnnnnnnnnnnnnnnnnnnnnnnnnnnnnnnnnnnnnnnnnnnnnnnnnnnnnccacgcgtccgcccacgcgtccggcagaatgattctggtggaggatcaagctggggaaagcaagatggtggtgggggtggttcaagctggggtaaacagaacgatggtggtggtgggtcgagctggggcaagcagggtgatggtggttctaaaccttggaatgaacatagtggtggtggtcgtgggtttggtgaaagaaggggaggagggggattccgtggaggtagaaaccaatcaggcagaggaggaaggtcgtttgatggtggtcgatcatctagctggaaaacagacaatcaagaaaacacttggaagagcgaccaaagtggtggatcagactggaaaaaaggttggggagaggattcaaacaatagcaaaccatccggttcgtctgctggtggttgtgctggaaactggcctagctgggatactaactcaaagaaagaaaccaatgacaaaccgggagacgatagcatatcagcttggggaaccagtaacgatcaggtgaataccgataacaacaatgacagttgggaaaaaaagccaaacaatgat

SEQ ID NO: 120544 - DNA, 402 bp, Arabidopsis thaliana
cccacgcgtccggcaaacacgaacgggtttacgtagaccgtcaaacgctcctccgtccgacggagaaaaaacgagacggtgaagaagaagaagaagaagaagaagaagaacgactcaaagatctcatcgatcactctctccaagatctattcacgcatcgtcggaagaattttcgcttccgacgacgtttctctcgtctgattttgtctccgaacatcctacctaatcgtattcggtgctggatttgaatccggtgaactgaatctgacaatttcgttcccggaggtgtttaaaaatggccgggatcttgaataaattgcggaatctagatgcatatcctaagatcaatgaagatttttacagccgtacattatccggcggagttatcactctcctctcctc

SEQ ID NO: 120545 - DNA, 509 bp, Arabidopsis thaliana
  unsure (1)..(509): unsure at all n locations
nnnnnnnnnnnnnnnnnnnnnnnnnnnnnnnnnnnnnnnnnnnnnnnnnnnnnnnnnnnnnnnnnnccacgcgtccggagaaagagcttgaagttgaaactttgcttaaggcttctgcttacattttaggagccactggttcgagtataatgtacaagactgttcttgaggacggtacggttctcgcggttcgtcggttaggtgagaatggtttgagtcaacaacgccggtttaaagactttgaggcacatattcgagctattggtaaattggttcacccgaatttggtacgtcttcgtggattctattggggcaccgacgagaaattggtcatttacgattttgttcctaacggcagtctcgtcaacgcccgttacaggaaaggagggtcttcgccgtgccatttaccgtgggagactcggctcaagatagtaaaaggtttggctcgtgggcttgcttacctncacgacaagaaacatgtgcacggtaacttgaagcctagtaacata

SEQ ID NO: 120546 - DNA, 637 bp, Arabidopsis thaliana
  unsure (1)..(637): unsure at all n locations
atgattctccnnnnngtgtactgtatctttcaatctatagttcagttacaaagatcttcactgccaattttagaaaacttctgacggaaaataaaaagagaggatttatttttatctttctgtgttaccggagaataaagacggtaccttttcactgttgacttaacggagaagatggcgactgttccggagataaagataatgagaagcgagagcttaggtcatcggagtgacgtgtcgagcccggaagctaagctagggatgcgtgtggaagatctctgggatgagcagaaaccacagctcagtcctaacgagaagctcaacgcttgctttgagagcatccctgtctctgctttccctctctcttctgattcacaagatattgagataagatcagacacaagtttggctgaagctgttcagacactatcgaaattcaaggtcttgagcgcgcctgttgtagatgttgatgcgcctgaagatgccagttggattgatcgctacatcggtattgtggaatttccaggcattgtttgtcttggcttttgcatccaagttggagccaccatcttccaaggggcccttcttttttagannttnaaatggggttttnntcanggtttcaaccccccgtttt

SEQ ID NO: 120547 - DNA, 419 bp, Arabidopsis thaliana
gagagagacgattcgtttttctagattctcgtcaaatttttttgcctccttcgatctctcctttttccttattcagcatttccccattttttcacgcaagatccgtgattttccagggattgatctgattgggggatcgtgaaattcgtttgtgttttctgctcgattaaccggagaaatggacgagtttggtgttctaacggagcgttatgggattaagccacaaggtaaatctgctccgatggctgcttctaagcgtaaccctaacaacaatgctcagagctggaatttcggttcaggctcctctggtttaaatgcaaagtcgacgtctttttcttccaatagctcttggaataaggattctactaatgggtctttgtttgatggtgacgatattttcattccggctaactctacta

SEQ ID NO: 120548 - DNA, 513 bp, Arabidopsis thaliana
  unsure (1)..(513): unsure at all n locations
atgatactctcgctannnnnnnnnnnnnnnnnnnnnnnnnnnnnnnnnnnnnnnnnnnnnnnnnnnnnnnnnnnnnnnnnnnccacgcgtccgcccacgcgtccgaaaaatccggtttacttatggactctaccgatatttcacgctaacggctggagctatccatggggaatcgccgccgtcggaggaactaacgtctgtttgcgtaaattcgacgcgccgttaatctaccgtttgatccgtgatgggggcgtcacacacatgtgtggagctccggtagtgctcaacatgttgtcggcgactaacgaatttcagccgttaaatcgtcctgtcaacatcttaaccgccggtgctccgcctccagcagccgtactcctccgagcagaatcaattggattcgtgataagccacggatacgggttaacggacaccgccggataaccggtcatgcgctggaacccaagtggattttttacccgcgaccaacgagcgaggtgaagcacggcaggattg

SEQ ID NO: 120549 - DNA, 629 bp, Arabidopsis thaliana
  unsure (1)..(629): unsure at all n locations
actatatggacagctggtacgcctgcaggtaccggtccggaattcccgggtcggacccacgcgtccgctctgtcgtcatcgacttcctcttcctctgactttgagcagctctgtcttcttctcgaaatcgtctcctgtttcttctgctttcatggatgcttcaaatcccaattcttctagaaaatctaatgtctcttccttcgctcagtccagtcgaagcggtggtagaggaggaggatatgagagagataacgatcgacggagacctcagggtcgtggcgacggtggaggcggaaaggatagaatcgatgcacttggacgactcttgacgagaatattgcgacatatggctactgagctgagattgaacatgagaggtgatggttttgttaaagttgaagatttacttaacctgaatttgaaaacttctgcaaatattcagttaaagtcacacacgattgatgaaattagagaggctgtgagaagggncaataagcaacgggttagtctcatcgatgagaatggagagccctgattcgcgcaancggggcaatcgatacnacgggtnngccngagnagtacttaacantactgtnccagannagccccgtgtggacatgnactttnga

SEQ ID NO: 120550 - DNA, 522 bp, Arabidopsis thaliana
  unsure (1)..(522): unsure at all n locations
cccacgcgtccgatcttcgttgaagtgagggtgacgagaagtttctgctttcatcaattaaaggtttacgcgtgaagcagatcatcagcaatggcggcgtcgcaagataagttggataagatgaaacttaggcaagattaccggaatttatggcactccgatctcatgggcaccgtcaccgccgacactccctattgctgcatctcgtgtctgtgtggaccttgtgtgtcatacatgcttcggagaagagcactttacaatgacatgtcaaggtatacttgctgtgctggatatatgccctgtagtggaaggtgtggagaaagcaaatgtcctcaactttgccttgccactgaggtcttcctttgcttcggaaactctgtggcctctacccgctttcttctgcaggatgaattcaacatccaggcaacacaatggggcaattgcataattgggtttatgttcngcntcagccaagttngcttgcatatncnctatagtggcttncantgntnggaagtgntg

SEQ ID NO: 120551 - DNA, 866 bp, Arabidopsis thaliana
tatacgacttactatagggaacagctggtacgcctgcaggtaccggtccggaattcccgggtcgacccacgcgtccgcggacgcgtgggaatttgttcaaccgtcatcttcttcaactgatcttagctcaactaacacactctttcttcttggcgtcaattcaatcaaccaaaacctttttctcctatctagctcacgctttcttcttcttccaatggcgtcttctgcagctctcggatctctccatcagactttagggtcagccattaattcacagagtgaggttcactcgctttctggaaactggtctgcctctggtaattcatgtgtgccacggtggagattatccaacaggaacagcaactacaggctcgtgttacgtgctaaggccgctaaatcttcgacaacaaccataagtgatggttcatctgatgctagtgtgtcagacgggaagaaaacagttcgacggataactttcccgaaagaagtggaggacttggttacgagatgtggatgaaactgaggttgtgtgctgcacttagggtggagatttcgaaagaacctaaacggaagattggagcagcacaaaccccttccggggggatattctcaactggagccctccattcttggaactagaataaattgtttttcggtccagccatctgagcaagcttccttgagaagggtcccttaaaaatcccctatgcgaaccagcaggtggtgcttgaggctttgatccccaccttgggtagcccactcccccggcgaacttccaggccaactgaagggaaaaccctcctactgaaaggggttgaaaaagaggccctttcgactcctcgtggaccacctccgccagaggctgg

SEQ ID NO: 120552 - DNA, 579 bp, Arabidopsis thaliana
  unsure (1)..(579): unsure at all n locations
ctttcttcttggcgtcaattcaatcaaccaaaacctttttctcctatctagctcacgctttcttcttcttccaatggcgtcttctgcagctctcggatctctccatcagactttagggtcagccattaattcacagagtgaggttcactcgctttctggaaactggtctgcctctggtaattcatgtgtgccacggtggagattatccaacaggaacagcaactacaggctcgtgttacgtgctaaggccgctaaatcttcgacaacaaccataagtgatggttcatctgatgctagtgtgtcagacgggaagaaaacagttcgacggataactttcccgaaagaagtggaggcactggttcacgagatgtgtgatgaaactgaggttgctgtgctgcaacttaaggttggaggtttcgggatgaacctaaaacggaggttttgngcagccacaaaccccattcccgtggnggttttcttcactctagggctcccatcctctgacctctgataattttttttggtctgccatttagaaanttctttgaagttncctagntnntttggacccaaattgtc

SEQ ID NO: 120553 - DNA, 701 bp, Arabidopsis thaliana
  unsure (1)..(701): unsure at all n locations
gcccccccgcccccnnnaatgaaaatgcaatggtccttccgcaggaccggtctcggaattcccgggtcgacccacgcgtccgagaagaaggagggatccaagtggaccagctcttcttccatgaccctgatggcttcatgatcgagatttgcaactgcgatagcctccccgtagtccccctcgtaggagaaatggctcggtcctgctcaagagtcaaactccaccagatggtgcagccacaaccgcagactcagatccaccaagtggtctacccttaattataaacagctcacttcttctttatattgtgtgtgtttgtgtattggtgtgcttggttttgggtgtaatatacaataagagaccgatgtgaatcagcgaatgtgattcccttcgaggaaatgaccattctctttgctccacaagcttatctaatataatcaagggagatcatgttttacataanngaaaaggagcnanaacaacacaccctnctaattatacaaaattaccaagggcggccgcctctagaggaaccaaagcttacgtacgcctgcctgccaagtcatagcttcttttatagtgtcaccctaaattcattttactgggccggcgttttaccaacgcccttgactggggaaaaaccccttggcgttaccccccaccttaaattggcctttgggaagcaacaatccccccctttt

SEQ ID NO: 120554 - DNA, 691 bp, Arabidopsis thaliana
ttaccattattacgccaagctctaatacgactcactaagggaaaattggtccgctgcaggtaccggtccgaaattaccgggtcgacccacgcgtccggttgtttggtcacgggattggaatacacctcctgtgtgccccagaaccagagaaacttcccaagaaaactgcgattaatcccaaggataatcacatctctttccagtgtgagagtatgggagtagtggagaagaagctggaggaaatggggatagattatgtaagggcattagtagaagaaggagggatccaagtggaccagctcttcttccatgaccctgatggcttcatgatcgagatttgcaactgcgatagcctccccgtagtccccctcgtaggagaaatggctcggtcctgctcaagagtcaaactccaccagatggtgcagccacaacccgcagactcagatccacccaagtggtcttaccccttaatttataaacaagctcacttcttcttttataatttgtggtgtgtgtttgtgtattttggtgtgcttgggtttttgggggggaatattccaataaagggagccccatgtgaatcaagcggaatgtgagttccccttcgaggaaatgaccaaaaaaaaaaaaaaaaaaagggcggccgctctagaggatccaagcttacgtacgcgtacatgcgagtggatag

SEQ ID NO: 120555 - DNA, 849 bp, Arabidopsis thaliana
cattaaccttctttctacacaacacaaaactatatataaagatcatacatgatctttgtctctggaaaatgaaggaagacgcaggaaaccctttgcatctcacgtcactgaaccatgtctctgtcttgtgccgatccgtcgacgaatctatgaatttttaccaaaaggtgttagggttcatcccgatacgaagacctgaatccttaaattttgaaggcgcttggttgtttggtcacgggattggaatacacctcctgtgtgccccagaaccagagaaacttcccaagaaaactgcgattaatcccaaggataatcacatctctttccagtgtgagagtatgggagtagtggagaagaagctggaggaaatggggatagattatgtaagggcattagtagaagaaggagggatccaagtggaccagctcttcttccatgaccctgatggcttcatgatcgagatttgcaactgcgatagcctccccgtagtccccctcgtaggagaaatggctcggtcctgctcaagagtcaaacttccaccagatggtgcagccccaaccgcagactcagatccacccaagtggtctacccttaattataaacagctcacttcttctttataattgtgtgtgtttgtgtattggtgtccttgggttttgggtgtaatatacaattaggggcccttgtgaatcagcgaatgtgattcccttcgaggaaatgaccattctctttgctccacaagcttatataatataatcaagggaaatcatgttttacataaaaaaaaaaaaaaaaaaagggcggccgctctagaggatccaagcttacggacgcgtgcatgcgacgtca

SEQ ID NO: 120556 - DNA, 510 bp, Arabidopsis thaliana
  unsure (1)..(510): unsure at all n locations
nnnnnnnnnnnnnnnnnnnnnnnnnnnnnnnnnnnnnnnnnnnnnnnnnnnnnnnnnnnnnnnnnnnccacgcgtccgcattaaccttctttctacacaacacaaaactatatataaggatcatacatgtaataacgtcctgcaactattacaatcattctcgcttgaattaacgtggacgtcattgtttttggattgttaatcaaaggcggcgttacttttttttaatataattgtttctttaggatctttgtctctggaaaatgaaggaagacgcaggaaaccctttgcatctcacgtcactgaaccatgtctctgtcttgtgccgatccgtcgacgaatctatgaatttttaccaaaaggtgttagggttcatcccgatacgaagacctgaatccttaaattttgaaggcgcttggttgtttggtcacgggattggaatacacctcctgtgtgccccagaaccagagaaacttcccaagaaaactgcgattaatcccaaggataatc

SEQ ID NO: 120557 - DNA, 676 bp, Arabidopsis thaliana
  unsure (1)..(676): unsure at all n locations
nnnnnnnnnnnnnnnnnnnnnnnnnnnnnnnnnnnnnnnnnnnnnnnnnnnnnnnnnnnnnnnnnnnnnccacgcgtccggtctttttcactcccacacgttctgctccagcgatactgtgagagaatctctgtgtggttctgaattcttaggctggaattgaattctgaaatggcggaggagtacaaggaagcgttgttggagaagcagaactatcacgacggatgtcccggctgtaaggtggagcagatgaagcagctccggcgaggatatccttacctcgagctttccttcgtttggattatcgtcctctccacttctctaccaatttcctcactctatcccttcctctactatatgattgaggattttggtgtcgcaaagacggagaaagatattgggttttatgctggttttgttggttgctcttttatgcttggaagagcactgacttctgtgttctggggaattgtggctgatcgttatggaagaaaacccattatactcttcgggacctatctcaattgcaaattttcaacgctcctttttggcttgggcccaaatttttggttggcaattgacaaaggttnntntttggggggtcaactttttcntggaccantaagccctnaacnaaaattcggggggatcaaagnccccaattcccctttngctc

SEQ ID NO: 120558 - DNA, 593 bp, Arabidopsis thaliana
  unsure (1)..(593): unsure at all n locations
nnnnnnnnnnnnnnnnnnnnnnnnnnnnnnnnnnnnnnnnnnnnnnnnnnnnnnnnnnnnnnnnnnnccacgcgtccgctgacttctgtgttctggggaattgtggctgatcgttatggaagaaaacccattatactcttgggaactatctcaattgcaattttcaacgctctttttggcttgagctcaaatttttggatggcaattggcacaaggtttcttcttgggagtttcaactgtttgcttggaacaatgaaggcctatgcatcagaaatatttcgtgatgaatatcaagctaccgcaatgtcagctgttagtactgcttggggcattggactgatcattggccctgctcttggtggttttttagctcagccggcagacaaatatccaaatgtgttctcccaagaatctctttttggcagattccggtatgcattgccttgctttaccatttcaccttttgccttgcttgtgacagtactatgctgcttcatcccggacacactgcacaatcataagctggacagcttatcacatgatgattcatacgatatacatgaagctgcatctcatgaatcatctccatctac

SEQ ID NO: 120559 - DNA, 997 bp, Arabidopsis thaliana
  unsure (1)..(997): unsure at all n locations
nnnnnnnnnnnnnnnnnnnnnnnnnnnnnnnnnnnnnnnnnaggcagagagagaatttgcttggcttggcgaccccatggagctctggatttgtgtgtgagtgagtagatcgcgcaaagaatctgaaaatggcgtcaacggaaggccttatgcctatcacccgggcttttctcgcttcttactacgacaaatatcctttctctcctctttccgacgacgtttctcggctttcctctgacatggcatctctgattaagctattgaccgtccaatctcccccttcacaaggggaaacttccctgattgacgaagcaaaccgtcagccccctcacaaaattgatgagaatatgtggaaaaatagggagcagatggaggagatactgtgtcttctgtcaccatctcgctggcctgttcagcttcgggaaccttccacatccgaagatgctgaattcgcttctattttgcggactctcaaggacagttttgataacgcattcactgctatgatttccttccagacgaagaattccgagcgcatattcagcacagtaatgacctacatgcctcaagatttccggggaacgctcatcagacagcagaaggagaggtcggagaggaacaaacaggcggaggttgatgcgttggtcagctctggagggagcatacgcgacacatatgctcttctttggaagcagcaaatggagaggaggaggcagttggctcagctaggctctgccactggtgtctacaaaaccctggtcaagtacttggtaggggttccacaggtgttgttggattttattcgacaaataaacgatgatgatgggccaatggaagaacagcgagaacgttatggaccccctctatacagtctcacaaaaatgggtgatcgcaattcgggttttcctaacacttctgtgggaaagatatgataccttcaaactgagtaaagaccaaatgaatctcctgtctgaagctgctatagtctacacttctg

SEQ ID NO: 120560 - DNA, 1803 bp, Arabidopsis thaliana
  unsure (1)..(1803): unsure at all n locations
cctgcaggtaccggtccggaattcccgggttgacccacgcgtgcgaaacaatgtgagtgggggaagatggagagtggtatgggaacaacaacaattgatgctatgacatacaacaacagcaagaaatttgtgtgagagtagagagtcttgcttcagttgaatcaaagattggtcctttttttttttcgttttctctttcctgctttttttgtttgtagtttctgatctctcaggaaggctttttataaatttgccctcaatttctccgtccctactactctttttgatcaatttctacgggaaaaagcaccaatctttaaacccgggcatgtccttgtaatcgagtatgttgtgtaagtgatgaatttgtggtgagatctggtgagaagtttcctcttttttctcagattgcggtaaaaaaaaagagtttttaataaggaagagattgagattagattttatcgcttttgtttgtgtgatatgggtaacgtgaacgcgagagaagaagcgaatagtaacaacgcttctgctgttgaagacgaagacgctgagatttgttctcgtgaagctatgtctgctgcttctgatggtaaccatgtcgctcctcctgagcttatgggtcaatctcctcctcatagccctcgagctactcagtctcctctcatgtttgctcctcaggttccggtgcttccacttcaaagacctgatgaaattcatatccctaatccttcgtggatgcaatcgccatcttcgttgtatgaagaagcttctaacgaacaaggaatccctacgatgatcacttggtgtcatggaggcaaggagattgctgtggagggatcatgggataattggaagacaagtcggctgcagagatctgggaaggacttcactatcatgaaagtgttaccttcaggagtctatgagtacaggttcattgtggatggacagtggaggcatgcccctgagctccctttagctagagatgatgctgggaacacttttaacattttggatcttcatggctatgtccctgaagacattcatagcatatttgggtttgagcgctcgcaatctccagagaatagttacagcaacttgcttctcggagctgaggactactctggaggaccgcctgtggtgcccgggcacctacaaatgacactgctgaacttgccggcagccaatcctgacattccatctccgctgccgagacctcagcatgtcattctcaatcatctttacatgcagaagggcaaaagtggtccttctgtggttgcgcttggttccactcaccgatttctagcaaagtatgtaccatgtggtgctctacaaatccctccacaggtgagtgaagatgatgcaattccaatgggtagtgggcatgtggatcctcggcatgctcttatctattttggtgttaaaacgttaactcatggagtatgggtgaggctatatagaaaggagacacccgaagagagttatttccaggcaaagtattccctcgatacagcgaattttgttgtctttaaaagttgtcaataaggtttaccaacagaatgaagatgcagtattcagtcagtgtctgtgtaatcttttgatttgaagacttcatcatctgttttttttttagcatagaagaatgcaggaacgacttcacttgtaaaaccggcaaatcttttttatggttttgttttggggctttcaagttttcaaaaaaaaaaccccaaagnnnnnnnnnnnnnnnnnnnnnnnnnnnnnnnnnnnnnnnnnnnnnnnnnnnnnnnnnnnnnnnnnnnnnnnnnn

SEQ ID NO: 120561 - DNA, 673 bp, Arabidopsis thaliana
  unsure (1)..(673): unsure at all n locations
aaatctcattaatcctacctaaatataaatatataaagtcccttttgccattgatagcaacaaaatcatcaattaatttgcaatataacacacacttactactacatacatagtagtttgaggaatctgggaagaagctccagtggcaaagactcaacatttaagatgagaggtgggagtctatggcagctagggcaatcaataacccgtcgtcttgctcaatctgacaagaaggttgtgtcacgtcgctactttgcctctgaagctgacctgaaaaagactgctctttacgacttccatgttgcccatggaggaaagatggttccttttgctggttggagtatgccaattcagtacaaagattcgattatggactcaacggttaactgcagggaaaatgggagtttgtttgatgttgcacatatgtgtggtttgagccttaagggtaaagattgtgttccttttcttgagacacttgtggttgctgatgtggctggtttggctcctggaactgggagcttaactgtgttcacaaacgagaaaggaggtgccattgatgactcggtgattaccaaagtgacagatgaacatatctttttgggggggcaatctnncttnagggtaaggttttgnccacatttaggcncnttangggtttaanccaaggggtttt

SEQ ID NO: 120562 - DNA, 844 bp, Arabidopsis thaliana
gggaatgctgtacgcctacaggtaccggtccggaattcccgggtcgacccacgcgtgcgacaaaccctaataatctagtggcaagtacaaccttctactctgaaagtacaggagccattctctgtttggcaagaatagaaacagacccagcggacagaacccaattgcgaatgacagtaggcacgggagatcctacccttacatttgagttgaaagaatttatcaaggaacaactaattactgtcccaatgggatctcgagctttagttccagcagcaggtccagcaccacctgtagctcaaccgccaagcccagcggctttagctgatgatccaggagctatgctcgctggcttactttaaattcattgggccttcgtgttgagagagtctaatctaagtcataacggggggaaattgcaaaaacacatcccaaacgcatagcatttcacttgtaaaaacctgaactaatttgaggtgatatattctagagatgaaatccatctcttataatgatttcggaaatcccaattttatttcaaaaaaccgggaaaaaccaagccattgtttgtaaatgtgcaacaaattaggcaagacccctttcaatgtttgaacccggttttttttagcatttttccccatcaaaattgaagaaggccaaaggtccccgaaaatatttaaattcaaacccggtggatttttttttggaaaaaaaaaaaaaaaaaaaaaaaaaaaaaaaaaaaaaaaaaaaaaaaaaaaaaaagggcggccgctctagaggaacccagcctacggacgggtgcaagcgacgtcaagcttctctaaaggtcccctaaatccaaccc

SEQ ID NO: 120563 - DNA, 608 bp, Arabidopsis thaliana
caaagcttcttatgcacgctcaacccccggatccagattggcatcacagctgactggagaggacaccatggtagacttgttctcttcatgggaaacaagaatacgtctccacttacatcagttcaagctctgatactaccccctgcccacttaagactggatctgtctccagtacctgatacaattcctcctcgagcacaggtacaatctccgcttgaagtgatgaacatccgccctagtagggatgttgcagttttggatttctcctacaagtttggtacaaacgtggtcagtgccaaattacgcatcccggcaaccttgaataagtttcttcaacctctacaattgacatctgaagagttcttccctcaatggagagcaatctcagggccacccttgaaacttcaggaagtggtaagaggtgtaagacctctagctcttccggaaatggcaaaatctgttcaaccagttttcattgtgccgttatgccctgggcttgatccaaaccctattattctagtggcaagcccaaccttctactctgaaactacaggagccatgctctgtttggcaagaattgaaacagaccagcggacagaacccactac

SEQ ID NO: 120564 - DNA, 445 bp, Arabidopsis thaliana
gcgatgtataagttttatgtccgttggtgttctcatctccttttggtcttggcttcggcctaggcctacggtctgtaactgatgttccagccgctatccttactggcttactaggaattccttgggataaaagattacttgcacatgtcgcaaagtttgttttctgttattgtagaatgtaatggcgaaaatatggaatgatgggagagtaaatgtagagccaagggagagaaaaaagctagttttgattatatttgtgccgtttatccaaagcgggcgggttgcgttaggtaagaaattttgcattcattctgaacatttgtattgtgaggtcagtggttgtatcagcttgttcctgtgcctatatattttcaatctgtttctccatgaaaaaaaaaaataaagggcggccgctcaggaggatccaagcttacgtacgcgtgca

SEQ ID NO: 120565 - DNA, 1107 bp, Arabidopsis thaliana
  unsure (1)..(1107): unsure at all n locations
gccccccctcgaagtcgacggtatcgattagcttgatatcgaattcgcgggcgcgccgagccatgggttctggacgtgtccacactggtctcatctcaacacagcatgacgagactgggacctacgatgagatcgcagctgatcttaaggagcctgggatccagccagtgatcccagagaaataccttgatgagaaaaccatcttccatctcaacccatctggtcgttttgttatcggaggtcctcatggagatgcagggcttaccggccgtaagatcatcatcgatacttatggtggttggggtgcacacggaggtggtgctttctctggaaaggacccaaccaaggttgacaggagtggggcttacatcgttaggcaagcagctaagagcattgtagccagtgggctagcgaggcgggtcattgtgcaagtctcgtatgccattggtgtccctgagccattgtctgtgttcgtggacagttatggaacaggaaagataccagacaaggagattcttgagattgtgaaggagagttttgatttcaggccaggtatgatctccattaacttggatctgaagagaggaggtaatggtaggttcttgaagactgctgcctatggtcactttggaagggacgatgctgatttcacctgggaggtagtcaagccactcaagtctaacaaggtccaagcttgaaacctgtcagcctctgtttcacttctgtccagaatcagtcttgttctctgtattttaggctctttctgcctctttagtttcaactctgagatgggtttattcattttgttttcaactttgaagaaaaaagctaagcagctgggaatttatataattatttatatggtattcttgtgctaagaaagttaaattcataatatgtatttcttacttattttgagaagaaaatcatataagagaataatattcgacattagtctcctaaaaaaagattatcaatatcnnnnnnnnnnnnnnnnnnnnnnnnnnnnnnnnnnnnnnnnnnnnnnnnnnnnnnnnnnnnnnnnnnnnnnnnnnnnnnnnnnnnnnnnnnnnnnnnnnnnnnnnnnnnnnnnnnnnnnnnnnnnnn

SEQ ID NO: 120566 - DNA, 1089 bp, Arabidopsis thaliana
  unsure (1)..(1089): unsure at all n locations
taggtgcactatagaagagctatgacgtcgcatgcacgcgtacgtaagctcggaattcgtctcgagatttctttagctcaaccttcattactaatctccttttaaggtttctttcgtgaatcagatcggaaaaatggaatcttttttgttcacatctgaatccgtcaacgagggacatcccgacaagctttgtgatcagatctccgacgctatcctcgatgcttgccttgaacaagaccctgagagcaaagttgcttgtgagacttgtaccaagactaacatggtcatggtttttggagaaatcaccaccaaggctaacgttgattacgagcagattgttcgtaaaacatgccgtgagattggattcgtctctgctgacgttggtctagatgctgacaattgcaaggttctggttaacattgagcaacagagtcctgacattgcacaaggtgttcatggtcatctcaccaagaagccagaggaggttggagctggtgaccaaggtcacatgtttgggtatgctactgatgagactcctgagctcatgcctcttactcacgttctcgctactaagcttggagctaaactcactgaagttcgcaagaatggaacttgcccttggttgaggccagatggtaagactcaagtcactattgagtacatcaacgaaagcggagccatggttcctgtacgtgtccacactgttctcatctcaacacagcatgacgagactgtgactaacgatgagatcgcagctgatcttaaggagcatgtgatcaagccagtgatcccagagaaataccttgatgagaaaaccatcttccatctcaacccatctggtcgttttgttatcggaggtcctcatggagatgcagggcttaccggccgtaagatcatcatcgatacttatggtggttggggtgcacacggaaggtggtgctttctctggaaaggccccaaccaaggttgacaggagtggggctttacatcgttaggcaagcagctaagggcattggacccagtgggctagccaggcgggccattgtgcaaggctcgtatgccattggtggcctaagccattctttntgc

SEQ ID NO: 120567 - DNA, 540 bp, Arabidopsis thaliana
caactctctgcgactcatatagggaaagctggtacgcctagcaggtaccggtccggaattcccgggtcgacccacgcgtgcgggaataagagaaaagtgagtttgttgtttgtatcgatcagaaaatggcgacgtcgatgatacagaggatgttcaagcaagggacgaagatcgtctgcgtcggccgtaactacgccgctcacgccaaagaactaggcaacgccgtccccaaggaaccagttatattcttgaagccaacatcatcatacttagaaaatggaggaacaattgagatcccacatcctttggattcacttcaccatgaagtagaactcgctttagtgattggacagaaagctagagatgtacctgaatcaatagccatggattacattggaggatatgcgggtgctcttgatatgactgctagggaactccaagcttctgctaaggcatctgggtctcccatggacggttgcgaaaggacaagataccttcacttcttataacttttgtctgtcaaaggcgatggtgcgtgat

SEQ ID NO: 120568 - DNA, 1125 bp, Arabidopsis thaliana
  unsure (1)..(1125): unsure at all n locations
tgatctgccnnnnnnnnnnnnnnnnnnnnnnnnnnnnnnnnnnnnnnnnnnnnnnnnnnnnnnnnnnnnnnnnnnnnnnccacgcggtgcgcccacgcgtccggtccatgttcctcggtttatccaaatcctcattcagacttcatcaaatcgtttcttgcttccgatccgaaatttgcggcgggaaaagaagataacatcaacaaaaaaatgatttctctattcatctcaaacttttcaaacttatcaaacttatctccgacctttgataacatgaacatgaacatcccatcgaagaagatcgtaccggtaccgacaccgagtgagaaagttgtctctttggtatctcgaaccggacgagatctccaacgttacaacaccgcagggtatcgtcaagtcgtcggatgtgtaccatatagatacaagaaacacggaggaggagaaattgaagtgcttttgataagtgcacagaagaaagggaaaggaatgttattaccaaaaggaggttgggagattgatgaatcaatagaagaagctgctttaagagagacaattgaagaagctggtgttacgggtcagcttgaagaatcacttgggaaatggcaatacaaaagcaaaagacatactatgattcatgatggtcatatgtttcctttgcttgttagtcagcagtttgagatatggcctgaatctgaattcagacaacgcaaatgggtttctttgtctgaagcgattgagttgtgtcagaattccgtggatgagagaagctttggaagctttcattaaccggaaatgccagacccaataaggataatgtagcatctctgggaacaaagagctcttcatttggaagcagatgcatataattgaagagcaggtcctcaagtttagtgttctgatttgattcattcatttgttaatgatgttaggtagactaattgataataactgattgttctgaatgattgtcttcacaacatgtaatgtgtacatatataacatggatcaatctcatagatgttataacgacttggtcttcacttttgatttaataagaaaaaaaaaaaaaaagggcggccgctctagaggatccaagcttacgtacgcgtgcatgcgacgtcatag

SEQ ID NO: 120569 - DNA, 751 bp, Arabidopsis thaliana
  unsure (1)..(751): unsure at all n locations
gtccgttcggattccggtcgaccaccgtcgatttttgcgagtgtccatatagatcaagaaacacggaggaggagaaattgaagtgcttttgataagtgcacagaagaaagggaaaggaatgttattaccaaaaggaggttgggagattgatgaatcaatagaagaagctgctttaagagagacaattgaagaagctggtgttacgggtcagcttgaagaatcacttgggaaatggcaatacaaaagcaaaagacatactatgactcatgagggtcatatgtttcctttgcttgttagtcagcagtttgagatatggcctggatctgaattcagtccgacgcaaatgggtttctttgtctgaagccatggagttgtgtcagaatttcgtggatgagagaagctttgggagctttcattaaccgcaaatgccagacccaataaggataatgtagcatctctgggaacaaagagctcttcttttggaagcccatgcatataattgaagagccggtcctcaagtttagtgcttcgatttcattcattcatttgttaataatgttagtagtctaattgataatatctgaatgttttgaatgagtgtattcacaacaatgtaatgtgagcatatataaacatggctcaatatcatacgatgtaataaaaaaaaaaaaaaagnnnnnnnnnnnnnnnnnnnnnnnnnnnnnnnnnnnnnnnnnnnnnnnnnnnnnnnnnnnnnnnnnnnngtacctaa

SEQ ID NO: 120570 - DNA, 441 bp, Arabidopsis thaliana
cagaaaaccctaaacacagataaaccccaaaactcaaaaaccaaatctttccaacaatggcgtctcatctctttacccgatctcgaatctctctcctcagaaaccctaaaacccaatccgtttacctcagcttcacccatcagagccatttccggtacaccattcctctctcaagatcctctgctcgcaaccgaatcaacagatcacgacccatcaaaccatcaatcaacctccacgccgcttccaccgaatccagcaacaggaagtcctctttaccaagagaattggcgtagtccgatcccaaacactccttccttcaaccaatctctagttccattaggatttctaaatcaagctcctgctcctcgtatcagagctctttctgagacgcttgacatgaactcgctgttgaatatgtttgcggattggactgtttcgcag

SEQ ID NO: 120571 - DNA, 1317 bp, Arabidopsis thaliana
  unsure (1)..(1317): unsure at all n locations
atggannnnnnnnnnnnnnnnnnnnnnnnnnnnnnnnnnnnnnnnnnnnnnnnnnnnnnnnnnnnnnnnnnnnnnnnnnnnnnccacgcgtccgcggacgcgtggggaaaaatcgagtcaagacggaaagctaagacagtacaagaaggatacagtgaacataattcaggaatatttcttatcagatgacattcctgagctaatccgcagtcttcaagatttaggggcacctgaatataacccggtgtttctgaagaggctcataactcttgctctagacaggaaaaacagagaaaaggaaatggcttcggttcttctttctgctcttcacatggagctattctcaactgaagatttcataaacggtttcattatgctcctggaatcggcagaagacacagctttagatatcatggacgcatcaaacgaacttgctctgtttttagctagagctgtgattgacgacgtcttagctccacttaaccttgaagatatctcaaccaagctgcctccaaaatcaaccggaaccgaaacagtccgctcagccaggtctcttatctccgccagacacgcaggagagagactcctaagaagctggggaggtggaaccggctggatagtggaagatgcaaaggacaaaatctcgaaactcctagaagaatacgaaacaggaggagtaacatcagaagcttgtcaatgtatccgcgatctagggatgccttttttcaaccacgaagtagtgaagaaagctttggtgatggcaatggagaagcagaatgatcggttactgaatctgcttgaggagtgttttggtgaaggattgattacaactaaccaaatgacgaaagggtttggtcgtgttaacgacagcctcgatgacttgtcgcttgatataccgaacgcgaaagagaagtttgagctgtatgctagtcatgccatggacaatggttggatccttcccgagtttgggatttctgcaactcagtgattagtggttctcttatcagtttcttgtgtttgtgcttacgatactttcctcactatctacatatatgtatggattcagttagtagataaacatgagatgtttatatgttcatgtgtttctgtctggttgttgtgttttgtctttgtactgatatcttttagtgtgttctaatttctgatggatttttgttccattgaaaataagttattagcatggttaaaaaaaaaaaaaaaagnnnnnnnnnnnnnnnnnnnnnnnnnnnnnnnnnnnnnnnnnnnnnnnnnnnnnnnnnnnnnnnnnnnnnnnnnnnnnnnnnnnnnnnnnnnnnn

SEQ ID NO: 120572 - DNA, 770 bp, Arabidopsis thaliana
agattattgtaactgcagaaaagagctatctctcagctcctcaccatgcagaactagtggagaagaaatggggaggtagtactcacactacagtagaagaaacgaagaaaaagatatctgaaatcttgaaggaatacgtggaaaacggagacacttacgaagcttgtagatgcatcagggaattaggtgtctcgtttttccatcatgaggttgtgaagagggctttggttctggcgatggattctccaaccgctgagtcacttgtactaaagctgttgaaggaaactgctgaagaaggactgatcagttcgagtcaaatggtgaagggattcttccgagtagcagagagtctcgatgaccttgctctagatatcccatctgccaaaaagctgtttgattcgatagttccaaaggctatttctggaggctggctcgatgattcatttaagataacctctgatcaagatggagaaaaatcgagtcaagacggaaagctaagacagtacaagaaggatacagtgaacataattcaggaatatttcttatcagatgacattcctgagctaatccgcagtcttcaagatttaggggcacctgaatataacccggtgtttctgaagaggctcataactcttgctctagacaggaaaaacagagaaaaggaaatggcttcggttcttctttctgctcttcacatggagctattctcaactgaagatttcataaacgggttcattatgctcctggaatcggcagaagacacagcttta

SEQ ID NO: 120573 - DNA, 473 bp, Arabidopsis thaliana
ggtccacgcacgcgtccgtatcaaattccctatcaaagtgaatgactttcttctccaaaatcgatttctgaaacatcccatttcttgatttccctctttgtcgcaaacccaacaaagtagagcaaaaccctaaaacggaaaccttccatggcgattatctctgaggtagaagaagaaagcagtagcagccgacccatgatatttccctttagggcaacactcagttctgcaaacccattagggtttttggagaaagttttcgactttctcggagaacagagcgattttctcaagaaaccctccgtggaggacgagatcgtcgtcgcggttagggcggcgaaggagaagttgaaaaaggctgagaagaagaaagctgagaaggagagtgtgaagcctgtggagaagaaagccgagaaggaaattgttaagcttgtggagaagaaggtagagaaggagagtgtcaagccaactat

SEQ ID NO: 120574 - DNA, 441 bp, Arabidopsis thaliana
agctcggaatgaggttcgttttcgtggttgggttacacacccagcagcggggctcgcatttaattgcaccttcttgttattcggatcagtcatccagctcattgcttgcgctagcaatatatattacataaacgataggttagacaagaggacatggacttatatatttggggcttgctgtgccacgaccgtgttcataccatctttccacaattaccggatttgggctttcctcggcaagagcgccgacccgcccaagatgcagcaaacacccacaacgctcacagaaacgccaactccgagtcgcgcgcacgcgcgacgaggggtagcgcgccgtggagcggccagtaaatgtaccaaagccactgacctctgcccccccgatgacacaagccccactcagggacactcgtgcccggtgcttaacctgcgagacctcgt

SEQ ID NO: 120575 - DNA, 547 bp, Arabidopsis thaliana
gggatgttctggaaaactctagctcaagagcaaggccattgccatggcggagatcatttggacgaccagcttcagttcctgattctgttatcttccagcgaaagcttcagtggcgagctagcatatacactaagcaattacgagctgttcgattacattcaaggcgcttggaactaagtttggcggtgaatgattacaccaaagcaaagataacctgaaggaattgagccatggattagaagagagcttcaggcagtccttgggagatcctgatccctcagttaattggtcaattttgcgtcagcctcttttcattccaaaaggcctttgagaggagggattaatcggccaaaacccgggcagacccgggatgttggtggaagatgaagtctcctctcttcgaaaattcttgtctgataaggtggatatattttggcatgaactaagatgttttgcggagagtatactcacgatggagacttatgatgcagtggttgaatacaatgaggtggagtaatagcagtaaaaaaaacagataaccgagcac

SEQ ID NO: 120576 - DNA, 816 bp, Arabidopsis thaliana
  unsure (1)..(816): unsure at all n locations
gcttcaggcagtccttggagatctgatcccctcagttatgttcattttgcgtcagctcttttcatcagaggacgacaatccggtaggcgagagagagagattaatcaatcggcgacctttttaattcgctcgtaattcgttttgattttcgtgtttttgcaacgaatttaacaacttctgtgtgtgtgggtgtgagtttcttaagagaagtcagaaacaatgattgggttgtttaaagtaaaggaaaagcaaagagaacaagctcaaaatgctactagaggaggagcttctgttaagaagcaatctgctggcgaacttcgtcttcacaaagatatatcagagttgaaccttcctagctcttgttcaatatcttttccaaatggcaaagatgatttgatgaactttgaagtatccattaaacctgatgatggatattaccacaatggtacgtttgttttcacattccaagtctctcctgtgtatccacatgaagctccaaaagttaaatgcaaaaccaaggtttatcatcccaatacacaagccggagcatccgaatgtagaactaacctcctcttcctatgtctctatttgcatgcttcgttttgctcttgaattatcttctattgtggatctcgtacttttcatttttctcttcttcaagaccaagcaaatcattgtttaaatctgttgtcttgcatttgtatttttaaaaagagaaaaacttgcttttaaaaaaaaaaaaaaaaaagnnnnnnnnnnnnnnnnnnnnnnnnnnnnnnnnnnnnnnnnnnnnnnnnnnnnnnnnnnnnnnnnnnc

SEQ ID NO: 120577 - DNA, 983 bp, Arabidopsis thaliana
  unsure (1)..(983): unsure at all n locations
attattgcaaccatttctctgctgtttctttttcttttagcttcagaggacgacaatggggtgtgctagagagagagatggatcgatcnncnacctttttaattcgctcgtaattcgttttgattttcgtgtttttgcaacgaatttaacaacttctgtgtgtgtgtgtgtgtgagtttcttatagtgtagtcagaaacaatgattgggttgtgggaagtataggaaaagcaaagagaacacgctcaaaatgctactagaggaggagcttctgttaagaagcaatctgctggcgaacttcgtcttcacaaagatatatcagtgttgaaccttcctagctcttgttcaatatcttttccaaatggcaaagatgatttgatgaactttgaagtttccattaaacctgatgatggatattaccacaatggtacgtttgttttcacattccaagtctctcctgtgtatccacatgaacccccaaaagttaaatccaaaacccaaggtttatcatcccaatatcgatttggaaggaaacgtttgcctgaacatcttgcgtgaagattggaaacctgttcttaacattaacacagttatctacggactcttccatctgtttcacggaacccaattctgaagatcccttgaaccatgatgctgcagcagttttgagggataacccaaagctctttgagaccaatgtttcgcagggccatgaccggtggatatgtcggtcagacctttttcccgcgttgtatctaacaaagctctggtttgtcttcttcaaggaaaaagataagaaccaaacccttttgtccgccattgtatttctcctctttcttcaaggaccctcgtttgtttgtttgaccttgtaaaattacattccgcgttaaagtaaccctttccttatatcgaaatcttgtcaactttaagttcgtgagaattcgataaaggagactaaaaggaattgnataacatgttgacgtn

SEQ ID NO: 120578 - DNA, 447 bp, Arabidopsis thaliana
  unsure (1)..(447): unsure at all n locations
ggatttaacaacttctgtgtgtgtgggtgtgagtttcttaagtgtaagtcagaaacaatgattgggttgtttaaagtaaaggaaaagcaaagagaacaagctcaaaatgctactagaggaggagcttctgttaagaagcaatctgctggcgaacttcgtcttcacaaaggtatataaatgccttgttgatcttttttttgttcttgcatctccaagtttcaatttttggtgttttttccgattttgaactgtgcagatatatcagagttgaaccttcctagctctttgttcaatatcttttccaaatgggcaaaggtgatttgatgaacctttgaaggatccctttaaaccngnatggtgggtnattnccncaatnggancggtttnttttcncaattccaaggcnttnccggggantccccatgngggnccaaagnttaattnaaa

SEQ ID NO: 120579 - DNA, 446 bp, Arabidopsis thaliana
  unsure (1)..(446): unsure at all n locations
cnnnnnnnnnnnnnnnnnnnnnnnnnnnnnnnnnnnnnnnnnnnnnnnnnnnnnnnnnnnnnnnnnnnnnnnccacgcgtgcggtgttttgttgtgccacaggcgtaacaggctttccgcttcaaccacctcttattccttaccgttaaagaagcttagagtctttggtagctatcaagcttcatatcatcatcttcttcttctcaggtcaagagccattctatggtttaaaggatgctcctggctaatctcagcacttagtttctctccctctgctctaaaagctaccccattttatggaatttggaggtggctttttaagcagatcccaatgggatctcctgtttcagatggtgatcatgtcgtatttgtcatctctcaccttcttgcaattgcatcttctcgagagaatgggtttctctttgagagatattgctaatggagca

SEQ ID NO: 120580 - DNA, 570 bp, Arabidopsis thaliana
  unsure (1)..(570): unsure at all n locations
nnnnnnnnnnnnnnnnnnnnnnnnnnnnnnnnnnnnnnnnnnnnnnnnnnnnnnnnnnnnnnnnnnnnnccacgcgtgcggagagttttaaagtctattgtgctattaatgatggaatcatcaatctcattgacaagttctttgaaatggcaaaacatgaagccatcacttcccttgaaatatacaagcgtgcgggtcagcaggctcgtagcctttctgatttctatgaagcctgcaaaggattggaacttgcaaggaattttcaatttcctgttctaagagagcctccacaatcttttctgacaacaatggaggagtatattaaagaagcaccgcgtgttgtcgatgtcccagcggaaccactgcttctaacatataggccggatgatggactgactaccgaagatactgaaccgtcgcatgaagaacgtgaaatgttaccttcagatgatgtcgttgttgtatctgaagaaacagaaccttctcccccgcctcctccttcagccaacgctcagaacttcattgataccgatgatctatggggtctgaatactggtgctcctgatacat

SEQ ID NO: 120581 - DNA, 574 bp, Arabidopsis thaliana
ggaaagctggcccgcctgcaggtaccggtccggaattcccgggtcccccacgggtcggggttatgatccgatcccttctcaatctcacggaggggaaaagattcctccaattcaaatctctgtctgtgtctctgtctctcaactttcaatttctgagagagtcggaaatattctccagatcgcctaaggcaaattcgttttccgattcggcctagcgacggcgagagaggagaggaagaggcaagttgattgaccggagaagaagacgaagccgttcttggagaaaatgataacgattccttatttaaccgctgtatccacctacttcagctatggattgctctttgcttttggtcagctccgagatttcttccgtcgcttcattgattggtggttcactagcaatctccagggatacgcgccgatctgtttggggcatgaggatttctatatcaggcgattgtatcatcggattcaggattgttttgaacgacctatatcgagtgcacctgatgcttggtttgatgtggttgagcgctactctaatgacaacaacaagacgcttaagcgaaca

SEQ ID NO: 120582 - DNA, 418 bp, Arabidopsis thaliana
gtgcgctgaatctctctgcatctatggaggctacgaaagaaagagttggcttgctcgatacgatcctcccgccggcacttgcagacgccggtctcgaggattgtgctctgccgccggaatctattcaggaagcatttcgcaaagccgctaacgccgtgaagtctcgcgcagcgtcgaatattcgaccacgaggaggaagacggttgtttagcggatcctattccggaaactgcagacaagattatcgttggaggagacaatgaaagggatactgggccgtgtttagctggaaaaggcattgagaagttggctgaatcgaaacaggccggagatttggtggtggctggcgaaggagaagaagggaagagctgcgttgatggtttgaaggatctagatgttgaaggtattgagagaagca

SEQ ID NO: 120583 - DNA, 727 bp, Arabidopsis thaliana
ttttgattccatatactgaatatggactcattctacttctgtatatacacatgggatccaaacttaaactttaccctctcttaaatcactcatccgtttttcacccagacagtcgttaccaatcggcccctacaatggaggaagagcaacaacaacttcgtgttctcttcgcgaaatacgagatgggaaggttactaggcaaaggaacattcggaaaagtttattacggcaaagagataacaaccggagaaagcgttgcaatcaaaatcatcaacaaagatcaagtcaaacgtgaaggtatgatggaacaaatcaaacgagagatctcaatcatgagacttgttcgtcatccaaacatcgttgagttaaaagaagtcatggctacaaaaacaaagatcttctttatcatggaatacgttaaaggcggtgaacttttctccaagatcgttaaaggaaagcttaaagaagactctgctcattttacaagacggtttgcttcatactcagtgtggaactccggcgtatgttgcaccggaggttttgaggaagaaaggttacgacggagctaaaggtgatatttggtcgtgtggtattatcttgtacgtgcttctcgctggattcttaccgtttcaagatgagaacctaatgaaaatgtatcggaagatcttcaaatcggagtttgagtatccgccgtggttttcaccggagtccaagaggttgatttcaa

SEQ ID NO: 120584 - DNA, 363 bp, Arabidopsis thaliana
agtcatctccttcttctttcttgatctagctagcggaaaatttgacaatggcaagaatcgggagctttctcattcttctgtccctcacttacgctcttactctctgcatctgcgacgacgacgagagtaactttggcggcgacaaagggaacctcttcccaggtttctacaggagctcgtgccctagagccgaggagatcgtgaggtccgttgtagccaaggctgttgcaagggagactcgtatggctgcttctctcatgaggctccatttccacgattgtttcgttcagggttgtgatggatcgttgcttctagacaccagtgggagtatagttactgagaagaactctaaccctaacagca

SEQ ID NO: 120585 - DNA, 457 bp, Arabidopsis thaliana
  unsure (1)..(457): unsure at all n locations
ataaaacgaagatgtgaagagtgaagaccgagagagatttatagcagaggaaagtgaaatcatgaaagggattctagggtttgaatacgggatagttcaggcgccattaggaccagatatctccggaccagagcttgtagccgccgtcgctaatgcaggagggattggtcttctcagatgtcctgattgggagtgtcctgattacttgagagagcttataagaaagacaaagacattgacagagaaaccatttgggatcggtgttgttcttgcgtttcctcatgatttgaacattaagacaatcttagaagagaaagtggctgtcttgcagctttattggggtgattgttcacaggagcttgtggatgatgctcactttgccggtgtcaaagttattcctcaggtggggaatgtcgaagaagctagaaaggctgttgctgtangagtagacgccatt

SEQ ID NO: 120586 - DNA, 591 bp, Arabidopsis thaliana
cggacgcgtgggttctgggagaacttaactgttgtcgtcaatgcactggataatgtgaatgcgaggctctatgttgattcgaggtgcttgtatttccagaagcctctccttgagtctggaactcttggtacaaagtgcaacacacagtcggttatcccacatctaactgaaaattacggtgcctcaagggacccaccagagaaacaggcccccatgtgtacagtgcattccttcccgcataacattgatcacttgttaacttgggctcgctctgagtttgagggtctgctggagaagactcccgctgaagtgaatgcatatctttctagcccagttgagtacactaactcaatgatgagtgctggtgatgctcaggcgagggacacattggagaggattgttgagtgccttgaaaaggagaagtgtgagaccttccaagactgcttaacctgggcacgactgaggtttgaggattactttgtgaaccgtgtcaagcatttgatatacacatttcctgaagatgctgtgactagtaccggagcttcattcttgtctgctttaaaaagatttcttcttccactccagtttttg

SEQ ID NO: 120587 - DNA, 398 bp, Arabidopsis thaliana
agggaagaagcttgacgctttgcttggtcgcagtttcaagaccaacaagttcaagtctcttatcaccttagctctcacaaggctctctattctcaagaaccagcgtcaagccagactctctcaagccatctctgatgtcaccgagcttcttaagctcggccaacatgagcacgcttaccatagagtcgatcaagtcgtcaaagaccaaaacactctcgacgttctcttcttcatccatggctacttcactctctgtctcgatcgtattcacctctttgaacacaacagagattgtcctgaagagcttctagaagctgtttcgggtttgctatttgcagcttctagaatcggtgaattccctgagcttcaagagattcgtaatgttttgatttcgcgtt

SEQ ID NO: 120588 - DNA, 637 bp, Arabidopsis thaliana
  unsure (1)..(637): unsure at all n locations
cccacgcgtccgctctctctctgctccatttctctcactttcttcacatctctgaagctcttcgtcacgcatctacaatggcatcgatgatgcaaccgcagatcatactgctgaaggaagggacggacacatctcagggcaaagcgcaactagtaagcaacatcaacgcttgcactgctgttggagatgtagttcgaaccacgctcgggccacgagggatggacaaactcattcacgacgataaaggatccgtcaccatttctaacgatggtgctaccatcatgaagctcctcgacattgttcatcctgctgctaagatcctcgtcgatatcgccaaatcccaagactccgaggtgggtgatgggacaactacagtggttcttcttgcagcagagtttttgaaggaagcgaagccatttattgaggatggtgttcacgctcagaatctaattaggagttaccgcacttcaagcactttgtcaattgccaaggttaaagaactcgcttttagcatcgaagttaagagtttatagcaaaagaaaggtntattggctaaaggcgctgttactactctatcatttaagcttatctgtggaaaaaatgatttattttctacaattgtttattatttttattt

SEQ ID NO: 120589 - DNA, 679 bp, Arabidopsis thaliana
  unsure (1)..(679): unsure at all n locations
nnnnnnnnnnnnnnnnnnnnnnnnnnnnnnnnnnnnnnnnnnnnnnnnnnnnnnnnnnnnnnnnnnnnnccacgcgtgcgcgccataactctctctctctctcccacttcccacagagagacacattcatgccagcaatgccaggtctcgtctcagtcaaaactccttccgatacaccgccgctacgtgtagccgtaccagacacgcaacctctctcaaacccgccgcgaactccgatgaagaaaaccccttcctctacaccatctcgatccaaaccatcaccaaatagatccaccggcaaaaaagattccccaaccgtatcctcctccaccgcagccgtaatcgacgtcgacgatccatctctagataatccagatctcggtcctttccttctaaaattagctcgtgacgctattgcttctggtgaaggtcctaacaaagcattagattacgcgatccgagcaactaagtcctttgagagatgttgcgccgccgttgctccgcctattcccggtggtagcgatggtggacctggtcttgatctcgctatgagccttcatgttctcgctgctatttactgtagtctcggccgatttgatgaagctgtaccacctcttgaacgagctattcaagtccctgaaccgactcgtggccctgaccactctctcgctgcgttttc

SEQ ID NO: 120590 - DNA, 724 bp, Arabidopsis thaliana
  unsure (1)..(724): unsure at all n locations
cgcgtccgaatttggcttttatcatcgccgccgggacacaacacaaagaggggcttagatttgtgctttcgagaagtgctttgatctctcttctccattttcacttctaatcggagatttctcttagggttttgttattcgttgagagatcgaattaaaaacttgtgaagaaatctctagggatcgtaatcgttgttggtgtggggtattacactgattccggtttgaacctgaatcgtatctatcaatcgatggcatcagaggatgtgaaaagaacagaatcagcagctgtgtcaacgatcgtaaatctggcggaggaagcgagggaaggagtcaaagctccgagttatgcttttaaaagcatctgcaagtctctttttgccggtggtgtcgctggtggagtgtcacgaactgctgttgcacctctggaaaggatgaagatattacttcaggtccaaaatccgcataatataaagtacagtgggacagtccaaggattgaagcatatttggaggaccgagggacttccgtggactnttncaaaaggnaatngcaccaacttgtgctcggatttgttcctaattcgggctgttaaatttttcaagcnnatgggcaagcttcaaaattggattactgtnacatgtatnggnagngggcccgnaatgnaaattncccaacttacttctcttttnnggggttgngnctngngaaccncttggggtta

SEQ ID NO: 120591 - DNA, 580 bp, Arabidopsis thaliana
ggaacccctgttcttacacattttcgaccccgtgggaacaaacacggcggttcactgccattttgctgtgtcaagaaagtcaatgcgacggagcttgacaagaatatttcctcatctgctgtagactcagagcagaaagggaagttggatgatgcacctaattcagggacagagaatggcaaaacagtacggaaggtaacaagaatgattccacgtcccaaacaaccgaaaaagaaaattttgcttaagaagaagttaaaaatcggggttgtgtcagcaacttacccaacaaaagacgatgaagaaattgttccttccttggactctagtgccaatcaacttctctgccagagatgtcactgttcgttgaagagcaccagcatcgatgacaacccaccttcatatacttctagtcataatcctaagatttgcacagatagtttgagctctgtttcaaataaagaagctcatcaaggatctgacgagaactcctctggctcgtgtaatgtcagtcaaagctctgaagctgacattgtcataatgaaacaagatgtttcctctagcaataatagtggaatcg

SEQ ID NO: 120592 - DNA, 531 bp, Arabidopsis thaliana
  unsure (1)..(531): unsure at all n locations
cttcgcttctcgtctctcttatcagtcttctcttttcacggctacaaggctaattgagagtgtcccttgcgttagagtttgttactagcttttttcgtctgaaacatggcgaattttgccaaaccagagaacgcgttgaagcgtgctgatgaattgatcaatgttggacagaaacaagatgctcttcaggcgcttcatgatctcattacttccaagagatacagagcttggcagaaaccgcttgagaagatcatgtttaagtatcttgatctttgtgttgacttgaagaggggtcgattcgctaaggatggattgattcagtatcgtattgtttgccagcaagtgaatgtcagttccttggaggaagttatcaagcacttcctacatcttgctactgacaaagctgagcaagctcggtctcaggcggatgcccttgaggaggctcttgatgttgttgcccttaagctgttggaagcntcgggttncactaagaatttcantggggnagggaaananaggntnccccnngca

SEQ ID NO: 120593 - DNA, 782 bp, Arabidopsis thaliana
tcgtccacgcgtccgcttcaccattgccactaacgacgaactctcttgtctctgaaatggaggttccaaaggagcagatcgcgactttaatagagcatgggctttacgattctgctgaaatgctcggctgctttctcgtttcttctcctactgttagtgccgaaactagtcctcagctcaaggcggagaatttgattctactgggtgatgctttatttcatcagagagaacaccggagagctattcatacgtacaagcaagcgttgcatcattacacaaggattccgaagcaaagctccggtatttcgaggagttcattatctttatctaccagatcatctgtgaatgcctccagcatttctgctattaatgagaacgaggtgagattcaagattgcttcatctcactttgctcttaatgaaacaaaagctgcgattgctgagatggaatctgtcaagaccaggagcttagagatgaatatactgatggcaaagcttcatcgaaattctggatacaaccgtggtgctattgctttttataaagagtgtttaaggcagtgtccttatgtacttgaagccgtcataggtttagctgaactgggagttagtgcaaaggatatcatatcatcgtttactcagacttcaaatagaagtgcaaaggtttcactcgatcagatagatcctacccgctggttgcaacgttatgtagaggcccagtgttgtgttgcttcgcatgcttacaaaggggcgctggaactctttgctgaactcttacaacgattt

SEQ ID NO: 120594 - DNA, 504 bp, Arabidopsis thaliana
  unsure (1)..(504): unsure at all n locations
atgatacgtcnnnnnnnnnnnnnnnnnnnnnnnnnnnnnnnnnnnnnnnnnnnnnnnnnnnnnnnnnnnnnnnnnnnnnnnccacgcgtccgagagaatctattgggaagaatcgagtcatgattatggagtgtttgtgaaggaattaggtgttttgagaagtaaagctgatggagctaggtctagagaagaagcttttgatggacatatggctattggtagggttttatatgagcatcagttgtttaaagaagctcttgttagcttcaagagagcttgtgaattgcaaccgactgatgtgagacctcatttcaaagctgggaactgtctttacgttttggggaaatgcaaagagtcgaaagatgagtttttgttggcgttggaagctgctgagtcgggcgggaaccaatgggcttatttgcttcctcagatttatgtcaatctcggtatcgcgcttgaaggcgaaggtatgggtttgagtgcttgtgagtattatagagaagc

SEQ ID NO: 120595 - DNA, 466 bp, Arabidopsis thaliana
agaccacgcgtccgcccacgcgtccgcggacgcgtgggctttcttctttctctaaaatcttctaagaataaccattttctaaagatatcttttaacgagacaacaaacaacagaaaaacacacaaaaacacaaaacttctgtttccctgtttctccggattctctccggctctgagctttcggcttctcctctccggagatgttactctgcttccctcttttgtgttctttttgttttctgggtgaatattgtatgaacctttgactgggatttttccgaagaagaatcccagacgacgtaatttttctccaagctatggctgttgaagagatggagaagaagatcaaaggaagccaagagacggagctacataaaaacgacttatcaatcgaagacccatctccaagatgcgtgcttgaaattccggtaatgagttcagattccgataacagcagcagtagtagg

SEQ ID NO: 120596 - DNA, 889 bp, Arabidopsis thaliana
atctcctttgaaaatatgtgtttcatggaggagaaacaccaagtgagcaacaacaacaacaaccagtttgggatgacaaactccgttgatgctggatgtaatgggtatcagtatttcagctctgaccagggtagtaattctttcgattgttcggagtttggttggagcgatcaagctccgataactcccgacatctcttctgcggttatcaacaacaacaactcagctctgttctttgaggaagccaatccagctaagaagctcaagtctatggatttcgagacaccttacaacaacactgaatgggacgcttcactggatttcctcaacgaagatgctgtaacgactcaggacaatggtgcaaaccctatggacctatggagtattgatgaaattcattccatgattggaggagtcttctgaagagatccagtttcatgtaaataaggctgcatgtttgtgagtttcccgcatcgttcgtttatcaacctccaaaactttctaatgtctgttacttgcatcttcttctgctgtctctgtctgtctctctcaggagttcctgtttgcattgcgagaagccatgagcctctatcttgagggtagttgtgatgaagttaagtagaggcttatttttaggggttgtggtagtttttgttttagtgaatcttttgaattcgtttgtgttttgtttttgttactttatgccccaaaactcctttaacatttgtcataatgtgtttgaacctctcatctgtttaatcaaataaatcttctttgtatgctaaaaaaaaaaaaaaaaaagggcggccgctctagaggatccaagcttacgtacgcgtgcatgcgacgtcataagtcttctataggtgcacctaaaagctatatccgc

SEQ ID NO: 120597 - DNA, 537 bp, Arabidopsis thaliana
  unsure (1)..(537): unsure at all n locations
tttgtttattggtagtcagcgacacggaactcattaactttactcttctcactggtcaatcgtcggagataatcgggtgatcggcgatggagaatacggacgtcttcttggggctgcatgatttcctggagcggatgcgcaaaccctccgccggcgatttcgtcaaatccattaaaagtttcattgtttcattctcgaacaatgcaccagacccggaaaaagattgtgctatggttcaggagttcttttctaagatggaggctgctttcagggctcatccactttggtctggttgttctgaggaggaattggatagtgctggagatggcctggagaagtatgttatgacaaagctatttactcgggtgtttgcttcaaacactgaggaggttatagctgatgagaagctttttcaagaagatgtcattggttcaacaattcatttctcccccgagaatttggatatacaaccaacttttccaaaatgaatcgccatggcttcttgcttaaaaagggcnccnnaggtaancatgntgc

SEQ ID NO: 120598 - DNA, 454 bp, Arabidopsis thaliana
caaaaacactttccttttcctctcatcaagaaactccctaatccgacgtcgttcgttttaattcagtgacacaatctcccacatcttcaaaccctttgaaaccagcgattacagagatgcaagatcctcatgtcccatcttctccaactatctcctccgtctcttcctccgatcttgatactgagtcaacaggatcgttcttccatgacagaagcatcacacttggaacgcttatgggatttagtttcactgcaactatgccgatgccatttagagcctcttcacgccgccacgtgtcaccttccgtcgcaatctcacgagcttctagctccaatgcaagacgcaaccaccagagaaagcgtcctccttcaaattcggctgagcctgagccgcatcgccgccgtaaatggtggcggttttgccgagatgacgatgacgacgccgccggaaatgg

SEQ ID NO: 120599 - DNA, 808 bp, Arabidopsis thaliana
  unsure (1)..(808): unsure at all n locations
cgggnncccncgtccccctttntnaattngccacttacccnngtaattntcccccggccccaaatcccacggtttcatcagtggtttccctgaggttccaaaaccccagtagcccaaagaggagtccagttatcaggtggcagaaacagaggatcgcgatagcaagagctgtgctcaagaaccctacagtgttgcttctagacgaagcaactagcgcactagatgcagaatcagaatgcgtgctgcaagaggcgttagagaggctcatgagaggtcggaccaccgtggtagttgctcaccgcttgtccaccataagaggtgttgattgcattggtgtgattcaagacgggcggattgtggagcaaggcagccattcagagctcgttagccgaccagagggagcttattcaaggctgttacagcttcaaacacataggatttgaagcttgatcatggattaaaaacaaaaaatcggtttgtgtaattttttttatattaaaactttaatttggaagatttctatggactataacgataatatgaataggtgtagataatgaagcttttggagtgtttatgaaggttctttaattaagggttatttttttcgcattttgcttatgtgcccgttttggaacataagactgaactatgttttcgttatgtttttaatttatgcctcgaaacaaaccaaaaaaaaaaaaaaagaaaaaaaaaagnnnnnnnnnnnnnnnnnnnnnnnnnnnnnnnnnnnnnnnnnnnnnnnnnnnnnnnnnnnnnnnncannnnnnnnnnnnnncaatggggg

SEQ ID NO: 120600 - DNA, 986 bp, Arabidopsis thaliana
  unsure (1)..(986): unsure at all n locations
cgtggagacgatccgtggagacattgagtttaggcatgttgatttcgcttacccttcaagacccgacgtcatggttttcagggactttaacctcagaattcgagctggacatagccaagctcttgtgggcgcgagtgggtcagggaagagttctgtaattgcgatgatcgagcggttttacgaccctcttgctggaaaagtcatgattgatggcaaagacatccgccggctaaacctgaaatctctaaggctcaaaatcggtcttgttcaacaagaaccagctctcttcgcagcaacgatcttcgacaacatcgcctatggtaaagatggtgcaactgaatccgaggtaattgatgcagctcgagccgcaaatgctcacggtttcatcagtggtttacctgaaggttacaaaactccagtgggcgaaagaggagtgcagttatcaggtggacagaaacagaggatcgcgatagccagagctgtgctcaagaaccctacagtgttgcttctagacgaagcaactagcgcactagatgcagaatcagaatgcgtgctgcaagaggcgttagagaggctcatgagaggtcggaccactcgtggtagttgctcaccgcctgtcccccataaaaggtgttgattgcattggtgtgattcaagaccggcgggattgtggagcaaggcagccattcagagctcgttacccgcccagaggagcttattcaaggctgttacagcttcaaacacataggattgaagcaagatcatggattaaaactaaaaatcggtttgtgtcatttttcttatattgaactttaatttggaaagatttctatggactatacgataaatatgtataggtgtagataatgnagcttttggagtgctatgaaggttcttaagtaaaaaaaaaaaaaaaaggtcggccgctctagaggatccaagcttacgtacgcgtgcatgcgacgtcatagtctnnctatagttca

SEQ ID NO: 120601 - DNA, 513 bp, Arabidopsis thaliana
ctgctacaatacgactcactttagggaaagctcgtacgcctgcaggtaccggtccggaattcccgggtcgacccacgcgtccgatccaagatgagtatgattggcctcgagttcaagacactgacagttcatgttctgatgaagttgttagtgcccgtgagtctctctctagtgacgaagacattactgaagatattgggtatatgagtgaggtttcatgtacagttgagagagacgacggtagtagttcaagacgaatcaccaatgctactatctctacacttaattccgagtcatcagattcagattcttcagatgagagtgaagtggtacaggtctttcaatcttctgctactccggatgtgaatagtacttatccagccagttcatctattccccggacagaagaggattttgtgacgtggcagcgtattatccgtctaaacgccgtgcgggcctgctcagaggggaccctctattctccatcccagggggtatatcggggggtagagg

SEQ ID NO: 120602 - DNA, 1115 bp, Arabidopsis thaliana
  unsure (1)..(1115): unsure at all n locations
nnnnnnnnnnnnnnnnnnnnnnnnnnnnnnnnnnnnnnnnnnnnnnnnnnnnnnnnnnnnnnnnnnnnnnnnnnntgttctcaccacgctctctctttttttcgagattcagctgtaaaaccctaactagcgccatagccaaggaagctttcctcagatcgtctctccgaaattttccggttaatcgtcagttaaggggaaaattaggctatggcgatgttaggtgcacagcaagttccagcagcagcttgtactccagatatggttgggaatgcttttgtgccccagtattatcacatattgcatcaatcacctgagcatgttcacagattttaccaagagattagcaagttaggtcgtcctgaagagaatggtttaatgagcatcacttctaccttgcaagctattgacaagaagataatggcgcttggttacggtgtaatcagtgcagagatagctactgtggacacacaagaatctcatggaggtggttatattgtactggtgactgggtatttgacgggaaaagacagtgtcaggaggacgtttagtcagaccttcttccttgctccacaggagacaggatactttgtcttgaatgatatgtttcgattcattgatgaaggcactgtcgtacatggaaatcagattccagtgaacaacgtccaagctcctgtcaacacttaccaggacacagctgctgcgaaggaaattccagatgactttgttcaggagaaatatgtccaagagaatcatgctgttaagcaaaccgaggtgttgtccaagagcattaatgagcctgaaaaagtgttcacgccctctgaagatgaacaagtatcagctgcagaagaagctctggtgactgaaacagttaatgaagcaccaatttgaagtgcaaaagggttggaggaatctgattctagggcctggcggaattcccaaagncggtctttatgcatcaatttgttgaagggttattgaaaggaaaattgcttgcacccaattgtcctgtttcggggacctcccaccaaagggtgggccccaangaaaccagggcggtcaggccctttttttcccttttcccaacacctttttntttnggaatnnnggttttc

SEQ ID NO: 120603 - DNA, 841 bp, Arabidopsis thaliana
  unsure (1)..(841): unsure at all n locations
atcaacattacgggcaagttaaacccataactcccaaaatccatatcctctttaaaacatttttgtccaaataaaatgccttcttgttcggtaactgaaatttcaaaatgtatcgtctatccggagaagaagtccaccgtctccgatctccgtctctccgtctccgacctccctatgctctcatgtcattacattcaaaaaggcgtcctcctcaccagccctcctccttccttctccttcgacgaccttgtctcctctctccgccgttctctctcctccactctttccctcttccctgctttagccggccgtttctccaccactcccgccggtcacatttccattgtctgcaacgacgccggagttgatttcgtcgccgcttccgctaaacacgtcaaactctctgatgttctcttaccaggtgaagacgttcctctgcttttccgtgagtttttcgtcttcgagcgtctcgttagttacaacggtcatcataagcctctcgccgccgttcaagtgacggagctccacgacggtgtcttcatcggatgtaccgtgaatcattccgttactgacggaacattccttctggcacttcttcaaacacctttgctgaacgtcactagcgggtgcttgtaacgatcaaacaaccttcccagatttcttccccgccaacaccgtctttcgatttctccgggtcgttctttccagtccctccccgggtgggtccacggtgtcacttttccggcggccgacccaaaccttcttacggggcggggaattttttcaattttaaagaagaaangggggtttncaaancttgaaacaanaggccgggttanaa

SEQ ID NO: 120604 - DNA, 701 bp, Arabidopsis thaliana
acccacgcgtccggcaagggcaggtttcaaaacctggacttgaaggaggaaacaaaagggttagtagtgaaggtggttcgaagaaagatgatggcgatggtggtaataaggccaaagttagtaccttgactaatggtcattccaatgggaatcatcaaatggaagatgattctcaggagactaatgatcttgctaacgggaaagaaaacacgagttctaatgttgctgttgatttaagtaaacttcagaaacttagaagtaaaggagtcagaggtagaggaggtgtaaggaaaactgacagtataggtaataagagttccaaggtagcggaaccagccaaaaaggcgacaaagaaaaacagggtttgggatgatgcggctcccaaacaatcgaaattggacttcacggattccatcgatgaaaatgggaacaatgatcatgtagatattgtggctgctgaccaaggagaaagtatgatggacaaggaagaggttttcagcagtgatagtgaaagtgaagatgatgacgaaccaggaagtgatgagaagcctgctcaggctaagaaaaagggatggttttcttctgttttccagagtattactgggaaagcgaatcttgaaaggacagaccttggaccggcgttgaaagctctgaaggaacggctcatgaccaagaatgtggcagaagagattgctgagaag

SEQ ID NO: 120605 - DNA, 409 bp, Arabidopsis thaliana
tacgactcactttagggaaagctgcgtacgcctgcaggtaccggtccggaattcccgggtcgacccacgcgtgcgggcaccaccaagagagccaaagccaagtactctctgctcttaaaaccctaacgtatctgcgataaaccctcgcgcctttgctaaaatagctgcctttatataacttagccgccactttaattctcgaaagtcatgttctttcacttttcttcgctggttcttcttcgcgctctctcttcttgccatggttggatttcccgctaatcaagcaaaaaccgttgaagaagagctacctttgcaagtcgtagccgatcaagaccccaaggtaaaaactttcaaggactcttttgatttcccttccatcgattcctttccggatttcgattctatcact

SEQ ID NO: 120606 - DNA, 490 bp, Arabidopsis thaliana
gcttaagctctctcgagtctgcctcaagtgtttttgggggaaattgatttcgttgagaaaaaccctaaattccgaacttgaagcaatttttcaatttcgtttgcagaaaaatggcaaaggataatgaagcaatcgccattaacgatgcggttcacaagcttcagctctatatgctcgaaaataccactgatcagaaccagctcttcgcggcgaggaagttaatgtctcgatcagattacgaagatgtcgtcactgaacgagcaatcgctaagctctgtggttatactctttgccagagatttctcccttccgatgtttctagaagagggaagtatcggatttcgttgaaggaccataaggtttacgatttacaggagacgagcaagttttgctccgctggttgtttaattgatagcaaaacgttttcggggagtttgcaagaggctcgtacattggagtttgattcggtgaagttgaatgagattttgga

SEQ ID NO: 120607 - DNA, 860 bp, Arabidopsis thaliana
  unsure (1)..(860): unsure at all n locations
tgttgttgttgttgttttaggcaacatgctcgttctttagccagccagcaaactttgccccggacattaacctatcactatcggagctcgctgctctcgacatgtgtaataaaagggtgattttcaagccgatgaatgaagaagaacgtcaagagatgaaacgtaggtgcggaggatcatggaaattagtccttcggtttttgctggctggtgaagcgtgttgtcgaagagagaaatctcaagctgttgctggtcctggtcatagtgtagcagtcacatcgaaaggagaagtttatactttcggatataataactctggacagctaggacatggtcataccgaggacgaagctcgaattcaacctgttagatcattgcagggagttcgaatcatccaagcagctgctggtgctgctcggacaatgctaataagcgatgacggaaaagtttatgcgtgtggaaaagaatccttcggggaagctgaatacggagggcaagggactaaaccagttacaactcctcagcttgtaacatctttaaaaaacatatttgtagtgcaagcagctattgggaattactttaccgctgttctctcccgagaaggaaaggtttatacattctcgtggggcaatgacggtagactaggacaccaaactgaggctgcggatgtcgagcctcgtcctttgttaggcccactcgagaatgtacccgttgtgcagatttgctgctggttattgctaccttcttgccttagccttgtcaacccaaatcggcatgtctgtttaacctcaagtttnggttgcngtttttggngggcaaactttggtcatngggtncaaagancannttgnggaangntc

SEQ ID NO: 120608 - DNA, 507 bp, Arabidopsis thaliana
  unsure (1)..(507): unsure at all n locations
tgannnnnnnnnnnnnnnnnnnnnnnnnnnnnnnnnnnnnnnnnnnnnnnnnnnnnnnnnnnnnnnnnnnnnnnnnnnnnnccacgcgtccgcgcaagctctcatcttcttcagctcaaaaagccatctcaaaggtatattttgaatcaaaaacaatggcagggactaatgattcttgtcctttggtaaagaacattcttcttctagactctgaaggaaagcgtgtggctgtcaagtattactccgatgattgggcaactaatgcttccaagttagcttttgaaaaatatgtcttctcgaaaacctccaagaccaatgctcgcacagaagctgagatcacactgttggagagtaatattgttgtctataagtttgcccaggacctgcatttctttgttactggaggtgaaaatgaaaacgagctcgtcttatcatctgttcttcaaggcttttttgatgctgttgcgttacttctgaggaacaatgttgaaaagatggaagcccttg

SEQ ID NO: 120609 - DNA, 519 bp, Arabidopsis thaliana
  unsure (1)..(519): unsure at all n locations
gcgtccgcaaacgagtccgcccacgcgtccgcccacgcgtccgcaactttcagccaacaaaattagggtttcaagctgagattttctacttctgttacacaaaaatacccaatgagtaaagcttcggtgatcctatacattacggtaggaatcctggtgctcttcctcgtctcttattcaccgaagaagaagggtgaccacgatcaccaccatggtggtcacaatcaacatcaccgcttaaaactccggtcttctttcaatttcaaacccactcgtcacgatccagttccgtttgatcctcttgtcgccgacatggagcgccgccgcgaggataaggagtgggagcgacagtacattgagcattctcacccggagcttgtctctcattctcagaaagaaacaaccggtggtggacatgaacatgcacctggtcacgagtcgcagcctgagtggggagaattcatggatcctggggtttcttaaaannttgggggggagttcaatntcactnnttgggnt

SEQ ID NO: 120610 - DNA, 328 bp, Arabidopsis thaliana
gtttgcgtgaggttccttcgctttactttaaggaggattgtgctcttgaggacggagctacatttcgttctgcttgccctttctcgagccttaatgagaatctagcgcttcaagagaagttgtcacagtatcttgatgtggtggagctgcatcttgtgaaggagatctctgtgaggtctgattcgtgtttcgaggctcaaggacagttacaggatttgaatgtgaagattgctgagggttgtagtaggattcgggagatgaaagagactattcggctcctggataggaatttggtagattcagctcgacagattcaagagctgagctc

SEQ ID NO: 120611 - DNA, 1129 bp, Arabidopsis thaliana
  unsure (1)..(1129): unsure at all n locations
ttgcagtaccggtccggaattcccgggtcgacccacgcgtccgcacgcaactttctttcaaatacaaaaccaatcatctcgattcatccaacccgcgaagacccagaaaccaaaatcgaagacccaacaaaacccacaagtcgaaatctcgaaatccgttgagagtttgttcctttttttgtttgctcggagatggaggctttgccggaggatgaagagtacagtttcagggaagtagtgttgccgtctttgattccggtagtgccggagccggaacttgagagagagagcggagagaggagaagaggaagagatgttatcgtagccgttgatcatggtcccaatagcaaacacgcttttgattgggctcttgttcatttctgtcgtctcgccgatactctccatcttgtccacgccgtctcaagttcgttctctcttcaatgtgttaagaacgatgttgtgtatgagacgagccaagccctcatggagaaacttgctgttgaggcgtatcaagttgccatggtaaagagtgtggctcgtgttgttgaaggcgatgctggtaaagtaatctgcaaggaagcagagaaagtgaagcctgctgctgtgattgtaggcacacgaggcaggagcttagtaagaagcgtgctacaggggagcgtaagcgagtattgtttccacaattgcaaatctgctcctgtcataatcgttcctggaaaagaagctggagacgagtcgatcgtggactggacacgctcagaagatcctaaaccctgaagaaaaagttcaagtgttgtttccacgaagactgttttgtttttcatctttctgtcgctactgttgcagtctttgtttctgtatgtccctaaaaatcttagattgcttcttcttcgtctctctgtgtgtgtatgtgttttgatttgggtttttgtagtttcaaaatttctgtataaaacctttgctcaggaatgaatgtattgtatgcagtggtgtgatgtgtttcagacttttcagtaaacaagcctatagcagcccnnnnnnnnnnnnnnnnnnnnnnnnnnnnnnnnnnnnnnnnnnnnnnnnnnnnnnnnnnnnnnnnnnnnnnnnnnnnnnnnnnnnnnnnnnnnnnnnn

SEQ ID NO: 120612 - DNA, 761 bp, Arabidopsis thaliana
  unsure (1)..(761): unsure at all n locations
cnnnnnnnnnacgactcactatagggaaagctggcacgcctgcaggtaccggtccggaattcccgggtcgacccacgcgtccgcccacgcgtccgcgactccaaaataaaatcaaatcaaaaatcaaattctctacacgcaactttctttcaaatacaaaaccaatcatctcgattcatccaacccgcgaagacccagaaaccaaaatcgaagacccaacaaaacccacaagtcgaaatctcgaaatccgttgagagtttgttcctttttttgtttgctcggagatggaggctttgccggaggatgaagagtacagtttcagggaagtagtgttgccgtctttgattccggtagtgccggagccggaacttgagagagagagcggagagaggagaagaggaagagatgttatcgtagccgttgatcatggtcccaatagcaaacacgcttttgattgggctcttgttcatttctgtcgtctcgccgatactctccatcttgtccacgccgtctcaagtgttaagaacgatgttgtgtatgagacgagccaagccctcatggagaaacttgctgttgaggcgtatcaagttgccatggtaaagagtgtggctcgtgtttttgaaggcgattctggtaaagtaatcttcaaggaagcagggaaagttaagccttcttcctttaattttaggcacacgnggcagcgctttttagaanggtnttcagggngngtanggtttttttcccaattcaaatttntccgg

SEQ ID NO: 120613 - DNA, 587 bp, Arabidopsis thaliana
  unsure (1)..(587): unsure at all n locations
gagaggaggatccataatcttcaaaaaccaacgtgcatttgcattatctggttttgcctcttggtttctctctctcaccatggaagagcatcatcaacctcagcatctatcttcaatctttctctcccacaccaacacccattccctgaacatgttgttcttaatgttcaaagaaaactcaacgattctctctcaagaagacaacttctcacttaccaacaagacgacggcaccacggcgtcgtcaccaataccttcttgcatcaccggaaacccaatcgacgattgttggcgctgcgacccaaactggtcggcaaaccgccaaagactcgccgattgctcaattggtttcggacaaggaacactcggaggaaaaggcggtcagttttacctcgtcaccgattcctccgacaacgacgcagcgaatccaattcccggaactcttcgacacgccgtgattcagccagaaccactatggatcatctnctcagcgncattgggatcaaatcaaanagnggtcatcatcgnagctacaagaaatcgtggagagncgatttcaatcccggcatggtgccaggttagaggnga

SEQ ID NO: 120614 - DNA, 886 bp, Arabidopsis thaliana
gaaacaaggatctaattcatagtgctgcttcttcttctctctgagactctcacaaaatagaaacacaagatcgttaaaaagcttttagctccagatctgtggaaccgccatagctatggagttttatagaagttctagaagattacaaattcttggatctgtgattcttctgctctctattcatgtcgctcactctttttaccttcctggtgttgctcctcaggatttcgaaaagggagatgaattgaaagtgaaagtaaacaagttgacatctataaagactcagcttccatattcgtattactctcttcctttttgtcgtcctaagaagattgtggacagtactgagaatcttggtgaagttcttcgtggtgaccgaatcgaaaatgctccttattcgtttaaaatgcgtgaggcgcaaatgtgtaatgttctcggtcgtgttatgcttgatgcaaagtctgccaaagcgtttaaagagaagattgatgatgagtatcgagttaacatgatccttgataatcttcctctagtggttccgatcgaaagaattgatccgggtcagggttctccttctgttgtgtatcagctaggatatcatgttggtcttaaaggccagtatgaagggagcaaagagcaaaagtattttatgcacaatcacttggcattcactgtccggtatcatagagatatgcaaaccgatgctgcaaggattgtgggatttgaggtcaaaccatacagtgtcaagcatgaatacgagggacaatggagtgagaagacccgtttgactacctgtgatccccacactaagcgactggttgttagctcagctacccctcaagaagtcgaaaataagaaagaaattatcttcacatatgatgttgac

SEQ ID NO: 120615 - DNA, 516 bp, Arabidopsis thaliana
gcgtccggcattacaaaaacccttcactactctttctcagagtctcaagcatcattttcccgagaaaactatgaattcaaacattttcccaccatcgaaacaacaaaacgagcttaataatatacaacaatccttctcaaatctccaatctcaatgctccaatttactcctcaacgtttcacaaacccttaatcctctcttcaacgccaacacgaacaacaacaaacctaatatattctctgctctcaattcgtttcgtgatcaagctaagcaagctttagattctagaatctctcgattcaattctggtaaggcacctgtctgggcgagaatttctgacgacggtggtggtgcgagggcttcagggtgacggttccgattcgcggaagcgggtaaggattatcttgcttgttgctattgaggagagattggcgggagttcctgtttacgcgttgagtaattcgaatgaggagtttgtgttggtttcagggacttcctctgggaaatctctgggtt

SEQ ID NO: 120616 - DNA, 721 bp, Arabidopsis thaliana
  unsure (1)..(721): unsure at all n locations
gaaaagnccggggccaaggccaccaattcancaatggncccccacctgttacttccccctttttcnancncatggacccccaaaggnttttttttccagttgntnggaatccctatttgngngttcaaggaccccgagccaattgggagttccgttcccaccgagcaacccaatgagggctctacgcgagtctctgggaagccgagcatttgggctacaaggggaggattagagaaaacagattggtcaaaagctccttttactgctttttatagaaactacaatgtcgatggatgtgtatgggctaatggaaaatcatcttgttccgcgaattccccatggttcactcaaaaactcgattcgaacggccagacaagaatgaaaggtgtgcaaagtaaatacatgatctacaactattgcaccgataaaagaaggtttcctcgaggagttcctgccgagtgcacttaaattcttgattctttgatacatgaatatgttacttggcattgcctttgtaactcaatccagtttttacttatttttttcatccttttgttgtgtagccgcatatattccaggantggtgggtgtttgtgtaagatgtttttaagattgaggtantaaaaataaattttgggaaaaaaaaaaaaaaangggnggcccctctngggggnccnaggnttngnccgggnnannngcggcatggcntttttagggcccc

SEQ ID NO: 120617 - DNA, 553 bp, Arabidopsis thaliana
accacggacgcgtgggcggacgcgtgggcttcagcacatgatcctcgtctctctttctttctctctctcaatcacaagtttcagttacacagctgaacccaaagtatctcacattctgatctaatcagaacactgttttgtctgtgtaacataaacaaacgatcctgtttttatggaaaatttaatgaaacagtgacgattcttctacacttctttataatgacaaacatttcatagtaccaaaatacacaaataccttttctttattcttctcacccttctctgtttctttatcattcatggctccaaattcagtagcagtgacaatggagaagccagacaacttctctttacctagagatcaacggctcagatccatcctcattccccgacaaacgtaaatccatcagtccaaaacaattttaatggttcctttttttaaaagctaataaactcatttggggtttttgggggttggtcttttcggttaaaaagcgaatcgcgttctccgcgaggaccattaccgaagaagaggatcctaaaggcagaggaa

SEQ ID NO: 120618 - DNA, 999 bp, Arabidopsis thaliana
  unsure (1)..(999): unsure at all n locations
nnnnnnnnnnnnnnnnnnnnnnnnnnnnnnnnnnncgcagtaccggtccggaattcccgggtcgacccacgcgtccgcgaaaatccacaggcggagaaatcaaaaaaccaaaaatccaatctttggattcttacttctacgatttgtgtgtttcctcaaacccaaatgtctcgtctcccgattttaatcgcttcgtgtctcttcctctcttcactcaccgccgccgtcgtcaccgccgccgaatccgatactccgacggcttattcactcctccaaagctacaacttccccgtcggaatccttccaaaaggagtcgtagcttatgatttagacacaacaacaggcaaattccatgcgtatttcaacgattcatgtagcttcaatcttgttggttcttaccaattgaattacaaatcaacaatcagtggttacatctccgagaacaagctcaagaaattgactggtgttaaagtcaaagttttgttcttgtggcttaacatcgtcgaggttattagaaacggtgacgagatggagttttccgttgggatcacatcggcgaatttcgcgatccaagagtttttggaatcgcctcagtgtggttgtggctttgagtgcaaggattcgaaattggacatgattgagagaatcccttttctttcttcgtcttgaaattgaaaaaggtacaatctttttttgtaatttgtccccaaaaaatcttacctttcgaaaagatcgcatcttttatgtattgtccaataatatgagcgtagtgtctggaatttgtaattgtttactttagttctatttattggattcaagttctgtaatggtgaaaagaaaagatactgaagggagatgtgaacattgtgaagtgaacctttggaatcttagattgaaagttttcatttttgttcccaaaaaaaaaaaaaaaaaaaaaaaaannaagggcggccgctctagaggatcccagcttacggacgcgtgcaagcgaagttctgg

SEQ ID NO: 120619 - DNA, 594 bp, Arabidopsis thaliana
  unsure (1)..(594): unsure at all n locations
nnnaatccgactcactttagggaaagcacgtacgcctgcaggtaccggtccggaattcccgggtcgacccacgcgtccgtacggctgcgagaagacgacagaaggggacaggcggagaaatcaaaaaaccaaaaatccaatctttggattcttacttctacgatttgtgtgtttcctcaaacccaaatgtctcgtctcccgattttaatcgcttcgtgtctcttcctctcttcactcaccgccgccgtcgtcaccgccgccgaatccgatactccgacggcttattcactcctccaaagctacaacttccccgtcggaatccttccaaaaggagtcgtagcttatgatttagacacaacaacaggcaaattccatgcgtatttcaacgattcatgtagcttcaatcttgttggttcttaccaattgaattacaaatcaacaatcagggggtacatctccgggaacaagctcaagaaattgacctggtgttaaaggcaaagttttggtctttgggggttaaaacccggcgggggtattaggaaccggttccgggttggggtttcccgttgggggcagaaggggngggntttgggt

SEQ ID NO: 120620 - DNA, 522 bp, Arabidopsis thaliana
agccccaacaatttactggtgttaagctcaaaattatgttcttggggcttaacactcgtcaagggtattaaaaccggttgccgagaaggagttttcccgttgggttccaatcggcgaatttcccgatccaagagtttttggaatcgcctcagtgtggttgtggctttgagtgcaaggattcgaaattggacatgattgagagaatcccttttctttcttcgtcttgaaattgaaaaagggacaatccttttttgtgatttgtccccaaaaaatcttacccttcgaaaagatcgcatcttttatgtattgtcccattatatgagcgtagtgtctggaatttgtaattgtttactttagttctatttattggattcaagttctgtaatggtgaaaagaaaagatactgaagggagatgtgaacctcctggaaaaaaaaaaaaaccgaaaaacacaaaaagcgaccgctctagaggatccaagcttacgtacgcgtgcagtcgacctcataactcttctgagagt

SEQ ID NO: 120621 - DNA, 409 bp, Arabidopsis thaliana
gcgtcccaacttctacacagtgacggtttatgaaaagggagctgaggtcgtcaggatgtacaaaactctactaggaactcaggggttccgaaagggaattgatctctattttgaaagacatgatgagcaagcagtgacttgtgaagacttctttgctgctatgcgtgatgcaaataatgcagactttgctaatttcttgcaatggtactctcaagctggaacgcccgttgtcaaagtggtatcctcttacaatgctgacgctcgtactttctctttaaaattcagtcaggagatacctccaactccaggccagccaacaaaagaacctacatttattccagtggttgttggtcttttggactcaagtgggaaagacattactctttcctctgttcatcatgatggtaca

SEQ ID NO: 120622 - DNA, 822 bp, Arabidopsis thaliana
  unsure (1)..(822): unsure at all n locations
atacgactcactttagggaaagcacgtacgcctgcaggtaccggtccggaattcccgggtcacaaattaagaagagagaaatggggaaagacggagaaggagacaagaagcgagaaacaatggcggtgatgagcttaatgaaggatcaacagaatccaattcaacagtttcaagtcaaattcaaggagattgagactggtttcaagtcgtggttatcaaaacagaagttaccggtggaagccgccgttgtcacggccatgggtggtgttcagggagcttttatcggtggtttaatgggaactttatctcctgaaatgcctcaggctggtattgaccctcaagctatggcttcgctaaagcaaactcaggctcttgttggtgggcctttggttcaagctcggaactttgctgctataactggtgttaatgctggtattgcttgtgttatgaaacggattagaggcaaggaggatttagaaatctcctgtggtcgcagcattcggatctggagttgcatattctcttgtgagcgcaggattacaaggacagcctatgaatgcaatcaccactgctgctggtttcgctgtttttcaaggagtgtttttcaagttgggtgaaaggttctctaaaccaagtgttgaaagatccatattacacccggggaaagatctatnttgttgaaactgggtctagaggagtatgagaagaacttcanagaaaggtttattagctgacccaactcttgnccaattnctcanttgntngcgcgnctaaggaggncgtnaagcantcccncccttggcccaagggctacctgattac

SEQ ID NO: 120623 - DNA, 518 bp, Arabidopsis thaliana
ctctatacgactcacataagggaaagctggcacgcctgcaggtaccggtccggaattcccgggtcgacccacgcgtccgcggacgcgtgggcggacgcgtgggctttctctctccatgagaactctaatctctcaccggcaatgtgtgacgtcaccgtttcttatctccgccgcatctccaccgtttcctggccggtgctttaagttatcctcctttactcctccacgtcataggcgtttttcttctctctcgatcagaaacatttcgcatgaatccgccgatcagacttcttcttctaggccgcgaactctttatcctggtggttacaagcgtcccgaactcgccgttcccggtttacttctccggctagacgccgacgaggttatgagcgggaatcgtgaagagactcttgatttggtcgaccgcgctttatctaaatcggctcaaatcgtcgtgattgatggcggagccaccgctggtaagctctaccaggcggcttgtttgctgaaatcacttg

SEQ ID NO: 120624 - DNA, 421 bp, Arabidopsis thaliana
gaaaggaagaggcagatctgttattctctgttgaagtctgattgatctgatcggagctattgcggaggaggggtttactgcaattgcacggtggtaatggctgcggttccgcctgaaaacggcgtggacggagatgacgaaagagaggaagaagaagaggacgaggaggaggaagaagaagaagaagaagaagagaacggagatgaggctgaggaggagccacgtctcaaatatcagaggatgggtggcaacgttcctgcgttgctatctaacgatgctgcttcctgcatcgctgttgctgcgaggatgatcgcgcttggtacgcacgacggtaccgtgcgtatcctcgatttattggggaatcaggttaaagaatttcgtgcccacactgctccggttaatgacatcaactttgacactg

SEQ ID NO: 120625 - DNA, 455 bp, Arabidopsis thaliana
aaacgaaatcgtggtcttactctctcttctgagttctgacctgagcacacacacagagattttgattgtgtcactcatggaacccaatatttaccaacttgccctcgcggctctattcggagcttccttcgttgctgtttctgggtttttcatgcatttcaaggcactgaatctagtccttgagcgtggtaaggagcgtaaagagaaccctgatggagacgagcctcaaaatccgaccttggtgaggcggcggagccaagttagaaggaaggttaatgaccaatatggtcgcagtcctgcttctcttccagatgccactccttttaccgatggtggcggcggcggcggcggtgatacaggacggagcaacggtcacgtttatgtcgatgaaattcctcctggtctccctaggcttcatacgccatctgaagggagagcttctgtacatggagcta

SEQ ID NO: 120626 - DNA, 767 bp, Arabidopsis thaliana
cccacgcgtccgcggacgcgtggggagaattagggttttctagtctagtgtttccgggagcagcctgagcaggaggaagaagacgaagaagaagaggagcagctactaccatggttctcaagacggagctttgtcgtttcagtggacagaagatttacccaggaagaggaattaggtttatccgatctgattctcaggttttcttgtttcttaactcaaaatgtaagaggtacttccataacaagttgaagccatccaagcttgcatggactgccatgtacagaaagcaacacaagaaggatgcagcacaagaggctgtgaagagaaggagacgtgccaccaagaagccatactcaaggtccattgttggtgctaccttggaagtaattcagaagaagagagctgagaagcctgaagttcgtgatgcagccagggaagctgctctgcgtgagatcaaggaaagaatcaaaaagaccaaagatgaaaagaaggctaagaaggtggaatttgcttctaagcaacagaaggtcaaggctaatttccccaaagctgctgctgcatccaagggtcctaaggtgggaggtggtggtggcaaacgctgaagagcttaaagccatcttttctcactctgcgtcttttctgctagtagctacttttagtagttgatgttcatttctgaatatttgcaaaacataaaccttgttattttcgtttttgtctctcacttttgctactcttataatatcagacttgagaattttgctgct

SEQ ID NO: 120627 - DNA, 469 bp, Arabidopsis thaliana
  unsure (1)..(469): unsure at all n locations
cnnnnnnnnnnnnnnnnnnnnnnnnnnnnnnnnnnnnnnnnnnnnnnnnnnnnnnnnnnnnnnnnnnnnnnnccacgcgtgcgggaacgtattgtttcaagaaactgattcagctgtagatttgaatcataatgtacaaatgatgaaccacccggtaagcaaaaccactagaatcgagcaggaggcaatgaaagtccaaccaccgagtaagattcctatagtgtagactatgagtggaggcaacaaggactttactatagccgttttgttcacccaacgtcccttgaaaagcactagtgtcgcgagattcaccacgttccatccgcctgactttatagatagacggttcaggttgttggcgaggaagaagacgaagaagaagaggagcagctactaccatggttctcaagacggagctttgtcgtttcagtggacagaagatttactcaggaagaggaattaggtttat

SEQ ID NO: 120628 - DNA, 560 bp, Arabidopsis thaliana
  unsure (1)..(560): unsure at all n locations
catnnnnnnnnnnnnnnnnnnnnnnnnnnnnnnnnnnnnnnnnnnnnnnnnnnnnnnnnnnnnnnnnnnnnnnccacgcgtgcgaccttttattaccgacaagattctgccacacaattattacatatttttgttcccatgaagcaattgttcctttcaagcatgtttacgagcaaaagagtgaaagggtagcttgatttttgtctactctagcttcattttctggcgatctttacttgagatttaaacattttgctctcggattgataataaagaagaatttggaatatcagtaggtttggttaggactctcggattctgttgtcggttagatatttgttttgtttaatccctagatttagcagagaaatccctcaaatctcacacaatccatgtaaggaagaagatgacctccagtatcaaatcaagtctgctaaatctagggctccttattatatttttcgtcttcttcttcctggtgattaactgtcgaggggaatcttgtacgtgtttggcggtttacaaacaaggcggagcttcagctgtgtttcaatcaccca

SEQ ID NO: 120629 - DNA, 438 bp, Arabidopsis thaliana
cacgcgtccagcagagtaggaggagacggtggaggaactggaaggtggccgagacaagaaaccctaactctgttggaaattagatctcgtcttgatcatatattcaaagaagctaatcaaaaaggacctctttgggatgaagtttctaggattatgtccgaggaacatggataccaaaggagtgggaagaaatgcagagagaagtttgagaatctgtacaaatactataggaagactaaagaaggcaaagccggaagacaagacggaaaacattacagatttttccggcagctcgaagcgctatacggggattctaataacttggtttcttgtcccaatcataacacgcagttcatgagcagtgctcttcatggtttccatactcaaaaccctatgaacgttactacaacaacgtccaacatccataacgttgatagt

SEQ ID NO: 120630 - DNA, 654 bp, Arabidopsis thaliana
gcgtccggataaattgcagacgtggcatatagacgaaatacaagattcagagataataaatacgtcaccaaaagttatcacccacaacgaatcttcttcttccatcgccattgccatggctaagctctctctttcctccatcttcttcgtcttccctctcctcctctgtttcttttccccttcttcttcttcatcggatggcttagaatcctacatcgtccatgtgcagagatctcataagccttccctcttctcctcccacaacaactggcacgtctctctccttcgctctctcccttcttctccccaaccagcaacgctgctctactcttattcacgcgccgttcatggcttctccgctcgtctctcccctatccaaaccgccgccctccgccgtcatccttcagtcatctccgttatacctgatcaagcgcgtgagatccacacaactcacacgcctgccttcctcggtttctcccaaaactctggactctggagcaactcaaattacggggaagacgtgatcgtcggcgttttagatactggaatctggccggaacatccaagtttctcggattcaggtctcggtccaattccatctacctggaaaggcgagtgcgagatcggacctgattttcctgcctcatcttgcaa

SEQ ID NO: 120631 - DNA, 527 bp, Arabidopsis thaliana
  unsure (1)..(527): unsure at all n locations
nnnnnnnnnnnnnnnnnnnnnnnnnnnnnnnnnnnnnnnnnnnnnnnnnnnnnnnnnnnnnnnnnnnnnnnnnnnnnnnnnnccacgcgtccgaaaaaaaaaaattggagaggaagagaaaggaggaaatcgaaaccattcggttggtgatgggccaagcgccgtcgtctacggcggaatcgaacggacgagagttagatttgaggttatggtctccggtgattgttgctggaggtgaatcgatggctgtggggaatgttgtggatcgggatttcaccggagatctgccggatgagtgtttagctcatgtgtttcagtttcttggagctggagatcggaagcgatgctctcttgtttgtaaacggtggttgctcgtcgacggtcagagtcgtcatcggttatctctagatgctaaggatgagatctcctctttccttacctctatgttcaatcgattcgattcggtgacgaagcttgctctccgatgtgatcggaagtctgttagcttgagcgatgaagctttggct

SEQ ID NO: 120632 - DNA, 1229 bp, Arabidopsis thaliana
  unsure (1)..(1229): unsure at all n locations
nnnnnnnnnnnnnnnnnnnnnnnnnnnnnnnnnnnnnnnnnnnnnnnnnnnnnnnnnnnnnnnnnnnnnnnnnnnnnnnnnnnccacgcgtccgggactgttgagtttttctacagtagcatctgctgatgaggctgaacatggattggagagtccagagtacccttggcctcatgatggcattcttagctcatatgaccatgcttcgatccgtcgtgggcatcaagtttatcagcaagtctgtgcatcatgccattcaatgtctctgatctcataccgagacttggtgggtgtcgcctacacagaggaagaggcaaaggcaatggcagctgaaatcgaggtagtagatggacctaatgatgagggtgagatgttcacccgccctggtaaactcagtgaccggtttcctcagccatatgcaaatgaatcagctgctaggttcgccaatggtggagcgtatcctccggatctaagtcttgtaactaaggcacgtcacaatggccaaaattatgtctttgctctgttgactggttatcgtgatcctcctgctggaatttcagtaaatctctctcctatttttgctttagacttgttattacaacttcaaattgttggaagttagaaataatcctgtgactaacgggtacagatcagagaggggctacactacaatccttatttccctggtggagcaatcgctatgccaaaaatgctcaacgatgaagctgtggaatatgaagatggaactcctgcaacagaagcacagatgggtaaagatgttgtatccttcttgtcctgggcagctgaaccagagatggaagagaggaaattgatggggttcaaatggatattcttactgtctttggctctgcttcaagctgcgtattacaggagactgaaatggtcagtactcaaatcccgtaagcttgttctcgacgttgttaactaatcccgtgaagatcaccttttctctgggtaataatcattaatcttgaaagggataaatggtgaatcccactttttgtctcaaaagacatgtttctttgtttattgtttagaaagtctaatgaggcaaagaagtaaagcttttttaacctcaagtcacacatgattttgagattatattatttctttttggtttgttgtctcctaaaaaaaaaaaaaaagggcggccgctctagaggatccaagcttacgtacgcgtgcatgcgacgtcaaagctcttctaa

SEQ ID NO: 120633 - DNA, 878 bp, Arabidopsis thaliana
  unsure (1)..(878): unsure at all n locations
gatgttcaccngccctggtaaactcagtgaccggtttcctcagccatatgcaaatnaatcagctgcaaggtttgctaatggtggagcgtatcctcctgatctaagtcttataactaaggcacgtcacaatggtccaaactatgtctttgcgcttctaactggttaccgtgatccccctgctggcatatcgattagagaggggttacactacaatccttatttccctgggggggagcaattgctatgccgaaaatgctcaatgatgaagctgttgagtatgaagatggtgtccccgccacagaggcaccagatggggtaaagatatttgtatcattctttggcctgggcagctgaaccagaaatggaagagaggaaactgatgggtttcaaatggatattcctactctctctcgctcttctccaagctgcttactacaggcgactaaaatggtcggttctcaagtcccgcaagctggttcttgacgtggttaactaaagcgccgctgaaaagcttttgcattggcctggccacacacagtcgtattttcaacaaaggatgttaaatagagaagagcctttctctgggtaataacgtatcatcatttttatgtgtcataaaaatctttgatgagaccagttctcacctgaaggtgaaaagacctcatcgttcttctttttccttcgattattactagagagttttatgaggataatcacgaaaacttgtttttttcgcctcataataatcacacatgattttgagattatatcatttgttatgttttccctcttgtcaaaaaaaaaaaaaaaaagggcggccgctctagaggatccaagcttacgtacgcgggcataggacggtcatagtgcgaacggag

SEQ ID NO: 120634 - DNA, 628 bp, Arabidopsis thaliana
  unsure (1)..(628): unsure at all n locations
atacgactcattaagggaaagccggtacgcctgcaggtaccggtccggaattcccgggtcgacccacgcgtccgcccacgcgtccgcggacgcttgggcggacgcgtggggttcgttcccaaactcttctccctcgatcgtctccgtcgccgatctcgtttcttcattttccgcgtgttgattggtacaaaggtttaatcaaatggttggaggaggagttatccagcaaattcttaggaggaagcttcactcccaatcacttgcaactccggttttgtcttggttttcttcgaagaaagctcatgaggatgctggttcttctggtgtaagagcacttgccttgttgggtgctggtgttacaggactgttgagtttttctacagtagcatctgctgatgaggctgaacatggattggagagtccagagtacccttggcctcatgatggcattcttagctcatatgaccatgcttcgatccgtcgtgggcatcaagtttatcagcaagtctgtgcatcatgccttaaatgccctaaactatanccgnattgggggntcgcctcaaagggaggggaaggnatggactaaaccgggtgaagnggcccaatntggggnatttnccccccggaa

SEQ ID NO: 120635 - DNA, 662 bp, Arabidopsis thaliana
  unsure (1)..(662): unsure at all n locations
anctttcccnggggcatctcccgaatccccagntgactttggttaantngccccccncagggcccnntgggtaaggnttgaccatctggcctggccgctgacccagaaatggaaggggggaactgangggnttcaaaanggatatccctactctctctcgctcttctccaagctgcttacttacaggcgactaaaatggtcggttctcaagtccccgcaagctggttcttgacgtggttaactaaagcgccgctgaaaagcttttgcattggcctggccacacacagtcgtattttcaacaaaggatgttaaatagagaagagcctttctctgggtaataacgtatcatcatttttatgtgtcataaaaatctttgatgagaccagttctcacctgaaggtgaaaagacctcatcgttcttctttttccttcgattattactagagagttttatgaggataatcacgaaaacttgtttttttcgcctcataataatcacacatgattttgagattatatcatttgttatgtttttcctcttgtctcaataaaaaataactttgtaaaaaaaaaaaaaaagggcggccgctatagaggatccaagcttacgtacgcgtgcatggtacgctcatagtaannnnnnnnnnnnnnnnnttgaatcg

SEQ ID NO: 120636 - DNA, 981 bp, Arabidopsis thaliana
  unsure (1)..(981): unsure at all n locations
nnnctccnnnnnnnnnnnnnnnnnnnnnnnnnnnnnnnnnnnnnnnnnnnnnnnnnnnnnnnnnnnnnnnnnaattttccacgcgtccggtttacttcttcttcttcttcttcttcttcttcctcctcctctgttcgtcaatcgccgatctcgttgcttcattttccttgagatcgattggtacaagtgttcatccaatggttggaggaggagttatccggcagcttcttagaaggaaacttcattcccaatcagtcgcaactccggtattgtcatggttgtcttcgaagaaagcgaatgaagatgctgggtctgctggtttaagagcatttgctctcatgggtgctggtattaccggattattgagtttttctactgttgcatctgctgatgaggctgaacatggtctggagtgtcctaactacccttggccacatgagggcattctcagctcatatgaccatgcttcgatccgtcgtggtcaccaagtttatcagcaagtttgtgcgtcttgccattcgatgtctctgatctcataccgagacttggtgggtgttgcctacacagaggaagaagcgaaggccatggcagctgaaatcgaggttgttgatggaccaaatgatgagggtgagatgttcacccgacctggtaaactcagtgatcggcttcctgaaccatactcaaatgaatcggctgctaggttcgccaatggaggagcgtatccaccggatctaagtcttgtaactaaggcacgtcacaatggccaaaattatgtctttgctctgttgactggttatcgtgatcctcctgctggaatttnagtaaatttctctcctattttnnctttnagacttgttatnacaacttcaaaattnttgggaagttagaaaataatccctggtganctaacgggggaccagttcaggggnnggggntacaatnanaaancccttantttnccctgggggggagaatttgntt

SEQ ID NO: 120637 - DNA, 814 bp, Arabidopsis thaliana
  unsure (1)..(814): unsure at all n locations
ccagcactaatacgactcacttagggaaagccggtacgcctgcaggtaccggtccggaattcccgggtcgacccacgcgtccgaccggatctaagtcttgtaactaaggcacgtcacaatggccaaaattatgtctttgctctgttgactggttatcgtgatcctcctgctggaatttcgatcagagaggggctacactacaatccttatttccctggtggagcaatcgctatgccaaaaatgctcaacgatgaagctgtggaatatgaagatggaactcctgcaacagaagcacagatgggtaaagatgttgtatccttcttgtcctgggcagctgaaccagagatggaagagaggaaattgatggggttcaaatggatattcttactgtctttggctctgcttcaagctgcgtattacaggagactgaaatggtcagtactcaaatcccgtaagcttgttctcgacgttgttaactaatcccgtgaagatcaccttttctctgggtaataatcattaatcttgaaagggataaatggtgaatcccactttttgtctcaaaagacatgtttctttgtttattgtttagaaagtctaatgaggcaaagaagtaaagcttttttaacctcaagtcacacatgattttgagattatattatttctttttggtttgttgtctcctaaaccggactcggtttgtcttaataaaaatgtggttttacaaaaaaaaaaaaaaaaaannnnnnnnnnnnnnnnnnnnnnnnnnnnnnnnnnnnnnnnnnnnnnnnnnnnnnnnnnnnnnnnnncgtcctaa

SEQ ID NO: 120638 - DNA, 543 bp, Arabidopsis thaliana
  unsure (1)..(543): unsure at all n locations
nnnnnnnnnnnnnnnnnnnnnnnnnnnnnnnnnnnnnnnnnnnnnnnnnnnnnnnnnnnnnnnnnnnnnnccacgcgtccgatctcccgcctatatcgacgccgtctaattcctatcatttctcgttgctccaaaaccctaactttactaccgtcggtcattattttcactttctcggctcgatttggtgttggaggttggtaatcagttatgggcgctccggaaaagtctcaatctaataccaattcgatgcagagagtgaaagtctatcatttgaatgaagatggtaaatgggatgatcgaggaactgggcacgtaagcatcgactttgtggagcgatctgaagaactcagtctatgtgtaattgatgaagaagattacgagacgttacttgttcatccccatcaaccctgaggatatttacagggaacaagaagacacaataatctcatggagagacccagagcgctcaacagaattggctttaagctntcaagagactgcagggtgctcttatgtatgggatcaaatctgcactatgca

SEQ ID NO: 120639 - DNA, 590 bp, Arabidopsis thaliana
  unsure (1)..(590): unsure at all n locations
nnnnnnnnnnnnnnnnnnnnnnnnnnnnnnnnnnnnnnnnnnnnnnnnnnnnnnnnnnnnnnnnnnnnnnnnnnnnnnnnnnccacgcgtccgatcattctctctgatctcaagaaataatctcaaatctcttacactcatagtcttcaagcaacttctcagattcagctcttatggatcatttgttacaacaccaggatgtttttgggaattataacaaagcaagagaagcaatgggactatcatattcatcaaacccaacaccgttagataacgaccagaagaaaccttctcctgcaacggctgtgacaaggccacagcctccggagctagctctcaggtgtccacgttgcgactcaacaaacacaaagttttgttactacaacaactacagtctcactcagcctcgctacttctgcaaatcatgccggagatattggactaaaggtggaactctaaggaacatccccgtgggtggaggctgccggaaaaacaaacgatccacatcttcggctgcaagaagcctcagaaccactccagaacnncgcgtccacgacgggaaagtcttctcggcggcaggttttaatggg

SEQ ID NO: 120640 - DNA, 739 bp, Arabidopsis thaliana
  unsure (1)..(739): unsure at all n locations
nnnnnnnnnnnnnnnnnnnnnnnnnnnnnnnnnnnnnnnnnnnnnnnnnnnnnnnnnnnnnnnnnnnnnnnnnnnnnnccacgcgtccgcccacgcgtccgcccacgcgtccgcaatggcgcagacattaatggcgacaactcgtccgtacgttcttctctcttccacaagagcgagtctttatcgcctttttcaatcttcaaagagacccttcgcttcattctcagctcctctcgtgagattcactaactcgagatgtgtaagcgccgttttgtctcgtaaagagactgcgccgtcgtcgatttacggcaatagagtttctagggtttctgggtttggtgctttggacattcgcagccttaatttcagtactaaatcctctcaaatcaatgatgctggttctattgatcaaacccttatgcaatccatggagctaaagatcaaagaacaattgaatgcagagtcggttactgtaacggatatgtctggagatggacgtcatgtctgcatcaatgtggtatcatcggcttttgagggacaatctgcagtgaacagacaaaggatggtctacaaagccatttgggaagagcttcagaacgttgttcatggcngttgatcaaatggcaacaaaggcttccttcttnaagttttnaggggttaaattttccgnaccttttaaaggggtttcaaananccttaaaatttatttngatttggnnggcaaacctnntttggtttt

SEQ ID NO: 120641 - DNA, 465 bp, Arabidopsis thaliana
  unsure (1)..(465): unsure at all n locations
gcgatcaaacccttatgcaatccatggagctaaatatcaaagaacaattgaatgcanagtcggtgactgtgacggatatgtctggagatggacntcatgtctgcatcaatgtggtatcatcggcttttgagggtcaatctgcagtgaacagtcaaaggatggtctacaaagccatttgggaagagcttcagaacgttgttcatcccgttgatcaaatgacatcaaagactccttccgaagtttgaagcgttaaattttccgaactctaaaaggcttcaatatcttatattatttgattagctgacaatgcggtttgttttatcaaaaagaaaaaagccaaaggaactgatatccagcctttgggtattttttaagtactttgattggttctcttgcaacccgccaacacatgttaagtgttggagcctttgcagtttgcgggtacacgtgttttgcggtttcaat

SEQ ID NO: 120642 - DNA, 525 bp, Arabidopsis thaliana
cccacgcgtccgttttcttcatcatctttcccatgatcgtctctcgcttctcaacgcaatcttcttcacccaatctctaaatctctcctaaattccatgtctctcgcttccatttcgccgtttagctgccggagctgccgtaattgccgctgcatccggtggcgctgtctacctgtctccgtcggttgcctccagcgacaaaggacgtggtccgattctagattcgttgaggcgtaggcttggtgatcccaccgcttctgtaccgtctcgatctgctcaagagtctgctctgattgcagccaccgcttctgatccgctcgatgttctcgtcattggcggtggagccaccggttctggagttgctctttacgctgatacacgtggcctccgtgttgttttggtggatcgcgaggatttctactctgggacttctttacgatctacaaagctgaatcattgaggggttcgttacttggttaaaactgtttttaattttttttatgtactagttaatgtttatatttt

SEQ ID NO: 120643 - DNA, 482 bp, Arabidopsis thaliana
  unsure (1)..(482): unsure at all n locations
cgcgtccgcatctacatcaccggtaaaaatggcgatgtgggtattcgggtacggatctttaatatggaaaacgggttttcctttcgacgaaagcctccctggtttcattaaaggctatcgccgtgtcttccatcaaggtagtactgatcatagaggaactccggattttccgggaagaacagtgacattagaagctgctcatgaagaagtttgttgtggagttgcttacaagataactaaagaggaagataaaagagatgctttattgcatttggaagtgagggagaagcaatatgatcagaaagagtatcttgatttcttcactgactctaatgcttcggaaccggctgtggcaggagtaatggtgtacatagcttcaccctgaccagaagggcaccaccacctacttagggcccgctcctcttgaaggtattgcccaccaggtngttaagcgganggccttnngggccancagggcttnt

SEQ ID NO: 120644 - DNA, 341 bp, Arabidopsis thaliana
gcgtccgcacccaattggcgcgtgttgtcttcatcttcttcctcctctcgacgacgaagagattaaagagagacggccttttctcagtttctgctccgattcgtatatcttctgtttcgtacgagtgttgtaagacgtttgttttgcctgagactagacgtttgtcatggatatagatcttcgactacattcaggtgacctttgcaaaggagatgatgaggatagaggacttgataatgtgttacacaatgaagaagatatggatattggcacaattgacgatgtttctgttgaggttaatactgatgagagtgtaggcatgggtgttccaactggggatt

SEQ ID NO: 120645 - DNA, 592 bp, Arabidopsis thaliana
  unsure (1)..(592): unsure at all n locations
accacgcgtgcgcacctntctctcgccgacgacgctacaaccatggcgtctctcgctctctccggctcctgctctctcgctttccctctcaaatctcgatctctctctctccctcgtcctccttcttcctctctcaatttgacgaaacctctccgatctctcgattctcgcttctccttactcaaatctccacttcccgtctctttacgccggagatcatcaactctcgttaaagcctcttccaccgtcgcttcagcttcctcttctccaactcctcctttggttccagctccggttccatggcaaggagctgccattaagcctcttctcgcttcgatcgctactggtttgattctatggttcgttccagtccccgaaggtgtcactcgcaacgcgtggcaattactcgcgatctttccttggcaacaatcgtngggntnaataantaagccggttnctttnggtgctgtnncntaaatggggttaaggggttccgttttaccaaaaccnaaggttggcggcgggttntcggtttngngnnccaatcccgnggtaatggtttgcctttttttggtngggttaaaaaangntc

SEQ ID NO: 120646 - DNA, 417 bp, Arabidopsis thaliana
gactatctggacactttcgatttctgaagttgagagacgactatggcgacgaacaatggtgatgtcttgatgttggaggcgacgccggaggctgcgaggccctgggctagtgcggcgaatgcagaagttatcgatgcgcttccttatatagacgacgactatggcaatccattgattaagtcggaggtagaccgtttggtggaggaagagatgcgtcggagctctaagaagccagctgactttctaaaggacttgcctcctcttccgaagttcgattttaagaactgccctgttcttggcaaagagtatgagcgtgttagagctgggaagcctcctgtgcggatagatttcgaatcccgatacaaacttgaaatgccacctgccaataagaggaatgatgatgctgcctggaagcag

SEQ ID NO: 120647 - DNA, 331 bp, Arabidopsis thaliana
ccataacttaatggataatctaattcttgaagataacgttggtgttctgcgtggagccgctaaacgcgccgctacttctgcttggcatctgcgccacaacagcgttcgtaagcatgtggatgcataacgtagcagctgcagtcatgatgatgcctgtcgctacggggatacttcagagactgccctcgtcatcatcgacgacggaagtggtgcatccggccgtggggaagtttaccacggcggtggtgttaggtgtgatatactctgcggcggttggtgggatgagcacactcactgtaacaggactgaatctgagtcttgttggaatgtg

SEQ ID NO: 120648 - DNA, 508 bp, Arabidopsis thaliana
  unsure (1)..(508): unsure at all n locations
nnnnnnnnnnnnnnnnnnnnnnnnnnnnnnnnnnnnnnnnnnnnnnnnnnnnnnnnnnnnnnnnnnnnnnnnnnnnnnnnnnnccacgcgtccgggggacacttttgtttttataacttacgcttaaaatcctatgaattcgccgccggttgacgcaatgattacccggagaatcatcgtcacaaagatctatcccaacgccgtttctcacagggacgtttaacctcgttgaagatagttccatcgacgatgttatctcatggaacgaagatggttcctctttcatcgtatggaatccgacagatttcgctaaagatttgcttcctaaacacttcaaacacaacaatttctctagtttcgttcgtcagctcaacacttacggattcaaaaaagttgtaccggatcgatgggagttttcaaacgatttctttaagagaggagaaaaacgtcttctccgtgagatccaacgtcggaaaataacaacgacgcatcaaacagttgttgctcc

SEQ ID NO: 120649 - DNA, 1094 bp, Arabidopsis thaliana
tatacgaccactatgggtaagctggtacgcctgcaggtaccggtccggaattcccgggtcgacccacgcgtccgtacatcagatatggccacatgattgacaatgtcgtgctcattgttactggaaccctgcatgagagagatgttcaagagttgattgagaaatgtcaccctttaggcatgtttgacagtattgctacactagcagttgctcagaacatgcgggaactctaccggttggtgcttgtggatactcctttggctccatacttttctgaatgcttaacgtcagaggatctcgatgacatgaacatagagattatgaggaacaccctctacaaagcataccttgaggatttttacaagttctgtcagaaacttggtggcgcaacagcggagattatgtctgaccttttggcctttgaggccgatagaagagcagtgaatatcactatcaacagcattggcactgagctcacaagagaagacagaaagaaactgtactctaactttggtctactctatccatatggtcacgaagagcttgctatctgcgaggatatagaccaggttcgtggtgttatggagaaatatcctccgtatcaagctatattctcgaagatgtcttatggagagagccagatgctcgacaaagcattttatgaagaagaagtcagaaggctttgcttagcctttgagcagcagttccattacgcggtattctttgcgtatatgaggttgagggagcaggagatcaggaacctgatgtggatatctgaatgtgttgcccagaaccagaagtccaggatccacgatagtgtggtctacatgttctgagtctggtaagaagtgtaatctgtctgaaaaaagcggagaataagaggaacccatatccttcttcttccttttcttcattactccatttttattagagaatctgctgtacaatcttgcggtctacattcactgtttatgtcgctctgcgcggatctaaaactcctcaatacccatctatccaatttgtttgttttttttcttcctcatattcttgcttggttccggtaaactctttgtaatgtcgaataatttcgatga

SEQ ID NO: 120650 - DNA, 724 bp, Arabidopsis thaliana
  unsure (1)..(724): unsure at all n locations
gcccacnccgnntntccccccttccccttggncaaggagcccgggatcccctccaccgcattgcctggcccccagggaagcagaaggcctgnccccacacttggccaccccaacccattggccccgagggcttgctatctgcgaggatatggcccaggttcgtggtgttatggagaaatatcccccgtatcaagctatattcccgaagatgtcttatggagagagccagatgctcgacaaagcattttatgaagaagaagtcagaaggctttgcttagcctttgagcagcagttccattacgcggtattctttgcgtatatgaggttaagagagcaggagatcaggaaccttatgtggatatctgaatgtgttgcacagaaccagaagtccaggatccacgacagtgtcgtctacatgttctgattctggtggtgagtcaaaaacacataaacaaatgtgaaatcttgagtctggttttcttcatcgctcctcatgtacaatcgttggtttttacattccctgtttctgtcgctctgtgtttaccagagtgcgtgtattgagtatctcccaataagaatctcttttatttgtttgtttgttgttggccatacactcttgtaagatcaaatttatttatgatgcataaaaattacttaaaaaaaaaaaaaaagggcggccgctctagaggatccaagcttacgtacgcgtgcatgcgacgtcagg

SEQ ID NO: 120651 - DNA, 784 bp, Arabidopsis thaliana
  unsure (1)..(784): unsure at all n locations
ggccngaatcccagggcagcccactgcgtccgggatttcttcttcagatctccggcgacaatcattgagatctgaatatcttacgttaaggagagaaagatgtacggattcgaggcgcttaccttcaacatccatggcggatatttggaggcgatcgttagaggccaccgtgctgggcttctcaccaccgccgattacaataatctatgtcagtgtgagaacctagacgatatcaagatgcatctctctgccaccaaatacggctcttatctccaaaacgaaccgtcacctctgcataccaccaccattgtggagaagtgtactcttaagcttgttgatgactacaagcatatgctttgccaagctactgagccaatgtctacctttttagagtacatcagatatggccacatgattgacaatgtcgtgctcattgttactggaaccctgcatgagagagatgttcaagagttgatcgagaaatgtcaccctttaggcatgtttgacagtattgctacactagctgttgctcagaacatgcgggaactctataggttggtgcttgtggacactcctctggctccatacttttctgaatgcctaacatcagaggatctcgatgacatgaacatagagattatnaggaataccccccttncaaagcatanccttgaggggttttaacaaactccttntcaggaantttngtgggcgcaacancagnagnttatgtnttncccttttggcctttnaagccgncagngnagcaantggatntcacttt

SEQ ID NO: 120652 - DNA, 465 bp, Arabidopsis thaliana
cagacgcgtgggcggacgcgtgggtcgcgatcacaatctctgcttcgatttcttcttcttcttcagaattcagatcagatctccggcgataatctttgagatctgaaatttcttacaatcaggagagaaagatgtacggattcgaggcgcttacgttcaatatccatgggggatacttggaggcgatcgtcagaggccaccgtgctgggcttctcaccaccgccgattacaacaatctatgtcagtgtgagaacctagacgatatcaagatgcatctctctgccaccaaatacggtccttacctccaaaacgaaccatcacctctgcataccactacaattgtggagaagtgtacgctcaagcttgttgatgactacaagcatatgctttgccaagctactgagccaatgtctacctttttagagtacatcagatatggtcatatgattgacaatgtcgtgctca

SEQ ID NO: 120653 - DNA, 747 bp, Arabidopsis thaliana
  unsure (1)..(747): unsure at all n locations
gaaggacctaaggatcttcctcctcaattggagtcaaacggtgcaagaggttcaggaagtgcaaacagtgttggttcaagcactacaagacccaaatctccatggatgccatttcctactctgtttgcagcaatctcacataaggttgcagagaacgacatgttgttgatcaatgctgactaccaacaactgagggataagaagatgacgagagcggagtttgtcaggaaactgcgggtgattgtaggagatgatctgctaaggtccaccataacaacccttcaaaaccagccaaagtcgaaggagattccaggaagcatcagagaccatgaagaaggtgcaggtggattgtaagtaaagtggatgatgatgatgacgaatatcaaaaggaagctgctttttatctatctacctgcctttgtggttctccttttgactttttctaattttagacttttggttttgggtcgggtcgttggtagagtttaaaatgtgtcgacttttctttctgtcgtgaaaaatcgtactatattatatgattctacttagtcaatgatgtcgttgggtctttgtttctttagctgcaagcaaaacattgttgtggaagtcgttgaatcttgacgaaaatttggtcgttaaaaaaaaaaaaaaagggcggccctctagaggatccaagcttacgtacgcgtgcaggcgacgtcaagatcttctatagttgtcnnnnnnnnnnnnnnnnnnnnnnnnnnn

SEQ ID NO: 120654 - DNA, 582 bp, Arabidopsis thaliana
tcatgtgcttcctgctcttatgaggaggttccacgaggcgaaagtgaatggagcggaggaagttgtggtgtggggtacaggtagtccgttgagggagttcttgcatgttgatgatttggctgatgcttgtttttccttgctcggacgcgtgggcggacgcgtgggtgttaacattggaagtggtcaagaagtgactattagagagttggctgagttggtgaaagaggttgttggttttgaagggaagcttggatgggattgcactaagccagatggcacaccgaggaaacttatggacagctcaaagctcgcgtctttgggttggacacctaaggtttctcttagagatggtctgagccaaacttatgattggtatttgaagaatgtttgcaaccgataagttaatggtttctcttctcatatatacacaactattgagtctcaggtaaatcagcttatcaccacattgtgatttaaacctttctttgagattcgagaattgctttttttgttatcaaaattgattcatttagagataagacttgcttctttatacaacattgtctgaggaattttaataat

SEQ ID NO: 120655 - DNA, 436 bp, Arabidopsis thaliana
  unsure (1)..(436): unsure at all n locations
cgcgtccgaggacgcgtgggtaaatcgccagtattcgccgcaagaaagatgtctccggcgaagaagagccgaagttttcctccgataagcgagtgtaaaagcagagagtatgattcgatcgctgcggatctcgacgggactctgcttctgtcaagaagctctttcccttacttcatgctggtggccattgaagcaggtagtctcttccgtggattgatccttcttctttctcttcccatcgtcatcatcgcttatctcttcgtctccgaatctctcggaatccaaatccttatcttcatctccttcgccggtatcaagatcaagaacatcggactcgtctctcgcgccgttcttacacgggttttacgcggcggatgtaaggaangatagtttttacggccgtttgataaaggnaaagaaccgggaatgtagttgt

SEQ ID NO: 120656 - DNA, 446 bp, Arabidopsis thaliana
acgcgtccgggagttacagtagattgagatttgaacgtgaaattctccgagtccagaaacattcctctccttccgtcgtcgtcaagaagatcaatttcattgaaatcgaaagagtgtgcttgaatcacagcttatgcagacgctacaccagtcccaacttctccagaatccggccgaggcggcgaacaatcagtctgaatcggacgcgccgccgaaacaggtggctcaggccatggaacgactcaatcaagcggctagggttatcgccgatatccgcctcggcgctgaccgtatccttgaagctatgttcgtggcttcgcaacctcgtcacacagacatgcctcttcagctctttctcagagaagacgcctccatgcgtcaacatcttcaggatcttcgcttaatacggaagaaattggaagaatctggagtgttaactgaatcac

SEQ ID NO: 120657 - DNA, 769 bp, Arabidopsis thaliana
tttacacacatataaacatctgaattctcttacaggaaccgaacatggagtcatcatcgtcgacttttctcaccacgacaagcttagacaagaaaaaaccatctccggtttcaagaaaatcaccaaagcaaaagaagaagacgacttcgacgaataaacccatcaaagttcgttacatctcaaaccccatgagagttcaaacttgtgcttctaagttcagagagctcgttcaagaactcacaggccaagacgccgtcgatcttcaaccggagcccatctattccccttcctccgacgaccacaacctttctccaccggcggagaatcttgcgccacgtgttcttcatcaggagccgttcggtgagagagacagtgattgttatgagccgttgaatgcggaagacatgtttttacctgatcagatgtcggcaggtttttctgggtttttctctaatgggttttacaatgtcaatgactttggaagcatcgattctatgtgataatctttcagagtttttattaggggtttcatctagtagatatatatcattatgatatcgatacataaatttaacccccaaattgatacatggatatgttaattactatagggtttgggatgcgaattagtatatgagtaagttgttttgtaaacagtttttttttcttaaatttgtttgtttgttttttcttacatcaaaacttcggtaatgtatgaacatattttctatttaatcaagaaacatgtgataatctaaagttagcgatt

SEQ ID NO: 120658 - DNA, 579 bp, Arabidopsis thaliana
  unsure (1)..(579): unsure at all n locations
nnnnnnnnnnnnnnnnnnnnnnnnnnnnnnnnnnnnnnnnnnnnnnnnnnnnnnnnnnnnnnnnnnnnnnnnnccacgcgtccggaaatcaataacgtctttggctttaaacctttgtgactttgtgtacaaattccggagtgtctctctcccaaatcagcatcgcagattcgatttctcatcctaagagagctgaaaaatggaggttggattcaaggcattgctcgatgatcttgacgttctcgagaaatctctctcagatccggctctgatcaacaagctgcgatcacatgttgagaatctagccactctgtctaaatgtaatcctcaccggcgttccaaagtcaaggaactaagctcggaagtggtagatagtaatccttacagtaggcttatggcacttcagcggatgggcattgtggacaactatgagagaattagagagttttccgtcgccattgttggaattggtggtgttggaagtgttgcggctgagatgcttaccagatgtggtattggtcgtcttttgttgtatgactatgacactgtcgaactagctaacatgaacagactgttttt

SEQ ID NO: 120659 - DNA, 506 bp, Arabidopsis thaliana
  unsure (1)..(506): unsure at all n locations
nnnnnnnnnnnnnnnnnnnnnnnnnnnnnnnnnnnnnnnnnnnnnnnnnnnnnnnnnnnnnnnnnnnnccacgcgtccgggaagcagcagttgagaaccgcgtaacagatcttcttacccgttacaatgggaaatttagacactatgatgtgaacaatgagatgctccacggatcgttctatcgagatcgactagactctgatgcaagagcaaacatgttcaagactgcacacgagttagacccattagcaactctgtttctgaatgaataccacatagaagacggatttgactcgaggtcatcacccgagaagtacataaaactcgtacacaagctgcaaaaaaagggtgcacccgtgggaggaatcgggattcaaggacatataaccagccccgtcggtcacatcgttcgttctgctttagacaagctaagcacactcggattaccgatctggttcacagaacttgatgtgtcctcgactaacgaacatataagaggggatgat

SEQ ID NO: 120660 - DNA, 956 bp, Arabidopsis thaliana
tacgactcacttagggaaagccggtacgcctgcaggtaccggtccggaattcccgggtcgacccacgcgtccgaatatttttctctactcaattcactcacactccaaaagcggtagcaatgtcagccaccgccgccgcctcctcctcgatcgccgttgccaccaactctctcaggaacgtgactctgtcttccagatcgccccttccatcagccatctccgtggctttcccttcccgtggacgcaatactcttcagcgacgcctcgttctcgtttcctgcagtactggagacggatctaagcctacgattctcgtggcggagaagctcggtgacgctggtattaagcttttggaggatgtcgcgaatgtcgactgttcgtataacatgactcctgaggagctcaacattaagatctcgctctgtgacgccttgatcgtgaggagtgggactaaggttggccgtgaggtgttcgaatcgtctcacggacggctcaaggttgttggtcgcgctggtgttgggatcgacaacgtggatctgagtgcagcgacggagtttgggtgtttggttgtcaacgctccgacggcgaacacgatcgctgccgctgagcacggaatcgctcttatggccgccatggctaggaacgtagctcaagctgatgcgtctgttaaggctggagagtggaagaggaacaagtatgtaggtgtttcacttgtgggaaagacccttgcagtgttgggattcgggaaagttgggacggaagttgctcgtcgtgctaagggtcttggtatgcgtgtcattgctcatgatccctatgccccagcagaccgtgcacacgccattggtgttgacttagtgagctttgatgaagcccttgccaccgcggatttcatttctcttcatatgcctcttacgccaacaacatcgaagatactaaacgacgaaacctttgccaaa

SEQ ID NO: 120661 - DNA, 303 bp, Arabidopsis thaliana
acacccacgcgtccgtttccttcctaatttccaacctctgttcttagcaatatattttttctccaaaaataattctcagtttgattttcttcttctagctcttaagtatatttctttgttgttatttatcttttaatcctttaatctcatctttgtttatctttaatcaaaacccattctttacatgggttcttgaaaatctagaagaaataaaggaaacataacacaaatagaaagaaaaagaagctaatggtcttaaatatggagtctaccggagaagctgttagatcaaccaccggtaac

SEQ ID NO: 120662 - DNA, 1088 bp, Arabidopsis thaliana
gcgtccgcacttacccttaacctcaaaagccatttagactcttcttctctctttcagatctctcttcttcttctgtttcttctgctcacgtagagcacaaacaagccaagaaccatctctgctctttctttcaccttcagcaaccaaagatgatgaacagctgtggaatccaacaaaacgcttttgaagagatgaggagaaacgccgccgtttctgatcggagagacgccgtgatttgtcctaaacctcgtcgtgttggtgctcttaatcaccactcttctcgatctctccgttggcaactcaatcatcagatggaattatgtgaatcgaattcaggaagtgagattttggatttcatcctcacaaagggtggtggtggtggtggtgagcaagatcagacgaggacggtgatgacgccacctctgttctttacagggtcacctccaagtagagtttctaacccattaacaaaagattcgctttttcgagaagagcttctcatggtggcttctccgagtccatcgactccacgagcaaccaaaccgcagccaccgtcttctccaaggaacggtagttgtgttatggcggcgacgagtttcgggaacaatcctgtggttcgtgttgtggggtttgattgtgacagacgcagcagcaacaggagcatttcgactcttgcataagagtagtccaatatgcatatatatataacagagagagtattaaaagaccaactaagaaaggtttaggtattgattatgtgggagggttttgttggtgaaaatgtgtaaatatgttgaaaaaaagtggggggatttataaatgggattgttataaatttagggttttggtttgggtgtccattttctaaaattttgtaattaaaaaggggggagagagagtggttaatttggtatctttagtgggaaataagagcgtagtgtaatcttccttattgtaacaaaaggaaaggctcgaaagagttttgaaatgtaaagatatcatttctctgccaaaaaaaaaaaaaaaaaaaaaaagggcggccgctctagaggatcccagcttacgtacgcgtgcatgcgacgtcatag

SEQ ID NO: 120663 - DNA, 512 bp, Arabidopsis thaliana
atgatactgccagctaccatacgactcactttagggaaagctcgtacgcctgcaggtaccggtccggaattcccgggtcgacccacgcgtccgctctttcccttaacctcaaaagccatttagactcttcttctctctttcagatctctcttcttcttctgtttcttctgctcacgtagagcacaaacaagccaagaaccatctctgctctttctttcaccttcagcaaccaaagatgatgaacagctgtggaatccaacaaaacgcttttgaagagatgaggagaaacgccgccgtttctgatcggagagacgccgtgatttgtcctaaacctcgtcgtgttggtgctcttaatcaccactcttctcgatctctccgttggcaactcaagtaagatacttttttgtataaagttcaaaacttttttgaggcaaatcacttgaagcaatcagatttattggtttttgattttggagtcatcagatggaattatgtgaatcgaattcaggaag

SEQ ID NO: 120664 - DNA, 750 bp, Arabidopsis thaliana
  unsure (1)..(750): unsure at all n locations
nnnnnnnnnnnnnnnnnnnnnnnnnnnnnnnnnnnnnnnnnnnnnnnnnnnnnnnnnnnnnnnnncgccacgcgtccgcttgttctcctcaccgcttctttcttccctgaactcagaacttagaacaaagaactctcgtagacgaagaagaagatgacggtagaaggagtgaaccctaaggcgtatccgttagctgattctcagttatcgataacgattcttgatcttgttcaacaagctacgaattacaaacagttaaagaaaggagctaatgaagctaccaagacattgaaccgtgggatctctgagttcattgttatggctgctgatactgagcctctcgagattcttcttcatcttcctcttcttgctgaagataagaatgtgccgtatgtgtttgtgccatcgaaacaagcccttggaagagcatgtgatgtaaccagacccgtgatcgcttgttccgttacatcaaacgaggctagtcagttgaaatctcaaattcagcaccttaaggatgccattgagaagctcctcatctagattcttggtggaatgaatgaatgatgggtctctccatttatgaagaggcttggactgaagtgagtttatgtgcaactttttagcctatgagaaaaacaaaaatcttgtgaacgaatcctatcctttttgaagattgtaatgctttttatttgatattgtgttggtgccaatgcatttatgaacaacaagaatccttttaaagtgagtttc

SEQ ID NO: 120665 - DNA, 430 bp, Arabidopsis thaliana
tcgggttatgcaaatatgctcgatatagtaagtttgaaactcggggtgtgctgaggaccagtgagttgaacaacacttcaaatgtgatttgttctctgggttttgatcgggacgaggattattttgccacagctggtgtgtcgaaaaaaattaagatatatgagttcaattcccttttcaacgaatctgttgacattcattatccagccatagaaatgccaaatagatcaaagcttagcggcgtttgctggaacaactacattaggaactacctagcttcctctgattatgatggtattgtcaagttatgggatgtgacaacaggacaggccatttcacatttcatagagcatgagaagagggcttggtctgttgacttctctgaagcttgtccgacaaaattagccagtggaagcgatgattgttctgt

SEQ ID NO: 120666 - DNA, 631 bp, Arabidopsis thaliana
gtacttatcttccaattataggaataaacatttcgccagtgaaaaaaggtctcattccttccttacttgtggagatggagatctgaatctctaaagtttcgatttttatttattcacttttatgcccaaaaagaaaaatcgttactttaaagccaaaaagaagaatacacaaacttcattcactctctcccattctcggatctctctcagtgcacagtggttgtcactcttctcctttggtcgaaactctttcttggaaagagcattttgttatcaagactctgaagagctcttttgggaggatagtaaggttggatgatgagagggagatctgatggaggcctaaagaagcggcttattgcttcggtctgtgtcgtggctctattcgtctgtttcttgtttatgtactatggttcctctagccaaggtgcatcagcattggaatatggaagatctttgagaaaactcggatcgtcttatttgagtggagatgatgataatggtgataccatacaggatgattctgtggctaatgcagaagacagtcttgttgtcgccaaaagttttcctgtttgtgatgaccggcactcggaaatcatcccttgcttagattggaattcatctccaaatg

SEQ ID NO: 120667 - DNA, 717 bp, Arabidopsis thaliana
attctcaagtcttctctttcatttttttgttgtcgccgtctggttttactttttttctttcttcaaaatcattcattctttaacatcaagcaagaatcaaattctgggcatactcaaattcttcatctttttaatatatatttttgccaagaacaagtcttttactttatctctgcagtttttgtttgctcctttgtgcatttggtgatgattcaatcaatgattgtctcttacctttgatctaatcgtttccgcaaaattctcttctcgttttctctgatttcaagctcaacaatctcaaaataatcaatttttggtagtgtgttaaatctgagaacggtttttgggttttgggtataaagcttgttactttgatctttattttgtgaattcgaagtggaaatggaatcgttaccatctccatttggcgatccagctcctaatttatccaattcggagctccgagaaactgcttacgagatcttagtcgctgcttgccgtagcactggaagtcgtccgctgacttacatccctcaatcgccgaaatctgatcggagcaacggtctgacgacggcgtcgttatctccgtctccgtcgcttcatagatctctgacttctacagctgcgagtaaggtgaagaaggcgttagggatgaagaaacgaatcggagacggagacggaggagcgggagaatcgtcgagtcaaccggatcggagc

SEQ ID NO: 120668 - DNA, 1045 bp, Arabidopsis thaliana
  unsure (1)..(1045): unsure at all n locations
tttaagaagcatccctaggtatctactcgctgagaccgtgggacaatgctcacttaagatcacatattcagctcatacagatctgactgtcaaatttcagagtcatcggagcagggacgatactaatccttaccttcccgttgctccatcagccattgatagtactggtcaggtggctgtgggtgtagacgggaagaagatggaacctgaaagtaatgttcttctcgcatctattgaaaacatgcagtatgcagtaaccttggatgttttacacatggtttttgcggcttttggggaagttcaaaagattgcaatgtttgacaagaatggtggggtacaggcactgatccaatactcagatgttcaaacggctgtggtggcgaaggaagcattggaaggacattgtatctacgatggtggtttttgtaagctccacattacttattcacgccacaccgacctcagcataaaggtgaacaacgatagaagcagagactacacaatgcccaacccaccggttccaatgcctcaacaacccgttcagaatccatacgccggcaatccacagcaataccacgcagcaggtgggagccaccaccagcagcagcagcagccacaaggtggatgggtccaaccaggagggcaaggctctatgggaatgggtggtggtggtcacaatcattacatggcaccaccatcttcaagctcaatgcatcaaggtccgggtggtcatatgcctccacagcattatggtggtcctggtccaatgcattagagagagaaaagaaagtccctcaaaagtcgaagacaaagaaagatgtttaatctctctctttatttctcttagctctgttttttaaagtttggaacacttgtacttgtgtccaaaagatgtttttttaaggataaaaccatttgagaaatgtattagaagctcttgatttctctaaaaaaaaaaaaaaaaagnnnnnnnnnnnnnnnnnnnnnnnnnnnnnnnnnnnnnnnnnnnnnnnnnnnnnnnnnnnnnnnnnnnnnnnnnngcaat

SEQ ID NO: 120669 - DNA, 536 bp, Arabidopsis thaliana
  unsure (1)..(536): unsure at all n locations
cnnnnnnnnnnnnnnnnnnnnnnnnnnnnnnnnnnnnnnnnnnnnnnnnnnnnnnnnnnnnnnnnnnnnnnnccacgcgtccggaagaaacctgtttccacctcggtaaacaactctttggttgagctgagtaattacaaccagaaaagagaagagtttgaccctgaatatgacaatgatgctgagcaactcttggcggagatggagttcaaagagaacgatactcctgaagaacatgaactgaagctgcgtgtgttgcgtatctattcaaaaaggcttgatgagaggaaacgtagaaaagaattcataatagaaagaaacctgttgtacccaaatccctttgagaaggacctgtctcaggaggagaaagtacaatgccgacgtttggacgtttttatgcgtttcattcacaagaggagcacgacgagctactccgtaatgttgtaagcgagtaccgcatggtgaaacggctcaaagatctcagggaagctcaagtggcaaggtgtcgttcaacggctgaagcagagaggtatctg

SEQ ID NO: 120670 - DNA, 1083 bp, Arabidopsis thaliana
taggtccactatagaagagctatgacgtcgcatgcacgcgtacgtaagctcggaattcggctcgagcttagctacaaaagaacagtcgccggcaaaagtctcagcctttttcctctccgccgttcacagttcaccggcatttctctcttctttctttttctccgactagatttccttgtctctttggtttcttggcgatgggagacgagaagccggtgattgttatggccaatcgagaaagagatcgagagcttctgattcccgtcgctgattccggcgacaaagacgacggttcttcttcgaagccttcttcttcttcctctgcttcttcttcttcgcatcaatccagccacgagactttaagcttgttcattaggggctgggcgtcaaagaagttcatgacaggctgtgttatcctacttcctattgcaattactttctatataacatggtggtttattcactttgtcgatggattcttctctccaatatatgcactacttggaatcaacggatttgggttcggttttttgacttccattgcattcatcttcttggttggggtgttcatgtcttcgtggttgggggcatcggttctgaacttgggagagtggtttatcaagcggatgccatttgttcgtcacatctacaacgcctccaagcaaatcagcactgccatatcgcctgatcaaaatacacaagctttcgaggaggttgcaatcatcaggcagccccgtgtaggtgaatatgcatttggcttcattacatcaactgttgttctccagaactacccaaccgaggaggaactttgctgtgtatacgttcccacgaaccacctttacattggagatatactacttgtcaacagtaatgacgttatcaggccaaacctctctgtccgggaaggaattgagattgttgtttccggtggaatgtcaatgccgcagattctatcgactcttgataaacctttggcctcgattggaaatgaatcttaaagtgactattcaaaaacctttggccgatcgataggaaaaaaacaaaaatcagaagagacgtttcacaaaatctgagcgaatagag

SEQ ID NO: 120671 - DNA, 775 bp, Arabidopsis thaliana
ggcgtcttcttcttcatcatcaatctctcaagacatgctctcttttttctctaaccagatcgaccggcaaaaagatgtgtctaatgaggaaaaaaccctaaccaatctcgaaaaatctgacggttcacaattccctggcgatgactaccgtccgtccgatcggaaaaactggatggctggtcttacgttggagaaactaactctaaacaagatcgtgtggccaggaacgcatgattcagccaccaacgatatcggaatacctctgatctctcgtcctttagctgaatgccaatcgctctctatctacgagcagctcgtcctcgggacacgtgtcctcgatatccgtgtgcaagaggatcgccaaatctgccacgggattctgacgtcatacgaaattgatgttgtcattgatgacgttatcagattcttgtcggagactcactcggagattgtaatcctggagataaggactgagtttggacacaaagatcctccggggttcgagacttacttggcagacaagttaggtcaattcttgatacatcaagatgatagcttgttcaacaagccggtatcagagattttgccgaaaagggttatatgcatctggaaacctagagagtctccaaagccgagccgtggtggaattctctggaactcagattatctaaaagataattggatcgatacggatcttccatggacgaaatttcagagcaatttgaagcatctgagtgagcagcagccgacatcttctagaaaattcttttaccgg

SEQ ID NO: 120672 - DNA, 942 bp, Arabidopsis thaliana
  unsure (1)..(942): unsure at all n locations
atgatttgccnnnnnnnnnnnnnnnnnnnnnnnnnnnnnnnnnnnnnnnnnnnnnnnnnnnnnnnnnnnnnnnnnnnnnnccacgcgtccgctttctttgcttctctaacaaaccaacttcagcgacaagataacaaaacgctttcacacgatcggataaaatggcggagaagagctttaagtacatcatcctcggcggcggcgtctctgccggatacgcagctaaggagtttgccaatcaaggggttcaaccaggagaattggctgttatctcgaaagaggcggtggctccatatgaacgccctgcacttagcaaggggtatttgtttcctgaaggggctgctagacttccaggtttccattgctgtgttggtagtggtggagaaaaactgcttcctgaatcctacaagcagaaaggaattgagttgatactaagcacagaaatagtgaaagctgatctctctgccaagagtcttgtcagtgcaactggggatgtcttcaagtatcagacgctcataattgcaactggttctactgttctcagattgactgattttggagtaaaaggtgcagactctaagaatatcctctatctgagagagattgatgatgccgacaaattggttgaagcaattaaagctaagaaaggtggaaaggctgtagttgttggcggaggttacattggtcttgagcttagtgcaagttttaagggatcaacaatttagatgtcactatggttttcccctgaaccttggtgcaatgcctaggctttttcanccgccgntatttgcttgcttttctatggngcctttctttttcaaaccaaggggggtgaaggtcccttaaaagggaccagtgggaatcttgggtcccaagntnagccaaattggggggntaagggaagtcacctcaaggttnggggggcatttganncgcnntttt

SEQ ID NO: 120673 - DNA, 480 bp, Arabidopsis thaliana
atcaagagattagtaagacctaactcttaacgaacttttagataaaagcttataactgagagagacatagatcgacaaaagtctctataccttcttgtaacgtggtggttaattaatcatggccgatcaaatctccggcgagaagccggccggagttaatagattcgctcttcaatgtgctatcgtcgcctccatcgtctccatcatctttggttacgatactggtgttatgagtggagcgatggtgtttatagaagaagatttgaagacaaacgacgttcaaatagaagttctcactggaattctcaacctttgtgcccttgtcggatcattgctcgccggaagaacgtcggacataatcggacggcgttacacaatcgtcttggcctcaatactattcatgttaggctcaatattgatgggttggggtccgaattatccggttcttctatccggtagatgcaccgcttgactcggagt

SEQ ID NO: 120674 - DNA, 497 bp, Arabidopsis thaliana
  unsure (1)..(497): unsure at all n locations
cnnnnnnnnnnnnnnnnnnnnnnnnnnnnnnnnnnnnnnnnnnnnnnnnnnnnnnnnnnnnnnnnnnnnnnnccacgcgtccgcaattttttctaaacaacaaatccagcatcgagaaaagtttctatttttggattttccaaatattaacagttatagcttcgtgacttcaagaaatatccatttcaagattatttaacctttttttgtctagcaagtcatcgtattctactttggtgtgggcaaatgggaagttcatgtttacctccagggttccggtttcatcctacggatgaagaactcatcgaatattacttgaaaagaaaagtcgaaggtctcgagattgagcttgaagtcattcccggcatcgatctttatagttccgatccttgggagttaccagacaagtcgtttctcccaaaccgggacatggaatgggacttcttgtgctcaagggacaaaaaatatcctaggggttttcgcacaaagcgaggaac

SEQ ID NO: 120675 - DNA, 609 bp, Arabidopsis thaliana
  unsure (1)..(609): unsure at all n locations
gccnnnnnnnnnnnnnnnnnnnnnnnnnnnnnnnnnnnnnnnnnnnnnnnnnnnnnnnnnntttctctgtaattccacgcggccgctaccttccatctctctcacccactctcctcggaaaccacagcgacggacggacggacggacgataaaacttttgcctctaatttgctcctacaaatctggaatcagccggagcgaatctcgaagcttatgatctcgacttgctgaagaggctgggaatggctggtaaagaggagactgatgtatctgcacaagggtctttaaccagggaggccactgagatatggaggagtgagttggaatctcgccggtttcaggtagatagtttagaagctgaacttgtggatgtcaaggcttaccttgagtttggctcagaagaagatgccagaaaggagttaggagttctttcgggtagggtcagatcgactgcaactatgttgcgttatttgagatcaaaagctagagtcttggccattcctgatgatctagcaaatgtgtcatgcggtgtggaacagattgaagaactgaaaggattgaaccttgttgagaaagatggtggttcattttcttttgacggggctagga

SEQ ID NO: 120676 - DNA, 861 bp, Arabidopsis thaliana
accaaaactgcgacgactcaaaacaaagagatactatactatcatcaaaacgattagcttgatatcgaattcgcggtcgcttccaattcaacgccggtggcttttaatcggcttttacactttctgatttctcggtctccgattaactgatctaggttttttttggggaggagaatgcaaaggtagatgatggatagtggtaataataatatgaatagagccaagaggaatttggatgggaacgatgatgatcagcctgagcgaaaacgccctgcttttgctagtgtgattgttgaggctctgaaagtagatagtttgcagaagctttgctcctctttggaacctattctccgccgagttgtcagcgaggaactggaacgtgctttagcaaaactaggccctgctaggcttactggaagttcgggctcttctccaaagcgaattgaaggtccggatggtcggaagttacagttgcacttcaaatctaggttatctctcccgttattcactggggggaaagtataaggagagcaaggtgctgtgattcatgttgtcttgattgatgcaaacactggccgtgctgtgggatatggtccagaggctttggcaaagcttcacattgttgtgcttgagggtgactttaacactgaatatgatgaagactggacacaataaagaatttgaaaggcccatgttggtaaaaaaaccgtttccaggaaaagaagaaccggttggctggactgggaagaaagtggtcttgttttaccaccttcaaaggggaaaaggggggtttgggaaaaccttttgggggcccgaagccttagattctttccacccgggaattaaattcttcgagagttt

SEQ ID NO: 120677 - DNA, 312 bp, Arabidopsis thaliana
gtcgaccacccgtccgctcaagcgaccggaatcgcagagcaaactatagactacagaaaacacttccgtcaccggcgaatttactcaggcggtaatctcaccggacatatctcagaaaagagggtttttttattttctggaggtaataacattatcaacaggaatttcgagaggaacgatgacgacgagcctgagcgaaagcgtcctgctcttgctagtgtgattgttgaggctctgaaacttgacagtttgcacaagctttgctcgtctttgcaacctatcctccgccgagtctgtctagtgaggaggtgg

SEQ ID NO: 120678 - DNA, 1638 bp, Arabidopsis thaliana
  unsure (1)..(1638): unsure at all n locations
nnnnnnnnnnnnnnnnnnnnnnnnnnnnnnnnnnnnnncactatacggatagctggtacgcctgcaggtaccggcccggaatccccgggtcggcttccgcatctcttttcatttctctctgatttctcgatctctccgtccaactatgtctgccttcacaagcaaattcgccgatgagttgatcgccaacgctgcctacatcggcacacctggaaaaggtattttggctgctgatgagtccactggtaccattggaaagcgtcttgcgagcatcaacgtcgagaacgttgagaccaacagacgtaacctccgtgagcttctcttcaccgcccctggtgctcttccatgcctcagtggtgtcatccttttcgaagagactctgtaccaaaagagttccgatggtaagcttttcgttgatatcttgaaggaaggaggagttcttcccggtatcaaggttgacaagggtaccgttgagctagctggaaccgacggtgagaccaccactcaaggtcttgacggtctcggtgacagatgcaagaagtactacgaagctggtgctcgtttcgccaagtggcgtgcagtcctcaagatcggagagaacgagccatctgagcattccattcatgagaacgcttacggattagctagatacgctgttatctgccaagagaacggtcttgtaccaattgtcgagcctgagatcctagtcgatggatcccatgacatccagaagtgtgctgccgtgactgagcgtgtccttgcagcttgctacaaggctcttagcgaccaccacgtcttgctcgagggtacactcttgaagcctaacatggttactcccggatctgacagccccaaggtttcacctgaagtcatcgctgagcacaccgtccgtgcccttcagagaaccgtcccagcagctgttccagccattgtcttcttatctggaggacagagcgaggaagaagctaccaggaacttgaacgccatgaaccagttgaagaccaaggaagccatggtcattgtctttctcattcggacgtgcgttgcagcagtctaccttgaagacatgggcaggtaaagaggagaatgtcaaggcagctcaagaggcgttgtatgtgaggtgcaaggctaactctgaagccacactcggaacctacaagggtgacgctaagcttggtgatggagcagctgagagccttcacgtgaaggattacaagtactgagcatcgtccacgggttgaattgtgacgtttgtcatcttcctggatatatttctagggatttttcgtttttctacttgacattatcggattataagtgttttttcttcattttccttttggatttgtgttttgattttgattgggttttgttttttagaattgagtattttaaaaacacgcccaaataaaaaagtcatttgaggttatttctggtgaacctcttgtggaatttgaaaatcagtttctgttgatttaccgcttcttgagcctaaattattgtatttggttctctgattcgtatatgaaatctcgtcttttaaaaaaaaaaaaaaaaagnnnnnnnnnnnnnnnnnnnnnnnnnnnnnnnnnnnnnnnnnnnnnnnnnnnnnnnnnnnnnnnnnnnnnnnntagaatc

SEQ ID NO: 120679 - DNA, 530 bp, Arabidopsis thaliana
  unsure (1)..(530): unsure at all n locations
atgatcttnnnnnnnnnnnnnnnnnnnnnnnnnnnnnnnnnnnnnnnnnnnnnnnnnnnnnnnnnnnnnnnnnnnnnnnnnnnccacgcgtccgcccacgcgtccgctttagtgatggcggcgcttatccggtgttgctcctccttctctcatacttccggtggccaaccaccgccgcgtgacaagtctcgagctccagagattggaaaatttgctacatctattggctactcagtagtcagaaaacctggggatcatcctcctttctccaaaattatacattcgtcttcacagcctaaggagcgacaaggaaagggaatcttacaaacgccatttgccagtgtgggatctcttgacaagttttcagcttttgagggaattgggaggctcaaattaccggtgatggcagtgttgttgacaaactcccttcagatggctacacctcttgaagctttggctgctgagatatgtgagcctgagagctccatgttcagcatgcctattttgttgcttggtgctcttattggagc

SEQ ID NO: 120680 - DNA, 489 bp, Arabidopsis thaliana
  unsure (1)..(489): unsure at all n locations
tccgcatcttttttnatttctntctgatttctcgatctctccgtccaactatgtctgccttcaccagcaaattcgccgatgagttgatcgccaacgctgcctacatcggcacacctggaaaaggtattttggctgctgatgagtccactggtaccatcggaaagcgtcttgcgagcatcaacgtcgagaacgttgagaccaacagacgtaacctccgtnagcttctcttcaccgcccctggtgcttcttccatgcctcagcggtgtcatcctttttcgaagagactctgtaccaaaagaagttcccattggtaaagcttttcggttgatattcttgaaagggaacggaggggtttcttccccggtttcaaagggttgacaaaggggtcccgtttgaaactagctggaacccgccgggttnagacccaccacttaaaggtcttttaanggtnttgggtgaaagntnnaaagaggttcttcgaaagctggg

SEQ ID NO: 120681 - DNA, 572 bp, Arabidopsis thaliana
  unsure (1)..(572): unsure at all n locations
agggaccnggcctgnattncctgggctgcccactgtgtccgggtctctggtgacagactgcaagaatgtactacagaagcttggtgctcccgtttcgccaagtggcgtgcagtcctcaagatcggagagaacgagccatctgagcattccattcatgagaacgcttacggattagctagatacgctgttatctgccaagagaacggtcttgtaccaattgtcgagcctganatcctagtcgatggatcccatgacatccagaagtgtgctgccgtgactnagcgtgtccttgcagcttgctacaaggctcttagcgaccaccacgtcttgctcgaggggtacactctttgaagcctaacaatggttactnccggttctgacacagccccaaggtttccaccctggaagtaatcgggtgagcaaaacggtccgtgcccttnaggaaccgtccaagaagtttttcagcaattgttttnttaattttgnggcanancnaggaanaagntnccagganttttaaccgcatnanccantttaaggccaaaaagccatgggaattnttttttaatttg

SEQ ID NO: 120682 - DNA, 555 bp, Arabidopsis thaliana
  unsure (1)..(555): unsure at all n locations
aacggcgtcgggttagtccgacggaggaaccatgtctttgcgtccacttatgtccgcctttacaggaaaattctcggttaagtggtcggctacgcttgctacattgggacacctggaaaaggtattttggctggtgatgagttcactggtaccaatggaaagcgtgttgcgagcattaacgtcgagaacgttgagaccaacagacgttacctccgtgagcttcttttcaccgcccctggtgctcttccatgcctcagcggtgtcatccttttcgaagagactctgtaccaaaagagttccgatggtaagcttttcgttgatatcttgaaggaaggaggagttctttccaggtatcaaggtttgacaagggtaccntttgaactagcttgaacccgacgggtgaagaccnnccactcaaaggtctttaacgggtcttcgggtgacaagatttcaaaggangtacttacgggaggctttggtgcctcgttttnggccaaagttggnggttgcaangtcnccttanaaaatnccggnggnggaaccggggccnatttt

SEQ ID NO: 120683 - DNA, 543 bp, Arabidopsis thaliana
tgtcgtccgcattattctcgatcagtggttgttacctgagaaaccctagatttcaattcccaacaccttaattttgttcgacaaacccaagaagattcgatgggtaagaacgattttctaaccccaaaggcgattgcgaatcgaattaaagccaaaggacttcaaaagcttcgatggtattgtcagatgtgtcagaaacaatgccgagacgagaatggattcaagtgtcattgtatgagcgaatctcaccagaggcagatgcaagtttttgggcagaatccgactcgtgttgtcgatggttactctgaagaattcgagcagacgtttctcgatctgatgaggcggagccaccgtttctctcgtatcgctgccactgttgtctacaatgagtatattaacgatagacatcatgttcacatgaattcgacggagtgggcgacgttgacggagtttatcaagcatcttgggaaaactggtaagtgtaaggttgaagaaactcctaaaggttggtttattacttatatagatagagattctgagact

SEQ ID NO: 120684 - DNA, 606 bp, Arabidopsis thaliana
  unsure (1)..(606): unsure at all n locations
cnnnnnnnnnnnnnnnnnnnnnnnnnnnnnnnnnnnnnnnnnnnnnnnnnnnnnnnnnnnnnnnnnnnnnnccacgcgtccggtctcttctttctcctgatttgactctctcgagtctcgtcgatttcctccgggaggagacttgaaattcgtgactttccgattgtgaattccccgatggatctgcctagcctcgctttaatcgttggcgcggctgctttcagtcccaatcctgacgagcgcagagctgctgagcagagccttaatcagttgcagcacactccacagcatttgataaggatattgcaaataattgttgatggtggctctgatctttctgtacgccaatctgctagtatccatttcaagaatttcattgctaagcactgggaacctcattctggtgaccagaacataatcttgccaagtgataagaatgttgtcaggaaccagattcttgcatttgtctctcaagtgcccccgattctgagagttcagatgggagagtgcctgaagaccataatttacgctgactatcctgagcaatggcccgaactcctggactgggtgaagcaaaacttgcaaaaaccacaagtttatggagcg

SEQ ID NO: 120685 - DNA, 748 bp, Arabidopsis thaliana
  unsure (1)..(748): unsure at all n locations
nnnnnnnnnnnnnnnnnnnnnnnnnnnnnnnnnnnnnnnnnnnnnnnnnnnnnnnnnnnnnnnnnnnnnnnnatttgttgatcccacgcggtgggattcttcctttagttcctctgttgatctatccaatcgaatcttacgaaaattttcgagtgaagatgaggtcgcttcaagcaccggttgtttgccctagtgttcgtcccagacaattgggtgtctctgctttacttgtcaactgctctgtttcgaaaactaggagtctcagaaaacaattctggggtaaccagaccaaaaatgacaagtctcaggctgctacagtgaatcttcgtctgcatcttcggaggtataagagtatcaaatgtcttttcagctcgcactctgatggtaccggaagcacagcagagaatttcaacgagaacgatgaggattatgtcaagtctagtgtattggaagctgttgaggtaaaaagtggaccagatggtttcatggtgaagatgaaggatgggaggcaacttcgatgtgtccacaataatcctcaaggagggaatctttccaaattatgctccacattctgcaattgtcctgaaaatggaaggtggacctggtcttcttctcccctttcgcctcttggggatgcctagtgtgttaccttatgggcagcaatgncaaattttcaaaatggcaaaggnccccttttttttcaaagnggtnaagggncnttgntnggcaaaantngggtttngngggt

SEQ ID NO: 120686 - DNA, 833 bp, Arabidopsis thaliana
gcagtaccggtccggaattcccgggtcgacccacgcgtccgagcaactgccgctctttcttctttcttactgtctcagatccgccattgttacttcttcagttcttcttcttcaacaacaacaagaagtaataattagggttgagaaacttcgaattccgaaacaacagagagacgtactagttttagccatcttcttttcttagtttcatcgaacttggtgttacctcaataggtcgacgctcaaatcttgcttattctctggtttttagagcttcttttagattctttcgacatgccagccagcaaaaagatttcggaccggaatcacttagggcaagtgttcgacaagctattgaatcagattggagaatctgaagaattcgagttaccggagtggttgaataaaggaaaacctactccttatatcttcatcaggcgcaatatatacttgacgaagaaagtcaaaaggagggttgaagatgatggaatcttctgttcttgctcctcctcgtctcctggttcttcttcaactgtctgtgggagtaattgccattgtgggatgctattctcaagctgttcctcaagttgcaagtgtgggagtgagggtaacaataaggccgtccaacaacgacatgtcaagaagatgaagttaattcagacagaaaaatgcggatcagggattgtgggataagaagaaatcgaagctggagaagttattattgaatatgttggaagagttattgatgattagacttggagaagagagggcttgggaagaagaaaacaccgggggcgggaccaactttttattattgggagaaaacccgaaga

SEQ ID NO: 120687 - DNA, 844 bp, Arabidopsis thaliana
  unsure (1)..(844): unsure at all n locations
gctcnnnnnnnnnnnnnnnnnnnnnnnnnnnnnnnnnnnnnnnnnnnnnnnnnnnnnnnnnnnnnnnnnnnnnnnnnnnnnnnnnnnnnnnnnnnnncggccgcgcgaaaaaagaaggaagaagaagaaaaattgaggaaggaggaagaggagcgccgcaggcaggaagagcttgaggctcaagctgaggaggctaagcgtaagagaaaagaagaaggtaaaagtagagcttttttgggaatcagaatcatcatcgatggtgaatccaaagcgtggcaataggtttttcaaatacagaattgtgtaaattgctctctatcttcttctctttcaaattctcttccttttgttgtattcaataactttttccccactttgatgggctgcaaccacatattcttcttctatctttaacttttcccaccaaacttctccttttttttctttttttttgggttctgggtctgcttttttgttgttgttgttgttgaatgaaggtccgtaagggaagaagacagatgattgcgaaagagcaagacgaatacaaattacgccaacaaggtcttgtttttcaaatggcttctcttttcctctctttcgattactccttactcttcttttggttgctcttccgcgttttcttatacgagaatcacgaacgaaaactccagattttctagcacacctcttctctctgcatcgccatcttgttttttcccccaaattttcgatttttttttttgtataacttttgagattctgatagatccggtacggagtcatgtatatggagatttcttctgcttccgatgattcgatcgcttacgttgagacagatccttct

SEQ ID NO: 120688 - DNA, 385 bp, Arabidopsis thaliana
acccaagcgtccgcccacgcgtccgcgctttttatgtgactttcagatccgccgagtcgtctgtttgtggaatcttttcatggagctcagtattctatatacacctctctttgtttgatcgatttcacaaaccctagcttcggcgatcttaaatctgcataaagtctatggcgtcttctcctggtaatactaaccctcacaatcctcctccgtttgatctcggtattctcttcaaaccttcatccaatccttatccgccgccgccggcatcttatcctccgcctacaggtccttttcttcacaaccagtacgatcagcagcactacgctccgcctggtatctccgctcaaccatctccggtgactcagcagcaacaagatgtgtc

SEQ ID NO: 120689 - DNA, 331 bp, Arabidopsis thaliana
tttgacgcgtgggtgggaactgtgtttcccatggcgttcgggatgatgtaaatttgtttagtagagatgatgatgaaaacttttccaagtacattcacccgcgtgttacaggacattcacctaggactgtacctcgtattggggacagaagaatcaggaagatattggcttctagacattggaaaggaggttcaaggcattcagatacgaaaccgtggagaaattattacttgcaccagcagaggagctatcctatcaagaaaaggaaaaactttgaccacatatctgattccgttactgatgattaccgtatgcgtactaagatgcatag

SEQ ID NO: 120690 - DNA, 645 bp, Arabidopsis thaliana
ctgcggtaccggtccggaattcccgggtcgacccacgcgtccgcatgtttccattgctgataaggtatcgctacgggacatagctagagagagacttgacatagtcgctgagagaatgcatcgattaccagaagaatatctcgaggagttaaagaatggtcttaaggctatccttgaaggaaatggtgcgcagcctatagatgagtttatgtttctgcagaagtttgtccagacgagatctgatttaacttcaaagacacttgtcagggctcaccgagtgcagcttgaagttcttgtggttataaacactggtatccaagcattcttgcacccaaacatcaatctctctcagtcatcactcatcgagatctttgtgtacaagagatgcagaaacatagcttgccaaaacgaactcccgggctgatgggttgtccctgtgagatcatgcgctaatagggaaaggcttctgcaacctgtgcatgtgtgtggtatgtaacaaggttgactttgcaggcaacacatgccgctggattggctgccaccggtgttctcattggactcatacggattgtgctattagggatggggagatttcgatgggagtttctcccaagagcgtatctgggatgggagaaatgctgttct

SEQ ID NO: 120691 - DNA, 587 bp, Arabidopsis thaliana
  unsure (1)..(587): unsure at all n locations
nnnnnnnnnnnnnnnnnnnnnnnnnnnnnnnnnnnnnnnnnnnnnnnnnnnnnnnnnaaatttatctttccccacgcgtccgcacggagtcacggttcctcgttcgtcctctcccgtcgtctctccgcactaaattgatgggcacatcatctgggtccaatcttcctcaccagatgctacctccacgtcagcaactacaaacatctctttcgcttgtatcttcagatccccacttgtcacggtctaattctggcattgtgcgtgaatcaccagctgaaagtgctagctctcaagaaacttggccaacctcaaaatctattatgggaaggaagacagatagcggaaagacagggcctgactctcatgatcaacatgtgatccgccatgtttccattgctgataaggtatcgctacgggacatagctagagagagacttgacatagtcgctgagagaatgcatcgattaccagaagaatatctcgaggagttaaagaatggtcttaaggctatccttgaggaaatggtgcgcagcctatagatgagtttatgtttctgcagagtttgtccagacgagatctgatttaac

SEQ ID NO: 120692 - DNA, 423 bp, Arabidopsis thaliana
  unsure (1)..(423): unsure at all n locations
aagttaacctgcgcttgcttattggagctcttaacctacgcggatgctccgattttatgacagctgagctcgatttggttgataaacaaaggcttcaagaattctaccggaatcaatggaggttctggtaggttctacgtttagggatcgtagcagcgtcacgacgcatgatcaggccgtaccggcgtctctgtctagccggattggtttgaggagatgtggtagatctcctccgccggagagttcgtcgtccgttggagaaaccagcgaaaacgaggaagatgaagacgacgccgtttcgtcatcacaaggaagatggctcaattcgtttagttcatctttggaagattctcttccgattaagagaggattatcannacattacatanggaaatcganatcgtttgggaatttatggaagcg

SEQ ID NO: 120693 - DNA, 1046 bp, Arabidopsis thaliana
  unsure (1)..(1046): unsure at all n locations
aagaaacccaatcgaaaacctaaaacccgattagattttcttagatacgaaacctctcttacgacgctccttcctcaatctctctcgatcgtcggagattctttcttcaagagtcatcttcttcttcttctccttctccctaaaccctaatttatcgcgtttggatcgaatcagctgtcaattcttgttttggttttcacggccagggccatgtctgccgtatattgcggaaccaagagatcttacttcgacgataattcttctccgccctcttctaagaggttccgatgtttttcgccttccaattctccaatctggtcctctcctccttcctcatcgctcgatcagcttcactctgcgtttcctcatattgaactcacggttctcgtcaaggcactagaagataatggaagtgattttaatgctgctatgaagagcttatactctttcgcatcttctgaggagaagaaagctgaagaattggccgcaggaggtgctgctactcaggaaactgatgccgtttgtggtggaaaccccccgaccagtggtgatgactgggttgaattgttagtcagggaagtgttacaatcgtctggtacagatgatgcaaaagtacgtgcagcaagagtccttgaggccttagagaagatgttaagtgcacgtgctcgtgaagaagctggaaacaaattccaagaggagaaagtggcagtgcagcaacaggtggagaccttggtgaaggacaacacagtcctcaaacgtgctgttgctatccagcatgagcggcagaacggcattggaggatgcgaaccatcagcttaggacttcttgaagcaactggttcctcaagttatcaggaaaagctttagaaaatcttggaggtgaacaattacgggttggggaattcagcttcagcaaagtgggaccattggcaactcaattcccncaaggttnaatccggncgnntttttaagtnttcccaggnggcaaggnccttttcaggggggggangcnattnaccngantttggggggggngggnatagngcc

SEQ ID NO: 120694 - DNA, 1241 bp, Arabidopsis thaliana
cacaacttcggagcgaatctattcttcttcttcttcttcttcttcttcttcttcttcctccgtttttttcatcttcttctctgtttcgagagatccactagtgaaagagtcagcaccatggccatggtcaaagagaaagaacaaaacactaaagacaaaaaactcctcgtcggcgtcatttggaacttctccgccgagctcaagctcactttcatggcgttacttgttctctgcactttagctactctcttacctttcataccttcttcattctctctctccacttccgatttccgcttctgcatctcacgcttctcctccgccgtccctctcaacaccaccaccaccgtagaagaatcatcatcctcaccgtcaccggagaagaacctagatcgagttttggataacggagttattaaacggacgtttactggctacggctcagcagcttataacttcgtctcaatgagtgcttacagaggcggcgttaactcattcgccgttatcggattatcatcaaaaccattacacgtgtacggtcatccttcgtatagatgcgaatgggtctcattagacccgactcaagatccgatttcaacaaccgggtttaaaatcttaaccgattggggttacggacggatctacacaacagtcgtcgttaactgtactttctcatcaatctccgccgtgaatccacaaaactccggtggaactctcatcctccacgccaccaccggagatccaactctcaatctcaccgattcaatctcagtcctaaccgaacctcccaaatccgtcgatttcgatctctataactccacgaagaagacgaagaagtacgattatctctattgcggatcgtccttatacggtaacctaagtccgcaacgagttagagaatggatcgcttaccacgttagattcttcggtgaacggtcacatttcgtgctacacgacgccggagggattcatgaggaagtgttcgaggttttaaagccatggattgagctagggagagtgacgttacatgatattagagatcaagaacgattcgatggatattatcataatcagttcatgatagtgaatgattgtttgcatacgtatagattcatgacgaagtggatgttcttctttgatgttgatgagtttttacatgttccagtgaaagagacgatttcgtctgtgatggaatctttggaggaatattctcagtttactattgaacagatgcctatgag

SEQ ID NO: 120695 - DNA, 677 bp, Arabidopsis thaliana
  unsure (1)..(677): unsure at all n locations
nnnnnnnnnnnnnnnnnnnnnnnnnnnnnnnnnnnnnnnnnnnnnnnnnnnnnnnnnnnnnnnnnccacgcgtccggcaaaactctcgtccgagatatatcgactccgcgaccctccactactctgctgatctacacacacacacaaaaaaaaaaaaaaactcaatcgccagcaacaatggcgaagctcacacttctcttcttcctttcctttctcatcttctcctcatccatcgctttccaatcagacgagctcctcgttgacgacgacgaatttggtctagaaggagcaaagccccgctccaccgatctttacacatcttcttcttcttcgccacagcagcagcaacagactccaactatccggagaagatactcagatcctaccgatttggattcaaaagtccaatttactctcgaacatgccttcggtgactctgatttctcccccgccggtactttctccgctcgtctcaaaacctggagtcatggcggaaagacattaacgaagctgcgnttctntagaaatgattttcctgctgaagagaaagatgcattcaagaatctgctgaaaggagatgacttttatcggattcggcttccatctaatgtggttagtccaccagggagagagtttgtgattgcatcagtgagngctagatgtctaccacgggatgg

SEQ ID NO: 120696 - DNA, 509 bp, Arabidopsis thaliana
  unsure (1)..(509): unsure at all n locations
cnnnnnnnnnnnnnnnnnnnnnnnnnnnnnnnnnnnnnnnnnnnnnnnnnnnnnnnnnnnnnnnnnnnnnnnccacgcgtccgcagagagtcgccgaaataaattgaaatccggtgagaagattttggattcactccttccttctttcttcttctttatcatcatttgagctggttttggtatctctcctgacgaatttgaatctctcagccattttctcttctcgcatctgtgttttcgtgcttggagctgtacacgtttctttaatttgaatagtgattttgcgttcgttaattagccttctcgtacgagtgggctattttgggaatgatttaggtggttttaagttactgggtagtagtcactgctgagcgatttctgtttctcctgttgaatgattgattcagaaatttgaaattcacatcgaaaccaaatcttaaatcatattggtagctttttttttgttttgtgattagatactgtttttttatagtattaaattcgttttg

SEQ ID NO: 120697 - DNA, 521 bp, Arabidopsis thaliana
  unsure (1)..(521): unsure at all n locations
nnnnnnnnnnnnnnnnnnnnnnnnnnnnnnnnnnnnnnnnnnnagtccaaacatatctcaagcttcttcttcgtgttacgcactttcttcttcttcttctctctctctctttcttcttcgtcttcgatcacagaagacagaattcaatgtcgtcgacctacaagctcaatcacactgattcatttgcaaatggagatgcaaagagtttgttgccgaacccagagaatggtttcactcatttgacttcacttgctcaatcagagaaggctgttcaggagcttcttcttcaacagactcctatgcaggctactgacgaccatctcgttgagttctctgaggctttgagaactgttgcaaaggcactaaggggagctgctgaaggaaaggcgttggctcaagctgaggctgctgaatggaagcgtagatacgagttagagaggtctaagaacgtggagttgcagcataaagaactgtcaaatggagtgtgtgccgatgaatctaatggtcaaaggatggagcac

SEQ ID NO: 120698 - DNA, 526 bp, Arabidopsis thaliana
  unsure (1)..(526): unsure at all n locations
atgatactgccnnnnnnnnnnnnnnnnnnnnnnnnnnnnnnnnnnnnnnnnnnnnnnnnnnnnnnnnnnnnnnnnnnnnnnnccacgcgtccgagattcttctccggagcgatcagatttcaccgacgacggttgtttttgcctcctctttcaatcagaggaagccaaagcttagagcaacagttgtaaatctatatatagagagggagagagagagagagagctcctctcgtccagtattagggttttaaaggcaagaactactagaacaagagaaggtacaaaaaaaaaatgtcgggcctccatcgatcatcaagttcatcgaagaacatcggaaattgccttccctccaaagaactccttgatgatctttgcagtcgatttgttttgaatgtccctgaagaagatcaacagtcattcgagagaattttgtttctggtggagtatgcttattggtactatgaagataatgctgtagagaatgatccaaagcttaagtccctgtctttgaaagagtttacttcgc

SEQ ID NO: 120699 - DNA, 661 bp, Arabidopsis thaliana
aaatccttcaattttcaagctccttgaagaagatgaggatgaatcgatgcattcaggagctgacgtagacgcgttccaagctgctctgaatcgtgatattgaaggttctatgacaacttcaataccccacgtgacaaacccaggaaacaaccattcttccaggcagcagttttcgacatggaagaatggtattggagattctaatatcaatgtccagactcagcatagccttgaaagtactcagatgaaggagcaagaaggttcgactttagaaaatcaacatcaacatgatttgaaacgcgcaaatgaacctcatttacaacacaaccagcctcaagaccttcatcgagctggtcaactctgggagaatccctcgcaggtcccccaatcaactgggttaccgattagtgaaaagaatcctactggtaatgaatcagatagatcccataatcaagagagtgaatctcagtatatgaaactgcaaaagatgagtagtcaacaggctcggggagtggaaccgcctgttaaccctatgaatgttaaccctataaaccgcaaccctaagcaagtaccatttgctgctttgcttcctactttaatgaaccaactcgataaagatagagcactgcagcttcgtaccctatatgctagacttaagaaa

SEQ ID NO: 120700 - DNA, 538 bp, Arabidopsis thaliana
  unsure (1)..(538): unsure at all n locations
nnnnnnnnnngccnnnnnnnnnnnnnnnnnnnnnnnnnnnnnnnncccacgcgtccggaagaatctttcaactatcactccctccacgcgtccggagaaaattcacttttccaatcaaaacgtaaagaagaagaggaagaatggctacatgtcctcctttcgatttctcgaccaaatattacgatggtgacggcggatgccagaggcagagcagcttcttcggaggcacgacggtgctcgatcaaggcgttggctacgccgtgattcttggttttggtgctttctttgccgtcttcacatcttttttggtatggttagaaaaacgatatgtgggagctcgtcatacatcggaatggttcaatacagcgggaagaaacgttaagacaggacttattgcaagtgtcattgtatcacagtggacatgggctgcgaccatactgcaaagttcaaacgtagcatggcagtatggggttagtggaccgttttggtacgctagtggagccaccatacaggtgctgttgtctggtgtgatggcgat

SEQ ID NO: 120701 - DNA, 383 bp, Arabidopsis thaliana
tgtacctgtgtctgacaaggccattgaggaggtagaagaaaaatttactagcgaatcagactctattgcagactcctctaagttagaatctgtggataccagtgctgtagagccagaggttgtagctgccgagagtgggagtgaaccaaaggatgtggaaaaagccaacggattggagaagggtatgacttatgctgaagtaatcaaggcagctagtgcagtagctgacaatggaaccaaagaggaggagagtgtgctcggtggcatagtcgatgatgcagaagaaggtgttaagttaaacaacaaaggagactttgtggtggactcatctgctattgaagctgtgaatgtagatgtggcaaagccaggggttgttgttgttg

SEQ ID NO: 120702 - DNA, 604 bp, Arabidopsis thaliana
  unsure (1)..(604): unsure at all n locations
tacgacaagaanaataccggtccggaattcccgggtctctctctggttgacccgataatttctctctcgcagacgcacagatctctcttcgaatctgctagatctgttccttttcttacatctgtattgcgaaacctctgatcggaaggtttcgtttacagatctaccgatacgagtttcgcagtatttccgagttccgacgtatgctttgttttcagatctgggtttgttgtatatctagaaatggcggagactttgaaagaagattcgattatgattcgagaggtttgggattacaatttggttgaagaattcgcgttgatccgtgagattgttgacaaattcagctatatcgctatggatactgagtttccaggtgtggttttgaagcctgttgctactttcaagtacaataacgatcttaactacaggactctcaaggaaaatgtcgattttttgaaattgttcaagggtggggtaaccttttctttggggaggggggatttccgtcttttgggccgggaagncntcaactgggaatcaattnccggnggnaanaccggggggttnntcgggganagctttttgnnttcgcngnnggttc

SEQ ID NO: 120703 - DNA, 1212 bp, Arabidopsis thaliana
gtttgttgtatatctagaaatggcggagactttgaaagaagattcgattatgattcgagaggtttgggattacaatttgggggaagaattcgcgttgatccgtgagattgttgacaaattcagctatatcgctatggatactgagtttccaggtgtggttttgaagcctgttgctactttcaagtacaataacgatcttaactacaggactctcaaggaaaatgtcgatttgttgaaattgattcaagttgggttaactttttctgatgagaatgggaatcttccgacttgtgggacggataagttctgcatctggcaattcaatttccgtgagttcaacatcggggaggatatctacgcgagtgagtctattgagctgttgcgtcagtgtgggattgatttcaagaagaacattgagaaaggtattgatgtggttaggtttggtgagcttatgatgtcgtctgggattgttttgaacgatgctatctcgtgggttacgttccatggtggatatgatttcgggtatttggttaagttgttgacttgtaaggaattgcctctcaagcaagctgatttcttcaagcttctgtatgtgtatttccctacggtttacgatatcaagcacttgatgacgttctgcaacggactgtttggtggattgaacagacttgcggagcttatgggagtggagagagttgggatttgtcatcaagctgggtcggatagcttgctcaccttagggtcgtttaggaagctcaaggaacgttatttcccgggatcaactgagaaatacactggagtcttgtatggtctaggtgtggaagatggtactactactactgttgctaattaagaagaaaggaatgaaagatactttgaaaattccagggaagtgcgattagatatatttctttagtctttgtgagtgtgagaagaccaaaatagaatcgtcgttgtgtaaattggcaaattggtgttagtaagtgacttgttgtgtctttgttgctttgttttcaggaaaaccccttgtgatcaaaatttgaggggtttttgttttagcttgagtttctgaatgtatatcaattcagctacccgtttatttaataaataatctccaattttaaaaaaaaaaaaaaaagggcgtcctccgtggagtgagctcgtcgacccagcaattaattccggcccggttcctgcaggcgtgcgtagctt

SEQ ID NO: 120704 - DNA, 659 bp, Arabidopsis thaliana
  unsure (1)..(659): unsure at all n locations
ggtgacaatatagaagagttatgacgtcgaacgcacgcgtacgtaagctcggaattcggctcgagtctgcaacggagggtttggtggattgaacagacttgcggagcttatgggagtggagagagttgggatttgtcatcaagctgggtcggatagcttgctcaccttagggtcgtttaggaagctcaaggaacgttatttcccgggatcaactgagaaatacacttttgtcttgtatggtctaggtgtggaagatggctctactactactgttgctaattaagaagaaagggatggaagatccctttgaacattcccagggaagtgccgatcaggtatatccctttagcctttgtgagtgtgagaagacccaaaataggaatcgtcgttgtgtaaatggccaaatgggtgttagtaagtgacttgttgtgtctttgttgcttttgttttcaggaaaaccccttgtgatcaaaatttgaggggtttttgttttagcttgagtttctgaatgtatatcaattcagctacccgtttatntnataaataatctccaattttaaatgttactctcttttctttttgtgtgttttcttcttactagtgaccaatgtaacttgacagtgtcttcttgtactagcgtactagcgtttgcttgtccc

SEQ ID NO: 120705 - DNA, 464 bp, Arabidopsis thaliana
tctcgttcgagcttccatttttcctcatcgcaatcttcatcttcaatctccagctatctcaactcgatccttctcgaatcaccatcatgagtgaccatggcgagaagacttgcccactttgtgctgaagagatggatctgactgatcaacaattgaagccttgcaaatgtggttatcacatttgtgtttggtgctggcatcacatagcggacatggcacagatagatcaattagaagggcgttgtccagcttgtcgcactccatatgacattgactcgattgtagggatgactgttaattgtgacagtctggcttctgaaggcaatatggagcgcaagaagatccagaagtcaaaatcaaaatcttctgaagggagaaagcaacaactcaccagtgtgcgagtgatccagaggaatcttgtttacattgttgggttgcctcttaatctagccgatgaagatcta

SEQ ID NO: 120706 - DNA, 957 bp, Arabidopsis thaliana
  unsure (1)..(957): unsure at all n locations
atgatactttcnnnnnnnnnnnnnnnnnnnnnnnnnnnnnnnnnnnnnnnnnnnnnnnnnnnnnnnnnnnnnnnnnnnnnnnccacgcgtccggttcagaaagtcaaagatggagacctaggattgctgttaggagatgattggattcggaaacacaatgtcaaagtgaaacaataccatatgaattatcagagaagctcatggaataagatgctggggttgctgaaggtggataatactgcagcaggcatgaacggtttggggaagaccatgaaggagaagctgaagcagttcaatattcagtttgatgagatatgtaaagtgcattcgacgtgggtagtgtttgacgagcagctgaaagaagagctaaagatctcactggccaggcttttggtaccggcatacgggagcttcatcggcaggttccaaaaccttggagacatagggaaaaacgcagacaagtacatcaagtatggagttgaggacatagaggcgcgtattaacgagctgttcaaagggactaccccgggaagaaaatgaaggtaacgaacccaaaaatagcctcttgtaacatcttcgtaacgaaccacctgctaaatgaccaatagcgaagtcttgcagggaggatttgtaacatgtattgtgtatccttttagacagttagctcagctctgttgtgttgttgtgtaatgttgtattgtaactggatcactttttttgtcattgtaaaaagagaaaacagttgaaaaagatgacatgttagggacttggatctacttctaagtcttgagtgcatattttatcaatatgttcttacatctaagtcttccctttttnnnnnnnnnnnnnnnnnnnnnnnnnnnnnnnnnnnnnnnnnnnnnnnnnnnnnnnnnnnnnnnnnnnnnnnnnnnnnnnnnnnnnnnnnnnnnnnnnnnnnnnnnnnnnnnnnnnnnnnnn

SEQ ID NO: 120707 - DNA, 681 bp, Arabidopsis thaliana
  unsure (1)..(681): unsure at all n locations
cttcatgatatcaacaaaacacacctcaacaaaaaaaaaaaaaaacttcatctctctcagatttcgaaattgacccgtcggtgattcttaatctctcctctctgttcttctccgatcaaacctcattccaaagaaacaaaccatggatctccaaccagaagagcttcaattcttgacaatacctcaactacttcaagaatcaatctcaatcaagaaacgatctccaagaaccttctacctcataaccctctccttcatcttccctctctccttcgctatcctcgctcactcactcttcactcaaccaatcttagccaaactcgacaaatccgacccaccaaactcagatcgttcacgtcatgattggactgttcttctaatcttccagttcagttacttgatcttcctctttgccttctctcttctctcaaccgctgctgttgtcttcaccgtcgcttctctttacaccggaaagcctgtttctttctcgtcaactctctctgcgattcccaaagtctttaaacgactctttataactttcctttgggttgctctgttgatgtttgcttataacgcagtcttctttgtcttcctcgtgatgcttctcggtagctcttgatttgaaatagtttaggtttagctattgtaggccggggntataaatctctggttcctatactt

SEQ ID NO: 120708 - DNA, 747 bp, Arabidopsis thaliana
gaaaaataaaaaacctttaaaccctttttttgtgtatccgattccgtcgcaagtacattcggactctttcacggcgtcaatgtctgagaacgcagccaacaacatcatggagaccaagatttgtacagacgccatcgtgtctgaattacagaagaagaaagttcatctcttttactgcttagagtgcgaagaacttgctcgcaacatcgccgctgaatctgatcacatcactctccaatccatcaactggaggagttttgctgatggattcccgaatctatttatcaacaacgcacatgatatccgaggccagcacgttgcgttccttgcttcattcagttcccctgctgtcatctttgagcagatctctgtcatttacttgctccctcgattgtttgttgcgtccttcactttggtgttgcctttcttccccactggctcctttgagagaatggaagaggaaggagatgtagcaactgcttttaccatggcaaggattgtctctaatatccccatttcacgcggtggtccgactagtgttgtcatctatgacattcacgctttgcaggaaaggttttactttgccgatcaggttcttccttggtttgagactggaatcccgttgttgactaaacgccttcaacagcttcctgaaactgagaaagtcatagttgcatttcctgatgatggagcctggaagcgtttccataagctgttggatcattatcccacggttgtgtgtacaaa

SEQ ID NO: 120709 - DNA, 507 bp, Arabidopsis thaliana
  unsure (1)..(507): unsure at all n locations
nnnnnnnnnnnnnnnnnnnnnnnnnnnnnnnnnnnnnnnnnnnnnnnnnnnnnnnnnnnnnnnnnnnnnnnnnccacgcgtccgggggaaactctctctctctcgggaccggaacacagactgaatagggaaggaagaatgtcgtcgccaatcaagaaggtcaaacactttacggaccttgaccagaaatgtgtcaacacgatccgaacgctgtgtgcggatgtcgtgcagaaggcgaacagtggacaccccggggcgcccatgggatgtgccccgatggcccacgttctcttcaccaagtgcatgaagttcgcgccgtcccaccctcactgggcggaccgtgatcgctttgttctctctaacggccacggttgcgctctgttgtatgcgctcctgcacctcactgggtatgaacgacccacgatggacgacttgaagaaattcagacagcttgactcggtcacacctggccaccctgagcgcaaccacggtcttgagggtatcgag

SEQ ID NO: 120710 - DNA, 1216 bp, Arabidopsis thaliana
  unsure (1)..(1216): unsure at all n locations
ctcactatataaacacacactcacacattcactctacaaacactagaaaccacaaagacaaaatcaaggtcttaaacaatgagatcccatctcttgattttgttaatctctctcttaatcttgaaatctgaatccataaactgcaatgaaaagagccattcctcagatctaagagtgttccacattaacagtctatgttctccattcaaaacttctgtttcatgggcagatacacttcttcaagataaggctcgtttcctatacttgtcaagcctcgctggcgttaggaaatcatcagttccaatcgcctctggtcgggccatcgttcagagcccgacttacatcgtgagggctaacatcgggacaccggctcagcccatgctcgtggctcttgacactagcaatgacgctgcttggattccttgttctggctgcgttggctgttcttcctctgttctctttgacccttccaagtcaagctcctctcgtactcttcaatgcgaagctcctcagtgtaaacaggctccaaatccaagttgcacagtaagcaaatcatgttggtttcaacatgacctacggtgggttcaaccatcgatagcatatctgacacaagacacactaacattggccagtgacgtcatcccaaactacacctttgggtgcatcaacaaagctagtggaacatcgttgccagcgcaaggactcatgggcttaggtcgtggtccattgtctttaatctcacagtcacaaaatctttatcagtctacattctcgtattgcttgcctaatagtaagtccagcaatttctccggatcactaagattgggacctaagaaccaaccgatccggatcaagaccactccattgttaaagaaccctagaagatcatcgctttactatgttaacttggttgggattcgtgtcggaaacaaaattgtggatattcctacaagtgcactcgcctttgatccggccaccggagccggcaccatctttgactcggggacggccttcacaagggtagccgaccagtttcgtggcggtagaaccgagtcnggngacgtgttagaacngaacggaactttccnngngggtttngacatgaancngggccggcgggtccgccggngnggtttgtncccggataanggacttnccccanaaacttttnnaagcccgnggaaccnnggncnccaagggnaccccggnaagaanc

SEQ ID NO: 120711 - DNA, 850 bp, Arabidopsis thaliana
cttcatcatcatcatcaaatcccagctttcttccaagtgatccttcactctctatactgcgatttaccgttcttctgactcttgttgcgaattcggatcggctgacgcagctccgattgcacaacaatggcttctcgtatcatcaatcattccaaaaagttgaaacatgtttccgctttactgcggcgtgaccatgctgtggcagtccgctgtttctccaacagtacccacccctctctcgttggaagagaagatatcttcaaggcccgcctgaattattcctctgtagagagaatttcaaaatgtggtactggcaatgtaacaatgcttagtggtatttcaacaacgagcacaaaactaagcagcccaatggcaggaccaaaactatttaaagaatttataagctcccagatgcgatcagtgagaggattttcatccagttcagatcttcctcctcatcaagagattggaatgccttctctttcgccaacaatgactgagggtaacattgccaggtggctgaagaaagaaggtgataaagttgctcctggtgaagtgctttgtgaagttgaaactgacaaagcaacagtcgaaatggaatgcatggaagagggttttctcgccaagatagtaaaggaggagggggcaaaagaaattcaagttggggaggtgattgctatcacagttgaagatgaagatgatattcaaaagtttaaagattacacaccctcatccgatactggtcccgctgcgcctgaagcaaaaccagctccttccctaccaaaggaagagaaggtagagaagccagccagtgctcctgaagccaagatctctaagccaagctcagctc

SEQ ID NO: 120712 - DNA, 629 bp, Arabidopsis thaliana
acttcacgttacttttctatctacattttcactttcaatggctttgattatcacctgctccgctctacccacgatccgagcatcttccggatccggatcccttaacccggatcaaaaccgtaagaaatctgctgcttggtgggctcctctcttcggtttaccctccgatccagattacctcaacatcgaaagctcatgctccaccgtgaatccggataaaaccgatatttccgggtcgggtcaaaagtttcgtcgcggttgttttacggaggagaaagctaagcagttgaggaggaaaaccgcagaagcttccacgttccatgacgtaatgtatcactccgccattgcttctcgacttgcgtctgatatcaccggccgagtcgaggattgaaacggattcgggtcagatctggagacgaatcaattaatgaataattaatcttttttttcttaattcagtgttcttgtaggatgcagaccatcttctatcggtgctcctttttcatttgaaccgttggcttgtgtttggtctttgtgtgttgtaaactctagttccctttctgtttcttctgtaatcaaccgttggatttccccttgttatttttagacatgtgttccctagttagctc

SEQ ID NO: 120713 - DNA, 516 bp, Arabidopsis thaliana
ctctacacgactcacttagggaaagctggtacgcctgcaggtaccggtccggaattcccgggtcgacccacgcgtccgccacactaatcggaaaaaatggcacagaagcttaacttgcttaatctcgccgtccctccggtcacccaccgctctaacttcccttccaccttcaccttcggcggtcgccactttccgcttaccagattgaaggaggttggcatgaaggtaaaaagggaccacgtatatgggataagttcactcatatcgaaagggaagattcttgatggaagtaacggcgatgttgctgtggatcattaccatagatacaaggaagatgttgatcttataggacaattaggattcggtgcttacagattttctatatcttggtctcgaattttccctgatggcctgggaactgaagtcaatgaagaaggcattgctttctacaacgatcttattaatacacttcttgaaaaaggtattcagccgtatgtaactctgtaccattgggaa

SEQ ID NO: 120714 - DNA, 610 bp, Arabidopsis thaliana
  unsure (1)..(610): unsure at all n locations
nnnnnnnnnnnnnnnnnnnnnnnnnnnnnnaattcccggggtcgacccacgcgtcccgaagctatcaaagctaaaagttatggcgagccatttttgcttgcttctgatcttcactttcttcactctagtgtttccgtcaaacggatcttcactgtcttcttccaagcttttacctcgtttccctcgctacactttccagaaccgagaagccagaatccagcagttccggggagatcgaaacgagtatcgatacgagactaagttcttctcacagcagctggaccacttcagcttcgccgatcttcccaaattctctcaacgctacctcatcaattccgatcactggcttggtgcttctgcgcttggacctatcttcctttactgcggcaacgaaggtgatattgaatggtttgctacaaactctggattcatttgggatatcgctcccaagttcggtgccttgcttgttttccccgagcataggtattatggagagtctatgccttatggaagcaggaagaaggttacaagaacggtaccactttatcatatctcactactgggcaagcttttgctgtttctggttttgcacggatttaaagaacttttt

SEQ ID NO: 120715 - DNA, 504 bp, Arabidopsis thaliana
tacgactcactttagggaaagctcgtacgcctgcaggtaccggtccggaattcccgggtcgacccacgcgtccgcgtaatttctcatcaaactccacttttcttctttttaagagaatctagggtttcttctactacttcttctttcttctttaggtggtcaaatttccaagttcttcttttagctctctcttttgtttccaagaaacctgagaagaatttttgtagatatgggaagaggaagggttcagctacggcggatcgagaataagataaggagacaagtgacattttcaaagcgaaggaccggtttggtaaagaaagctcaagagatctcagtgttatgtgatgctgaagttgctttgattgttttctcccccaaaggcaaactctttgagtactctgctgggtccaccatggagagaattcttgatcgatatgagaggtctgcctacgccggtcaagattttcctaccccaaatttggattcacagggagagtgctc

SEQ ID NO: 120716 - DNA, 628 bp, Arabidopsis thaliana
  unsure (1)..(628): unsure at all n locations
nnnnnnnnnnnnnnnnnnnnnnnnnnnnnnnnnnnnnnnnnnnnnnnnnnnnnnnnnnnnnnnnnnnnnnnnccacgcgtccggggacagatgttacctatgtagctgaagccattatacctttatttgaaaccgcaaaagagttgatcttacggaaaatgggagacgacttagaggtgcaagagaagccggcgttgattctatgccatgttttcagaagggttgatgaaccttctcttctgtcagctgcatctaagtttgggtttaagcttgcagacagatgggctgcaaattcaaaggaatctcctattgggaacatcattgacagttggttttccgaaaaggatttggtcgcagaaatcccgagttctgcgttgcatattctctattttcagatggagtaactatgtggtagaggagcaaatgttgattaactggagagttcttttatattaaaaaatcctcattgaatctcaaatcaatgaatgtcctacatgtattcttctatattagcaatggattttttgggtatccaactattacataaaaaaaaaagggcggccgctctagaggatccaagcttacgtacgcgtgcgtgcgacgtcataaatcttctatagtgcaccta

SEQ ID NO: 120717 - DNA, 511 bp, Arabidopsis thaliana
  unsure (1)..(511): unsure at all n locations
agctcnnnnnnnnnnnnnnnnnnnnnnnnnnnnnnnnnnnnnnnnnnnnnnnnnnnnnnnnnnnnnnnnnnnccacgcgtccgcggacgcgtgggcatgcgtgggttagagaaggcgggaatgctactgatatccctgtcgacatttcagttctgaacaacttaagacaatttgtgagatacagccgtctaaagcaatttgctttaagggcgcttgctagcacacttgacgaggcagagatctctgacctcagagatcaatttgatgcgattgatgtggataaaaatggcgtcattagtcttgaagagatgagacaggcacttgccaaagatcttccttggaaactgaaagactcacgagttgctgagatccttgaagcggtagttatatttttgttttccattgcaattgcatctctgggggtatcagagggagacgtagtttcataatgacccggtggggacttgtatctttggtggtcacagattgatagcaacacctgggggttagg

SEQ ID NO: 120718 - DNA, 1085 bp, Arabidopsis thaliana
  unsure (1)..(1085): unsure at all n locations
tacgactcactttagggaaagctcgtacgcctgcaggtaccggtccggaattcccgggtcgacccacgggtgcgagtatatcgtcttcttcctcctcgaaccaaaaacatcagtctctcctagtctcagcgctcgtgaaaatctgaaactctgcgttcgaattttcgaagaacattagagatctggtattatctggatccgatctgttcaccatggaggagaagaagacagaatcaaccaacaagaatgttaagaaggccaatctattggaccaccactcgatcaagcacatccttgacgaatccgtctccgatatcgttacgagccgtggctataaggaggatgtgagattgagcaacctcaaactgattttgggaacgattatcatcgttgttgctcttgttgctcaattctacaacaagaaattccctgagaacagggattttttgattggatgcatcgcattgtatgtagtgttgaatgcggtgttgcagctgattctgtacactaaggagaagaatgcgattttgttcacctatcctcctgagggatcattcaccagcactggtttggtggtatcttcaaagttgcccagattctctgatcagtacactctcaccatcgacagtgctgatccaaaatcaatctcagctgggaagtcagttcagctcaccaaaagtgtcacccaatggttcacgaaagatggagttcttgttgagggtttattctggaaagacgtagaagcactaatcaagaactatgcagaagaagaaccaaagaagaagaaatgatcatcttccagagaaatatatgcttttgaaactccatatgttggcgttttagaatactaaatcgatggtgactttgtttagagatgaaactaatatttggatttttccttatagccaactttttgaattaatccgagattttatgatcactatttagaaaagaataaaaagctttaccttaaaaaaaaaaaaaaaaagnnnnnnnnnnnnnnnnnnnnnnnnnnnnggaaatcatnnnnnnnnnnnnnnnnnnnnnnnnnnnnnnnnnnnnnnnnnnnnnnnnnnnnnnnnnnn

SEQ ID NO: 120719 - DNA, 594 bp, Arabidopsis thaliana
  unsure (1)..(594): unsure at all n locations
ttgttttaggtgcactatagaagagctatgacgtcgcatgcacgcgtacgtaagctccgagtcccgcccctcgtgaaaatctgaaactctgcgttcgaattttcgaagaacattagagatctggtattatctggatccgatctgttcaccatggaggagaagaagacagaatcaaccaacaagaatgttaagaaggccaatctattggaccaccactcgatcaagcacatccttgacgaatcccggctccgatatcgttacgagccgtggctataaggaggatgtgagattgagcaacctcaaactgattttgggaacgattatcatcgttgttgctcttgttgctcaattctacaacaaggaattccctgagaacagggatttttttgattggatgcatcgcattgtatgtagtgttgaatgcgggtgttgcagctgattctgtacactaaggggaaggatgcggttttgttcacctatccccctgaggggtcattcaccagcactggtttgggggtatcttcaaaggtggccccgattctttgttagaaacctttaccattgcagnnttgtcccaaaaaaanttagtnggtc

SEQ ID NO: 120720 - DNA, 1137 bp, Arabidopsis thaliana
  unsure (1)..(1137): unsure at all n locations
nnnnnnnnnnnnnnnnnnnnnnnnnnnnnnnnnnncgcctgcaggtaccgggccggaattcccgggttgacccacgcgtccgagagggtgtgaaagagaagaaggaagctcttggcgaggttctaaacggggatcggctagttagcgctccatacaagctcaacttcagagatgaaaaagagtctgaggtatactgcaacaagaagttgagtaaagaagaggtcaaacagttcagaaaagctgttgagaaggactactacttccagatgtactatgatgatctacctatctggggattcattggaaaggttgacaaggatatcaaatctgatccgagtgaattcaaatatttcttgtacaagcacattcagtttgagattctatacaataaggaccgtgtgatcgagatcagtgctagaatggatcctcattcgcttgtggatctcactgaggataaggaagttgatgcagagtttatgtacactgtgaagtggaaggaaactgagactccttttgagaaaagaatggagaagtactctatgtcttcttctcttccacatcatttggaaatccactggttctccattattaactcctgtgtcactgtccttcttttgactggattccttgcaactatcttgatgcgagtcctcaagaacgatttcatgaagtatgctcaagatgaggaagctgctgatgatcaagaggaaactggatggaagtacattcatggcgatgtgtttcggttccctactcacaattctttatttgctgcatcgctcggtagtggcactcaattgttcacgctcaccatatttattttcatgcttgctcttgttggagtgttctacccatacaaccgaggagcactctttaccgctttggtggtcatttacgctctcacttctggaattgccggatacacatctgcctctttctactgtcaacttgaaggaaaaagctgggtgaggaacttgttactcactggatgtctcttctgtggcccattattcctaaccttttgcttccttaacaccgtagccatcacctacactgcaaccgctgcattaccctttggaaccattgtggtgatcgtccttatatggactctagttacctcacctttactcgtcttgg

SEQ ID NO: 120721 - DNA, 519 bp, Arabidopsis thaliana
ctcagatctcacgattttcttcttcctctcacattaacacacatcatcatgagattaccaacgacgctgctcctttttatcggagctctcatcttctccggcgccggtactgtcagatccgatgcctccgaccaccgttacaaggacggtgactccgttcctctctacgccaacaaggtcggcccctttcacaatcccagtgagacgtatcgctatttcgatctccccttttgtattccagagggtgtgaaagataagaaggaagctcttggtgaggttttgaatggggataggcttgttagtgctccatacaagcttaactttagagatgagaaagactcagaggtgtactgtaaaaagaagcttagtagagaagaagttgaacactttcgaagagctgttgaaaaagattattactttcagatgtattatgatgatttgcctatttggggaatcattgggaaggtggacaaagagagcaaatctgatcctagcgaggttaaaatattttttacaaca

SEQ ID NO: 120722 - DNA, 459 bp, Arabidopsis thaliana
cgggaaggaatggccggaccgaaaaagttactcagatctcacgatttgagcagaatacgcaatgaggacaccgacgacgattctccttcttgtcggagctatcctcttctccggcgccggctatgtcagatccgacgcctccgaccaccgttacaaggaaggagacaccgttcctctctacgccaacaaggtcggcccatttcacaatccaagtgagacgtatcgatattttgatcttcccttctgtatcccagagggtgtgaaagagaagaaggaagctcttggcgaggttctaaacggggatcggctagttagcgctccatacaagctcaacttcagagatgaaaaagagtctgaggtatactgcaacaagaagttgagtaaagaagaggtcaaacagttcagaaaagctggtgaggaggactactacttccagatgtactatgatgatctacctat

SEQ ID NO: 120723 - DNA, 425 bp, Arabidopsis thaliana
aaaacctctctttctctctctctccgacgatggcttccggtgaccagagcaagaagagaaaacagcattatcgccctcaaaacagaccagtgaagaagaagggatcttaccctttgaagccaggtgttcaaggttttttcatctcttgcgatggcggacgcgaattccaagctgctcaggaagctattaacgtcattgattcctttttcgaggagctaatacaagggactgactcgaaagtgaatcctggtttgtttggtaatccaataaacaaaaaagttacattttcgtatagcgaggatgaggatgaggaggaagatgagagtaataatggcgaggaagaggaaaacaaaggagatggggataaggcagtagtgagtgaaggcggtaatgatctagtgaatgagaaagaaatagctagtgaa

SEQ ID NO: 120724 - DNA, 993 bp, Arabidopsis thaliana
  unsure (1)..(993): unsure at all n locations
aggtgacactatagaagagcttgacgtcgcatccacgcgtacgtaagctcggaattcggctcgagcatatcgatcgagccatgtggaaacgcctactggctcatttcatcgtctcaaataccactaactctcttcttcactctctggatctgcttcagtgacaatgttcaaagccaacaacaatcagattaccatgtctcagtaaaggatgtagaagatttgagatcaaatgatggagcaagatcaaacaagtgtatgttccctgtaatggctctattagctggagttttgggtggtgtttttggtattggaggtggaatgctcattagtcctcttcttctccaagttggtatcgctcccgaggtaactgcagcgacatgttctttcatggttcttttttcatcaacgatgtctgcgattcaatacttattactaggcatggaacataccggaaccgcaagtatatttgcggttatatgttttgtggcatcactcgtgggactaaaggtggttcaaaaggtaataaccgagtatggaagggcttcgatcattgtgttctcggttggtatcgtcatggcattgagtattgtgttgatgacaagctatggagctcttgatgtttggaatgattatgtctctggtcgttacatgggtttcaagttaccttgttgagaccaagtttcataatacatgtgtatatcatatcaccatgttgttgctctttcatccatttggtcatttagagttaacaagctttctatttctttcttttgtatgatttttaaatcactattcagaatgcacatctcgtgcattcgaatatatggtcaaataaaagttatgttctggacctaaattcagattccaatatccatttttagcctttggttgttgtnnnnnnnnnnnnnnnnnnnnnnnnnnnnnnnnnnnnnnnnnnnnnnnnnnnnnnnnnnnnnnnnnnnnnnnnnnnnnnnnnnnnnnnnnnnnnnnnnn

SEQ ID NO: 120725 - DNA, 592 bp, Arabidopsis thaliana
  unsure (1)..(592): unsure at all n locations
tctcctaaaatctcccaaacttttaaaaagttaaccaaaacccccaaacaaaaaaatgagaaacaatttcgtccctataattctctccttcatcatcttcttgactccatcaatcgcagaacaagaaccttcaattctttctcccgtcgatcaactcctcaacaaaacaagctcatacctcgatttttcaacaaaattcaaccaaccaagaatcgaactaacaacatcaacgatcatcgccggcttactctctttcctagcttcatcaatctcaagcgccggtggaatcggcggtggaggtttatatgttccgataatgacaatcgtggccggtctcgatctaaagacagcttcaagcttctcagcttttatggttactggtggatctatagctaacgtgggatgcaatctattcgttagaaaccctaaatctggtggcaaaaccctaatcgacttcgatttagctcttttattggaaccatgtatgcttctttgggggtaggtattggggtgtccgtaaacttggttttccgactggtggtaangggctcttcgtgtgttnttngtggngcggtaaggcttttgaatngtg

SEQ ID NO: 120726 - DNA, 753 bp, Arabidopsis thaliana
gtggcaaaaccctaatcgacttcgatttagctcttttattggaaccatgtatgcttcttggagttagtattggtgtgatctgtaatcttgtttttccgaactggttgattacgagtctcttcgctgtgtttcttgcgtggtcgacgttgaagacttttggaaatggactttattattggagattggaatcggagatggtgaagattacagaatcgaatagaattgaagaagatgatgaagaagataagattgagagtctaaagttgcctctcttggaggattatcagagaccaaagaggtttccatggattaagcttggagttttggtcattatttggctttcttacttcgcagtttatcttcttcgaggaaacaaatatggcgagggaatcatatcgatcgagccatgtggaaacgcctactggctcatttcatcgtctcaaataccactaactctcttcttcactctctggatctgcttcagtgacaatgttcaaagccaacaacaatcagattaccatgtctcagtaaaggatgtagaagatttgaggtccaaatgatggagcaagatcaaaccaagtgtatgtccccctgtaaatcggctcttattagcctggggtttttgggtgggtgttttgggtatttggaggtgggaatgcccattaggccccttccttctcccaagttggtatcgctcccgggggaactgcagcgacatgttctttcatggttcttttttcatcaacgatgtct

SEQ ID NO: 120727 - DNA, 507 bp, Arabidopsis thaliana
ctctactacgactcactttagggaaggcttggaccgcttgcaggtcccggcccggatttccgggttcgaccaaggcgtccgcccacgcgtccgcaggccttttcttctgcagtaagtgacatcggatctgttgtaagcatggttgatcggatagctggttcagcaccaggaaacggttcaagagcttccgttggtgaagacttggttgcaatgactaagtgccgtctccaagcaagaaacttcatgacccaagagggaatgatggcgactaagaaaatgaagcgtcacacaaccgcaatgccactaagcgttgcttcactgggaggaagtgttggtgataactacaagcagtttgctggttcagaaacatccgatctacaatctactgcgacttcggatggcaagaaggcaagaactgagaccgagcatgcccttttggaggaaataaaggaaataaaccagcggctgatacatacagttgttgagataagtgatgatgaagatgct

SEQ ID NO: 120728 - DNA, 1074 bp, Arabidopsis thaliana
ctggtcgcctgcggtaccggtccgttttcccgggtccgcccacgcgtccgcgcacgcgtcggattggattaatcaaagacaaagaaaacgaaaatgttggcaatatttcagaaagcttttgctcacccaccggaagaactcaacagtccggcttctcatttctccggcaaaactcctaaacttcccggcgaaactctctccgacttcctctctcatcaccaaaacaatgctttctctatgaacttcggcgactccgccgtcttagcttacgctcgccaagaaacctctcttcgtcaaaggttgttctgtggactagatgggatctactgtatgtttctagggagattgaataatctctgtacattgaatcgacaatacggtttatctgggaagaactcaaacgaggcaatgtttgtgatcgaagcttatcgaacacttcgtgatcgtggtccttacccagcagatcaagttcttagaggtcttgagggaagcttcgctttcgttgtctacgatactcaaacttcctctgttttctcagctctgagttctgatggaggagagagtctttactggggaatttctggagacggatctgttgtaatgtctgatgatattcagatcataaagcaaggctgtgctaaatcgtttgctcctttccctaatggatgtatgtttcatagtgagacagggcttaagagctttgaccatccgactaatatgatgaaggcaatgccgaggattgatagtgaaggtgttctttgtggagctagtttcaaagttgatgcttgttctaagatcaatagtatccctagaagaggaagtgaagctaactgggcgctggctaattctcgttgattttgcttctagtttcgttaactcttgcttctttgttgcgttttctttttatgtactcttgtttatgtaaatatagccttatgaagacgataaagaaataaaattgatttgcttcttcgtgaaaaaaaaaaaaaaaaaaaagggcggccgctctagaggatccaagcttacgtacgcgtgcatgcgacgtcatagctcgtagatagtgttacaacgaaa

SEQ ID NO: 120729 - DNA, 612 bp, Arabidopsis thaliana
  unsure (1)..(612): unsure at all n locations
gcattggattaatcaaagacaaagaaaacgaaaatgttggcaatatttcagaaagcttttgctcacccaccggaagaactcaacagtccggcttctcatttctccggcaaaactcctaaacttcccggcgaaactctctccgacttcctctctcatcaccaaaacaatgctttctctatgaacttcggcgactccgccgtcttagcttacgctcgccaagaaacctctcttcgtcaaaggttgttctgtggactagatgggatctactgtatgtttctagggagattgaataatctctgtacattgaatcgacaatacggtttatctggggaagaactcaaacgaggcaatggtttgtgatcgaagcctttccggacacttcgtgatcggggggccttacccagcaggtcaaggtccttaagagggcttgacggggaagctccgctttccgttggcaacggtacccaaattcccccggttttcccagnnctgagtcctgatggaggaanagagcccttgctgggggaattctggaaacgggcctggtggaaagcccggtggaatccggcctaagaagggcgggcaaacggtgcccctcccaaaggggaggta

SEQ ID NO: 120730 - DNA, 589 bp, Arabidopsis thaliana
  unsure (1)..(589): unsure at all n locations
ccccctttcgagtcgaccgtatcgatattcttgatatcgaattcgcggccgcttttgctcaggttgttctgtggactagatgggatctactgtatgtttctagggagattgaataatctctgtacattgaatcgacaatacggtttatctgggaagaactcaaacgaggcaatgtttgtgatcgaagcttatcgaacacttcgtgatcgtggtccttacccagcagatcaagttcttagaggtcttgagggaagcttcgctttcgttgtctacgatactcaaacttcctctgttttctcagctctgagttctgatggaggagagagtctttactgggggatttctggagacggatctgttgtaatgtctgatgatattcagatcataaagcaaggctggtgctaaatcggttgctcccttcccctaatggggaaaccaaaacttaaagtttttcatttaagccccctttaaaagaaaggaacatactttggaggttagaatcctgaaagggggggntttggggntttgggaattccaggnnggatggtnccaaaggnaananggngtaaaacntttnncanccggcaaa

SEQ ID NO: 120731 - DNA, 766 bp, Arabidopsis thaliana
  unsure (1)..(766): unsure at all n locations
tgattctccaagctactcatacgactcactatagggaaagctgcgccgcctgcaggtaccggtccggaattcccgggtcgacccacgcgtccgcccacgcgtccggttttctcagctctgagttctgatggaggagagagtctttactggggaatttctggagacggatctgttgtaatgtctgatgatattcagatcataaagcaaggctgtgctaaatcgtttgctcctttccctaatggtaaaccaaaacttaagtttttcattagccctataaagaaagaaacatacttttgagtttagatcttgatgtgtgttttgtgtttttgttattgcaggatgtatgtttcatagtgagacagggcttaagagctttgaccatccgactaatatgatgaaggcaatgccgaggattgatagtgaaggtgttctttgtggagctagtttcaaagttgatgcttgttctaagatcaatagtatccctagaagaggaagtgaagctaactgggcgctggctaattctcgttgattttgcttctagtttcgttaactctggcttctttgtggcgttttctttttaggtactctggtttatgtaaatatacccttatgaagccgataaagaaataaaattgatttgcttcttcgtgacatagcagtctttacttaaaaaaaaaaaaaaaggccggccgctctagaggatccaagcttacgtacgcgtgcatgcgacgtctagctcttctatagnnnnnnnnngatcattcgc

SEQ ID NO: 120732 - DNA, 612 bp, Arabidopsis thaliana
  unsure (1)..(612): unsure at all n locations
gcatttgattaatcaaagacaaagaaaacgaaaatgttggcaatatttcagaaagcttttgctcacccaccggaagaactcaacagtccggcttctcatttctccggcaaaactcctaaacttcccggcgaaactctctccgacttcctctctcatcaccaaaacaatgctttctctatgaacttcggcgactccgccgtcttagcttacgctcgccaagaaacctctcttcgtcaaaggttgttctgtggactagatgggatctactgtatgtttctagggagattgaataatctctgtacattgaatcgacaatacgggtttatctggggaagaactcaaaacgggggcaatgtttggtgatcgaggcttatcgaacactttcggtgatcggtgggtcctttacccagcaaggtcaaagttcttagggggcctttgaggggaaggtttcgttttcggttggctacggttctcaaacttccccctggtttttaagccctgaggttcttattgggggggggggctttactgggggatttttggggcgggccttttaaaagcctgggggatcaagccaaaagaaagggtgccaaacggttnccnncccaatgg

SEQ ID NO: 120733 - DNA, 553 bp, Arabidopsis thaliana
  unsure (1)..(553): unsure at all n locations
gcattggattaatcaaagacaaagaaaacgaaaatgttggcaatatttcagaaagcttttgctcacccaccggaagaactcaacagtccggcttctcatttctccggcaaaactcctaaacttcccggcgaaactctctccgacttcctctctcatcaccaaaacaatgctttctctatgaacttcggcgactccgccgtcttagcttacgctcgccaagaaacctctcttcgtcaaaggttgttctgtggactagatgggatctactgtatgtttctagggagattgaataatctctgtacattgaatcgtcaatacggtttatctgggaaggactcaaacgaggcaatgtttgtgatccaagcttatcgaacacttcgtgatccgtggtccttacccagcaggtcaagttcttagaggtcttgagggaggttcgctttcgttggctcggtntcaaacttcccctgtttctagccctaggtntnatgggggggggcttcctggggattttgggcgggctttgaatactatgatcagccaaagaaggtgnnaa

SEQ ID NO: 120734 - DNA, 488 bp, Arabidopsis thaliana
acgactcactatagggaaagctgctacgcctgcaggtaccggtccggaattcccgggtcgacccacgcgtccgcaaagacaaagaaaacgaaaatgttggcaatatttcagaaagcttttgctcacccaccggaagaactcaacagtccggcttctcatttctccggcaaaactcctaaacttcccggcgaaactctctccgacttcctctctcatcaccaaaacaatgctttctctatgaacttcggcgactccgccgtcttagcttacgctcgccaagaaacctctcttcgtcaaaggtatatactaatatacataaaacacatatatacaagtcaaatctctaaatccaattcatagattcataatggttttgttgttttgctcaggttgttctgtggactagatgggatctactgtatgtttctagggagattgaataatctctgtacattgaatcgacaatacggtttatctgggaagaactc

SEQ ID NO: 120735 - DNA, 479 bp, Arabidopsis thaliana
  unsure (1)..(479): unsure at all n locations
gaacttgatctgctgggtaaggaccacgatcacgaagtgttcgataagcttcgatcacaaacattgcctcgtttgagttcttcccagataaacgaccgtgttggcaatatttcagaaagcttttgctcacccaccggaagaactcaacagtccggcttctcatttctccggcaaaactcctaaacttcccggcgaaactctctccgacttcctctctcatcaccaaaacaatgctttctctatgaacttcggcgactccgccgtcttagcttacgctcgccaagaaacctctcttcgtcaaaggttgttctgtggactagatgggatctactgtatgtttctagggngnttgaataatctcttgtacattgnatcggcaatacgggntatcttnggnaggactcaaacgnggcnatnttttaatcgaggtttttggaccacttcggngttgggggnctntncccgnagntcaagttttt

SEQ ID NO: 120736 - DNA, 898 bp, Arabidopsis thaliana
  unsure (1)..(898): unsure at all n locations
ggttcaggttcgttttggtggtgaccactcctttattcacctacggtgagatcggcggcggagtctagacgacggcgataacgccggtgaccgacggaatcatgttaagatagtcactggcgaattcgttcttcttccccggagacgacaagcatcgaagaatctgtttagagacagctatgcttgtctctgtttctgcgttttctctttccgatcttgtctctcggatccggtgaagaagctgccgccgatcacatcttccagtttccagagattctaaagcttttgtcttttgatccttcatcgaattcattgaggagattataagaagatgaactttgagtgattgcagctatcggggagttttgtggtatgctgaaaagagatgtctttgaaaagcatccttcgtgatctgaaggaagtgagggatggacttggaggcatctccaaaagaagctggtcaaagtcgtctcacattgctcctgatcaaacaactccaccactggataacataccacagagcccatgggcttctttgccgcctgagttgcttcatgacattatctggagggttgaagagagtgagacagcttggcccgctcgagctgctgttgtctcttgtgcttctgtctgtaaatcatggagaggaatcactatggagattgtgaggatccctgagcagtgtgggaagctcacttttccaatctcattgaaacagccggggcctcggagactctccaattcaatgctttattaagagggacaggagcacaggttcatatcattccctattatngggtttaatgccttnaagaggcttngancggcaaaactntttntttgcagcaaagaanggtttagnagggnggccattnnncagggctttntaaaanccccc

SEQ ID NO: 120737 - DNA, 554 bp, Arabidopsis thaliana
agaatctgtttagagacagctatgcttgtctctgtttctgcgttttctctttccgatcttgtctctcggatccggtgaagaagctgccgccgatcacatcttccagcttccagagattctaaagcttttgtcttttgatccttcatcgaattcattgagtctatcggggagttttgtggtatgctgaaaagagatgtctttgaaaagcatccttcgtgatctgaaggaagtgagggatggacttggaggcatctccaagagaagctggtcaaagtcgtctcacattgctcctgatcaaacaactccaccactggataacataccacagagcccatgggcttctttgccgcctgagttgcttcatgacattatctggagggttgaagagagtgagacagcttggcccgctcgagctgctgttgtctcttgtgcttctgtctgtaaatcatggagaggaatcactatggagattgtgaggatccctgagcagtgtgggaagctcacttttccaatctcattgaaacagccggggcctcgagactctccaattcaat

SEQ ID NO: 120738 - DNA, 358 bp, Arabidopsis thaliana
atccgcggacgcgtgggaatcgatttcattgattttttccatattcacagcgaaagaatcgatccttaatacaaaattccttcaagatctcacatctcttataagctttctcgataccatcattttcctttctttttttcttttcttcgattctaatttggttctgccggatcttcaaccttgtctgaagaagacattttctagggtttctagagattggtcgggtttttcggttcaagtaaatggttggatcagcctatcgtacgctccacttcattagggttatcaacgacaatattcatcatctaataatcatcatcaagggtcttgcttcgattctgaatctctgctgctgctg

SEQ ID NO: 120739 - DNA, 516 bp, Arabidopsis thaliana
  unsure (1)..(516): unsure at all n locations
tgattctnnnnnnnaacaaaacacagtttctttntctntctctctctctctctctctctctctctctctaaaagctctcttctcttacaatggagaattcaccgagatacagagaagcgacgaatctgattccgtcgccgagatgtcacaacagcaacaacagttgcggtatgagcagtagcagtgaaagtaacaaaccaccaacaactccgacccgacacgtaaccacaagatccgaatccggtaacccgtacccgacaacattcgtccaagcagatacttcttccttcaaacaagtcgtccagatgctaaccggatccgccgagagacccaaacacggttcatctctcaaaccaaacccgacccatcatcaacccgacccaagatccactccttcttctttctcaatcccaccaatcaaagccgtacctaacaagaaacagtcttcttcttcagcatcagggtttcgtctctacgagcgtcgtaattcaatgaagaatctcaaaatcaatcctt

SEQ ID NO: 120740 - DNA, 721 bp, Arabidopsis thaliana
  unsure (1)..(721): unsure at all n locations
agtgaacctctcccaggcaccgaactgaaagaggtatggaaactcgctgatgtgccaaaggatgccaatttccaatcccccccctttgcccccaaggtttattgcttcgacactgccccgaaaaagctgttgccctctgattccccgttacggcctgattgatccgcccttgggatggccgccatgtccaaatcaggctatgggaagagcagcatggaagagagacagagacctgaaaagagaacccgcgaagagaaaggccaagcctttactccaaaatggttcgatgtaacggaagaagtcactgctacaccatggggtgatctggaagtttaccaattcaatggaaagtactcggaacatcgtgcagctgcggataactctgaagataaccccggccctaagtcgatccaattcaacccatggcaattccaagatctgtctacttaaatgtatcgctcccaaagacagaaaagatcaaatctttttgggaacaaatgtattcttattctctcgtagttacaaaaaactttgttttacatctgctagctttcccattgctttctctagtattagtgtacaacttctactgttttgtcttaaattcattcaaatctttctttgaaaaaaaaaaaaaaaagnnnnnnnnnnnnnnnnnnnnnnnnnnnnnnnnnnnnnnnnnnnnnnnnnnnnnnnnnnnnnnnnnnnnnnnnnnnnnnnn

SEQ ID NO: 120741 - DNA, 634 bp, Arabidopsis thaliana
  unsure (1)..(634): unsure at all n locations
atacgactcactttagggaaagctgctacgcctgcaggtaccggtccggaattcccgggtcgacccacggctnncggcgtgatcattggaggagagttatgcaagggcatgctggagctaacgtggtacctctagtagcctcaaatcgcatagggaaggaaataattgaaactgagcatggacctagtcagatcactttctacggaacttccttcattgccggaccaacaggtgaaattgtggccgaggcagatgataaatcggaagctgttcttgtagcacagtttgatcttgatatgatcaagtcgaaaaggcaaagctggggagtgttccgtgaccgtcgtccagatttgtacaaggtgcttcttactatggatggtaatctctaaatcttttgctgttggaagctttgatcttttgtttaagatcacactggggaaatccattaacaacaattattactggcttaaccttaaagggtaagtaagcccaaaaataaaagaccagaaaaggtttaatacatctcaaaatttgttctgggaaaaaaaaaaaaaaaaaaaaaaaaaaaaaagcggccgctctagaggatccaagcttacgtacgcgtgcatgcgacgtcatcatcttctatagt

SEQ ID NO: 120742 - DNA, 929 bp, Arabidopsis thaliana
  unsure (1)..(929): unsure at all n locations
nnnnnnnnnnnnnnnnnnnnnnnnnnnnnnnnnnnnnnnnnnnnnnnnnnnnnnnnnnntcaattctaaatctccacgcgtccggaagaaaattaccggcaaatttcacggagaaacctcgccaacgaagcggagttatggcgggcatggctgcggtggcaggattacgaccgtggaacgcttttattcaagctctagttctgatatctctatcatttccctttctctccagcgcttaccgacctggagatatcgtccggatgagcaagatggggcagtatcactcttcgagaacgacttggcatgatgtgatcggaaagcattgcccgatcttcgccgtcaatcgcgaggtgttgatcccaatagcgaaaccaattggctacacaggaactgatccttataagataaaattccaagttggaagtgagaaatttctgattcactggcttttggtaattaaccgtaagagctcagaagttccgatgatcgatgtaaatttgagatattctggaggagatctgcttggagtcacagctcaagttatcgacatgcctcatagctatctgaatacacacccggagatccgcaaacagttttgggatcctcaacactggccaaaacatgttcttgttagatacacatggaatgagcagtcagagattgatgtatcctcaggattctatgtcctgtttggctcagctctcacattttctttgtactctccattacgtctacaatcgcacgagagaactggcaggtttgtagagaacgtggtgagagcacacatgatgttggaaattgcaggggattggcactagcaagattgatgttcacatttaatactgaattgattggctcacttagaatattttataacagatagcgagcaaactgcctgacatatgttataatacgtctaaaaaaaaagg

SEQ ID NO: 120743 - DNA, 817 bp, Arabidopsis thaliana
  unsure (1)..(817): unsure at all n locations
tagcaagatgggcagtatcactcttcgagaccgactggcatgaatgtgatcggaaagcattgcccgatcatcgccgtcaatcgcgaggtgttgatcccaatagcgaaaccaattggctacacaggaactgatccttataagataaaattccaagttggaagtgagaaatttctgattcactggcttttggtaattaatcgtaagagctcagaagttccgatgatcgatgtaaatttgagatattctggaggagatctgcttggagtcacagctcaagttatcgacatgcctcatagctatctgaatacacacccggagatccgcaaacagttttgggatcctcaacactggccaaaacatgttcttgttagatacacatggaaggagcagtcagagattgatgtatcctcaggattctatgtcctgtttggctcagctctcacattttcttttgtactctccatttacgtcttacaatcgtcacgagagaagctggcaaggtttgtaagagagacggtggtggagagcagcagcatgaatgttggagaatttggcaagggggattgagtcacatagtcaagtatatgtatgtttctacaattttagatacttggaatatggaattggccgttcaactctcagaaaagatttttcatcaaacatgaatagtcgaaagcaaaaactttgtccttgtaacattatggtttaatagatttacgtttcttaaaaaaaaaaaaaaaagggcggccgctctagaggatccaagcttacgtacgcgtgcatgcgacgtcatagatattnctatagtggtacctaa

SEQ ID NO: 120744 - DNA, 422 bp, Arabidopsis thaliana
ccaagaagccaaaacgtcaagatgctaacaacccttgtagtctaaccactcccaagatttaagaattttcttacttttgttctagttttgttgagaaaaagatgcatccgatcttcgatgccatccttcaaaatgaccttccagcttttcttggtttggtggaagcgagagaatcttccctggaggagagaagcgaggaacagaacaccaacaacacggttttgcacgtagctgcaaagctcggtcaccgagaactggtcgccaagattattgagctccgaccttcccttctctcttcccgtaacgcgtacggagacacacctttgcatcttgctgctcttcttggagacgtaaacatagttatgcagatgttagacactggattggaactatattccgcacgcaataacaagaaccaaaca

SEQ ID NO: 120745 - DNA, 642 bp, Arabidopsis thaliana
  unsure (1)..(642): unsure at all n locations
cggctactaatacgactcactttagggaaagcacgtacgcctgcaggtaccggtccggaattcccgggtcgacccacgcgtccgcccacgcgtccgggtgaattctggggagaagctgaaattctttcaaagcttcatcatccaaatgtggttgcattttatggtgttgtaaaagatggacctggtgcaacattggctactgtaacagagtacatggttgatggttctctgagacatgttctagtcaggaaagatagacacctggatcgtcgtaagagactaatcattgccatggatgctgcctttggaatggaatacttgcacgccaaaaacattgttcacttcgatttgaaatgtgacaatttacttgtgaacctcaaagatccttctcgcccaatctgcaaggttggtgatttcggtttgtcgaaaatcaaaaggaatacattggtatctggggggtgtacgcggaaccttaccatggatggcaccagagctttctcaatggtagcagcagcaaagttttcanggaagggccgtggcttccctttttgggataggcctttggggggttctanccgggggggnccntttgctaanntgncctcggggcttataanngggnggggttngtgccacanactt

SEQ ID NO: 120746 - DNA, 567 bp, Arabidopsis thaliana
agcactaatacgactcacttagggaaagccggtacgcctgcaggtaccggtccggaattcccgggtcgacccacgcgtccgattcataactcacactcgtctcaaattcgaaaaatgtcgtctctctcctgccctacctaccgctcccgcacttcgtcttcgtctcctttcttgtcgaatcatcatcattcttcgctgatcaatgttgttgacccacgccgctcactctccttccactacgcttctcctcaggggcttaatctagctgagctctgtgttgttagatcgcagaggaggtccgttcagagttctgttgtcgtgcaagatggatcagtagccaccgagtcaagctcgtccgaggaggcgaaagatgtaggggtgttaacgattccttcacttgaagctgacaaggttgtagcagagtctgatggcggtgaacaacttttcaacagttagtatcacggtggtgggagcttcttggggatcttgcccagaagaaaatattcccagctcttttcgcactttactattaaggcttgtcttcctgagcattttaccatttttggc

SEQ ID NO: 120747 - DNA, 524 bp, Arabidopsis thaliana
cagctacaatacgactcactttagggaaagctcgtacgcctgcaggtaccggtccggaattcccgggtcgacccacgcgtccgcccacgcgtccgggttacagcagctagactcccgtacttcgatggtgactactggccaggtgcagcagaggatatcatatcccaaatgagtcaagaagatgatggtagaaagggaaataaaaaaggaatactcaagaaacccatttcatagagggcgcttaaagcatctggccagtcggatttctctgggaatgcttccaaagacctgctactaatgcataaacttggggagaccattcatccaatgacggaggattttatcatggttcacttgcagcatagttgcacacattgctgtacgctgatgggaactggaaatcggtggggttgcacccaatgcaaagatttccagttatgggatggatggtatgaggctgggcacaaccgagagaacagagaaaggactccttgttaataaaaaagataaacataatatttttc

SEQ ID NO: 120748 - DNA, 586 bp, Arabidopsis thaliana
  unsure (1)..(586): unsure at all n locations
atgagagcctcatagaagcggcactagttcgtttggtggatcccttaacgcgcttcttcttcttctttcgcgagataacctagaaacccttttcctttcgttcgcttcttcaatccgccatggatcttgaggctgagatccgcgcattacagcttgaatcggcagatgaaaacaatggtgttgtcattccagaagttcataactcacatgaagttgagaatttggataaagcaccggaagacttgaaagatgaagtgcaagaatcaattccagttcctgatgagcaagaagcttctgaggatcatgatgaagtaatgcttcatccagtccataatccagcgaaagctaaagagaaagctgctcaagagaaggctgccaaagaggaagctgaagatgttgcagaagcaaataaaaagagacacttgaatgttgtgtccattggggcatggttgatgctgggaagnccncaattgggggggcagatcctttttccctaagggggcccggggggttgtccgncaaanccnaaagttttgngagggggcccaaaggccaaagntngnaaanccgggntttnggggtntnt

SEQ ID NO: 120749 - DNA, 489 bp, Arabidopsis thaliana
  unsure (1)..(489): unsure at all n locations
cagctacnnnnnnnnnnnnnnnnnnnnnnnnnnnnnnnnnnnnnnnnnnnnnnnnnnnnnnnnnnnnnnngtccacgggtgcgtgtctctttctctctctctcagaaactctttctccaataatggcagaggcaagtttctatatcggagtcataggaaatgtaatctccgtactagttttcctctcaccagtggagacgttttggaaaatagtgaagcggagatcaacggaggagtacaaaagcttgccgtacatttgcacgttgttaggatcatcgctatggacatattacggcatcgtcactcccggagaatatcttgtctccaccgttaatggctttggtgctcttgttgaaaccatctacgtttcactttttctcttttatgcccctcgacatctcaagctgaaaacagtggtagtggtagcgatgttgaacgtgttttttccaatcgcggcgattgtggcaacgagaagtgcgtttgaagatg

SEQ ID NO: 120750 - DNA, 513 bp, Arabidopsis thaliana
  unsure (1)..(513): unsure at all n locations
cgactactatggngaagctggcacgcctgcaggtaccggtccggaattcccgggtcgacccacgcgtgcggttcagtctcaagttattctcttcgtgtcctgaatctgtgcaccaaaggttatcgaaaatgtcagtgcgagttctgaatcctaatgccgaggttctcaacaaatctgcggcgcttcatatgaccatcaacgccgccaagggtttgcaagatgtactcaagtcgaatctcggtcctaaaggaacaatcaaaatgcttgttggtggttctggggatattaagcttaccaaagatgggaacacgctattgaaggaaatgcaaattcagaatccaacagccattatgattgcgaggacagctgttgcacaggatgatataagtggtgatggtactacttccactgttatcttcattggtgagcttatgaaacagtctgaacgctgcatcgatgaaggtatgcatccacgagtcctagttgatggttacgagattgctaaaagagctt

SEQ ID NO: 120751 - DNA, 389 bp, Arabidopsis thaliana
gcgtccggtactatcttcagagcttcgagaatgtcgatgttaatggcggccaaatccacttcactctttagctcaaaccctacaatttcagctaaaatagggcaaaaccctcgcggcgtcagatcggtttatccgacggtgagaatgcagtcacgtgttcaccgtctgattgaagagcaaggtgctgtgcttattcccggagtctacgacgcattatctgcggctattgtgcagcagaccggattctccgccgcattaatctccggttacgccctctccgccgtaactttgggaaaaccagatttcggtttgataacacctccggagatggcagcaacggcgagatcagtgtgtgctgcggctccaaagattccaatcattgcagatgc

SEQ ID NO: 120752 - DNA, 420 bp, Arabidopsis thaliana
agagaagatccaaaagcgtgggaaaatcgaattagggttttctgaaaatggttgatactgttgacaaattaggttacttccaagcgattacaggtctcgaagatgctgatttgtgtactgagatccttcaagctcatggttgggacctagaactagcaatctcttcattcacatcttctgatcaagacgcttcgtcttccgccgtcgatggtggtggtaacaatcgcgatcacgatcacaataacgccaccgtgactcctgattatccacctcgcgggatcgttgacgatacagagcttgttatgcgtgatgatggaggaggaaatcgaggtccaggagttgcgtggaggattattactttaccgatttcgattgtttctggtagcttagggttagtttctggagcgatccgggtaggta

SEQ ID NO: 120753 - DNA, 273 bp, Arabidopsis thaliana
cccacgcgtccgcccacgcgtccgaaaaaactttcattttattcgtcgtcagtttcatcttgttgcttcggagcgagcgagaattatcgtcggagaatttatcgtctctctctctgaaaattctgatcggtgaagaatcgtcggatcgaaagttcgtttatcttctcgtttacgtttccgtgatttaaatcctttggggtttttttttcttggtaatgtctgtgtttctgaatgtgtggttgatttttgttcgtacactttactttgatcgat

SEQ ID NO: 120754 - DNA, 552 bp, Arabidopsis thaliana
  unsure (1)..(552): unsure at all n locations
nnnnnnnnaccccctnatttagggaaagcacggacgcctgcaggtaccgggccggaattccctggtcnacccacgcgtccgcccacgcgtccgatcaaaaaaaacttgcacatcttctcagatcttcaagtttctcctctggtttctcatcatgaccgttgatattatgcgtttacctaagatggaagatcaaacggctatacaagaagctgcatcacaaggcttaaaaagcatggaacacttgattcgtgtcctctctaaccgtcccgaagaacgtaacgttgattgctctgagatcactgatttcacagtttctaagttcaagaaagttatctctcttcttaaccgttccggtcacgcccggtttagacgtggtccggttcattcccctccttccttcctcccgttcctccaccggtgaaagtgacaactccggctcccactcagatctctgctccagcaccggttagcttcgttcaaggcaaatcaacaaaagcggtcacggtaggttttnaactngtccangngntttttgggnggtnaaaccaaana

SEQ ID NO: 120755 - DNA, 391 bp, Arabidopsis thaliana
cccacgcgtccgctgatttttttcttctctctctctctctctcttccttctgggcttctagggtttgtcctctccagtccccgatttccgctttatccgatcggccgccgccgagattctagataaacctatggcaatggaggttacgcagttgctcattaatgctcagtcgattgatggaactgtacgtaagcacgcggaagaaagtcttaagcagtttcaggagcaaaaccttgcgggtttcttgttgtcgcttgctggagagcttgcgaatgatgagaagccagtagatagcaggaaattagctggtttagtccttaaaaatgctcttgatgctaaggaacaacacaggaagtatgagcttgttcagagatggttggctctagacatg

SEQ ID NO: 120756 - DNA, 525 bp, Arabidopsis thaliana
  unsure (1)..(525): unsure at all n locations
gaatnccggggcggcccacacccgtccacacatagaagacgaagaagaagaagaagacgatacagatccacaacgccatgggtttaggcatcttagcttctcgaacaattcgaccagcttcacgtcttcttcaatctcaaacctccaatttcttcctccgcacaatcgtctcaaaaccagagctccaatctcctgaatccgctgctgtctctgagcctgagccgccgacacagattctccctcctagaaaccctgtaggtggagcacgcgtccacttctcgaatcctgaagatgcgatcgaggtctttgtcgatggttacgcggtcaaagtccctaaaggattcactgttcttcaggcttgtgaggtcgctggagttgatatcccgaggttttgttatcattctcgtttatctattgctggaaattgcaggatgtgtcttgttgaggttgagaaatctcctaagcctgtagcttcatgtgccatgcctgcgcttcctgggatgaagattaagactgatacaccga

SEQ ID NO: 120757 - DNA, 669 bp, Arabidopsis thaliana
  unsure (1)..(669): unsure at all n locations
cagtttgcaggnttngccntggnccactggntccggtnacatganngggcccccttttcatggcggggatgagaaagccgctgtggttttcgatctagacggataccttagcaccgagagcgctcgttaccacaccgcttttatcagtggaaaggatggattctttaaacctgtgactctaggagtagctcccaatgtcggggaaccttgtcccagaaccgggcatattccgactacatatcgtcccccgcttgtctgctcgtctacttaccttccgagtttagtgcaagtcaaccaacagcgcaaaaggaaagaaagacatgtttagttttctgttccttgcagttctcaagactgctagtcaattctcagttacatttccatgttatctttctcctcttttagtttctcttctcaaacttactcttgtcatggtttaagtttcttacttttcgtcagtgagatggttaggtaccttatttgtttcttgcattgtcgtctgctagtaaatttatcaaagcattgttctagtcacttgttcacttgcaccatccttaagcaaagcatgacatggtttcatgtactgttagcccaattatggagtacatatctcatataagaaataaaaaaaagggcggacgctctagaggatccnagcttacgtagggg

SEQ ID NO: 120758 - DNA, 501 bp, Arabidopsis thaliana
  unsure (1)..(501): unsure at all n locations
ctcacgacttgcgctctaattcatggagggttctcgaggtcactcccaacggggaaatggaccctaatcatcccctctacggcgtttctgtgaagggaaatacctacttttttgcgcatgaggatagcagcagtggtgaaattgatgaagatggcgacataatcgatcttgaagatttcttactctgttttgattttacaacagagacatttggtctgcgtctgcctcttccgtttcactctactatcgatgcgactgtgaccctctcttgtgttagagaccagcagctcgcggtgctatatcataatgagggtcttcacagtgatgatcggtttaccacagttggggttttggggttaacaactcaggatttgaggcccaactctggttggccccgggggcaaaggttttttgacaagtggggtnttggggcccaattgggcactcaactgggttttccgggtttncaaatnatntngggggccnncccttttttaaatt

SEQ ID NO: 120759 - DNA, 590 bp, Arabidopsis thaliana
ctacaacttgcgctctaattcatggagggttctcgaggtcactcccaacggggaactggaccctaatcatcccctctacggcgtttctgtgaagggaaatacctacttttttgcgcatgaggatagcggcagcggtgaaattgatgacgatggcgacataatcgatcttgaagatttcttactctgttatgattttacagcagagacatttggtctgcgactgcctcttccgtatcactctactatcgatgcgactgggaccctctgttgcgttagagaccagcagctcgcggagctatatgataatgagggtcttcacagtgatgatcggtttaccacagttgagttttgggttactactagtattgagcccaactctgtgtcctggagcaagtttttgacagtggatatgagaccattggcactcactggtgttcggtttgacaatgatatgggtgccaccttcttcattgacgaggatgagaaagtcgctgtgggttttcgatctagacggatacctaagcaccgagagcgctcgttaccacaccgcttttatcagtggaaaggatggattctttaaacctgtgact

SEQ ID NO: 120760 - DNA, 554 bp, Arabidopsis thaliana
  unsure (1)..(554): unsure at all n locations
gcgatttcttgtggaacaattcagattgtgtgtttagcccacgaggattggaaaaacatgtcgtgttcgcctgacacagagcgggccctgatctgacccacccaatcttcagcatgttccacacgcagcatgagttgcttagggacatccacatgttacagtcaaaggatctatcactgtgccacagcatgattccgcttggatcttgtacgatgaaactaaatgcaacaactgaaatgatgccagtcacatggccaagtttcactgacattcacccttttgctcctgttgaacaagcacaaggttatcaggaaatgttcgaaaatttgggtgacctcttgtgtacgatcactgggtttgactctttctcgttgcaacctaatgctggtgctgctggtgagtatgccgggcttatggttatccgcgcatatcacatgtcaagaggagatcatcaccgtaatgtgtgtatcatacctgtctcttgcacaacggtacaaacccctgcaaagtgcctggtatnttgcggggntggaaaattaatttcaaagttggga

SEQ ID NO: 120761 - DNA, 649 bp, Arabidopsis thaliana
  unsure (1)..(649): unsure at all n locations
tttgacactgttaaaattaagtgttcggatgcacatgcaattgctgatgcggctgccaagaagtgagatcaatctgcgtcttgtggactccaccactattactgcttcctttcgacgaaacaaccaccttggatgatgtcgataaactttttgaagtttttgcttcgggcaagcccgttcaattcacggctgagtctcttgcaccggagtttaacaatgctattccctctagcctaacaagagagagcccttatctgacccatccaatcttcaacatgtaccacacggagcatgagttgcttaggtacatccacaagttacaaaataaagatctatcattgtgccacagcatgattccacttggatcttgtacgatgaaattgaatgcaacaactgaaatgatgccagtcacatggccaagtttcaccaacatgcacccttttgctcctgttgaacaagcccaaggttatcaggaaatgttcgcgaatttgggtgacctcttgtgtacggtcactgggttcgactcttttcttcgttgcaacctaaatgcctggtgctgctggtgagtatnccgggttttggttatccgnggattcanatntcaagggggggtcntcnccgtaaagngngttcaaacctgtttttgnaa

SEQ ID NO: 120762 - DNA, 525 bp, Arabidopsis thaliana
  unsure (1)..(525): unsure at all n locations
atgatactgccnnnnnnnnnnnnnnnnnnnnnnnnnnnnnnnnnnnnnnnnnnnnnnnnnnnnnnnnnnnnnnnnnnnnnnnccacgcgtccgagaacaacttcttcaggttctataaagagattccgaagaagaatcttttccagaaacagtgtaagtcttatcttcttctttaggctttaagatgactgctgaagttaaggttgaggagaaacaggtggagtcagaggttgttattgctcctgctgttgttcctgaggagactactgttaaggctgttgtggaagagactaaggttgaagaagatgagagcaagcctgagggtgtggagaagagtgcttccttcaaagaagagagtgatttctttgctgatttgaaagaatctgagaaaaaggcactgagtgatctcaagtctaagcttgaggaagctattgttgacaacactctcttaaagacgaagaagaaggagagctctcctatgaaggagaagaaggaagaggttgtgaaacctgaagctgaggttga

SEQ ID NO: 120763 - DNA, 1699 bp, Arabidopsis thaliana
  unsure (1)..(1699): unsure at all n locations
cggacgcgtgggttttttttctctcatagtcgctctccctctcctctccctttgagaaatccctaactctttgctcttctcttcccggcgatctatctctccgatttgggtattgaaatggcaactcctatggttgaagatacgtcaagcttcgaagaggatcagcttgcttccatgtccaccgaagatatcactagagctactcgtcttctcgacaacgagattcgaattctcaaggaagacgcgcaaagaacaaatctagaatgtgattcttacaaggagaagattaaggagaatcaggagaagattaaactcaacaagcagctgccttacttggttggcaacattgtcgagattttggagatgaatccagaagatgatgctgaggaagatggtgcaaatattgatcttgactcgcaacggaaaggaaaatgtgttgtgttgaaaacgtctacacggcagaccatctttctaccagttgttggactcgtggatcctgatagtttgaaacctggtgacttggttggagttaacaaagatagctacttgattttggataccttgccatccgagtatgactctagggttaaagccatggaggtcgatgaaaaaccaactgaagattacaatgacattggaggactagagaagcagatccaagagcttgtagaggcaattgtgcttcccatgacgcacaaggaacgttttgagaagctgggtgttcgtccaccaaagggagtgctcttgtatggtcccccagggactggtaaaactttaatggctcgtgcctgcgcagcacagaccaatgccaccttccttaaattggcaggccctcaattggtccagatgttcattggagacggagcaaagcttgtccgtgatgcctttcaacttgccaaagagaaagctccgtgcattatcttcatagatgaaatcgatgccattggtacaaagcgtttcgacagtgaagtcagcggagacaaggaagtgcagaggactatgttggagttgctcaatcaacttgacggattcagtagcgatgaacgtattaaggtgattgcagctactaaccgtgcagatattctggacccagcactcatgcgttctggtcgattagacagaaagattgagttcccacacccaaccgaagaagcgagagcaagaatcttgcagattcactcaaggaagatgaatgtccacccagacgtcaactttgaggagcttgcacgatcaacagatgatttcaatggagctcagctgaaagcagtgtgtgtagaggcaggcatgttagctcttcgccgtgatgccacagaggtgaaccatgaagacttcaatgaaggtatcatccaagtccaggccaagaagaaagcaagcttgaactactacgcctgatctctctctctcatcatttatttttatcaatgccgtttatctttcaactagttttacttgtaccctcattccgatttggatctttttaagttttcgaatcaggatcatctattatatcaaaatacatttaattgtgttcatcttcttctgaaaacaagtttggaaatttagaaatcttagtatctctatnnnnnnnnnnnnnnnnnnnnnnnnnnnnnnnnnnnnnnnnnnnnnnnnnnnnnnnnnnnnnnnnnnnnnnnnnnnnnnnnnnnnnnnnnnnnnnnnnnnnnnnnnnnnnnnnnnnnnn

SEQ ID NO: 120764 - DNA, 648 bp, Arabidopsis thaliana
tacgcgagctctatacgacttacttagggaacgctggtacgcctgcaggtaccggtccggaattcccgggtcgacccacgcgtccgtgcgaatgcagctccagagcaacagagaacgatgcttggtgagaatctatacccgcttgtggagcagctggagccagaatccgcagctaaagtcacgggaatgcttcttgaaatggaccaaaccgaagtacttcacttgctggaatcaccagaggcacttaaagctaaagttacagaagcaatggatgttctgaggagtgtagcacagcagcaagcgggtggtgcagctgatcagttagcttctctgtctcttggagacaacatcgtaccttgagagttctaagttatatctgaaagagctcagtttatatacactgtaaaagtgtttattttgttcttttggagaatcagaaacagagttgttcttgaaagttttggatttttgagtttttgttttgggcgagagttttaacattttccttctgtgtttttgattttcttaatactttgggaagttttgtatcgttactctcacctttttttacctacactgctcatttgatagggtattgtttggcttttgtctagagtttcgacttttgggtataaaatttggtttaat

SEQ ID NO: 120765 - DNA, 1228 bp, Arabidopsis thaliana
  unsure (1)..(1228): unsure at all n locations
gagctattacagagatgaatggaaaaatgatcgttaccaaacctctatatgttgctcttgcgcagcggaaagaagaccgcaaagctaggttacaggctcaattttcacagatgaggccggtcaatatgccacctgcggttggtcctaggatgcaaatgtatccaccaggtggtccaccaatgggtcagcaactcttctatggtcaagggcctcctgctatgattcctcagcctggattcggatatcaacaacagcttgtaccgggtatgagacctggtgggtctccaatgccaaacttcttcatgcctatgatgcaacaaggccagcaacagcaacagcagcaacagcagcagcagcgacctggtggtggtagaagaggagctcttccacaaccacaacaaccttctcctatgatgcagcagcagatgcatccaagaggtcgaatgtatcggtatcctcagcgagatgtaaacacaatgcctggtcctactcaaaacatgctttctgttccatatgacgtctcaagtggtggtggtgtgcatcatcgtgactcgcctacttctcaacctgttcctattgtagctttggctacacggcttgcgaatgcagctccagagcaacagagaacgatgcttggtgagaatctatacccgcttgtggagcagctggagccagaatccgcagctaaagtcacgggaatgcttcttgaaatggaccaaaccgaagtacttcacttgctggaatcaccagaggcacttaaagctaaagttacagaagcaatggatgttttgaggagtgtagcacagcagcaagcgggtggtgcagctgatcagttagcttctctgtctcttggagacaacatcgtaccttgagagttttaagttatatctgaaagagctcagtttatatacactgtaaaagtgtttattttgttcttttggagaatcagaaacagagttgttcttgaaagttttggatttttgagtttttgttttgggcgagagttttaacattttccttctgtgtttttgattttcttaatactttgggaagttttgtatcgttactctcacctttttttacctacactgctcatttgatagggtattgtttggcttnnnnnnnnnnnnnnnnnnnnnnnnnnnnnnnnnnnnnnnnnnnnnnnnnnnnnnnnnnnnnnnnnnnnnnnnnnnnnnnnnnnnnnnnnnnnnnnnnnnnnnnnnnnnnn

SEQ ID NO: 120766 - DNA, 1429 bp, Arabidopsis thaliana
  unsure (1)..(1429): unsure at all n locations
cggaantnccggggcggcccgagccgtccgcccacgcgtccgcccacgcgttctctcttctgacgtgtttcccttcttcggtttctcatcctcacgtccgccggatttcgaggaaacgaagaagaagaagaacaacaacaacaaaagccttttgagatatggacagcttctggcaattaggtgatgagctacgaggtcagacgagagcatcagaggatcacaaatggtctactgttgcaacgaagctagctgagcaaactagaatgaaaggggagaggatgaacaatcttgatctctccaaaggttacactgagtttagaccaagtgagaaattcagtttccaggagaacaatcttaacttcaacatgttgaatttggatggtaaatttggtgaaagcatcatggggaagacttcgatgcagagcaatgtttataatatgaatactgttttccagaagaatgactttaagagtggaggcaacatgaaagttaacaagtataatggtaatgttgttgctaacaaggagatgagcaacaacaaacataacaacaactgcaatgataatgggaatatgaatttggctgttgacaagaggtttaaaaccttgcctgcttcggagactcttccgaggaatgaagttcttggtggttacatctttgtttgcaacaatgatactatgcaggaggatatgaaacgtcacctctttggtttacctccaagatacagagactctgttcgagctataacacctggattgcctctgtttctttacaactacaccactcaccagcttcatggtatcttttgaggcaacaacttttggaggtactaatattgatgctactgcttgggaagacaaaaagtgcaaaggagagtcaaggtttccggctcaggtaaggatcagagtgaggaaaatctgcaaagccttggaagaggactccttcaggccagtacttcaccactatgatggtccaaaattccgccttgagctctctgttcctgagacattggatctgctagatctttgcgaacaagctggttctgcataagccgaaacgatcaaccttgcaatgccacgttgcaaagagggggatgttttgtatgaaatctatctatatatgtaagacctaccgtaagagcgtaagcttttgggatttagttaagagtcggattcaaatgtatgtttactaagaagggatgagagtatgtgtggtcttaaggcaagcaaaagagcgaagaggctctgccgaataagcgactactcttgttctgtgtcgtgtctgatgtgtgagtgtgtgtctgtgtttgtgagagattcgatactctttgaaacaaagatttatgtagaagaatatagagaaagaaagactactataaacagagaaaaaaaatgatgtgagctaaaaaaaaaaaaaaaagggcggccgc

SEQ ID NO: 120767 - DNA, 409 bp, Arabidopsis thaliana
aggaaacgaagaagaagaagaacaacaacaacaaaagccttttgagatatggacagcttctggcaattaggtgatgagctacgaggtcagacgagagcatcagaggatcacaaatggtaaactgttgcaaagaagcttttcgaattggaatctaatcatgctggctattacatgttaatgtcgaatgtgtatggggttaagggagaatgggagaatgtggaggaagttgagaaattcggtgaagcagagaggaattaagaaaggactggcagagagtttgattgagattagaagaaaagtacatagatttgtggcggatgatgaattgcatcctgagaaagagccggtttatggattgctgaaagagctggacttgcatatgaaagaagatttgaaaactgtgtgtact

SEQ ID NO: 120768 - DNA, 1373 bp, Arabidopsis thaliana
  unsure (1)..(1373): unsure at all n locations
atgtctnnnnnnnnnnnnnnnnnnnnnnnnnnnnnnnnnnnnnnnnnnnnnnnnnnnnnnnnnnnnnnnnnnnnnnnnnnnnccacgcgtccgaaaatcaacacactgataaaataagagttgcagagagagtctctcatcttcttcatttcttcaccaccatcatcacacaccttcttcttcttcttcttctctctctatcacaagagagtcaaatccatggcttctacttcttccctcgctctctctcaagctctcctagctcgtgcaatctctcaccatggttctgaccaacgtggatctttaccagctttctctggactcaaatccaccggttcacgcgcctcagcttcgtctcgtcgacgtatcgctcaatccatgaccaaaaaccgatctctccgtcctcttgttcgcgctgcagctgttgagactgttgagccaaccactgattcgtcgattgtggacaaatcggtcaactcgattaggtttttggctatcgatgcggtggagaaggccaaatcaggtcatcctggtcttcctatgggttgtgctccgatggctcacattttgtatgatgaggtcatgaggtataaccccaagaacccttattggttcaaccgtgaccgattcgttctatctgctggacatggatgtatgttgctctacgcgttgcttcatcttgccggctacgacagcgtccaggaggaagatttgaagcagttccgtcaatggggaagcaagacaccaggacatcctgagaatttcgagactcctggaattgaagtcactactggtcctcttggacaaggaatcgctaatgctgttggtttagctcttgctgagaagcatttggctgctagattcaacaaacctgatgctgaagtagtcgaccactacacatatgcgatccttggagatggttgtcagatggagggtatttctaatgaagcttgctctctagctggccattggggacttggaaagctcattgctttctacgatgacaatcacatttctatagatggagacacagtagttgccttcactgagaacgtgggccagcgacttgaagcccttggacggcatgttatctgggtgacgaatggtaacactgggtatgacgagatccgtgctgccattaacgaacctaaaactgttactgacaagcctactttgatcaacgtcactactaccattggcttatgggtctcccagcaaggcgaactcatacaagtgtccatggagcttgcactttggcgagaaggaaagtttgaggcttaccagaaattaacctttggttgggccnatttnanccgttncagggtcccttacggttnttnaaaaggcccttggggnngggnaatanaccnnaa

SEQ ID NO: 120769 - DNA, 1683 bp, Arabidopsis thaliana
  unsure (1)..(1683): unsure at all n locations
cacagaaattgccttcactgagaacgtggaccagcgatttgaagcccttggatggcatgttatctgggtgaagaatggaaacactgggtatgacgagatccgtgctgccattaaggaagctaaaactgttactgacaagcctactttgatcaaggtcactactaccattggttatgggtctcccaacaaggcgaactcatacagtgtccatggagctgcacttggcgagaaggaagttgaggctaccagaaataaccttggatggccgtatgagccgttccaggtacctgacgatgtaaaaagccactggagtcgtcatacacctgaaggagctactcttgaatctgactggagtgcaaagtttgcagcatatgaaaagaagtacccagaggaagcttctgagttgaaatctattatcactggtgaattacctgctggctgggagaaggctctacctacatacacaccagagtctccaggtgatgccaccagaaacctgtcacagcaatgtcttaacgcccttgctaaagttgttcccggtttccttggtggaagtgctgaccttgcatcatccaacatgacattgctgaaagcctttggcgacttccaaaaggccacacctgaagaaagaaatcttaggtttggtgttagggagcacggaatgggagccatctgcaatggcattgcccttcacagccccggtcttatcccttactgtgcgacgttctttgtcttcaccgactacatgagaggtgccatgagaatctcagctttgtctgaagctggtgttatctatgttatgacccatgattccattggtcttggagaagatggaccaacccatcagcccattgagcacattgcaagtttccgtgctatgcccaacactcttatgttccgtcctgctgatggaaatgaaacagccggtgcatacaagatcgctgtcaccaagcgcaagacaccatctatcttagctctgtctaggcaaaagctgcctcatcttccaggtacatccatcgaaggagtggaaaagggtggatatacaatttctgacgactcttcaggcaacaaacccgatgtgatcttgattggaactggttctgagctagagattgctgcacaggctgcggaggtgctcaggaaagacggcaaaaccgttagagttgtttctttcgtgtgctgggaactatttgacgagcaatcagatgaatacaaggagagtgtgttgccatcggatgtatcagctagagttagcattgaagcagcttcgactttcggatggggaaagattgttggaggcaaaggaaagtccattggtattaattcattcggagccagcgcaccagcacccttactctacaaggagtttggtatcaccgttgaagctgttgttgatgcggccaagtcattcttctaagagatttaagatcggaccattctctctgagggggttttgtctgaaacttgatttggaaacaaggctattcacaacattgtctcatatctcgaaataaagtgcaacaagacacaaagactttcactttcaaaaaaaaaaaaaaaaaaaaaaaaaagggcggcagctctagaggatccaagcttacgtacgcgtgcatgcgacgtcatagatctctantagtgnnnnnnnnnnnnnnnnnnnnnnnnnnnnnnnnnnnnnnnnnnnnn

SEQ ID NO: 120770 - DNA, 862 bp, Arabidopsis thaliana
agctctccagcttacaattagtttcgggtcgtacgcgtgaggattgtgagagaaagcgtttcaagcagataaatctatgcccatgatgtcgcaggttctaattcgtttctgtataggaaaagatggaacgcgtgcaggttcgggtccggtattaccgtggtaaacccatgtgtccgtaaaaagttaagggattcaaggcaaaacgtgtgagagttgtttccctttgtattgttgggaagcttttcgacgaagcgcatcagattgcatacaaggaaagtgttttgccatctgatgtatcagctagagttagtatcgaagctggatcgacttttggatggggaaagatcgtcggaggaaaagggaaatcgattggaattgatacgtttggagcaagtgcaccagcaggaaagctttataaagagtttggtatcaccattgaagctatggttgaagcagccaagtcacttatttaaaaaagtatcttacaggtactaccgaggtttgcatttgaagtaagagacattccataagcattatcttctttgtccaaataaaaatatactccttccaatctttttataaatgatgtttaaagctttcattttggtttttaaataaatgatgttttaaattttcaatgcaaaattatttttattggttgattaaataaatgatgttttaggcttttatttatatttttattgttttcttgtaattaacatagttttgatctttgtaaacaacaactctattgtacttttattcttgattagttgattttaaaaaaaaaaaaaaagggcggccgctctagaggatccaagcttacgtacgcgtgcaggcgacgtcatagatcttctatagt

SEQ ID NO: 120771 - DNA, 800 bp, Arabidopsis thaliana
caggggggaaccatccccattaaaaaaaggaaggggggaaaaaagggggggaaaaaataccaattttctggaggggcttttttcaggggcaaccaaatccgggaatgtggttctttgattgggaaactggtttttaagctaaagaattcctgcacaggctgcgaaggtgttcaggaaaaacgggcaaacccgttagagttgtttctttcgtgggttgggaactatttgacgagcaatcagatgaatacaaggagagtgtgttgccatcggatgtatcagctagagttagcattgaagcagcttcgactttcggatgggcaaagattgttggaggcaaaggaaagcccattggtattaattcattcggagccagcgcaccagcacccttactctacaaggagtttggtatcaccgttgaagctgttgttgatgcggccaagtcattcttctaagagatttaagatcggaccattctctctgagggggttttgtctgaaacttgatttggaaacaaggctattcacaacattgtctcatatctcgaaataaagtgcaacaagacacaaagactttcactttcttttttgtttttgttttttgtacttcaggtcaagataggttttcggtttgagaagagaaacaaattagaaagacaatgtaaaactcccatgatcattcgtgtaacgctaaatgcttgaatttcagcaaaactttccagcaaaaaaaaaaaaaaaaaataaagggcggccgctctagaggatccgagctcacgtacgcgtgcgtgcgcagtcatagtatag

SEQ ID NO: 120772 - DNA, 494 bp, Arabidopsis thaliana
cccacgcgtacgtattttctctctctcagttaaccagagagagcatcaattgcttctacttcttctctagcgctctcgcaagctctccttacacgagccatctctcacaatggctctgaaaactgcgtctctataccagctttctctgctctcaaatccacttctccacgcaccagtggcaccatctcttcccgtcgacgaaacgcctccacgatcagtcactctctccgccctctggttcgtgcagccgccgtagaggcaatcgtgacaagttctgattcgtccctggttgataagtcggtgaacacgatcaggtttctggcaatagatgcggttgagaaggcgaaatcaggtcatccaggtcttcctatgggctgtgctccgatgtctcacattttgtacgatgaagtcatgaagtataaccccaagaatccttactggtttaaccgtgatcgtttcgttctctctgctggacatggatgcatgttgcaata

SEQ ID NO: 120773 - DNA, 820 bp, Arabidopsis thaliana
cccacgcgtccgctttttaatagaaataaaagctaaatcccaggaatcccattttagtaccagtcgtggtataaatattaacacttactgattgccgagagacgaaagaggaaaatcccaacaataaagagcaaacgatcttacagctcataatatttcgttaattatcaaattgctaataggagaaaaaaatgggtcaagctttgggttgtattcaagttgatcagtcgaatgtagcaatcaaagagacttttgggaaattcgacgaagttcttgagccgggttgtcactgtttgccatggtgtttgggaagtcaagtcgctggtcacctttctttacgtgttcaacagctcgatgttcgctgcgagacaaagactaaggataatgtgtttgtcacggttgttgcttccattcaataccgtgccttagcggagagtgctcaagatgctttttacaagctcagcaacacgaggaatcagattcaagcttatgtctttgatgtgatccgagcaagtgtacctaagctggatctagactctacctttgagcaaaagaatgacattgcaaaaaccgttgagactgagctcgaaaaggctatgtcgcattacgggtatgagattgttcagacactgattgtggatatcgagcctgatgtgcacgtcaagagggcaatgaatgagatcaatgctgcttctagaatgagagaggcagcgagtgagaaagctgaggcagagaaggattctgcagatcaagcgcgctgagggagaagctgaatcgaaatacctttcaggtatgggtatagtccgtcagagacaagcca

SEQ ID NO: 120774 - DNA, 447 bp, Arabidopsis thaliana
accaaacaaaaagaaaacacctaaatcgatctgtgaagtcaaaacactttccagtttcagattctgattatggcaacaccggagacgcgtggcgttgattccgatttagagacagcggagaagataatactccggtgggattcaacaacatctgaagaagctaaagacaagctgattttccaaagcggtggtgatcgagaagaagtagatcggtacttgaaagctgtagatgaagttcaaagacacatctcttcaatctcaatctccgatgaagtcatagcaacgagtcaaatcgccatggctagactcgaggacgagctaagaaatatcttaatctctcagacttctactttcgaacctgattctcttcttctcgattcatcgttatcttcttcctctttcgcttcttcttctcgtacggagcttgaagatgacacttgcgatgac

SEQ ID NO: 120775 - DNA, 581 bp, Arabidopsis thaliana
  unsure (1)..(581): unsure at all n locations
gggtanggttagatagaaagatcgagatcccggttgccaaatgaacaatcaagaatggaaatcctcaagatccacgcatctggcattgccaagcatggagaaatagactatgaggctatcgtgaaacttggagagggtttcaatggtgccgatctgcgtaacatatgcactgaagctggaatgttcgcaatcagagcagagcgtgactatgtaatacatgaagacttcatgaaggctgtgagaaagctgagcgaggccaagaagcttgagtcgagctctcactataacgcgggatttttggggaaagagtaagaaaagaataagctcacgagaagaagagagggcctaaagggcagtgaaaaactctgttattcactttgaaaaaacaagctgatgattctgtttcagtttctcaatgttttgttttgaggttctagtaaacacaaaaatttcttgttttagtaatgacaactattttctgtttgtcctaaaaaaaaaaaaaaaaaaaagnnnnnnnnnnnnnnnnnnnnnnnnnnnnnnnnnnnnnnnnnnnnnnnnnnnnnnnnnnnnnnnnnnnnnnn

SEQ ID NO: 120776 - DNA, 786 bp, Arabidopsis thaliana
  unsure (1)..(786): unsure at all n locations
tgagctgcctctcatgaatcctgaacttttccttagagttgggattaaacctcctaagggtgtccttctgtatggacctccgggtactggaaaaactctactagctagggctattgccagcaatatcgacgccaacttcttgaaggttgtatctagtgcaatcatagacaaatacattggagaaagtgctaggttgattcgagaaatgtttaactatgctcgtgaacatcagccttgtatcattttcatggatgaaatcgatgctattggtggacgccgttttagtgaaggaactagtgctgatcgtgaaattcaaagaacacttatggagttacttaaccagcttgatgggtttgaccaacttggaaaggtgaaaatgataatggccaccaacaggccggatgttcttgatccagcacttctccgtccgggtaggttagatagaaagatcgagatcccgttgccaaatgaacaatcaagaatggaaatcctcaagatccacgcatctggcattgccaagcatggagaaatagactatgaggctatcgtgaaacttggagagggtttcaatggtgccgatctgcgtaacatatgcactgaagctggaatgttcgcaatcagacagacgnggcctatgnatacatgagctnatgaaggtgtgaaacctgccaggccaaaacctnagcggncccacaaaaccgggtttngnaaggntgaaagtacccgnaaaaaaggcnaagggtaaacctgttccctaaaaaactgtgctgcagnccaagntgtttt

SEQ ID NO: 120777 - DNA, 1001 bp, Arabidopsis thaliana
  unsure (1)..(1001): unsure at all n locations
cgactcactatttggaagctggactgcctgcaggtaccggtccggaattcccgggtcttcccacgcgtgcgctatctcgatggaaacttgttgtcggagatgtgttcagagaaccagaaatgtcaaagcttctatgcattatggtgggagatggggttcgaattacaggaatggctgttgtcactattgttttcgctgcacttggattcatgtcgcctgcctcaagaggaatgctactaaccgggatgattattctctatcttttcttgggtattgttgctgggtacgctggtgttcggctctggagaactgtcaaggggacttcagaaggatggagatcactttcctggtccattgcatgcttcttcccgggtattgcttttgttatactcaacagtgttgaacttccttctctggagcagcaacagcactggagccatcccaatctctttgtattttgagctcttggctctctggttctgcatctcggttcctctcaccctatttggaggattcctaggaacacgagcagaagcaatccagttcccagtgagaaccaaccagattccaagggaaatcccagaacggaaatacccgtcatggcttctagtccttggagcaggaacccttccttttggaacgctcttcatagaactgttcttcatcttctccagcatatggttagggagattctactatgtatttgggttcttactcatagttctgcttcttttggtagtcgtgtgtgcagaagtatcagtggtcttgacctacatgcacctctgcgttgaagactggagggtggggggggaaagccttctatgcatctggttcagtcgcattgtaccgtttcgcttactccatcaactattttggtctttgatctacaaaggtctgagcgggccccgtctaacgtatgctttacattgggctactctctgcttatggccatttgcaatcatggctcgcacgggaacacttggcttcctcacctnctttta

SEQ ID NO: 120778 - DNA, 1089 bp, Arabidopsis thaliana
  unsure (1)..(1089): unsure at all n locations
ttcagttcttcttcttctcgtcacaggaagaattttgttctgttcctcgcagctctcacagccaatgaatggcctcaaagacatagttgagacgagaaattttaaggcttggctcttagatcagtatggagttcttcatgatggcaaaaaaccttaccccggtgctatctcaacattgaaaaatcttgcaacagcgggtgccaaaattgtgatcattagtaattcttctagacgtgcttcaactacaatggaaaagttgaaaggccttggctttgatccttctttcttcaccggagctataactagtggtgaactaactcatcaatctttgcagaggagagatgattccttggtttgcttgcactgggaaggaggggcattcacattacttggaatgaccgaggagcaatctctttggagggtctagatctaaatgttgtggagaatgtggaagaagctgactttgttttagcgcacggcactgaagccctaggacttccttcaggcagtgtatctccaaggactattgatgagctagagaagattttggagaaatctgccgctcgaggacttcccatgatcgtagctaatccagattacgtgactgttgaagcaaatgtttttcatatcatgccaggtacactagcttccaagtatgaagaactgggaggagaagtgaagtcgatgggaaaacctcataagatgatctatgagtctgctatagcaattgcgggagtcaatccgtctgagtctatcgcagtaggagattcgctacatcatgatataaggggagcaaatgtttcaggaattgaatcaatattcatcactggagggattcatggtaatgagcttggtctcacttcttttgatgaaactgcaagtctagattcagtcaagacccttactgctaaacacaatgcattcccaacttatgtattatcagcctttaaatggtagttttcgttttgttgtacaaatcatattattgcttcttgaactacattttgccttcatttaacactcagagagagtaatttaaaaagctcatttgctgagnnnnnnnnnnnnnnnnnnnnnnnnnnnnnnnnn

SEQ ID NO: 120779 - DNA, 1679 bp, Arabidopsis thaliana
  unsure (1)..(1679): unsure at all n locations
nnnnnnnnnnnnnnnnnnnnnnnnnnnnnnnnnnnnnnnnnnnnnnnnnnnnnnnnnnnnnnnnnnnnnnnnncttttttttttttttttgagcaaccaaaagagaatttcaactgaaactgaataaaaagtagtgagtgggtgtatgcccactctctctatcttggagtgtgtccctctcatcttttaagattacatcacacaaagaaaaaaaggacaagaaacaataggaagagagtatgtaaagagagagagagcactatcctgaattcaggaacacaaatttcaaaaaaaacaaaaatgataaagttcaaatcaggaagaaattgagcttactcactcttcctcatcaccgtatggtttctcttatttttccaaacaaaaatcctaccccatcgaactcctaataacctttttcgtcattgtttaggctttggcttcagtagctgcgatggcaggagctggagcaacaccaccagtggttggcaggccaacaaacactttgaaggcatcgtataatccccactgtgctccagtcaacgtcccgatcatcacaattctaagaggaagccctcttgtgaacagtcccaccataccaatcttcttcaccgcatctccaacggttgctcccttagcgttgttgaggaatgacactagattgtctgctggatgagaaacgatggcacagaacactccggcaacgtaacctccggcaaaactcactccgagttgcagacctttgctgcactcactctttgggttggggattgcgtacttgtaaatcatctcaacaatggtctcaaaggaagcaaacttcatcatagtgtaaggaatctgacgtccccagagtggagcaagacccttatacaagcctccgtatccttcggacttgataaacttgggaaatccatcagacatccccctagcaaatccaggctgtgtctgaacacgaaccttcacagcttcaaatgggcaaagtgcaatatcggcaatgatctcagcagaagcagaaccagcaaggtagatgagagtcttgtatttggcagtgtactcaggtccagcaaggtcagagtaagtcttcttaaagtactcgtagaatccaaacttgcaggcaccctgagcactgtaacccaaaagagtaggaacccatccacggaaaaagcctttgactccttgctctttcagcaaaattccaaaaccagacgagatgctcttgtacttcgctggatcaatctgcatattgcacttgacgagatcgagaggagtcacggtcatgtgagtaagaccacagctgagaattccaccaaaggtacaagcagcgtagaaggcaggtgaatacatctcgatccccttccctggctcggtgggagatgcaataaggaaattcttccgagaaatcatcgacgtaggagaggaacgcggggccggagaaggagatttctcgaatgcagcgttggagttggaattgagcacctggtcgaggaggaaagatctcggagatgaagatgatgaatagaggaagctcgggatcagagaattcttcggagattccatggcggcggcggaggaaggagatggagatagcgtttgaaatgagagacggaggcgatgtttgattcccgatctcactcacgctttgcgcccacgcgtccgcccacgcgtccgttgacgcgttggtc

SEQ ID NO: 120780 - DNA, 838 bp, Arabidopsis thaliana
aagatttatgaagagaaattagaaaccataagggttttatccaaaactcgataagccatccaccgctagtgtttatcactttatctggttcttgttttgtattttttctatttatttatttagtggagacatcgatgctgacactttcattttcttaatcattctttaaggctctggtagctttggcttttgatctaaaagctgagagtcaatagagagctttgtgctgagcatagcagagaagagttatggggaaaggagggatgtctcaaggagaaggctcaaaggttgaagaagaaaacatggctgcttggttggttggtatcaataccctcaagatccaaccttttcttcttccttccgttggtcctcatgatgtgagagttaggatgaaagctgttggtatttgtggaagtgatgttcattaccttaagaccatgagatgtgcggattttgtggtgaaagagccgatggtgattggacatgaatgtgctgggatcattgaagaagtaggtgaagaagtgaaacatttagtggttggtgaccgtgtagctcttgaacctgggattagttgttggagatgcaatctctgcagggaaggacgatacaacctttgtccagaaatgaagttctttgcaactccaccggttcatggctctttagctaaccaagtggtacaccctgcggacctatgcttcaaattgcctgagaatgtgagtttggaggaaggagcaatgtgtgaaccacttagtgttggtgtccatgcttgtcgccgaactgaggttggtcctgaaacaaacgttttggtaatgggagctggacctattggccttgttac

SEQ ID NO: 120781 - DNA, 417 bp, Arabidopsis thaliana
gagaagaatggagagtacaggcaaatgcttattcaagccatccatgcttgtgcagttaagttccccgaagttgcaagcacagtggtccaccttctgatggacttcctgggagatagcaacgtggcttcagctcttgacgtggttgttttcgttagagagataatagaaacaaatcccaagttgagagtttcaatcatcaccaggttgttggacacgttctatcagatccgtgcaggaaaggtctgcccttgtgccctttggatcattggggagtattgcctatcactttcggaagttgagagtggcatttcaactatcacgcaatgccttggcgaattaccattttactctgtttctgaggagtctgagccaactgagacatcaaagaagattcagcctacctcttctgccatggtg

SEQ ID NO: 120782 - DNA, 797 bp, Arabidopsis thaliana
  unsure (1)..(797): unsure at all n locations
ccccccctcgaggtcgacggtatcgataagcttgatatcgaattcgcggccgcagcaaagccgccaaagtgtaaacgaaagtttataaatttcatttctgtgatcttacgtaattggaggaagatcaaaattttcaatccccattcttcgattgcttcaattgaagtttctccgatggcgcaagttagcagaatctgcaatggtgtgcagaacccatctcttatctccaatctctcgaaatccagtcaacgcaaatctcccttatcggtttctctgaagacgcagcagcatccacgagcttatccgatttcgtcgtcgtggggattgaagaagagtgggatgacgttaattggctctgagcttcgtcctcttaaggtcatgtcttctgtttccacggcggagaaagcgtcggagattgtacttcaacccattagagaaatctccggtcttattaagcttcctggctccaagtctctatcaaatcggatcctgcttctcgctgctctgtctgagggaacaactgtagtggacaacttgttgaatagcgatgacatcaattacatgcttgatgcgttgaagatattgggacttaatgtggaaactcacagtgaaaacaatcgtgctgtagttgaaggatgtggcggggtattcccagcttccattgattccaagagtgatatcgaactttacctcggcaatgcaggaaccagcaatgcgtccacttcaccgccgccgtcactgctgcaagtgggaaccgaagtaagtgccccttgaatggggnnccncngatnnngggg

SEQ ID NO: 120783 - DNA, 611 bp, Arabidopsis thaliana
  unsure (1)..(611): unsure at all n locations
nnnnnnnnnnnnnnnnnnnnnnnnnnnnnnnnnnnnnnnnnnnnnnnnnnnnnnnnnnnnnnnnnnnnnnctgaagcggatgcgtcaatacaccaacaacaatggagttaccaaaactattaatctcactctttctcttctcattctcatctttcttcttaggtgctgaatcggattatcctcagcatagtaacttgaagagactgagaccgaatagactgttcgtgtttggagattcctatgcagacaccggaaacataaggaaatctctctccgattcttggaaaattccttacggcatcactttcccccaaaaaccttccggtcgtttctccgatggccgcgtcgccaccgattttctagcaagatacttggggataaagtcaccaattccgtacacgtggaaggattatgccggaaaggaacggctattgtacggaatgaattatgcgtatggaggaacaggagtgtttaagactaaagataatccattgccaaacatgacaactcagattgattatttccaacgtgtcctcgccgccggcaatatctactcgccttncgatctcccctcctccctcgctctggtcagcgtcgccggcaacgactac

SEQ ID NO: 120784 - DNA, 644 bp, Arabidopsis thaliana
  unsure (1)..(644): unsure at all n locations
ggagaattttgcatttgcatttgcacaacgttataagaagaccacaagagccatttgcaatggggcataatatatgtcctaactcaccaaccccctcaaaattgccaccaacttcaaatttctctcctttaaacctttctcaatcatctttcttctgccttggaatcctgatcatggcgtcgtcttctctcacttcgaaatccattctcggatccaccaaactcggttcttcttctcttccctcggagctccgtcgtctctcttctcccgccgttcagatctctctccgtacccaaaccaggaagaacttccagatacaagctactggaagttcatatgggactcattttcgagtttcaacttttggagaatcacatggaggaggagttggttgtatcattgatggttgtcctcctcgtattccacttactgaatctgatttgcaattcgatctcgatagaaggaggcctggtcagagcaggatcacaacttctagggaaagagacttgttactttnccgggatatncgtctggaggntcttnaaggnattnccggcaggancacctttnccatgtgtttgacccaacacaggttanggggggcttattnnagnggaaanncngggtgnctntagccncngnat

SEQ ID NO: 120785 - DNA, 470 bp, Arabidopsis thaliana
  unsure (1)..(470): unsure at all n locations
ccnnnnnnnnnnnnnnnnnnnnnnnnnnnnnnnnnnnnnnnnnnnnnnnnnnnnnnnnnnnnnnnnnnnnnnnnnnncgcgcgtgcgggataactcacctacccctaaaccaactccaatttctctcctcctctattaaatctttctcaatcatctttctttgagtcttttgccttggaatcctgatcatggcgtcttctctcacttccaaatccattctcggatgcaccgggccgcgcttcttcttcttttcttccggcggagctccgtcgtctctcttctcccgccggtcagatatctctccattcacaaaccaggaagaacttccggcagtcgtggggattgaagaagagtgatctgatgctaaatggttctgagattcgtcctgtgaaggttacggcttctgtttccacggcggagaaagcttcggagattgtgcttcaacgcattagagaaatctcgggtctcat

SEQ ID NO: 120786 - DNA, 709 bp, Arabidopsis thaliana
  unsure (1)..(709): unsure at all n locations
cggggttcngganntttcncccgtttgccccanaccgaaatntgnatgnttcacnggggattcgaatgggttccggaattagaagccggtgctcccaagatcgacttcagggaaggccctgctcttcccgttcttgatgaaatcgttgctgacgagaagaaccatggaacatatgactttatattcgttgatgctgacaaagacaactacatcaactaccacaagcgtttgatcgatcttgtgaaaattggaggagtgattggctacgacaacactctgtggaatggttctgtcgtggctcctcctgatgcaccaatgaggaagtacgttcgttactacagagactttgttcttgagcttaacaaggctcttgctgctgaccctcggatcgagatctgtatgctccctgttggtgatggaatcactatctgccgtcggatcagttgatttgactcctccctactctgagtttgtccacagtggattactttccatcttcttatacctttcaatcgcattttcaccaaccactaaaatggacctttttatgtatttgtgttaagtaatatctccattgtccttgttttgctttcttctgaacaaagaaataatatgtaccttacttttaaaaaaaaaaaaaaaaagataatttaaagggcggccgctctagaggatccaagcttacgtacgcgtgcatgcgacgtcagag

SEQ ID NO: 120787 - DNA, 700 bp, Arabidopsis thaliana
  unsure (1)..(700): unsure at all n locations
cagctcnnnnnnnnnnnnnnnnnnnnnnnnnnnnnnnnnnnnnnnnnnnnnnnncggacgcgtgggcggacgcccacggtttaatctcacccaagaagacaaaaacacagagagagaaagagagagaaatggcgacgacaacaacagaagcaacgaagacatcatcgaccaatggagaagatcagaagcagtctcagaatcttcgacatcaagaagttggtcacaagagtctcttacagagcgatgatctctaccagtatatactggagacaagtgtgtatcctagagaaccagaatcaatgaaggaactcagggaagtgacagcaaaacatccatggaacataatgaccacatcagctgatgaaggacagttcttaaacatgcttatcaagctcgttaacgccaagaacacaatggagatcggagtttacactggctactctcttctcgccaccgctcttgctctccctgaagacggcaaaattctggctatggatgtcaacagagagaattacgaattgggtttaccgatcattgagaaagccggcgttgctcacaagatcgacttcagggaaggccctgctcttcccgttcttgatgaaatcgttgctgacgagaagaaccatgggacatatgactttatattcgttgatgctgacaaagacaactacatcaactaccacaagcgtttgatcgatct

SEQ ID NO: 120788 - DNA, 782 bp, Arabidopsis thaliana
  unsure (1)..(782): unsure at all n locations
caaaaacacagagagagaaagagagagaaatggcgacgacaacaacagatgcaacgaagacatcatcgaccaatggagaagatcagaagcagtctcagaatcttcgacatcaagaagttgctcacaagatcgacttcagggaaggccctgctcttcccgttcttgatgaaatcgttgctgacgagaagaaccatggaacatatgactttatattcgttgatgctgacaaagacaactacatcaactaccacaagcgtttgatcgatcttgtgaaaattggaggagtgattggctacgacaacactctgtggaatggttctgtcgtggctcctcctgatgcaccaatgaggaagtacgttcgttactacagagaccttgttcttgagcttaacaaggctcttgctgctgaccctcggatcgagatctgtatgctccctgttggtgatggaatcactatctgccgtcggatcagttgatttgactcctccctactctgagtttgtccacagtggattactttccatcttcttatacctttcaatcgcattttcaccaaccactaaaatggacctttttatgtatttgtgttaagtaatatctccattgtccttgttttgctttcttctgaacaaagaaataatatgtaccttacttttcttcttggtctcgttcttttgtttttctccatgatacaaaaaaaaaaaaaaagnnnnnnnnnnnnnnnnnnnnnnnnnnnnnnnnnnnnnnnnnnnnnnnnnnnnnnnnnnnnnnnnnnnnnnnnn

SEQ ID NO: 120789 - DNA, 2745 bp, Arabidopsis thaliana
gctctacacgactcactattgggaaagctggtcacgcctgcaggtaccggtccggaattcccgggtcgacccacgcgtgcgcccacgcgtacgctcctcatcttctcttccattcaaatctcacattccctcttcacaacaacagcttcgtattcgctcatcttcttcgctttctggcattgttcgtctactcgaggatttcaattttggtcatacaagagaagcgaagcagcgtcgccgttcaagacgaggtacagagaaaacgaagaagaagaagatatgacgattaaaccggcggttcgtatttccgacgggaatctaatcatcaaaaaccggacgattctaaccggtgtaccagataatgtcatcacgacgtcagcatcggaagctggaccggtagaaggagtcttcgtcggagctgtatttaacaaggaagagagtaaacacatcgtaccgatcggtacgcttcgcaattcccggtttatgtcttgtttccggtttaagctctggtggatggcccagagaatgggagaaatgggccgagatattccctacgagacgcagttcttattggtcgagagcaacgatgggtcccaccttgagtctgacggagctaacggcgtcgagtgtaaccagaaagtttacaccgttttcttgccgttaatcgaaggatctttccgttcgtgtctccaaggaaacgttaacgatgaggttgagctctgtttggagagtggtgacgtggacactaaacggtcgtcgtttactcactctctgtatattcacgccggtacagatccgtttcagacaataacggacgctattcgcaccgttaagttgcatctgaatagtttccgtcaacgtcacgaaaagaagcttccagggatcgttgactacttcggatggtgcacttgggacgcgttttatcaagaagtgactcaggaaggcgtcgaagctggtcttaagtctctcgccgccggtggtacgccgccgaagtttgttatcatagacgacggttggcaatcagttgagagagatgccacggtggaggccggagatgagaagaaagagtcaccgatttttcgactgacggggatcaaggagaacgaaaagtttaagaagaaggatgatccaaacgttgggattaagaacattgtcaagattgctaaggagaaacacggtttgaaatatgtttacgtgtggcacgcgataacgggttattggggcggagttagacccggggaagaatacggatctgttatgaaatatcctaatatgtcaaagggtgtggtggagaatgatccgacgtggaagactgatgtaatgacgctgcaagggttgggtttggttagccccaagaaagtgtataagttttacaatgagcttcatagttacttggctgatgctggcgtggacggtgtgaaagtggatgtgcagtgtgtattggagactttgggtggtggtttaggcggtcgggttgagctgactcgtcagtttcatcaagctcttgactcctctgttgctaagaacttcccggataatggctgcattgcttgtatgagccataatacggatgctctttactgctcgaagcaagcagctgtgattagagcatcagatgatttctatccacgggatccggtgtctcataccatccatatagcctcggttgcttataacagtgtgttcttgggagagtttatgcaagcctgactggggatatgttccattccgtgcaccctgctgcagagtatcatgcctctgctagggccatcagtggtgggcctctctatgtcagtgattctcctggaaagcacaactttgagcttctaagaaagcttgtattgcctgatggatcgattcttcgtgctcgactccctggtagaccaactcgcgattgtttgttcgctgatcctgcccgtgatggtgtcagcttgctaaagatatggaacatgaacaagtacactggagttcttggcgtgtataactgccaaggagcagcttggagcagcacagagagaaaaaacattttccaccagactaaaactgatagcctcactggctccattcgtggtcgtgatgtgcattcaatatcggaggcctccactgatccaacaacctggaatggagactgtgctgtttactcccagagcagaggcgaacttattgttatgccatacaatgtgtctcttccagtctcactcaaaatccgtgagcacgagatcttcacggtgagccccattagtcatcttgttgatggtgtatcttttgccccaattggtctagtaaacatgtacaattcgggaggagctatcgaaggacttagatatgaagccgagaagatgaaagtggtaatggaagttaaaggatgtggcaaattcggatcttactcttctgtgaagcctaagagatgcgttgttgagtcaaatgagattgcattcgagtacgattcctcctctggattggtcacctttgagttagacaaaatgcctatagagaacaaacgatttcatctgatccaagttgagttatgaagagtgattcatacaattcattaaacaaaaacagtctcaaaacagttttaaatagtctttattatttgtaaacctttggttaccattgtagctactttcaatgttatactacagttcacgttaaaaaaaaaaaaaaaaagggcggccgctctagaggatccaagcttacgtacgcgtgcaggcgacgtcatagtattctataggtcgcctcaat

SEQ ID NO: 120790 - DNA, 677 bp, Arabidopsis thaliana
  unsure (1)..(677): unsure at all n locations
agctannnnnnnnnnnnnnnnnnnnnnnnnnnnnnnnnnnnnnnnnnnnnnnncccacgcgtccgagaaaaacctcgccaaacgaggaaagccaaagagagagagagagaaacaaaaatggcgtcacagagttgctacaatggaatccatcgtataaaaagggttcatcctctgattcactctctcacatttcatcgattctcctcatcttctcttccattcaaatctcacattccctcttcacaacaacagcttcgtattcgctcatcttcttcgctttctgatcttggaaatcgcaggcattgttcgtctactcgaggatttcaattttggtcatacaagagaagcgaagcagcgtcgccgttcaagacgaggtacagagaaaacgaagaagaagaagatatgacgattaaaccggcggttcgtatttccgacgggaatctaatcatcaaaaaccggacgattctaaccggtgtaccagataatgtcatcacgacgtcagcatcggaagctggaccggtagaaggagtcttcgtcggagctgtatttaacaaggaagagagtaaacacatcgtaccgatcggtacgcttcgcaattcccggtttatgtcttgtttccggtttaagctctggtggatggcccagagaatgggagaaatgggccgagatattcccta

SEQ ID NO: 120791 - DNA, 551 bp, Arabidopsis thaliana
  unsure (1)..(551): unsure at all n locations
aacgggggggccattggtgaaaaaaaaaaaggtcctttgtcaacggcaggcccgctccggggtaccaaccgncaaccccccgtccgtttggaggactttgaatcaatcgaagaagataagcgaagagctatttgcgagagaagtgcactcgagtttgcgaagatgcttctcaaggaaaggagaaagtttaagagtatcggtgaagttgtttcagcaattcaacaacaaagctaagacaatttataatgttcttctgctgaagttcttgaaagtcttgttttgatcttgggagttaattggcaagaaaagtatcacaatgctgcttatcacatggatttgtaatttagtggtttgtggtggtgatgatggtattcaaatgcattttgttacaataataataataaaagtttcgacatgaaacacaggaaacaatcacgggccgccgctctagaggatcccccctccctgcccctgccatcgccacacatgtgtcacttgtataaggtgcaccaaattacacttactggaacctgcgtcacccacagatgaag

SEQ ID NO: 120792 - DNA, 765 bp, Arabidopsis thaliana
  unsure (1)..(765): unsure at all n locations
cagctcnnnnnnnnnnnnnnnnnnnnnnnnnnnnnnnnnnnnnnnnnnnnnnnnnnnnnnnnnnnnnnnnnnnccacgcgtccgatcgaaaagaatacaagcagtggatcttgagaaccattgagcaaacttggaatttgtttaacaaaaggttcattgcgctatgggatcaaaacaaagatggaccaggcgaagcataccttgcagatatctataacaataccgaggttttgaagtttgttcaagaaaactacatgaggaatttgttgcatgactcactcggattcggcgctgcaaagatgattaggagaattgtgggagtggcacatgttgaggactttgaatcaatcgaagaagataagcgaagagctatttgcgagagaagtgcactcgagtttgcgaagatgcttctcaaggaaaggagaaagtttaagagtatcggtgaagttgtttcagcaattcaacaacaaagctaagccaatttataatggttcttctgctgaagttcttgaaagtcttgttttgatcttgggagttaattggcaagaaaagtatcccaatgctgcttatcacatggatttgtaatttagtggtttgtggtggtgatgatggtattcaaatgcattttgttccaataataataataaaagttttgggtttttttcactaaaaaaaaaaaaaacccaacccacanannnnnnnnnnnnnnnnnnnnnnnnnnnnnnnnnnnnnnnnnnnnnnnnnnnnnnnnnnnnnnnnnnnnnt

SEQ ID NO: 120793 - DNA, 443 bp, Arabidopsis thaliana
  unsure (1)..(443): unsure at all n locations
ctttgaggactttgaatcaatcgaagaagataagcgaagagctatttgcgagagaagtgcactcgagtttgcgaagatgcttctcaaggaaaggagaaagtttaagagtatcggtgaagttgtttcagcaattcaacaacatagctaagacaatttataatgttcttctgctgaagttcttgaaagtcttgttttgatcttgggagttaattggcaagaaaagtatcacaatgctgcttatcacatggatttgtaatttagtgggtttgtggtggtgatgatggtattcaaatgcattttgttaccaataataataataaaagtttaggaattaaaaaaaacctaaaaaaaaaaggggcggcccgcccttagggggttccaagccttnccgaaacgcgtgcattcggacggcaatagctcttcctatnggggcccccnnaatt

SEQ ID NO: 120794 - DNA, 691 bp, Arabidopsis thaliana
ctatgacgcaccctgcacgcgtacgtaagcttggatcctctagagcggccgccctttttttttttttttttgaatcaaaagaactgtttctttctttctttcttctccatgagaagaattatcatatcatagatctattccaacaaatgggaaacaatttaaaactactcaaataatcaaaagaaaattataaccagaaaaaaagagaagcttattgtcgccaccatcattcatcttcttcaacataattcaactcttgtttttttcaaaagtcatagtccttgaacaacttcttaacttgttcaagcgtaacaaacaaaaccaccgtgaacggtgcttgtctcgaaaccgtcgggataaaacctttatacaaagacataatcccttccgctttcaccgttttcaaagcacaatcaaccgctcctttatacggcggagcaactccagccaccaccttcatattcatcactctcgtcttaatcacatcaacaggattactcgcaacgctcgcaacagaccccgccgcgaaactcgccgactcatgagtcccaagcccatctttcaacaaccctttctccaaaatcgtctctttaacagaatcatacgaagccaactgcgatgacgtcacaagcattgctctgtttatcgtcaaagacgatcctctccacaacgacgtaacgccttcaccgga

SEQ ID NO: 120795 - DNA, 746 bp, Arabidopsis thaliana
atagggacgtattggggagctgtgagtacagctttttgtgctgaaatcgttgaatctgcggatgcttatctgtttgcaggtccgattttcaacgattacagttctgttgggtattctctgcttctcaagaaggagaaggcaatcatcgttcagcctgatcgggttactatcggtaacggacctgcgtttggatgtgttcttatgaaggattttctaagcgagttggctaaacgaattaagcacaacaacacttcttatgagaattatcacaggatctatgtcccagaaggaaagcctttgagagataacccgaatgagcctttgagggttaatgtactgttccaacacattcagaatatgctctcttctgagtctgctgtgcttgctgagacaggagattcctggttcaactgtcagaagctgaagctccctgaaggatgcggttacgaattccaaatgcagtacggatcaattggctggtcagtgggtgctactctaggctatgctcaagccatgccaaacaggcgtgtcattgcttgtattggagatggtagtttccaggtaaccgcacaggatgtatctacggttgatacggtgtgggcaaaagaccataatcttcctcatcaacaacggaggctacaccattgaggtgggaattcacgatggtccttacaatgtcataaagaactgggactacacagcttttgttgacgccatacacaatggagaggaatgctggctccagg

SEQ ID NO: 120796 - DNA, 703 bp, Arabidopsis thaliana
  unsure (1)..(703): unsure at all n locations
atacgactcaccttagggaaagctactacgcctgcaggtaccggtccggaattcccggtgtcgacccacgcgtccgcccacgcgtccggtttgctatataaatcctccaatttctcaatattctaaacaaattatatattttcttacttacttgttctcttgtaatggatttctctccgatcaactgcctcattttcgatttggatgacacattataccctctaaaaactggaatagcgccagctgtcaagaagaatattgacgattttctagtggagaaatttggattctcagaaagtaaagcttcaagcttaagagttgaactcttcaagacttatggaagtactctcgctggtcttagggcgttaggtcatgatgttcatcctgatgaatatcacagtttcgtgcacggaaggttaccgtatgggtcgatcgaaccaaacaacaagctacgtaaccttctcaacaaaatcaaacagagaaaattaatatttacgaattcggacaagaatcatgcggtgaaggtcctcaaggaacttgggttagaagattgtttcgaagagatgatttgttttggggcaatgaccccaatttttgtcggggcaacaaccggcccgatgatncccggttgttctnaagcttcgttgccnaatggtatttcattgngagcacgtntcccncgacgattttggngaannccanc

SEQ ID NO: 120797 - DNA, 574 bp, Arabidopsis thaliana
  unsure (1)..(574): unsure at all n locations
atcttcaagacttatggaagtactctcgctggtcttagggcgttaggtcatgatgttcatcctgatgaatatcacagtttcgtgcacggaaggttaccgtatgggtcgatcgaaccaaacaacaagctacgtaaccttctcaacaaaatcaaacagagaaaaattatatttacgaattcggacaagaatcatgcggtgaaggtcctcaagaaacttggtttacaagattgtttcgaagagatgatttgttttgagacaatgaacccaaatttattcgggtcaacaacccgacccgatgaatacccggttgttctcaagccttcgttgaccgcaatggatatttgcattcgtgtagccaacgttgatcctcgccgaacagtatttttggatgataatatccacaatattaccgcgggtaaatctgtcgggcttcgcacaatcctggtgggaagagcagaaaagacggaagatgcggattatgcggtggagacggttactgagatagctacggcgggtgccanagatttnggnttncgncgaccgncgacaagncggnttttnccgttggntggtt

SEQ ID NO: 120798 - DNA, 505 bp, Arabidopsis thaliana
  unsure (1)..(505): unsure at all n locations
nnnnnnnnnnnnnnnnnnnnnnnnnnnnnnnnnnnnnnnnnnnnnnnnnnnnnnnnnnnnnnnnnnnnnccacgcgtccgatcaatatatatctctctttctctctcttcatttgatagatttgaagatttgagaggagagagaggaagaaaaaatgggagagatgaagagtatgcaaatgggtgtgattggagcattgtttctatcagttgcatcttctgtctccattgtcatttgcaacaaagctttgatgaccaatcttggtttcccttttgcaacaacacttactagttggcatttgatggtaacatattgcacacttcatgtggcatataaactaaacttctttgagaataaaccaatagacatgagaactgttgttctctttggcctcctcaatggcatttccattggtctcctcaatctcagcctcggctttaattccatcggcttctatcaaatgaccaaacttgctatcataccattcactgttcttttagaaacc

SEQ ID NO: 120799 - DNA, 513 bp, Arabidopsis thaliana
  unsure (1)..(513): unsure at all n locations
nnnnnnnnnnnnnnnnnnnnnnnnnnnnnnnnnnnnnnnnnnnnnnnnnnnnnnnnnnnnnnnnnnnnnnnccacgcgtccgcggacgcgtggggtttttctatcgagcacggtgaagggtctgagagaacgtcctccatcgtcttactctctcaagatggagtctttcaacacactcatgaagtctgtttacactgagagatacgaatctcgtccttttagggtcggtagatacaactggacgcttgttgtgtatccgaagggaaacaagaacgataacggtacagggcacatttcgctatacgtcgtcttagacaactcaactctcacctctcaaagtgaagaggttcatgtagatctcagattttacgtattcaacaagaaagagacgaagtactttacgatccaagatactgatgtatggcgattcagtgcaatcaaaagaatgtgggggattttctaaaggttcttcctctgtttacgtttaacaacctaaaaaatggatacctttat

SEQ ID NO: 120800 - DNA, 769 bp, Arabidopsis thaliana
tgctctgaagactttgtttgtgtagcaaaaaaaaaacgcgattttttttctgggtttcttccgatgttagatttgcagccgtcagatcggcgtcatggagctccgagtagtagcggcggtgttagtggtggtgatgagctgatcagaacttataaaggctggaaaggcaataacgtgttcttccttggaggaaggctcgtgtttggacctgatgctcgatctattctcatcaccgtcttcttaattacagctcctgtcattgtattctgtatttttgttggcagaaaatttatcgatgattttcctcaccatagaggagtatcagttttagctgttgctgttggtctgattttattagatctagtatttcttcttctaacctccgcgagagacccagggataataccacgtaatctgtatcctcctgaaccagagagtaatgaaggcaatggagaaccacgtcttgctcatactcctcagagtcggttgcctcggacaaaggatatgattgtaaatggaattactgtcaagatcaaatactgtgacacatgcatgctttacagaccgccccgtgcttctcattgttcgatttgcaacaactgcgtcgagaagtttgatcaccactgtccttggcttggtcagtgcattggattgagaaactataggttctacttcatgtttgtgttgtgctcaactcttctctgcatttatgtccatgtgttctgctggatctacgtcaagcggataatggatagtgagaacataaaca

SEQ ID NO: 120801 - DNA, 1079 bp, Arabidopsis thaliana
  unsure (1)..(1079): unsure at all n locations
nnnnnnnnnnnnnnnnnnnnnnnnnnnnnnnnnnnnnnnnnnnnnnnnnnnnnnnnnnnnnnnnnnnnnnnnngtgatttgttatatctttatgcttattccaaagtccaaactaattgcatattcgaagataatagccacatgtatgagatgacgtggttggataatagctagtagtgttaaaatacctcatttgacctttcgacattcatacgcaatcgactcattccacggatctgcttactcattgattctcgataaattgttcttctcccacagacaccagattctaccaatcatttgctcgaaaaggaatcatgggtcttaaagctggaacctttgtgcttctcttgttgggtttgatcttggtctctgacgctagatctttcgttgactccaccatctcagagaaagtttccaacaaggaagacgtttgcactctgtgtgaggaatatgttactgatgctctcagctaccttgagaaaaatgtcacacaagcggagatcatcgaagatcttcatgatcggtgttcccaattgcgcggatattcgcagcagtgcataagtttggtggattactatgttcctcttttcttcttacaactagagtcgtttcaacctcattatttctgcaagaggatgaatctttgtggcaaagttgtagctcttgtcgaagaagctcgtcaggacagttgcggtgtatgccacaggactgtttcagagattctcatcaaactacaagatcctgacacacagctggatatcgttgaactgcttatcaagggatgcaaatcgctcaagaactacgagaagaagtgcaagacgttggtgtttgaatatggacctctgatactcgtaaatgcagaggaattcctagtgaaaaacgacgtctgcacactcttgcgcgcatgcccccctgagaaatcggttctaaggcagccggagttggctgattcttgaatgttcaaaacgttgctatcacggtttattcctatgggnncaagagggcncgggtntcctngntngttcagcttttgagggcctntttggtaanancccaatccctccttgaaannccta

SEQ ID NO: 120802 - DNA, 628 bp, Arabidopsis thaliana
tatcgttgaactgcttatcgagggatgcaaatcgctcaagaactacgagaagaagctcgtcaggacagttgcggtgtatgccacaggactgtttcagagattctcatcaaactacaagatcctgacacacagctggatatcgttgaactgcttatcaagggatgcaaatcgctcaagaactacgagaagaagtgcaagacgttggtgtttgaatatggacctctgatactcgtaaatgcagaggaattcctagtgaaaaacgacgtctgcacactcttgcgcgcatgcccccctgagaaatcggttctaaggcagccggagttggctgattcttgaatgttcaaaacgttgctataacaggattttaattccttatgggttatacaagtaggaacacgagctgctccatgagaatggttgcagactttgtgtagtgtctatatgtatggattcaaacacatcctccaaaatgtccctttgcctttgtgtaaataatgatcgctacaacaattgtacctctactatgatatcactgtattctatttgaggtttgttacattttatatgaatgatattagtgtagtttgcccccctgcgatgcgacgtcaaagtcttctatagtgcacct

SEQ ID NO: 120803 - DNA, 806 bp, Arabidopsis thaliana
  unsure (1)..(806): unsure at all n locations
attatgttcaacgattacgcctactgataaaagtgtttaactatcagggattctttgtcaacaatcctcgtgaagactttctttctatcttatattgatgatgagtgttatatactgactttgctttctcttgattatctagctggatatcgttgaactgcttatcaagggatgcaaattgctcaagaactacgagaagaaggttaaaatgatcaactcaaatccataacattgccttcacgtgtttacaaattaaccatttcattctgctttctctgttggtgttcttctcgaacttttgcaacgcatctgcatgatcacatagcagttagcgtacgctttttctgatattatgttgggtcttggggtaatacagtgcaaaacgttggtgtttgaatatgggcctttgatacttgtaaatgcaaaggaattcctagtgaaaaacgacgtttgcacacttttgggggcatgccccccttaaaaatcggttttaaggcaaccggagttggcttatttttgaatgttcaaaacgttgctataacaggattttaattccttatgggttatccaagtaggaacccgagctgctccctgagaatggttgcaaactttgtgtagggtttaaatgtatggattcaaacccatcccccaaaaagtccctttgcctttgtgtaaaaaatgatcgctccccccnnnnnnnnnnnnnnnnnnnnnnnnnnnnnnnnnnnnnnnnnnnnnnnnnnnnnnnnnnnnnnnnnnnnnnnnnnnnnnnnnnnnnnnnnnnnnnnnnnnnnnnnnnnnnnnnn

SEQ ID NO: 120804 - DNA, 924 bp, Arabidopsis thaliana
tctacgactcatatggggtacgctggtacgcctgcaggtaccggtccgagcctacccgggtcgatccaaccgtccgcccacgcgttcgtacggctgcgagaagacgacagaagggtacggctgcgagaagacgacagaagggtgcggctgcgagaagacgacagaaggggaccaatcatttgctcgaaaaggaatcatgggtcttaaagctggaacctttgtgcttctcttgttgggtttagatcttggtctctgacgctagatctttcgttgactccaccatctcagaggaagtttccaacaaggaagacgtttgcactctgtgtgaggaatatgttactgatgctctcagctaccttgagaaaaaatgtcacacaagccggagatcattcgaagatcttcatgaatcggtgctcccaattgcgccgtatattcgcaccagtgtataagtttgggggattactatggttcctcttttcttcttacaactagagtcggttgcaacctcattatttctgcaagaggatgaatcttttgtggcaaagttggagcctcttgtcgaagaagcccgtcaggacagttgcggtgtatgccacaggactgtttcagagattctcatcaaactacaagatcctgacacacagctggatatcgttgaactgcttatcaagggatgcaaatcgctcaagaactacgagaagaagtgcaagacgttggtgtttgaatatggacctctgatactcgtaaatgcagaggaattcctagtgaaaaacgacgtctgcacactcttgcgcgcatgcccccctgagaaatcggttctaaggcagccggagttggctgattcttgaatgttcaaaacgttgctataacaggattttaattccttatgggttatacaagtaggaacacgagctgctccatgag

SEQ ID NO: 120805 - DNA, 709 bp, Arabidopsis thaliana
  unsure (1)..(709): unsure at all n locations
gttttcctttttttttctccttcctctcctctctctctctctggtttttttttgccctatccatagggttttcttcgctctctatctcctcgatcttcatgtgcatctctctctttggtataatcggagctaattcgttcgttttcttcttcatcttcgtcggatctctcttttttgctctttcccacgggttttcgcttgagaaatcaagcgttttcgtttttcctgggagttttgagctcaaatcatgtctcagatctttagttttgccggtgaaaatgatttttaccgtcgtggcgcaatatacccaaacccaaaggatgctagtcttttgttatcgcttggtagtttcgctgatgtttatttccctccaagcaagagatcacgtgttgttgcacctacgatcttcagtgctttcgagaaaaagccagtttccattgatgtgctaccagatgagtgtctttttgagatctttaggcgtttgtctggaccacaagagaggagtgcttgcccttttgtctccaaacagtggcttacgcttgtaagtagcatccgtcaaaagggggttgatgttccttccaagataactgaagatgggtgatgattgtgaaagggtgtttgtctacggagctttagatggggagnaaggcaacanatttttngntttggcagcaaattcctntttgggacctncttgnccgtgggggcc

SEQ ID NO: 120806 - DNA, 514 bp, Arabidopsis thaliana
  unsure (1)..(514): unsure at all n locations
cnnnnnnnnnnnnnnnnnnnnnnnnnnnnnnnnnnnnnnnnnnnnnnnnnnnnnnnnnnnnnnnnnnnnnnnccacgcgtccgatcgaatcaacaatgtcgaatcctgcagccgtcaccgccggcagaggatcaatcactcacgtcatattcgacatggacggtcttcttctcgatactgagaagttttacactgaggtccaagagattatacttgctaggttcaataaaaagtttgattggtctctcaaggctaaaatgatgggtagaaaagcaatagaagctgccaggatctttgttgaagaaagcgggattagcgactctctttcagctgaggactttcttgtcgagagagagtcaatgttgcaagaccttttccctactagtgagctcatgccaggggctagtagactcattaagcatctccatgtaaagaatattcccaatatgtattgctaccggctactcacacacggcattatgatctgaaaacccaaagacacagagagcttttt

SEQ ID NO: 120807 - DNA, 663 bp, Arabidopsis thaliana
  unsure (1)..(663): unsure at all n locations
accgggccccccctcgaggtcgacggtatcgataagcttgatatcgaattcgcggccgcgcggccgcggtcctctgacaccatcgacaatgtcaaggccaagatccaagacaaggaaggaatcccaccggaccagcagcgattgattttcgccgggaagcagctcgaagacggccgtaccctcgccgactacaacatccagaaggaatcgacgcttcacctcgtccttccgtctccgtggtggtgctaagaagaggaagaagaagacctacaccaagccgaagaagatcaagcacaagcacaagaaggtcaagctcgctgttcttcagttctacaaggtcgatggttctggtaaggttcagcgtttgaggaaggagtgccctaacgcaacctgtggtgctgggactttcaatggcgagtcatttcgatcgccatttacctgtggtaagtgtgggctcaccctacgtttaccagaaagaaggggctccgggatgattttccatcccgatctccatcattttgaattgaatacggctttttttttggaatttggaagttgttttgggatgtttccggccggtgtgcggccgaannnnnnnnnnnnnnnnnnnnnnnnnnnnnnnnnnnnnnnnnnnnnnnnnnnnnnnnnnnnnnnnnnnnnnnn

SEQ ID NO: 120808 - DNA, 629 bp, Arabidopsis thaliana
  unsure (1)..(629): unsure at all n locations
aagagtttcgccagaaattttcttccgccgtaaaagcaaaaaaagatgcagatcttcgtgaaaaccctaacggggaagacgatcactctcgaggtcgagtcctctgacaccatcgacaatgtcaaggccaagatccaagacaaggaaggaatcccaccggaccagcagcgattgattttcgccggaaagcagctcgaagacggacgtaccttagccgattacaacatccagaaggaatcaacgcttcaccttgtccttcgtctccgtggaggtgctaagaagaggaagaagaagacctacaccaagcctaagaagatcaagcacaagcacaagaaggtcaagctcgctgttcttcagttctacaaagttgatggttcaggaaaggttcagcgtttgaggaaggagtgccctaacgcaacctgtggagctgggactttcatggcgagtcattttgatcgtcatttacttttggtaagtttgggctcaccctacgttttccagaaagaaggggctcaggggtttttttttatccgtcttccatttttaattgatncgctttttttttgnatttgnaggtnttttggttttnggcctatgtaccttnttaatcaattggnttttaaaaaaaa

SEQ ID NO: 120809 - DNA, 684 bp, Arabidopsis thaliana
  unsure (1)..(684): unsure at all n locations
ggaaagctggtacncctgcaggtaccggtccggaattcccgggtgcggccaggcgtgcgtcttcatgaaaaccctaacggggaagaccataacccttgggggtggaatcatcccacaccatcgacaatgtgaaggcgaagatccaagacaaggaaggaatcccaccggaccagcagcgattgattttcgccgggaaacagcttgaagacggccgtaccctcgccgactacaacatccagaaggaatcgacgcttcatctcgtcctcccgtctccgtggtggtgctaagaagaggaagaagaagacttacaccaagccgaagaagatcaagcacaagcataaggaaggttaagctcgctgttcttcagttttacaaaatcgatggatctggaaaggttcagcgtttgaggaaggagtgccctaacgcaacctgtggagctgggactttcatggcgagtcattttgatcgccattactgtggtaagtgtggactcacctacgtttaccagaaagaaggagttgaagcttgatctgttgtagcggtagatcgatccttctctttctctcttatcttttaaaaactgcatttctatttgggaattttgtaagctctttaatttgagttatcatggattctatgttgaacatctttcgttctggattataaattatggaaggttttagg

SEQ ID NO: 120810 - DNA, 524 bp, Arabidopsis thaliana
  unsure (1)..(524): unsure at all n locations
nnnnnnnnnnnnnnnnnnnnnnnnnnnnnnnnnnnnnnnnnnnnnnnnnnnnnnnnnnnnnnnnnnnnnnnnnnnnnnnnnnccacnngcgtccgctcttatcaaataactaacaattcacaagaagaaacaatggtacactctcgttttttaaacgttgttttagtcctagtgaccattgcttccatattctccacatttgccgaggccaataggggctttgggtggggttggggtggacactccaacaattcaagtggttcaggttcaaactcgaggtccggatggggttggggttggggtcaaggctccaactattcaagtggttcagcttcaaccccagggtcaggatggggtttcggctctagtcgaaacggctcaggctggggttggggttggggcggggttcccaacaatacacacagctcagggtctggcggctcgggttggggcatggggcctaacaacaattacaggttggggatctgggcggcctggggttcggggctggggaatatgggagg

SEQ ID NO: 120811 - DNA, 541 bp, Arabidopsis thaliana
  unsure (1)..(541): unsure at all n locations
cagctctctacgactcactattgggaaagctggtcacgcctgcaggtaccggtccggaattcccgggtcgacccacgcctccggaacaaacaatggtacactctcgttttttaaacgttgttttagtcctagtgaccattgcttccatattctccacatttgccgaggccaatacgggctttgggtggggttggggtggacactccaacaattcaagtggttcaggttcaaactcgaggtccggatggggttggcgttggggtcaaggctccaactattcaagtggttcagcttcaaccccagggtcaggatggggtttcggctctagcaaaaacggctcatgctggggttggggttggngcagacgctaccatcttggccttatcttgcgtgacactttggataatttggtggctttggggatcacatagaacgattgttaagaaagggggctgncggatttatttcaaaaaaaatggggagagtaaaaaataatctatggatacgtagaagcagacgccgtcgaggtgggggcgaagtg

SEQ ID NO: 120812 - DNA, 813 bp, Arabidopsis thaliana
  unsure (1)..(813): unsure at all n locations
cccagccttcccttatcttccggtcgtatgtgtgggattgtacggatacatttcacccaggaccagctatgacctgatcgcccagctctaatcgctctcataggaaagctggtcgcctgcaggtccggtccggaatcccgggtcgacccacgcgtccgcccacgcgtccgcccacgcgtccgaaggaattcaaacagtttgatgagctacgtagtaaacttggaccattctctctagcgctttttgcttatggcaaagctaatggtttacttacaatgaaagatttcaaacgagccgcctctcaggtatgtggaataacattgtcagacaatgtgatagaaattgcgtttcatgtgtttgactcgaatcaagatgggaatttgagtgtggatgagtttttcgcgggttctgcatcgaagagagagggacgtggcacagccaattgcaaaaggattgtctcggtacttctcagatggatggaagggttctaagaactgttcctcatcgtgaagactcttcttcctctttggggcttaccgatgaaactcgaagactattttttgaggctcttgggttcatacgagtgagcccagagattttatgattactccacgctggcattgtaagaaagaaatctgaataaatctgtgtatagtttgatcgacctatgaacttttttgttttgttttgttaatgataaatggtaattgcataaaaaaaaaaaaaaaagtaaagattacacgcctnagngattgatacatatcggtgtatataatttaaggcaagaaaaaanggggcggggggggnnnnncg

SEQ ID NO: 120813 - DNA, 1296 bp, Arabidopsis thaliana
  unsure (1)..(1296): unsure at all n locations
gggaagcttgtccccttgaggtcccggtccggatttccgggttcgccccacccttccgggggaagtatttattggtccttcgctgttagttcaccgccttctgttggtggggtaaaagtcggcgatctggaaccgagatcgtttattccgaatttgtcgttgcctggttacagctctggattcatcttcggagatgcgtatagaaggaagatcttcttcaattacgagaaacgtttgagattacaaagtcctcctgaaaagggttttcgagtactttgcatctgttcgaacagataaaggggaaatactaatgaaaccggcagatttgatgagggcaattgtccccgtgtttcctccatcagaatctcatctagtaagagaaggatatttgactggggagagaaatcctggtgaacttagatgctctccttccgagttcttcatgctctttgatgttgataatgatggtcttatatccttcaaagagtatatattctttgtgacattactcagcattcctgaatcaagcttcgcagtggctttcaaaatgtttgatactgacaacaacgggtgagtagtcggtcacatatgtaaaattaggttaatcctgcttttggtaactttttttctggtccgtattcccatattgtgatcctccaaacggacgggttgtgggaatcagtggagtctctttttgagtttacgctgaatcatctggtcagtgcttctatcctttgtaacttctatttcctcgagatggtactgacgaatgattgttttagggagattgacaaagaagagtttaagacagtgatgagtctgatgcgatctcagcatagacaaggagttggccacagagatggccttcgaacagggttacatatgaccggttctgtcgaggatggaggattggtacaatacttctttgggaaagatggcagtcaaaaactgaaacacgacaaattcactaagtttatgaaagatctaactgaagagatgctgaggctggagtttgcacattatgactatcaacgaagaggaagtatttcggccaaagattttgcattgtcgatggttgcagcgggctgatgcaagccatttgagcaagctgctttgatagagttgagagtctgagcgaacacccgcatctcccggggaacattgcgttttctcccctgaaagggaattcccaacccctttagattgaagcttccntttttttaactttggacccattctcctcntancgccttttttggctttattggcanancctacattgggttttncttnncc

SEQ ID NO: 120814 - DNA, 664 bp, Arabidopsis thaliana
  unsure (1)..(664): unsure at all n locations
gaaagnctngcgaaccccnctcncgggcatcgacnccccnnaggatccaancagttnaaggaccncgtgnnaacttggccccntctctctgcccttntgcttatggcaaagctatggtttncttacnatgaaaggatttcaaacgngcccgcctctcaggtatgtggaataaccntgtcagccaatgtgatagaaattgcgtttcatgtgtttgactcgaatccaagatgggaatttgagtgtggatgagtttttgcgggttctgcatcgaagagagagggacgtggcacagccaattgcaaaaggattgtctcggtacttctcagatggatggaagggttctaagaactgttcctcatcgtgaagactcttcttcctctttggggcttaccgatgaaactcgaagactattttttgaggctcttgggttcatacgagtgagcccacagattttatgattactccacgctggcattgtaagaaagaaatctgaataaatctgtgtatagtttgatcgacctatgaacttttttgttttgttttgttaatgataaatggtaattgcataaaaaaaaaaaaaaaaaaaaaaaaaaaaaaaaaaaaaaaaaaaaagggcggccgctctagaggatccaagcttacgtacgcgtgcatgcgacgtcat

SEQ ID NO: 120815 - DNA, 991 bp, Arabidopsis thaliana
  unsure (1)..(991): unsure at all n locations
tgtttcgagggagataaatagtcaaaaagaagattttgttcagtttatcagcttcacgttgttgtattatatatacttgagattataattcatggtttctctatttatgatgcttccccaccaagaaatgagatacgatatatagatatttatgcaagtctaaaatttgacgtgttatatagaggcgaatctaaaagataaggttccgattatgaaggattcgtatctttaatcgacgccgtgtttccatatagcagtaaacagacacaaacgcgttattcgttggttggataaatcctccttataaataaacgatcctttaagtaaggttagttgtcaaaagaatctgcgaaaaataagagagagagagagagaaacaggatcattcattatgcccgccttatctcactacagatcagtatcatctctaccgtccgttgaccgatcattccttctcatccaacgactcaggatccacggcagctcttcttccttccctgaatcttctccttctgcgtctattctctccggcgcagatccgttgaagtgtacggtctctggtggatctcttgctaaatggatcaccgggatttcagctggatccgccttagggtttctctattggtcctctggttcttctgattccatctctggtttgtttggtgggagtaatttattgtccttcgctgatagttcaacgccttctgtttgtggtgtaaaagtcggcgatctgaaaccgagatcgtttattccgaaattgtcgttgcctggttacagctctggattcatcttcggagatgcgtatagaaggaagatcttcttcaattaacgagaaacggtttgaagattacaaaagtcctcctgaaaaagggttttcgagtacttttgcaacctgttncgacagnttaaaggggaaatncttattgaanccggcagntttnnttgagggcaatttncccngggttccnccatcagaattnaacttggaaac

SEQ ID NO: 120816 - DNA, 753 bp, Arabidopsis thaliana
  unsure (1)..(753): unsure at all n locations
nnnnnnnnnnnnnnnnnnnnnnnnnnnnnnnnnnnnnnnnnnnnnnnnnnnnnnnnnnnnnnnnnnnnnnnnnnnnnnattcccatatcgtgatcctccaaacggacgggttgtgggaatcagtggagtctctttttgagtttacgctgaatcatctgggagattgacaaagaagagtttaagacagtgatgagtctgatgcgatctcagcatagacaaggagttggccacagagatggccttcgaacagggttacatatgaccggttctgtcgaggatggaggattggtagaatacttctttgggaaagatggcagtcaaaaactgaaacacgacaaattcactaagtttatgaaagatctaactgaagagatgctgaggctggagtttgcacattatgactataaacgaagaggaagtatatcggccaaagattttgcattgtcgatggttgcagcggctgatgcaagccatttgagcaagctgcttgatagagttgagagtctgagcgaacacccgcatctcccgggccatgcgtttttccctcactgaaggaattcaaacagtttgatgagctacgtagtaaacttggaccattctctctagcgctttttgcttatggcaaagctaatggtttacttacaatgaaagatttcaaacgagccgcctctcaggtatgtggaataacattgtcagacaatgtgatagaaattgcgtttcatgtgtttgactcgaatcaagatgggaatttga

SEQ ID NO: 120817 - DNA, 827 bp, Arabidopsis thaliana
  unsure (1)..(827): unsure at all n locations
ctcgcaaaggcaagcaattttgtagaaaaacttaaaaacttaggattggctgatcaacaagaaaggaaataaggatttcccgggaaaggcacaagaagtgaattgccaccacctggaagtgttgaagtagtgtgtgcaaaggtgtgcacactacttcacgctatatccattttaatgtgcagtcttaggattattagatctaggaccatgttgttacacattgtcttgtagtagaacgctagaacataaacttcctttgaggataaaggaattgctaacacatgtatattctcggtggctaagctttggagtaatagccacacttgagctaacttagattaagatcatttttaagattcaaaatttagattgctcatcatatcttgaaccaaccccactaatggattgtggggttcttgcatttgcatgtatttttgcctcttgggagatattttggttccctttaggttcttctcataacaatcaaccaaaccagttgaccaaccatggttaggaatttcaggtgagaggtattcatcacctctttatctctcttttgtactcttctttcctctgtttcttcaagactaaaaactctctttttatgtaatttgttgttatatcttgtaagctgtgtgtttctgattctatgtaagaaaactaaaacctttcagtttccatcctcggtggttggagaatgaaactgtgattgcaatattttactttgatctgatatataatcaaaaaaaaggaggttatgacnnnnnnnnnnnnnnnnnnnnnnnnnnnnnnnnnnnnnnnnnnnnnnnnnnnnnnnnaacggaaat

SEQ ID NO: 120818 - DNA, 569 bp, Arabidopsis thaliana
  unsure (1)..(569): unsure at all n locations
atgatcttgccagnnnnnnnnnnnnnnnnnnnnnnnnnnnnnnaataaatcaacccatttcacacttttattgaatttaaaaactaaagtcaaaagcaatagacgctctgtgatagctctctggtccaataatcgagaaacctatcttgaccaccttctccgacgccggtgtagcccacgcttgccagcgtcgggatttttccttccctgcttctctctatttcacattgctatctgtttcccctcttgtgcggccgtttcctcaatcatctagtgtaatcaagcgtcttaaagtggagaacggcatttcatcctccatcatactcagatctatcgacgctggttcttcctcgatctccctttaaaccttcttccaccgtatctcgccgccggtagttacttcttcacctccccttgcgattcaaccaaatccctcttgcctcgtcttcgagctctcgggattcttattgttggggagtttccggccaaggcttactccggtgaaggaagagaaggtgagcggcggcgcagacctaattgcttttgatgtctcccgatttgacctaatc

SEQ ID NO: 120819 - DNA, 525 bp, Arabidopsis thaliana
  unsure (1)..(525): unsure at all n locations
atgatactgccnnnnnnnnnnnnnnnnnnnnnnnnnnnnnnnnnnnnnnnnnnnnnnnnnnnnnnnnnnnnnnnnnnnnnnnccacgcgtccgcccacgcgtccgcccacgcgtccgcccacgcgtccgagcaaaatctcactgctcaggaagagaagtctggactacttcagctctctgactcatcagaggactcttccaacatttatgtttttcagatttccacgacgaaccaatcaactatagacattgcctttgtctctggaataaaagaagaaacgtccaacatggaaaatcgtataatgagtcttacaggtttgccactctctagtctacttgaagagaaacatatagcatttaatgctaagttcaatgaatgcttcaacctttctgacaagcttgatcctgaaactttggtggttggtaaagcagcaatcgggaacatgcttggaggcattggttacttctatggtcaatcaaagattcattttcctaaaagtcctctggctaaaagtgaggatgatt

SEQ ID NO: 120820 - DNA, 630 bp, Arabidopsis thaliana
  unsure (1)..(630): unsure at all n locations
cnnnnnnnnnnnnnnnnnnnnnnnnnnnnnnnnnnnnnnnnnnnnnnnnnnnnnnnnnnnnnnnnnnnnnnnccacgcgtccgcccacgcgtccggaaaaaagctttttcgaatctcgcttgctttttgtcgccatgagtctctttgggttaggaagaaatcagaagactttccgacctaagaagagtgcaccttctggaagcaagggtgcacagcttcgaaagcatatagatgccaccctaggaagtgggaacttgagagaagctgtaagacttcctccgggagaggatgcaaatgaatggcttgctgtaaacactgtggatttctttaatcaggtgaatttgctatatggcacccttaccgagttctgcacacctgataactgtcctacaatgactgctggcccaaagtacgagtatagatgggcagatggtgtacagatcaagaagcccatcgaggtttctgctccaaagtatgtcgagtacttgatggattggatcgagacccaactcgatgatgagactttatttcctcaaaggcttggagcaccatttcctcagaacttcaaagatgtggtgaaaacgatctttaaacggctattccgagtttatgctcacatataccactctc

SEQ ID NO: 120821 - DNA, 875 bp, Arabidopsis thaliana
  unsure (1)..(875): unsure at all n locations
nnnnnnnnnnnnnnnnnnnnnnnnnnnnnnnnnnnnnnnnnnnnnnnnnnnnnnnnnnnnnnnnnnnnnnnnnnnnnnngacccacgcgtccgcctacgggtcctcttttactttgtgaacgatggaccaacaaccggagaggcgagaaggccggagttttccggagcgtaaaggacagaagcggaagctagaggaaggagccgccgccgtagaagatcgagagatctctgccgtcagcaccgacggaggccaagcgcttcttagcgaggttgctgctcaagtctcggtactaaactctgccttctcttggcaagagtccgatcgcgctgctgccaagcgagccactcaagttctggctgagctagccaaaaacgaggatttagtgaacgtgattgtcgacggaggtgctgttccagctcttatgacgcatctacaggcgccaccatacaacgacggggacttggctgagaagccgtacgaacacgaagttgagaagggaagcgcttttgcgcttggtcttcttgctattaagccagagtatcagaaactgatagtagacagaggtgccttacctcatttagtgaatttgttgaacagaagcagagatggttctagctctcgagctgtgaagactgttatcacaagagcggctgatgccatcaccaatcttgctcatgagaacagcagtatcaagacccgtgttacggtagaacgcggtattccacctctcgtggagttgcttgaattttctgattcaaaggccagagagcagcagcagggnattgaganccttgcatttaaaatggtgntaccagatcngtagttgatgcatnccttcccactatcaagcaggtcangtncgcaaatatagggt

SEQ ID NO: 120822 - DNA, 412 bp, Arabidopsis thaliana
  unsure (1)..(412): unsure at all n locations
gcgcaattacacttattttgctatcgtttgagcatctcaaaaatttctccggggagatttgttgggatatggactcttccacagagaagatgctcaaggtccctgaacaccaagttgctggtcacattgctagtgatgggaagctcggtccactcgtagatgaccaaggccggttcttcaagccacttcagggagattctcgtggcgaacacgaggctaagttctatgagtctttcacatcgaacatgaaggttccagatcacatccatagatacttcccggtgtatcacggcactcagctagttgaagcatctgatggatctggcaagcttcctcatctngttcttgatgatgttgtttcagggtacgcaaacccgtcggtaatggatgttaagattggatctaggacatg

SEQ ID NO: 120823 - DNA, 1075 bp, Arabidopsis thaliana
  unsure (1)..(1075): unsure at all n locations
cggcannnnnnnnnnnnnnnnnnnnnnnnnnnnnnnnnnnnnnnnnnnnnnnnnnnnnnnnnnnnnnnnnnnnccacgcgtccgcttcctctctctcagacgagatttcctcttcatctcaagagaaatggctgaatccaaggtagtggttccagagtctgtgctaaagaagatcaagaggcaagaggaatgggcattggccaagaaagatgaagctgtagctgctaagaagaagagtgttgaggcccgcaagcttatcttcaagagagctgagcagtatgccaaagaatacgctgagaaggataacgagttgatccgattgaagcgggaggctaagttgaaaggaggtttctacgttgaccctgaggctaagttgctctttatcattcgtatccgtggtatcaatgccattgacccaaaaaccaagaagattctgcagctcctgcgtttgagacagatcttcaatggtgtgtttcttaaggtgaacaaggcaacagtaaacatgctgcgccgagttgaaccatacgtgacttacggatacccaaacttgaagagcgttaaggaactgatctacaaaagaggttatggaaagctgaaccaccagaggatagcacttactgacaactccattgtggatcaggctctcggaaagcatgggatcatctgcgttgaggatctcatccacgagatcatgactgttggacctcacttcaaggaagccaacaacttcctgtggccattccaattgaaggcaccactcggtggccttaagaagaagagaaaccactacgtcgaaggtggtgatgctggaaacagggagaatttcatcaacgagcttgtcaggagaatgaattgatgaaagcttccttctttatctttgcaaatttcaaagattttgggaccgagtttttttttttttgttcaagttatcagagacttgtgatcttttatccgagataggctttttatgactaatcatgttattttcccaaaaagaaaaaaaaaaaaagggcggccgctctagaggatccaagcttacgtacgcgtgcaggccaacgtcgtagctcttctatag

SEQ ID NO: 120824 - DNA, 632 bp, Arabidopsis thaliana
  unsure (1)..(632): unsure at all n locations
cactcatggtttctaggacagcacgtaacattgcccggttgaccatcgtgcttccgntccccaacttgaagncgttaggactgatctccaaagnggttntggaaagctgacccnccagngntagcncttactgacaactccattgtggatcaggctctcggaaagcatgggatcatctgcgttgaggatctcatccacgagatcatgactgttggacctcacttcaaggaagccaacaacttcctgtggccattccaattgaaggcaccactcggtggccttaagaagaagagaaaccactacgtcgaaggtggtgatgctggaaacagggagaatttcatcaacgagcttgtcaggagaatgaattgatgaaagcttccttctttatctttgcaaatttcaaagattttgggaccgagttttttttttttttttgttcaagttatcagagacttgtgatcttttatccgagataggctttttatgactaatcatgttattttccaatggcgggcttttaaattgatcttgaatttttattggctgttnnnnnnnnnnnnnnnnnnnnnnnnnnnnnnnnnnnnnnnnnnnnnnnnnnnnnnnnnnnnnnnnnnnnnnnnnnnnnnnnnnnn

SEQ ID NO: 120825 - DNA, 1067 bp, Arabidopsis thaliana
  unsure (1)..(1067): unsure at all n locations
gggccggttcggaattcccgggtcgacccacgcgtccgcggattatgagctcgctaggaagcacctgaaatatgtttgcatgttacggctcctaagagaggtgatatcgtcagacagattggggatgcactaacatccaaactggactatcttgggcgccttcttcctcttgaaatgggaaagatccttgctgaaggtattggagaagttcaggaagtaattgacatgtgtgattttcctgttggtttgagccgacaactcaatggatcggttataccttcagaacgccctaaccacatgatgttggagatgtggaatcctcttggcattgttggtgttatcacagcgtttaattttccctgtgcagttcttggttggaatgcttgtattgctcttgtctgtggaaactgtgtagtctggaaaggtgctccaactacaccgttaataactatcgcaatgaccaagctagtagctgaagttttagagaaaaacaacttacccggtgccatttttacggccatgtgtggtggtgctgaaattggtgaagcaatagccaaagacacacgcattcccttagtatcctttactggaagctccagggtgggctcaatggtacaacaaacagtgaatgcgagatctgggaaaactttgcttgagttgagtggaaacaatgcaatcatagtcatggacgatgctgatatacagttagcggctcgatctgttctattcgctgcggttggaactgctggtcaacgttgcacaacttgccgtaggctgcttttgcatgagagtgtctatgacaaagtactcgagcaactgcttacctcatacaaacaagtcaaaatcggcaatcctcttgagaaagggacattgttaggaccattacatactcctgaatcaaaaaagaacttttgaggaaaggatttgaagtcatcaaatcccagggtggtaaatncttancggggggtaaagcatcggaggttaaggaaactttttgggnccccggntatcggggnttccncanattntttttttngcaaaaanggggttttttccccgnttttttt

SEQ ID NO: 120826 - DNA, 816 bp, Arabidopsis thaliana
  unsure (1)..(816): unsure at all n locations
atgatatgccnnnnnnnnnnnnnnnnnnnnnnnnnnnnnnnnnnnnnnnnnnnnnnnnnnnnnnnnnnnnnngcttacctccacgcgtccggtcaaaatcggcaatcctcttgagaaagggacattgttaggaccattacatactcctgaatcaaaaaagaactttgagaaaggaattgaagtcatcaaatcccagggtggtaaaatactaacgggaggtaaagcagtcgaaggtgaaggaaactttgtggagcctacgataatcgagatatcagcagatgctgctgtcgtcaaagaagagctatttgctccggttctatatgttctaaagtttaagtcatttggagaggctgttgcgataaacaactcggttcctcaaggtctaagcagctcgatattcactcggaaccctgaaaacatcttcaggtggatcggaccactgggaagtgactgtggcattgtgaatgtgaacataccgacgaatggagctgagattggtggagcttttggaggcgagaaagcgactggtggtggtcgtgaagctggaagcgactcatggaaacagtacatgcgtcgatcgacttgtaccatcaactatggaaacgagttacctctagcgcaaggaattaacttcggttagatttttcagagatttactcgttaattaataatgttatgttggttcgatttcgatacttgtattgtatgccttgttctctccaagcccttggctttaggcggccgaaaattcaaacagccgggtggatccactagttaatagagcggccgccaccgcggtggagctcccttaccgta

SEQ ID NO: 120827 - DNA, 670 bp, Arabidopsis thaliana
  unsure (1)..(670): unsure at all n locations
ggtaaagcagtcgaaggtgaaggaaactttgtggagcctacgataatcgagatatcagcagatgctgctgtcgtcaaagaagagctatttgctccggttctatatgttctaaagtttaagtcatttggagaggctgttgcgataaacaactcggttcctcaaggtctaagcagctcgatattcactcggaaccctgaaaacatcttcaggtggatcggaccactgggaagtgactgtggcattgtgaatgtgaacataccgacgaatggagctgagattggtggagcttttggaggcgagaaagcgactggtggtggtcgtgaagctggaagcgactcatggaaacagtacatgcgtcgatcgacttgtaccatcaactatggaaacgagttacctctagcgcaaggaattaacttcggttagatttttcagagatttactcgttaattaataatgttatgttggttcgatttcgatacttgtattgtatgccttgttctctccaagcctttgacttaagatgattacgcttttaatatatataaaaaaatattgaattaataaaaaaaaaaaacccaaccaaaaaaaaaagcggccgctctagaggatccaagcttacgtacgcgtgcatgcgacgtcaaagtcttctataagtcacctaatcaattnn

SEQ ID NO: 120828 - DNA, 795 bp, Arabidopsis thaliana
  unsure (1)..(795): unsure at all n locations
acgactcactattgggaaagctgacacgcctgcaggtaccggtccggaattcccgggtctacccacgcgtgcgagcagctcagctttcgtcttctccgtcaatccaataaaaaaatcagcaaccgttgtttgtttttaagctttttttacaaaagacgtacacgtctctctctctcactccctctttaagatcagaagctcatttcttcgatacgatcaaccattagagatgggttcggcgaacaacgagtacgagtttctgagtgagattgggctgacttctcacaacttgggatcttacgttgctggcaaatggcaagccaacggacctcttgtttcaactctcaatcctgctaacaatcagccaattgctcaagttgtggaagcttctctagaggattacgagcaaggtttgaaagcttgcgaggaagcagctaaaatatggatgcaggttacggctcctaagagaggtgatatcgtcagacagattggggatgcactaagatccaaacttgactatcttggtcgtcttctttctcttgaaatgggaaagatccttgctgaaggtatttggagaagttcaggaagtaattgacatgtgtgattttcctgttggtttgagccgacaactcaaactgggttcggtaatacccttcagaacggcctaaccccatgttgttgggatttggatccncttggcattnttngggtatcncagcgttaatttncccgtgcagttctttggttgnatcctnatttcccttntttngaacttttagctgnaagncccactgc

SEQ ID NO: 120829 - DNA, 736 bp, Arabidopsis thaliana
  unsure (1)..(736): unsure at all n locations
gacccacgcgtacggtttttttctctgatcttcgagttctgataattgctcttttttctctggctttgttatcgataatttctctggattttctttctggggtgaatttttgcgcagagatgggttcggcgaacaacgagtacgagtttctgagtgagattgggctgacttctcacaacttgggatcttacgttgctggcaaatggcaagccaacggacctcttgtttcaactctcaatcctgctaacaatcagccaattgctcaagttgtggaagcttctctagaggattacgagcaaggtttgaaagcttgcgaggaagcagctaaaatatggatgcaggttacggctcctaagagaggtgatatcgtcagacagattggggatgcactaagatccaaacttgactatcttggtcgtcttctttctcttgaaatggggaagatcccttgctgaaggtattngagaaggtcaggaagtaattgacatgtgtgattttgctgttgggttgagccggcaactcaatggatcggttataccttcagaacggccntaccacaatgatgtttgggntgttgnatncncttttggcattntttgnggttatcacaagcggtttaattttcccctgtgcaagttcttgggtttggaatgcccttgtanttgcccnttgcnttttnggaacctttttnaggcttggnaaggggntnccaccttaacccggtaatnacttttgg

SEQ ID NO: 120830 - DNA, 376 bp, Arabidopsis thaliana
  unsure (1)..(376): unsure at all n locations
gccgcttgcagnaccggtccgttttcccgggtcgcccatgcgttcgacaagctagtagctgaagtttgagagaaaaacaacttaccccggtgccatttttacggccatgtgtggtggtgctgaaattggtgaagcaatagccaaagacacacgcattcccttagtatcctttactggaagctctattgtggggggggtgggtacaacaacacgggggantgcgaagatataaggaaaactttggttgggggggggtggagacaatgcaatcatagtcatggacgatgctaatattcaggtagcgggttcatcttttctatttcgtggggggtgaactgctgggcaacgttcccaacttggccgaggctggttttct

SEQ ID NO: 120831 - DNA, 525 bp, Arabidopsis thaliana
  unsure (1)..(525): unsure at all n locations
atgatactgccnnnnnnnnnnnnnnnnnnnnnnnnnnnnnnnnnnnnnnnnnnnnnnnnnnnnnnnnnnnnnnnnnnnnnnnccacgcgtccgatttcgtagtccccagtttcagcattcaaatgcccctccaagtgaaaacttatttccaggcaggcaacatcagagaactacatcttctgggagtgtcagatcagttgacagtaatttcatgtctatcaagtcatatacttcgggtggtttaggggaggccgtatctgaaagtcgtcaaaatacaggaagccagcaaggtaaaacatctaatcatgttcctttagtagcagagtcgacaaaggctcctatagatttgtttcagttgccaggagcgccagtggctcaatctgtcgatacatttcaaccttcaatagcaccccgatctccacctgggaatcttcaacaagctccacagacctactcttttcccccggcaaattcggttgcgggaaattgggggccgccccccccttaaaaccataaaattgggcg

SEQ ID NO: 120832 - DNA, 750 bp, Arabidopsis thaliana
  unsure (1)..(750): unsure at all n locations
cggacgcgtgggtttttcctcgcttaatttctcaataacgctctcagagagaccatttgatgaagcttctcgcttctggaatttgaaaaggaacttgttatggagataatctcactgaacgttgtgccccagtgctctgtggttacttggagtagtaaattagcaacgaaaagattggtcccaaatcggtcaagtttgttattctcaggggtcaaaaaatccagacttgtgattcgaagtggaaattccgatggttatgttgttggtgagaatgatgacttgggtcgtatagccagaagaggagaatcaacgtcaaaggttttcgattcctggtttgcctgatgaatcaaatggtgaaattgctgctcgaatcagtcattctcactgcgagtggaagcccaagcttagagtacattatgagaaagccggttgtgacaatctcgatgctcctgcggtgttgtttcttcctggctttggcgttgggtcatttcactatgagaagcagcttaccgatttgggaggggattatcgagtatgggctattgattttnttggacagggtttatctctccctacttaagatccnactaccatgactnaagnaacccagttcctcggaaggtaaggnaccntttttgggggtttggtgacaaaaaattgacccggggnttancaaacttnanttcncncnngttctnttggggggcccaagnccngaattttttagaaggggttttcgggggccctttt

SEQ ID NO: 120833 - DNA, 604 bp, Arabidopsis thaliana
  unsure (1)..(604): unsure at all n locations
accgaacgattgaagttaaccaagccagcaagcaacccaattcttctatttcttcttcacctttagatttttcctcgcttaatttctcaataacgctctcagagagaccatttgatgaagcttctcgcttctggaatttgaaaaggatttgataagacgagttcatagaagattaccgcaagttcatcaactttttgaacttgttatggagataatctcactgaacgttgtgccccagtgctctgtggttacttggagtagtaaattagcaacgaaaagattggtcccaaatcggtcaagtttgttattctcaggggtcaaaaaatccagacttgtgattcgaagtggaaattccgatggttatgttgttggtgagaatgatgactttgggtcggatagccagaagaggggatcaacggcaaaggtttttgattcctgggtttcccnatggatcaaatgggggaaattctngctcggatnagtcattcttcactcggggtggaagcccaannttgggnccattttgggaanccgttttgcaatncggncnccncgggggttttttncccggtttgggtggccattnnctttggngganttccct

SEQ ID NO: 120834 - DNA, 1989 bp, Arabidopsis thaliana
cccacgcgtccgcacgcctctaatctccgcgcacacacacacaccctcacgaagaagaagaagacgaagaagaatcaatggcttctgttatctcttcctctccttttctatgcaaatcatcctccaagagtgatttggggatttcttcgtttcctaaatcttctcagatttcgattcatcgatgtcagaagaaatcgatctcacggaagattgtttccgttatggctcctcaaaaggatcggtctcctggaactacaggatcggtgaaaactgggatgacaatgacggagaagattctagctagagcttcggagaagtcattagtggttcctggtgataacatttgggttaatgttgatgttcttatgactcatgatgtttgtggtcctggtgcttttggtatcttcaagagagagtttggtgaaaaagccaaggtttgggatccggagaagattgttgtgattccggatcattatattttcactgctgataagcgtgcaaaccggaatgttgacatcatgagggagcattgcagggaacagaatattaagtatttctatgatatcactgaccttggaaattttaaggctaatcctgactacaaaggtgtttgccatgttgcacttgcacaagaaggtcattgcaggccaggagaggttttgttaggaacagactcacacacttgtactgctggagcatttggtcaatttgctacagggattggaaacactgatgcaggttttgtgttaggcactggaaaaatcctccttaaggttccaccaacgatgaggtttatcttggatggtgagatgcctagttatttgcaagcaaaggatctgattttacaaattattggtgaaatatctgttgctggtgcaacttacaagacgatggagttcagtggtacaactatcgaaagtctgagtatggaagaaagaatgacattgtgcaacatggttgtggaagctgggggaaagaatggtgtcatccctcctgatgcgacgacattaaattatgttgagaataggacatctgtaccatttgagccagtatatagtgatggaaatgcaagctttgtcgcagattatagatttgacgtgtcaaagctggagcctgtggtggctaagcctcattctcctgacaaccgagctctagctagagaatgcaaagacgtgaaaattgacagagtatacatcggttcttgtactggtgggaagacagaggattttatggctgcagctaaacttttccacgcagcaggaagaaaggtcaaagttccaactttccttgtcccggctactcagaaggtgtggatggatgtgtatgctctcccggtacctggagcaggtggaaagacatgtgcgcagatctttgaagaagctggctgtgacacaccagccagccctagctgtggtgcttgccttggtggcccagcagacacctacgctcgcttgaatgaacctcaagtgtgtgtctcaacgacaaacaggaacttccccggtcggatgggacacaaagaagggcaaatttacttagcgtctccttacactgctgcagcctcggctttaaccggccgtgtcgctgacccaagggagttcttgcagtaggctaatgtaatggcttcgtgtgaaaaatcatatgctatgcatcgacgaaatattgctaaatgatggggcattgtgaactatatgtatgtattttccttatttcgctgttggacttgatagtttcaagcactatgtcaaactttgatgttttgagtttgaaataataaaagagagaaaaagagtgagttagataagtcaaaagcttaaaagctaatatctccatgaccccattagtgatttgatcgcaaaagttaattattgaaaacttggtgaaattttgctatcgaagataaatcatgcggtatcttcctttctggtttcgcaaaagctagctatgcgtcatataacattgttattcacttattctgaaaatttctaaaat

SEQ ID NO: 120835 - DNA, 707 bp, Arabidopsis thaliana
agagccatgtgatgtgatcgaaacaaaaagctctttgcttcttcttcgtccatttctcgtagcacacttttcacaaagaagatgggttcttcacaatctacgcaaatggaagacgaagaagaagaagaagaggaaactgacaatgaagaagaagaagaagaagataatggcagatcaaacacaagacaattagacaatctcctagtaaagaaagttctagaacaagagcctgagatgttaccatgtcacgcttcagcttcaccactctcaccacaactatcatctctcggtactccaaggcttggaccatcgattaaagtctgggatccttacaacgtcctctctccgccgccgcaaccgccgtctatcttctctcgaatcgtgtctggtgatgaagatcgagctgtgacagaggtttatctgattagccatggtgagtctgatcttaatcttaaacctgatttgattggtgggagatgtcatgtagctgctcttactgctaatggtaaacgtcaagctagggctcttgctgttttcttcaaatctcaaggcgttcggtttaattcggtttattcggcacctctagatcgagctagatccatggctgtttctgtttgtcaggaaatgagttttccggaggagcatgtacaatcttcggatgctgttattgagatgagtttaggggattgtgaaggctgtaatcaagc

SEQ ID NO: 120836 - DNA, 510 bp, Arabidopsis thaliana
  unsure (1)..(510): unsure at all n locations
tttttctttatggaagaagacgggtctgattggggcggattggctccagagatactcatcaacatcatttcaaggcttacgattcaggagctatggaccggtccgatgttcgtccaaaaatcgtggctaactgtttgcagagatccgtatctctggtctatcttcgatctggagccatggttcgattcctatcccgagtcgactcacttgtggtcccctgagttcgagcagaaggtagacttaatgctacgatcagtcgttgattggagcgaaggtggtctcactgagatccgcgtccgccattgcagcgaccacgctctctcttacgcagccgatagatgcccgaatctacaggttcttgncattagangcagtcctaaacgtgacaanacgnatngatgncgnagatagcgtttcggtncaggagtttaaaaggaacttgatattnagttanttnacgnggtantcttacgncaactcttntnnnttntttggtngnaacttncctat

SEQ ID NO: 120837 - DNA, 557 bp, Arabidopsis thaliana
  unsure (1)..(557): unsure at all n locations
cagctcnnnnnnnnnnnnnnnnnnnnnnnnnnnnnnnnnnnnnnnnnnnnnnnnnnnnnnnnnnnnnnnnnnccacgcgtccgaaagaaacatttgcaaaaaaaaaaaaaaaagagaggcaaagatctcgagagatttcaattttcaatggagaaagtgaatcaaaccttcttcttatctcatggatctccaactttgagcatagatgattccttggaagcgagacaattcttcaaatcatggactcaaaaagttcttcctcaaaaacccaaatcgattttagtcatctctgctcattgggacaccaaattcccatctgtcaacactgttcttcgcaataacacgatccacgatttctctggcttccctgatcctatgtacaagttgaaatatgaagcaccaggagcaattgaattagggaaaagggttaaagagttgttaatgaaagaaggaggaatgaaacgtgttgatgaagatacaaagagaggacttgatcatggagcttgggttcctcttatgttgatgtatccagaagctgatatacccatttgtcaact

SEQ ID NO: 120838 - DNA, 555 bp, Arabidopsis thaliana
aatacgactcactttagggaaagctcgtacgcctgcaggtaccggtccggaattcccgggtcgacccacgcgtccgcagaggtgtaacgaaaacgctagaacaataactttgatcgttcttcttcttctcttgaatcggaaacaatggcggatgaacataagcatgaagaatcttcacctaatttggatccagcagtggaggttgtagagagggaatcgttgatggagaagttatcggagaagatccatcacaaaggtgattcgtcgtcttcatcatcatcagatgacgaaaacgagaagaagtcttcgtcatcgtctccaaagtctttgaaatcgaaggtttatcgtttgttcggaagagagagacctgttcataaggttctcggcggcggaaaaccggcagatatatttatgtggaaggacaagaaaatgtcaggaggtgtatttggcggtgctacagtggcatgggtgctatttgaattgatggagtatcatcttcttactctggtatgtcacgttatgatcggtgctcttgcctgggtggttctatggtct

SEQ ID NO: 120839 - DNA, 893 bp, Arabidopsis thaliana
aaaaccgcttccgtcgtcaatggcgtgagcctaaacaagaaagaaaatttatcagcatgttattgctaaagagaggaaaggagattatttgggaaagactgttcaggttgttcctcatgtcactgatgcaattcaagattggatcgagagagttgcggttattcctgttgatggagaagaggatcctgctgatgtttgcgttattgaattaggtggaacaataggtgatattgaatccgcgccttttatcgaggcgcttggtcaattctcttaccgtgtaggcccagggaatttctgtctggtccatgtcagcctcgtgcctgtgcttaatgttgttggtgaacagaaaactaagccgacacagcatagtgtcaaggggctacgaggattgggcttgacgccggatatcttagcttgtaggagcacaaagccacttgaagataatgtgaaagaaaaactagctcagttttgccatgtcccgcttgagtatatcttcactctctatgatgttcccaacatttggcgtattcctttgttgctaaaggatcagaaagctcatctggcaatctcaaaagtgctcaatcttgctagtattcttaatgagccttctctaggggaatggacttccagagctgaattatgtgacaatttacatgtgccggtgagaatcgctgttgtggggaaatatacaggcctctctgatgcttatctctctgtcttaaaggctctcttacatgcttctgtggcttgtcgcaaaaagctcgtagttgattgggttccagcttgtgatctcgaaaaagaaactgagaaagagaatccagatgcgtataaagctgcttggaagttgctaaagggtgtagatggaattcttgtacctggaggttttggtgata

SEQ ID NO: 120840 - DNA, 898 bp, Arabidopsis thaliana
  unsure (1)..(898): unsure at all n locations
nnnnnnnnnnnnnnnnnnnnnnnnnnnnnnnnnnnnnnnnnnnnnnnnnnnnnnnnnnnnnnnnnnnnnnnnnnnnnnnnnnnnccacgcgtccggaggcgcttctctgctgcaaattgcctttactgtgtttctctcttcccctttataaaaccgcttccgtcgtcaatggcgtgagcctaaacaagaaagaaaaaccattcttctctcttttcgtttttttcattctctctctctctactccatcgttttcacacttttctcgccgccctttatccttatccgataaacccacaaataaagacagactcttttgttctttaaacagagattgtaaatccagagccgccggaaaatacaaccgccggtttactctcaggattagttgatattattcgattttaaaaatcagtaggaagaagatgaagtacgtgcttgtaacaggaggtgttgtgagtggattagggaaaggagtaacagcaagtagtattggtgttctccttaaagcttgtggtcttcgagttacttctatcaaaatcgatccttatctgaacactgatgctggaactatgtctccatttgaacacggtgaagtttttgtcttggacgatggtggtgaggtggatcttgatcttggaaactacgaaaggtttctagatatcaaattaacaagagacaataacatcactactgggaaaatttatcagcatgttattgctaaagagaggaaaggagattatttgggaaagactgttcaggttgttcctcatgtcactgatgcaattcaagattggatcgagagagttgcggttattcctgttgatggagaagaggatcctgctgatgtttgcgttattgaattaggtggaacaataggtgatattgaatccgcgccttt

SEQ ID NO: 120841 - DNA, 442 bp, Arabidopsis thaliana
ctgctttgctacattatcctcttcatcatgcatacagacaagaagaacaagatgaagatgcttggtttgctttttgtggtgtttgctgtggttggagtgattgtagctggaagtttgcagatacctgaccagctcacacggtggtactttgtcgggttcttgagctgcggttctcttgtttcaatgtttgcctcgccgttgtttgttattaacctagtgattcggactaagagcgttgagtttatgccgttttatctctcgctatcgactttcttgatgagtgcttccttccttctttacgggttattcaacagcgatgcctttgtttatacaccaaatggaataggaacgattcttggcattgtgcagctggctttgtactgttactaccacaggaattctatagaagaagaatcaaaagagcctttgattgtttttacgt

SEQ ID NO: 120842 - DNA, 850 bp, Arabidopsis thaliana
  unsure (1)..(850): unsure at all n locations
gcctgcangtaccggttcggaattcccgggtcgacccacgcgtccggcttaatctatccaacaatgtcgaagattatttcccttgtggtggcgatgatcgcagtgctagctttgccgattcgtggtcaacaacaacctctaagccaatgtactccatcaatgatgaccaccgtgagtccttgtatgggcttcataaccaacagtagcagcaatggaacttcgccgtcgtctgattgttgtaactcgctgaggtctttgaccaccggaggaatgggatgtctttgtctaattgtcactggaactgttcctttcaatattcctattaaccgcacaaccgctgtctcacttccccgtgcttgtaacatgcctagagtccctcttcaatgccaagccaatattgctccagctgctgctcctggacctgctgctacatttggaccatcgatgtctccaggaccagagacggatccaattgttccagagccaactccggcagctcagacaccacagtctgatacaacccgaccatttacaccatccgtcgacggtggagctccaacatcagacgacggaggaagcaccagtcgaccttctgagactccttcatccgcctacgcactctcaccatctcttctcttcttcagcatcgccctcgtagctctcaaattctactgatgattccttttgtttctttgcattccttatgtgatttgatttatgcatcgttgattatagaaagaaaccatttatttggtcattgctttgtggaataagcttttgtgtatactgttctctgtttcgagtgagatttattttgtgttgttgaagtaatacatcatcatttttatgg

SEQ ID NO: 120843 - DNA, 623 bp, Arabidopsis thaliana
  unsure (1)..(623): unsure at all n locations
cccacgcgtccgcggacgcttgggatagctttaaacttccaaaagaatacaacaaacaatcaaagcttaatctatccaacaatgtcgaagattatttcccttgtggtggcgatgatcgcagtgctagctttgccgattcgtggtcaacaacaacctctaagccaatgtactccatcaatgatgaccaccgtgagtccttgtatgggcttcataaccaacagtagcagcaatggaacttcgccgtcgtctgattgttgtaactcgctgaggtctttgaccaccggaggaatgggatgtctttgtctaattgtcactggaactgttcctttcaatattcctattaaccgcacaaccgctgtctcacttccccgtgcttgtaacatggcctagagtccctcttcaatgccaagccaatatttgctccagctgctggctcctgggcctgctggtaaatttggggccatcggtgtttccagggccagaggcgggttccaattgttccagaggcaacttccgggagttcaggaaccaaggtttgttcaaccggccctttttaccattccgtggcggtgggggtnaanattaggnggggggggngncnattggccttttgggttntttnt

SEQ ID NO: 120844 - DNA, 409 bp, Arabidopsis thaliana
acttcggtttcagaggatgtcgtgtgtatttggtgaaatcaaaggactacaaatgcagcaaagtctcaaagctcttcggtggagatgtcggcgctgaacttaagcctgagaaaaagctgggaaaatctacggtggtcgtcaacaagctcgtatacggtctctttaacgttggtccatttgcctttaacccgtcttgccccaaatgaagatgatttgatgctctggttactatcttgattgtttcatgtttaaaaagattgagagagagtgttgttatgcgtctactgtacggttgaattttaatcaatgttagctagtctttaagttaaatgcttgggtattatgttgtatctctttaagtgacgtcgtttgagtttcgtttgaataaaaatagcagctttcaagataa

SEQ ID NO: 120845 - DNA, 1036 bp, Arabidopsis thaliana
gcgtcctccaggttgaagattaatcggacaaaggagattagaagagtagaaaaaacgacaagaagaaagaaacacagttgcaggagagaaagagatatggctgtccggataaacgcgatggcggtgacgtttgtggcgcacgcgctggcggtaatagcggcgattatggtactggtttggagtatcagttacagaggtggattggcctgggaagctactaacaagaatctcatcttcaatctgcatcctgttctgatgctcatcggatttataatcttgggaggagaagccatcataagttacaaatcgcttccgctggagaaaccagtgaagaagttgatccaccttatactccatgccattgctctggctcttgggatatttggcatctgtgcagcctttaagaaccacaatgaaagccatatccctaatctctacagtctccattcctggattggtattggagtcatttctctttatggcttccagtgggtgtacagcttcatagtgttcttcttcccaggaggatcaacaaatttgaaaagcggattgcttccgtggcacgcaatgcttggcctgtttgtttacatacttgctgtcgggaatgcagctttagggtttctggaaaagctgactttcttggagaatggagggcttgacaagtatggatccgaagcatttcttatcaacttcacggccattatcactattctctttggtgcctttgtggtactcactgcttctgctgagtctccttctccttctccttccgtctccaatgatgatagtgttgacttcagttattctgctatataaaacactttctacattccacgttacatctgtatcgccccttgtactctcaaaactccatttatgtatgatgcatttgtagcgaaaagctttgtgtgttacggctttgctacttctggtgtgtaaaatcttcaatgatattgatgaatcttttaaaaaaaaaaaaaaaaaaagggcgaccgctctagaggatccaagcttacgtacgcgtgcatgcgacgtc

SEQ ID NO: 120846 - DNA, 431 bp, Arabidopsis thaliana
ttatcggagactattttatggtggtggagctggcatgattggaaatgataattttggttcgggtaaccctaatgctgacagaagaggcagtcgaggaagggctggtggttcctatcttccttctggcccacctaatggtgctagacctggactacacccggcagggtacccgatacctagggttccactttcaccctttcctggtggtcctccttctcagccatacgctattccaactcgtggacctgttggtgctgttcctcatgctcctcaacctggaaaccatggttttggagctggtcgtggaacttcagttggggggcaccttccgcaccaacaagccacccaacataatgtttgaactattggccctagtttaaacttttcccttgatagtccgaatagccagccttacctggtggtccgctatc

SEQ ID NO: 120847 - DNA, 1260 bp, Arabidopsis thaliana
  unsure (1)..(1260): unsure at all n locations
nnnnnnnnnnnnnnnnnnnnnnnnnnnnnnnnnnnnnnnnngcccccccccattgaatggctgtgggcccccttcgaggtcgacggtatcggccacccaaacttcactactgaattactgtgaaaatatgttacatctaaatgttaagaatctctgggtcataaatttttctaccaaaaaaataagaaagaaaagacttttaaatagaagaaagggaatcagagaggtaggtggctctcggatcagatcatctctgaggctgatcagatgcagaggctccaacggaaggtgcagttggtgcaccgctagccgacccgttctcagccggtggagcgactccccatttaccttcagactcgagcggttcgaatatgtgcactcccccgtctgagagaccaactgcaaacatgtttggttcttgcggatgtgcagcaatcactagtggatgtacgtttgaattgctgagactagctggtagatacgcagaagggttgacccggcaacgcagccgtagatttgcagagctaaatacacaaactgttgcatccataaaactcgcgtagaccaattggctatcgcatgagaatgtggcatgagtgattggagctaatgattctcgaacagcccactgtttcatgcattcgagcttggtagtttcgtatatagcaagttgcgtctcgtgcacaacgaggaagtgagcttgatcttgatggaactgaacacgcgtatctgaaggtgcactgtttggtcttccctgtggaagtggcaaaaccttgcttctctgcttttcccatccatctgtgttccaaacacaaagctgtgcatctgctccagacaaaccaacacgtttaatacgttggagaaggcaagaccagttatcccctttgaatgacctttaagcttactcttcacctcatcaacacggacattataaatctgaatcgtgctatcatccatcccaatagcgatgatattgttgtcttgaggatgaaaagcaagaaaagtagcagccggtggtgggggcatgaaagtcgccattgtcttaaacgtcatcatgttaaataaggatatctttcctccggaggctgacattacatatgaatcattcttggataaagcaaaacaaggtacagcttcctcgggattggtttcagcaacatcgttagtcatgaggatcccactagctggttgccactgctgaggcggtaaagaantgtcgcctttccagttgcgttgcgctcattccgctgccatttccat

SEQ ID NO: 120848 - DNA, 805 bp, Arabidopsis thaliana
gcctgcagtaccggtctcggattcccgggtcgaccacgcgtccgctctctggcctgtcaacctagagagcataaacttgtcatttactgttgtgaccgatagcggtttaagaaaattatctggtttgacatctcttcgaacattgaatctggatgctcgtcatgttactgatgctggtctttccgcgctcacaagtttgacagggttgacgcaccttgatctcttcggtgctcgtatcacagattctggaacaaatcacctacgaaacctgaagaaactgcagtcacttgaaatatgtggtggtggattaaccgatactggtgtcaagaacataaaagatctttcatccctcactctcctcaatctatcacaaaactccaatctcacagacaaaacactggagttgatttctggattgaccggattggtctctctgaacgtctcaaactctcgagtatcaagctcaggactacgtcacctgaagccattgaagaacttgagatctctgaccttggagtcctgcaagctctctgctaatgacatcaggaagcttcaggcgactgatctgccaaacttggtcaacttccgtcctgaataaaataatatgttcaaaggcaaattcacgaactctgtaaatagatcgatctcctctggtctcagactaagacactgctcttagatatatcgtcaaaagctatgctcttcttcggataaaaaaaaaaaaaacaaagggcgcacgctctagaggatccaagcttacgtacgcgtgcatgcgacgtcatagatcttctatagtgtcgtccta

SEQ ID NO: 120849 - DNA, 1006 bp, Arabidopsis thaliana
ttaaataatgtggtggtggattaaccgatactgtgtcaaagaacataaaagatctttcatccctcactctcctcaatttatcacaaaactccaatctcacagacaaaacactggagttgatttttggattgaccggattggtctctctgaacgtctcaaactctcgagtatcaagctcaggactacgtcacctgaagccattgaagaacttgagatctctgaccttggagtcctgcaagctctctgctaatgacatcaggaagcttcaggcgactgatctgccaaacttggtcaacttccgtcctgaataaaataatatgttcaaaggcaaattcacgaactctgtaaatagatcgatctcctctggtctcagactaagacactgctcttagatatatcgtcaaaagctatgctcttcttcggattatttgctgaagaaactgtaaataaagcttctttcaagctatggccggacgaaagagtcctccatggctcttctacgtggtcagctttcaggatctgtttggtttgtttatctactgaagtgaaccaacataaactgtcactcttgtaaatatatgtaaattcgaaatatcgactgtaatatataattgaatatcttgcacaatagaaaatctatgtgaaggtgcgtacctcagaaaaggaaaagagagagaaacaacatcagtcactgtttttatccaaacttcactactgaattactgtgaaaatatgttacatctaaatgttaagaatctctgggtcataaatttttctaccaaaaaaataagaaagaaaagacttttaaatagaagaaagggaatcagagaggtaggtggctctcggatcagatcatctctgaggctgatcagatgcagaggctccaacggaaggtgcagttggtgcaccgctagccgacccgttctcagccggtggagcgactccccatttaccttcagactcgagcggttcgaatatgtgcactcccccgtctgagagaccaact

SEQ ID NO: 120850 - DNA, 694 bp, Arabidopsis thaliana
agctggtccgcctgcaggtcccggtccggatttcccggtccgacccacgcgtccgtattgctaaagtctcttgcgcggttgtgtcgtgtgctaccgcgttgatgttggttcatattattcctgatcttctcagtgttaagaacagggaattgtttctcaagaagaaagctgatgagttagatagagaaatgggtcttattttaacacaagaggagactggtaggcatgttaggatgcttactcatggaattagaagaactcttgataggcatactattttaagaaccactcttgttgagcttggtaaaactctttgtcttgaggaatgtgcgttgtggatgccttctcaaagtggtttatatttgcagctttctcatactttgagtcataaaatacaagttggaagcagtgtgccgataaatctcccgattattaatgaactcttcaatagcgctcaagctatgcacatacctcattcttgtcctttggctaagattgggcctccggttgggagatattcacctcctgaggttgtttctgtccgtgttcctcttttacatctctctaatttccaaggcagtgactggtcggatctctctggcaaaggttacgctatcatggtcctgattctcccaaccgatggtgcaagaaaatggagagaccatgagttagagcttgtagaaaacgtggcgga

SEQ ID NO: 120851 - DNA, 952 bp, Arabidopsis thaliana
  unsure (1)..(952): unsure at all n locations
cagctannnnnnnnnnnnnnnnnnnnnnnnnnnnnnnnnnnnnnnnnnnnnnnnnnnnnnnnnnnnnnnnnnnccacgcgtccggtttcttctttatcacactgttacgcttggattctcatttcttcaagttcataacgctcggatcaatcaggaagacgaacttgaactttctttttttcatcattacccaaagctatgaggctcacaccaccaatagctccgccgtcatgaatccttctcttccaggtcaacacaagtcagagctccaaaaatggagtcatgcgattgttttgagacgcatgtgaatcaagatgatctgttagtgaagtaccaatacatctcagatgcgttgattgctcttgcatacttctcaatcccactcgagcttatctatttcgtgcaaaagtctgctttcttcccttacaaatgggtgcttatgcagtttggagcctttatcattctctgtggagctacgcatttcatcaacctatggatgttcttcatgcattccaaagccgttgccattgtcatgactattgctaaagtctcttgcgcggttgtgtcgtgtgctaccgcgttgatgttggttcatattattcctgatcttctcagtgttaagaacagggaattgcttctcaagaagaaagctgatgagttagatagagaaatgggtcttattttaacacaagaggagactggtaggcatgttaggatgcttactcatggaattagaagaactcttgataggcatactattttaagaaccactcttgttgagcttggtaaaactctttgtcttgaggaatgtgcgttgtggatgccttctcaaagtgggttatatttgcagctttctcatactttgagtcataaaatacaaggtgggaagcagtgtgccgataaatctcccgattattaatgaactcttcaatagcgctcaagctatgcacat

SEQ ID NO: 120852 - DNA, 939 bp, Arabidopsis thaliana
tttcgactttgaagagtcaaggcgaaacaactaaaaaatctcataaataatagagagaaaagattcatcatcaccaaaagatcatcaaagaagtaaagaagaagaacttctctgcatcaatggcgatctccaagctccatctactcttccttctctcagtctttctctcccttcatcctcttgttctttccgacaccgccgatgaagaagatgttcttcttacaggcatcaacagttacagagcatcactaaacctaacaaccttaatacacaaccacaacgcagaatgtctagcagacgaaatcgcagaccaattcaagaaccaaccttgcacaaacaccactggctcagcctctgtccctggaaccacacctggattcccaaacttgcctaacctcctctcaaaatgccgcctcaaccctaccgtaactagagacggtgcgattttgccagcttgtgttcctaaccttgatcctagccttgtcttgaccaatttcacaatgtcacagtactccaaggacttgaatgattctaagttcactggaattggtattggttctgatgataattggattgttgttgtcctcactactagcacaccggagggtagctattctccggcctctaactcaggagctttcgcgttcggagttaatggccttgtttcttcaagtttgatgtttcttctcttttgcttcttcatgttttgagtcccttttttggtgtttatctaaactacctccctgtctttgtttcttatttatgttgttattatggtgatttgtatgaattcgtaaggcattaaagagaataacaatattatcattaagtttctgcttaaaaaaaaaaaaaaaaaaaaaaaagggcggccgctctagaggatccaagcttacgtacgcgtgcgtgcgacgtcataaatcttctatagttgtacctaat

SEQ ID NO: 120853 - DNA, 515 bp, Arabidopsis thaliana
  unsure (1)..(515): unsure at all n locations
ccnnnnnnnnnnnnnnnnnnnnnnnnnnnnnnnnnnnnnnnnnnnnnnnnnnnnnnnnnnnnnnnnnnnnnnnccacgcgtccggaagtaaagaagaagaacttctctgcatcaatggcgatctccaagctccatctactcttccttctctcagtctttctctcccttcatcctcttgttctttccgacaccgccggtaattaactctctcatttcccgtcaatgtcttcttggttattcaatttaggttcttgaactctatcgatcgtaatttgtttacctagatctggtctgaaatcgttgaatcttcttaattcaagcttagttcggttcttgatttgtgtgtcattgtgtgttctgttctgtttcgaatctttttgaatcggatcttgatttttgtgtgtgttctgttttctttttgatatacacagatgaagaagatgttcttcttacaggcatcaacagttacagagcatcactaaacctaacaaccttaatacacaaccacaacgcag

SEQ ID NO: 120854 - DNA, 816 bp, Arabidopsis thaliana
  unsure (1)..(816): unsure at all n locations
nncagctcctcatacgactcactttagggaaagctcgtacgcctgcaggtaccggtccggaattcccgggtcgacccacgcgtccgcccacgcgtccggataagtagaaaaaaaaagacatccttttttggttcttcttcttcttcttcttcggacaaaaaggaagaaggcgttgactgattcttaagatgggtttgtgttaagtttgtgagtatagttgaaagtttcagttcaatttcaatggagcctccaataggatttcgagcttctttattccaattcttactcttccttccttatttcattggattgctatttctgggtttcatcaaaggtattgttttgtgcccactcgtatgcctcgttgtgactataggcaactccgcggtcatactgagtcttctaccagtccacatcgtttggactttctattcaatcgtgagtgccaaacaagtaggaccaatcttgaagatctttctatgcttatgtcttcctgctgccatcattctctggcctattgttggtattttaggaagtgttttgggaggagctttatatggtttcttctccccaattttcgccacctttgatgctgttggtgaaggcaagccttaccagtttttccattgcttttatgatggaacttggagcaccatgcaacgcagctttaccgttgttcgggattttaaagatgtttgctttcattcatacttctcacttatggatgagctgaaacanagctgtccggatcgaaaatattatgaaataaggctacttctactttcaggggctttagtagtttcagttctcgggata

SEQ ID NO: 120855 - DNA, 471 bp, Arabidopsis thaliana
gttggcattcttaaaagagccacaaaccccattgtcgaacgaacacaaaaccaaaccgcgggcaaagaaacaaattcgcagacaatagtcgaaaatggctgaaatctcggcgacttcgtttccttcttcttcttcctctgctctcgtcatccgtagctcccacaatggtagcttaaaatgtcagaatgtagctgttccaaaaactacttcccagttccaagagttatctctgaaacgaagccagcttgttggcaatgccgttgttaccggtcatgttaccggatcccgcagctgcaagaatcaagctattcgagctgttctatccggtgatggaaccgccttgactactgattcaaaggaggctggacttcgtggaaaactgaaaaaggtcgttctagcttacagtggaggcttagacacctctgtcattgtgccatggcttaaggagaactatggttgtgaagttgtgtg

SEQ ID NO: 120856 - DNA, 1275 bp, Arabidopsis thaliana
  unsure (1)..(1275): unsure at all n locations
cnnnnnnnnnnnnnnnnnnnnnnnnnnnnnnnnnnnnnnnnnnnnnnnnnnnnnnnnnnnnnnnnnnnnnnccacgcgtccggaagcggacaaaccaaagaatccaccggagctagtgatatgggtggttccagagagttccgagctgaggaacattcaaatcaattccactctatcatcgccatggccatctggcttggcgccattcacttcaacgtcgctcttgttctctgttctctcattttccttcctccttctctatctctcatggtcttgggcttgctctctctgtttatctttatcccaatcgatcatcgtagcaaatatggtcgtaagctcgctaggtacatatgcaagcacgcgtgtaattatttccccgtctctctgtacgtcgaggattacgaagctttccagcctaatcgtgcctatgtctttggttatgaaccacattcggtgctaccgattggagttgttgctctttgtgatctcacagggtttatgcctattcctaacattaaagttcttgcaagtagtgctatattctacactccctttctaaggcatatatggacatggttagggctcaccgctgcttctaggaagaatttcacttcccttttggattctggctacagttgtgttcttgtacctggtggtgtgcaggagacttttcatatgcaacatgatgctgagaatgttttccttacaagaagaagaggttttgtgcgcatacccatggaacaggggagccctctggttccagtattctgctttggtcaggcacgcgtgtacaaatggtggaagccggattgtgatctctatcttaaactatctagagcaatcagattcaccccgatctgcttttggggagtttttggatcaccattaccgtgtcgacagcctatgcatgtggtcgttggtaaaccaatagaagtcacaaaaactctgaagccaactgacgaagagattgctaagtttcatggccagtatgtggaagcgcttagggatctgtttgagaggcacaagtcccgagtcggctatgatcttgagctgaaaattctttgaacaaaatctccaatggaaataattacttgtgtgtatccttctttaattgttaccttggagctggatttggacttaatataaatgactacatcatgtagtctacatgtattgcatgtctttagcataaaaaaaaaaaaaaattaaagggcggccgctctagaggatccaagcttacgtacgcgtgcatgcgacgtcataaatggtctatag

SEQ ID NO: 120857 - DNA, 501 bp, Arabidopsis thaliana
  unsure (1)..(501): unsure at all n locations
ccnccntttaaaacntttgggggnaannggntccccccccnattntnttgggggntttttgggacccccccattcccggtncgaaccccctatgcaatgggcccgttgnaaaccccaattggagtccncaaaaactctgaagcccaactgncgaagagattgctaagtttccatggcccagtatgtggaagcgcttagggatctgtttgagaggcacaagtcccgagtcggctatgatcttgagctgaaaattctttgaacaaaatctccaatggaaataattacttgtgtgtatccttctttaattgttaccttggagctggatttggacttaatataaatgactacatcatgtagtctacatgtattgcatgtctttagcatcgactgttgaagtaatggaatacgtttataaagcctgtaaattacatgtcgtcttgcacaagagtatgtggtaataataacatttgaccccaaaataatactagttaaatttttcct

SEQ ID NO: 120858 - DNA, 515 bp, Arabidopsis thaliana
  unsure (1)..(515): unsure at all n locations
nnnnaaagagaaaaagattaatcatcatcaatctaaagatttaggaatctacaatttcccagtagacagatttccccgcggccgcttcttcttattccatttgatctaagtttctcgaaataggtacaaagttcgagtctttttcttgtaaccgcgtgaaaccaccaagaaacctatagtaagagtttccgcaaatgtgaattaaagacagctcatcactctgtcaaacttctacagtattaagttaacgaagcaggtacagccaaactaaaataacgcggagttatgggaatcatcgacggttctttgcttcggcggttgatttgtctctgtctctggtgtcttctcggnggaggagtgacggtggttacggcggaggatgagaagaaagtggtacataaacagcttaatcaaactccgacttgggctgttgctgctgtttgtactttcttcatcgntggttctgttcttcttgaaaaacttcttcacaaagttggaaaggttctatgggatcg

SEQ ID NO: 120859 - DNA, 509 bp, Arabidopsis thaliana
  unsure (1)..(509): unsure at all n locations
nnnnnnnnnnnnnnnnnnnnnnnnnnnnnnnnnnnnnnnnnnnnnnnnnnnnnnnnnnnnnnnnnnnnnnccacgcgtccgattcttgtgatcttgtcttgacgaaaaaatggacgatgtgaccgtgatttcttcgagcattgttcaacccggaaacgccaggcattcgggtcgggaaaagatccatctcactccatccgatcttagccttctctatcttaattaccctcaaagaagtctcctcttccccaaaccctacccggaaacccggttcatctctcggttaaagtcctctctctctacgtctctagagatctacttccccttagctggtcgtcttgtcaaagtcaacaaccatgaagacaatacggtgtcgttttacatcgactgtgacgacggccgtggtgtcaaatttggccatgctatagccgaatctgtctcggtaagcgatatccttcaacctcatggctctgttcctgactttttcaggcttttctttcccatgaacg

SEQ ID NO: 120860 - DNA, 515 bp, Arabidopsis thaliana
  unsure (1)..(515): unsure at all n locations
cagctcnnnnnnnnnnnnnnnnnnnnnnnnnnnnnnnnnnnnnnnnnnnnnnnnnnnnnnnnnnnnnnnnnnnccacgcgtccggtcatcggtcgcctcatcggaatggtggtggtggtagtggttgtcctagccgttctcatactaggcatgcttcttatgacacgattgacttaccaaatgaggagctgagaaagaggagtgagttgcagccaaccaagattgttgttctgaaacctagcctcggggagccacgttatgctgctagaacttttgcatcgccaagctcttcttccgatgagttcagagcagatcgtaggcttccatgcaccaccactcatggcaggcagaaaagtaatgaagatgtccgcctgtcaagacagaattcaagagattgtggagaaatggccaaaataatgtctaggcaaaggaaggtgagctggggcaatggtccggccatgagttttgagacttcaggatttagaggatatgcagggggatgaaagctcatcagg

SEQ ID NO: 120861 - DNA, 430 bp, Arabidopsis thaliana
gagagaaaaagaagagcagagcaaaatccctaaaattttaaactctgttttgctttccgacaatcaaaccctaggggttgctaaagggaaaggagagagatgggtggtgaagaggaagttgtttctgttgagctaccagcaccttcttcatggaagaaattgttttaccccaacaaagtgggttcagtgaagaaaacagaggttgtgtttgtggctccaacgggtgaggagattagtaacagaaagcagctggagcagtatctcaaatcgcaccctggaaaccccgcgatcgcagagtttgattggacgactagtgggacacctaggagatctgcaagaatcagtgagaagactaaggctacgccgtcaccagataaagagccacccaagaagcgaggtagaaccaaatctccagtgtcaaagaaagatg

SEQ ID NO: 120862 - DNA, 922 bp, Arabidopsis thaliana
  unsure (1)..(922): unsure at all n locations
atgatactccagctctatacgactcactattagggaagctggtacgcctgcaggtaccggtccggaattcccgggtcgacccacgcgtccgatggtactgatgatgataatgatcttggtgaaaagcaaacggtaaccgtgaggatgcttgtaccgtctgaccaaattggttgcgttattgggaaaggaggtcaagtaatccagaatcttcgtaacgacaccaatgctcagattcgtgttatcaaagatcatcttcctgcttgtgctttgactttgagtcatgatgagcttcttctgataattggagagcctttggttgttagagaagctctttatcaagttgcttcactgcttcatgataatccttcaagatttcaacacttactcctgtcttcttcaagttcttccatgcatcaacctggtgcaatgttaatgtctgcagcactgacgagctctcacagaaactacgctgtgcgtagagatatagcagatgcaagagaattttgtgtttgcttcatctgtccagctgaaaacgttggaggtgtgattggaaaaggcggtggtttcattaatcagatcaggcaagaaactggtgctactattagagtcaatacctcagaaactgatgatgatgattgcatcattttcatatcatcaaaagagttctacggagatcaatctccagcggtgaatgcagcaataccgcttacaacagcgatgcaggtgaggaaagtttggtaaagattgcaaatgattttggcaattctcttacggggttacttgtatcggggtccccaaatcgggggggccccatttggaaaaggtgggcccgtttttttcttgnggttgggggtntncaaggnctantatncggtttttccaaaangnggntncccaaatttccnntnaggntanggntggc

SEQ ID NO: 120863 - DNA, 664 bp, Arabidopsis thaliana
  unsure (1)..(664): unsure at all n locations
atgatacgtcnnnnnnnnnnnnnnnnnnnnnnnnnnnnnnnnnnnnnnnnnnnnnnnnnnnnnnnnnnnnnnnnnnnnnnnccacgcgtccggcaaatccaaatacgcaaaacgcgatgaccacagtaaactgagggatatatggaagagatggttcagattacaggaagtcctgatgccgctatgaaagctctcacgcaagtaatcttgcgattaagagctaactctttcgacatggatcatggacttgtcttgctaccaacatcttttccatatatccctcaagtgactgaaagttcgagcaaatccaaatacgcaaaacgcgatgaccacagtaaactgaattcgaattctaagagaagaaaccatgtttcttaaatcaagaaaaccaatcttagagaggaagattgagagtgttcagaacttcaatgttgatgcaatttttatacaatattatgttacttgtaggaaaaaaaagttgtctatgcaattcacataagaaatgtaaacaagagatggtgtgttttcatctttgttctttttttcttttacgttggtatactctttgaattttcgcaagtcttttttaaaatttctatttctagaaaaaaagggcgaccgctctagaggatccaagcttacgtacgcgtgcgtgcgacgtcat

SEQ ID NO: 120864 - DNA, 824 bp, Arabidopsis thaliana
  unsure (1)..(824): unsure at all n locations
atatcatcaaaagagttctacgaagatcaatctccagcggtgaatgcagcaatacgcttacaacagcgatgcagtgagaaagttggtaaagatgcaaatgatttagcaatctctacgcgtttacttgtatcgagttcccaaatcgggtgtctcattggaaaaggtggagcagttatatctgagatgaggagtgtaacaagagctaatattcgtattcttcaaaaagaagacgtaccaaaaattgctcgtgaagatgaagagatggttcagattacaggaagtcctgatgccgctatgaaagctctcacgcaagtaatcttgcgattaagagctaactctttcgacatggatcatggacttgtcttgctaccaacatcttttccatatatccctcaagtgactgaagttcgagcaaatccaaatacgcaaaacgcgatgaccacagtaaactgaattcgaattctaagagaagaaaccatgtttcttaaatcaagaaaaccaatcttagagaggaagattgagagtgttcagaacttcaatgttgatgcaatttttatacaatattatgttacttgtaggaaaaaaaagttgaaaaagcaattcacataagaaatgtaaacaagagatggtgtgttttcatctttgttctttttttcttttacgttggtatactctttgaattttcgcaagtattttttaaaatttctatttctagtaaccaacatttcattattcaaaaaaaaaaaaaaagnnnnnnnnnnnnnnnnnnnnnnnnnnnnnnnnnnnnnnnnnnnnnnnnnnnnnnnnnnnnnnnnnnnnnnnnn

SEQ ID NO: 120865 - DNA, 723 bp, Arabidopsis thaliana
tttttattgagaaatatggtactcatgttgttgttggagtgactatgggaggtaaagatgtcattcatgtgaaacagatgcgtaaatcgaatcatgagcctgaggaaattcagaaaatgttgaagcattggggtgatgaaagattttgtgttgatcctgttgaaagtaaatctcctgcttctgtttattcagggaagccaaaggaggagaatcttctacaatggggacttcaaccgtttggtacctcggttagctctgctgttgtcatgcataccaagaacgaggagattatgagggtttgtatcagaagaggaggtgttgatctggggcaaagtcatgaacgatggctctcaacagtatcacaagcacccaacgttatatcgatgtgttttgttcctataacttcactcttgagcggtctcccagggacaggatttctttagtcatgcagtgaacttatacctcccgatataagccacctatagaagggttgcatcagtttcttgaggttcaacttccacgccaatgggctccagtgtatggagatctccccctttggactacgccgctcgaaacaaagttctccatcccttcagttctctttgatgggtccaaaactatacgtcaacacatcaaaggttgattcaggtgagcgaccagtaaccggactacgcttcttccttgagggaaagaaaggaaatcatctagcaatacatttgcagc

SEQ ID NO: 120866 - DNA, 871 bp, Arabidopsis thaliana
  unsure (1)..(871): unsure at all n locations
gttacttgttagatctcaacaaccaggtcgcacacactaaaatggcgttccgcgttttgctcctcttctcactcaccgcacttctcatcttctccgccgtttctccttctttcgccgcttcttcctccgacgacgttgacgatgaggatctcagcttcctcgaagatctcaaagaagacgacgttcccggcgctgactcactctcttcctcaactggatttgacgaattcgaaggaggagaagaagaagatcccgatatgtacaacgacgatgacgatgaagaaggagatttttccgatctaggtaatccggattccgatccgttaccgacgccggagattgatgagaaagacgttgtggttatcaaggagcgtaacttcactgatgtgattgagaataatcaatacgttttggttgagttttatgctccgtggtgtggtcattgtcagtctcttgctcctgagtatgctgctgctgccacggtgctgaaggaagatggtgttgttttggctaagattgatgcgacggaggagaatgagttagctcaggagtatcgtgttcagggctttccgacgcttcttttcttcgttgatggtgagcacaagccttacactggaggaaggactaaagaaacaattgtnacatgggtgaagaagaagattggtcctggtgtgtataatctaactacattagatgatgctgagaaagtntttgacttctgggnancaaaagtttgtttttgggntactttgnacctccctggtgggtnttntagcacggtccngctttaattctggtttccaaaagncttaagacggntgtgaaccttttttccaaacaagtgaatccctgatttttnnaaanntntttt

SEQ ID NO: 120867 - DNA, 1220 bp, Arabidopsis thaliana
  unsure (1)..(1220): unsure at all n locations
agacctccaggtacctaccactcactttaggaaagctgctacgcctgcaggtaccggtccggaattcccgggtcgaccccccggccccttcaccgcctgccgatctctctcaatctccgatcaaccatgagcaaaggtccaggactcttcaccgatatcggcaagaaagccaaagatctgttgacgagagactacaattccgatcagaagttcagtatctccacttacagtgcctccggcgtggcccttacgtctactgctctgaagaaaggaggagttcatgctgctgatgttgccacccaatacaagtacaagaatgctttgtttgatgttaaaatcgacactgattctagtgttttgacaacagtcacacttaccgagatcctcccatcaacaaaagccattgcctccttcaaagtccctgattataattccgccaagctcgaggtgcaatacttccacgaccacgcaacagttaccgctgctgcagctttgaaacaaaacccactaattgacataacagctactcttggttcgccagtcatctcatttggtgctgaagctggatatgacacaacctccaaaactttcaccaagtacaatgccgggatcagtgtgacaaaaccagatgcttgcctctccataatattgggagacaaaggagactcactcaaagcatcataccttcatcactttgatgaatttaagagaaccgcagcagttggtgaggtttacaggaagttctcgacaaatgaaaacacgataacggttggtggattgtatgcgattgttcattcgactgcagtgaaagctaagctcaacaacccatggcacacttggtgctcttctgcagcacgaggtcctgcccagatcactagtgactgtttccagtgagattggacactaaggctttagaaaagcatccaaggtttggtctctctcttgctctcaaaccttgagaacacacactcacatcagacctgcttgagtcttcctacttttctcgtatgctctcattgttgatttcctctacggcaggacgtaagagttagcgtttttttcctccttttttccttacgtttaattggaatcaataaatagttccgcagtgaaattgccggataaaaaaaaaaaaaaaagggcggccgctctagaggatccaagcttacgtacgcgtgcgtgcgacgtcataaatcttgtagtagtgttacctnnacaat

SEQ ID NO: 120868 - DNA, 624 bp, Arabidopsis thaliana
  unsure (1)..(624): unsure at all n locations
gcgttcgtctaccaaaacaccatcctaaaaatcatcgtcaattctccaaaagatcgacggatcacgcgggattatattttacctacgtgtaccccatctntctggaacccaagtggagacaccagagttgccagcggataccaaaatccattgtctgaagcgttttactcgggcagatggaaaatgttttgaacgtgacacatggagagaaataaaggaagacattgaacgtgataggtctgagaatgccagctcctctgatgcagttgttatatctcaagaaatcacagaaaagaagcctgtagaaataagagaggttgaatcgaatgcacctcgcgccagtgattgtaccgagaaagtagatgtcaacaaggaacgtcttcttaaagtccccatagatagggctctatatcagaaggcactaacatcacttgttgattccaaaattccccaagaagaagtctttggggtccatgaaactaataagcctggtgaggaagcactagctagtgctgagtttgtgtcttttgtggactgtactcctgaaagggtcaaatctatctttgagaaggccaaattggtgaagggttgctggctaagatgtgctttgacataaaagaccct

SEQ ID NO: 120869 - DNA, 485 bp, Arabidopsis thaliana
ggaaggctggcccgcctgcaggtcccggcccggaattccccggtcgacccacggcgtacgcccacgcgtccgacgagtcgctaatcaaataaacctaaaccctagatcgtgatcggcaacggcacctcctcgtcggcgatagcttctcttccactaaaagaaaatcctcttcggtgagaatggcagagcatttagcttcaatctttggtactgaaaaggatagagtgaattgtccgttttactttaagattggtgcttgtcgtcacggtgaccggtgctcacggcttcataaccgtcccaccatctcgccgacgcttctcctctcgaacatgtaccagagacctgacatgataactccaggtgtggatcctcagggacagccgttagacccgagtaagatccaagaccactttgaggatttctacgaagatattttcgaagaactcaacaagtttggtgaagtggagagtctcaatgtttgtgac

SEQ ID NO: 120870 - DNA, 500 bp, Arabidopsis thaliana
tacgactcactttagggaaagcacgtacgcctgcaggtaccggtccggaattcccgggtcgacccacgcgtccgcccacgcgtccgcccacgcgtccgcccacgcgtccgagcaatctgggcatgacaaagtccatgaatttctttcagaacatcattaaacctttcaaacgcagctccaatcgaggtaagatccgtttgatttgttgattcttagtgtaagattaggtggttgtgaaatttgactaactttttcttcgttgacttaaaggtcttgaagatgatattgagcgaattgctgctatggagcaaaaagttttcccatttcaagttttagtttccgctaccaaagattttcacccgacccataaactcggtgaaggtggtttcggtcccgtcttcaagattacctgacgggagagacatagcagtgaagaagctatctcaggtttcaaggcaaggcaaaaacgagtttgtgaacgaggctaagttgttggctaa

SEQ ID NO: 120871 - DNA, 859 bp, Arabidopsis thaliana
agctactatacgactcactttagggaaagctcgtacgcctgcaggtaccggtccggaattcccgggtcgacccacgcgtccgcccacgcgtccgatttacacggcgtctcgggccatcacgagcctaattccgaacctccaattccgacaggttcgtcgagtccgaagctgaagattagtcccaaattgaatcggtggtctaggggccgagctttaagatctggtgttaagcttgacccgccaattccccgttccgataactcacctcgccgtcaagtaacggaagcccaaccgaccgatgaggctgataagaagacgacggcgatcgacgtggaggtaacggcgggaaagtctatatatttggtttccgacggaactgggtggacggcagagcattccgttaacgccgctttgggacaattcgaagatttttcgttgaatcgtggctcttctgtgaatacccatctcttctcctgggttgaggatgaggagaggcttatcgagattattaagcaagcggcaaaggaaggggcaatgtgtttctacactttagcaaatccttctatggcaaaatccgcaaagcaagcttgtgatcagttggggtgtgctttcggttgatattctaggaccaatcatcgaagggattgcgtctcacttaggtgtttctccgtcaggtcttacacgtggagcacctggtagggtcaagactctcaatgatgcatatttcaaaaggattgaagccattgagtttaccattaagcaagatgatgggactttacctgagaacttaagcaaggctgatatagttcttgtcgggtttcccggacagggaagacgcccttgtccacttacattgctc

SEQ ID NO: 120872 - DNA, 515 bp, Arabidopsis thaliana
agctaccatacgactcactttagggaaagctcgtacgcctgcaggtaccggtccggaattcccgggtcgacccacgcgtccgcggacgcgtccgcccacgcgtccgttctcaactaacttagttagggatatctccggtcatggatctcaggcggagacagtggttcttgtcggctattttgctgtcggcggcgttgctgattgacccgcaattctcgacggcggcgacggcttcggagaatttggtatttgaagttcgaagcaagttcgccggaaaaagagtaaaagatcttggagctctcagagctcacgacgtccaccgtcactcaagactcctctccgccatcgatattcctctcggcggcgatagccagcctgagtctattggtttatacttcgctaaaatcggactcggaactccatcaagagacttccatgttcaagttgatacaggaagtgatatcttatgggggaattgtgctggttgcatcagatgtcctaggaaaagtgatctg

SEQ ID NO: 120873 - DNA, 821 bp, Arabidopsis thaliana
  unsure (1)..(821): unsure at all n locations
cnnnnnnnnnnnnnnnnnnnnnnnnnnnnnnnnnnnnnnnnnnnnnnnnnnnnnnnnnnnnnnnnnnnnnnnccacgcgtccgaatcaaccaaaaaaaaacaaaaaatgaagaaacttcttttgatatttctcttttctcttgtcattctccaaactgcttgtggattcgattacgacgacaaggaaatagaaagcgaagagggcttatcaacgctttatgatagatggaggagccaccactccgttcctaggagtctaaatgaaagggagaagagattcaacgttttcagacacaatgtcatgcatgtccacaataccaacaagaagaaccgatcctacaaacttaagctcaacaagtttgcagatttaacaattaatgagttcaagaatgcatacaccggttccaacatcaagcatcacagaatgttgcaaggaccaaaacgcggctcaaaacagttcatgtatgatcatgagaatttatccaaattaccgtcctccgttgattggagaaagcaaaggttgctgtcacctgaaatcaaggatcaaggggaatgtgggagttgttgggcattctcgaccgtagcagctggtgagggaatcaacaagatcaagactaacaaactggtctcactgtctgaacaagaactagtggattgtgatactaagcagaatgagggttgtaacggaggtcttatggagattgcattttgaatttcattaaaagaagaaaccggtgggtatccaccccactggaggggaataggctattccctttaatgaaaagggttttccggatgggaaaaaattgccgaacgccttt

SEQ ID NO: 120874 - DNA, 909 bp, Arabidopsis thaliana
ggagaaagaaaggtgctgtcactgaaatcaagattcaaggaaaatgtggaagttgttgggcattctctaccgtagcagctgttgagggaatcaacaagatcaagactaacaaactggtctcactgtctgaacaagaactagtggattgtgatactaagcagaatgaaggttgtaacggaggtcttatggagattgcatttgaattcatcaagaagaacggtggtatcaccactgaagatagctatccttatgaaggtatcgatggaaaatgcgacgcttcaaaggataacggcgtgcttgtgacgatagatgggcatgaagatgtacccgaaaacgacgaaaatgctcttcttaaggctgttgcaaaccaacctgtatctgttgcaattgatgctggaagttcagatttccagttttattcagagggagtgtttacgggatcttgtggaacagagctgaaccatggtgtggcagcggtcgggtatggatctgagagggggaaatagtattggatagtgagaaactcatggggagctgaatggggagagggaggctatataaagattgaaagagagattgatgaaccggaagggcgttgcggtattgcgatggaggcatcgtatccgatcaagctatcgtcttctaatcctaccccgaaagacggtgatgtcaaagatgagctctagatatgtgtacacattgtgtaaaaccatatcaaaggtgatcccaattccttgttgattcatgttgttagtttcgtcttcatgatttgattttgttgttggttttgaatttgaataaaaatgtctcgtgttttctcaaaaaaaaaaaaaaagggcggccgctctagaggatccaagcttacgtacgcgtgcaggcgacgtcataaatcttctatagttgcaccta

SEQ ID NO: 120875 - DNA, 511 bp, Arabidopsis thaliana
gcactatacgactcacttagggaaagctggtacgcctgcaggtaccggtccggaattcccgggtcgacccacgcgtccggtggtcgtgaattacctcaggcagcccctcctggcctaggatcacctcatcagaacaacagagtatcgagtttacctggtactcctcaaaggtttagtattccgcagcgattagcttctttggtcagatttcgagagaaacggaaaggaaggaattttgataagaagattcggtatacagtccgcaaggaggtagctttgaggatgcaacgcaataaaggtcagttcacatctgccaagtcaaacaatgatgaagctgcatctgctggatctagctgggggtcgaatcaaacctgggccatagaaagtagtgaggctcagcatcaagagatctcatgtcggcactgtggaattggcgagaagtcaactccaatgatgcgacgtggacctgccgggccaagaacactttgcaatgcatgtggacttatgtggg

SEQ ID NO: 120876 - DNA, 454 bp, Arabidopsis thaliana
caaatattttcccatccttggatttttcatccccttcctctcggcgacaagaacaacatcaacacaaaaaaactcaaaaccatcgcgaacatcgaagaatcatctctcaacaattctccgataattctttggactgatgaattaaagggaaacgctgagtgtaaatcatacaacagttctaagtcgtgaaaacaaaaaaaagatggcttgtagaggttgtttggagtgtttgttgaagttactcaactttctcctggctgttgctggacttggcatgattggttatggtatctatttattcgttgagtacaagagagttaccgataattctgttacattcgatttgactaatggagatcaaagttacgtttcgtttgggaggcctattcttatggctgtgtcactgtcttctaatatctttgacaatcttcccaaagcgtggttcatatacttg

SEQ ID NO: 120877 - DNA, 818 bp, Arabidopsis thaliana
  unsure (1)..(818): unsure at all n locations
agataacagctggagagatgaacttccttctgacaggactggaaacttcgatacgatatataatttccttagagagaactggaagattgtaagatgggtagctctaggagcagttgttttcgaggctttactcttcttgcttgcccttatggtcagggcagctaatacaccagcagagtatgacagtgatgatgaatatcttgctccaaggcaacaaatcaggcagccattcatcaaccgccaagccgcccctgtcactggtgtcccagttgctcctactttggaccaacgcccaagccgcagtgacccttggagtgcacgtatgagggaaaagtatgggcttgacacatctgagttcacatacaatccctcagagtcacaccggttccagcaaatgccagcgcaaccaaacgaagaaaagggccgatgcaccatcatgtgagtccattttaaaagtcttgaagagttcagttaattctcttttcctgtgtctttattatttctgcgtgtaacaatcaagagtgtcagtaaaagtaggattcttgtttctgggttgatgatgactctagcatttgagatctctaatcaacctagtcacggtctcaaaactcatttgttgtgtctgtgtagtcttttgtaaggattcaccattatgaatattcatcttggttcccagtctgatccagtcctatgtttcttattatatataaaaaattcactttcttcatgttacacgcccagaattctcgcgtgctctacattttagcccataataatgcagattaagtgcccnnnnnnnnnnnnnnnnnnnnnnnnnn

SEQ ID NO: 120878 - DNA, 440 bp, Arabidopsis thaliana
tacggctgcgagaagacgacagaaggggacaacaacaacacaaaaaaactcaaaaccatcgcgaacatcgaagaatcatctctcaacaattctccgataattctttggactgatgaattaaagggaaacgctgagtgtaaatcatacaacagttctaagtcgtgaaaacaaaaaaaagatggcttgtagaggttgtttggagtgtttgttgaagttactcaactttctcctggctgttgctggacttggcatgattggttatggtatcttgctccaaggcaacaaatcaggcagccattcatcaaccgccaagccgcccctgtcacctggtgtcccagttgctcctactttggaccaacgcccaagccgcagtgacccttggagtgcacgtatgagggaaaagtatgggcttgacacatctgagttcacatacaatccct

SEQ ID NO: 120879 - DNA, 477 bp, Arabidopsis thaliana
accacgcgtccgcggacgcgtgggcgcggagcaatacatcgcagtctcccactgattcagcagctctttgaactactcttcgacaatggccgaacgtggtggagaacgtggtgttgagcgtggtggagaacgtggtgatttcggacgaggattcggaggccgtggaggtcgtggagatcgtggagggcgtggacgtggaggccgtggtggtcgtcgtggagggcgtgccagtgaagaagagaaatgggttccagtgaccaagcttggtcgtctcgtggcggctggtcatatcaagcagatagagcagatctatcttcattcactcccggttaaggagtaccagatcattgatatgctcatcggtccaacattgaaggatgaggtaatgaaaatcatgccggttcagaaacaaaccagggctggtcaaaggactagattcaaggcctttgttgtcgttggagatggtaatggtcatgt

SEQ ID NO: 120880 - DNA, 511 bp, Arabidopsis thaliana
  unsure (1)..(511): unsure at all n locations
nnnnnnnnnnnnnnnnnnnnnnnnnnnnnnnnnnnnnnnnnnnnnnnnnnnnnnnnnnnnnnnnnccacgcgtccggaaaaatgatggcagataaagctttggtgcgtaggctttcagcctgtgaaaccatggggtctgcaacaacaatttgcagtgataagactggaactttgaccttaaacgagatgaccgttgttgagtgttatgctgggttacaaaagatggattctcccgacagcagctcaaaattgccatctgcttttacatccatacttgttgagggtattgctcacaatacaaccggcagtgtgttccgatctgaaagtggtgagattcaggtttctggatctcctacagaaagagcaattctcaattgggcgataaagttgggtatggattttgatgctcttaagtctgagtcttctgctgtacaattttttccattcaactcagagaagaaacgaggaggtgtagcagtgaaatcaccagattcgagtgtccatattcact

SEQ ID NO: 120881 - DNA, 669 bp, Arabidopsis thaliana
  unsure (1)..(669): unsure at all n locations
aaaagcccattttagctaagtgtgtcaccgtttactctcgcttcactaagcgtcaccgtttgggcgatggtcgtccctttagtttttttttttttgttttggtgtcttctgggacttatcgattcttccttaaactgggaaactactttgttcgaatctcagagctttttcgtttcccatcggaagaagaaactcatatataccttccaaaaaatccatacgtcaagtatttgttctctatcctctctttgttgtcttataaattcttcaagcaggtttcgagatttcctcgaatctgttttgttcttgttcctcaaaaatgctgggtttttgaacgaacgaggatgacgatgctcagagtccgaagcagagatggattggagagagtgagtgtagatggacctcatatcacagtctcccaactcaaaaccctaatccaagatcagcttcagatccctatccacaaccaaaccttatccaccaatagaaaccttctcctcgctaagagcccttctgatttcccaagcggtcaccgacatggccgatccctaacctcggaactcggctctaatcnagccaggggcaangggcanctnggttaggaggggggggancntcgggggggccnnggaaancntngggccttggggggaaaacccgaggtantgc

SEQ ID NO: 120882 - DNA, 811 bp, Arabidopsis thaliana
ccacgcatccgaaagactaaaaatttggacgataagcagaaaagagagaggagggcctctcgccctcttattaaaaccttgccttctccaaatctgaagatttctcaatcctaaaatcttttttttttcctctttctccgtttctttattttcggaatccaagatcgtgggtcgatcggtttttacacaatccgatcacgacccatctgctctttttcatcctattttgcttcccttgagaaatggaaatggaatcatgtaagctcttcatcggtggtatatcttgggaaaccagtgaagatcgtcttcgtgactattttcacagttttggtgaggttttagaggctgttattatgaaggatcgtgccactggccgtgctcgtggctttggtttcgttgtctttgctgatcctaatgttgctgaaagagtcgtcttgcttaaacatatcattgatggtaaaattgttgaggcaaagaaggctgttccaagagatgatcacgtagtatttaataaaagtaacagcagccttcagggatcacctggcccatcaaactccaagaagatctttgtgggaggtttggcatcatccgtgacagaggctgagttcaaaaagtattttgctcagtttgggatgatcactgatgttgtggtgatgtatgaccacagaacccagcggcctagaggctttgggttcatttcatatgactctgaagaagctgttgacaaagtactgcagaagacattccacgaactcaatggttagatggtggacgtcaaactggctgttcctaaggatattgctctcaacac

SEQ ID NO: 120883 - DNA, 322 bp, Arabidopsis thaliana
  unsure (1)..(322): unsure at all n locations
taaatatagagaaagagatttgagagatatatgtgtaggtgttagggttttcattacttgtgaattgtggctgtggcattgaatagaggtgtttggggttttgtccctttggtaaaggatgagtgttctctagtgtgaagctaaattggtcttctaagccatctgtgtgagggatggaagtgtagaaggtgctgaaacaactcatttggattagggattggaattggattcgtcttgtggcctttaccgtggtanggatttagatggtagagaaagctagggtagattaaattttttgtaagaagagctttctctgttgttg

SEQ ID NO: 120884 - DNA, 1115 bp, Arabidopsis thaliana
  unsure (1)..(1115): unsure at all n locations
tgatctnnnnnnnnatcgccaggtgtcaaattacaggagcttctgagaaggataaatctcggaggttcccggtctgaacgacccacagacgaagcgaaacaaaagtactctaagggagagaagtatcaaaattctcatcggaaaaagacagatctacaaattttgagagacaagccatgactaaggtgaaagatgagccacgcgcttccgttgaaggtggatgtggtgttgccgacggtgacggcggcgcggctgagatcggcggtaccggatctgttgagaaatcgattaacgaagttaggtccacggagattcaaaccgctgagccaacggttcctccaaatcaacttactattttctttggtggaagtgttactgtgtttgatggacttccatcagaaaaggttcaagaaatccttcgtattgctgctaaagcaatggagacaaagaattctacaagcatcagtcctgtctcatcgccagcactgaacagagctccttctttctcaagcacatctaatgtggcatcaccagctgcacagccatttcctatgcagccaatctcgttttgcagatccacggctgatctacctattgcaaggaggcattccgttcaacgattcctcgagaaaagacgggacagattggtcaacaaaaacccttaccctacttcagacttcaaaaagacagatgtcccaacaggcaatgtctctatcaaggaggaatttccaactgcttagcagaagatcaaacctccacattaagcttataagcaaactaagtaaaacgttttgtcaatatagtaattaatatgataatctatcatgtacgctgctgtgtgaatgtgttgtatgatagtgtctgtataggtttgctagacaaaccgaagattgtttccatgtctgggagtggtcagatatgtttgccattttacaattctactgaagaaactattgtagttagtaacactgtcctagagtctatctaactaatgactctttgatgttatgttaaaaaaaaaaaaaaaaaaaaaaaaaaagnnnnnnnnnnnnnnnnnnnnnnnnnnnnnnnnnnnnnnnnnnnnnnnnnnnnnnnnnnnnnnnnnnngtacctaa

SEQ ID NO: 120885 - DNA, 739 bp, Arabidopsis thaliana
  unsure (1)..(739): unsure at all n locations
nnnnnnnnnnnnnnnnnnnnnnnnnnnnnnnnnnnnnnnnnnnnnnnnnnnnnnnnnnnnnnnnnnnnnnnccacgcgtccggaaatttgtaaaagatatgagaaattagtaaattccagagacttattagaagcggcggatcgaattcgcgacgagcgttccattagggtttcgaatcaacatcaacaaacgacgagagaaaactttttaaaacatgtacggaggcgattttgacggcgacgctgctttcgccggcggcggcttcatgccttctcaggcgactacgcaagcccatgaatcctcatcttccctcaagaaccgcgatgtacgtaccttgcttcccctgacactgaagcagttgagcagcgcatcaaccactggcgaatcaaatttctctattgatggcggtgatattaaaactgttgtaatcgttggacggatttctagaatggagaacagaatccctcaggtcgattttgttgttgatgacggtacaggctgggttgattgtgtcagatggtgtcacgctcggcaagaaactgaagaaatggaagcagtcaagctgggaatgtatgttcgcttacatggacacctgaaaatttttcaagggaaacgatctgtgaatgttttttcagtcaggcctgtcactgacttcaatgagattgtacaccactttaccgagtgtatgtatgtccacatgtacaacaccaagttacggggtggttctattactcaaga

SEQ ID NO: 120886 - DNA, 681 bp, Arabidopsis thaliana
  unsure (1)..(681): unsure at all n locations
nnnnnnnnnnnnnnnnnnnnnnnnnnnnnnnnnnnnnnnnnnnnnnnnnnnnnnnnnnnnnnnnnnnnnnnccacgcgtccgtaatagtcgacaatttgggatttgtttatggtttacttcacatgaatcacatacgttcatgtcgattcctttgagatactgtctcgatttcgtttttttctcttgtttaatttggaattattgtaaagcacgtggatttgcttgtcttggttttgttttctccttcgacctctttgatgaaatcgaggaacctacaatttcttcgtcgatccaaatggtagcttagtggtggtgataataggtttctcctcttgattggctccagctttaggttttttttttatctttgtttctgcttcgattcccaaaatttaccctttcgattttgagtctaactagtcgagttgactcagtagagtcgaaagcttctgggtttacgaagagacatctcctaattgaaacaaaacctttcctttccattgggctgagaaaaaagcaagagtctttgaatattttttggagcgtggttttatttanatgggaggtcaatgctctagcctgagttgttgcaggaacacttcacacaagacagctgttcttgaagctcctgatgttgataatggagagagtagtgagaacacttgtgttcctaatttccg

SEQ ID NO: 120887 - DNA, 767 bp, Arabidopsis thaliana
  unsure (1)..(767): unsure at all n locations
attttctttgatttccccccgggatgccccaattttattttacttttgttaaacggtgctcccatggaagacatttggtcacgttcaacataagaggacccctaataacccctgaataaacagggcaaaatttgagtgggaagaataactccaaaaggccagtcgtgttaagcctgttgaaaaaaacggaaacactttccgattcgaggttcctcagatcaaggggaaatcttttcgaggtggacctcaaatgattcagctaagcctccatgggcaaccattgtatgcaacaaactccctgtttagcgcatgggatcgtcagttttatcctgaaatcatggagaaaggctcacacataattcagattgatgttgattacagaaaaaggtggtctcaccataaaccctgatttctttgtggactttggtgatgaaccagacggtccttcactagcccacgagatgagatatccaggtggagactgcacttccgatatctggatttgaatttggctttgtttagagtgtgttttgtgttaagtttaaattgagttttattatttgttgtgtgtttagtagagttgaataaaaaagggagtaagatgactcagacaattaacacttgtttgtacattttgactcctatgtgtcttaagtaataaaactttctacatttcgacttaaaaaaaaaaaaaaagnnnnnnnnnnnnnnnnnnnnnnnnnnnnnnnnnnnnnnnnnnnnnnnnnnnnnnnnnnnnnnnnnnnaac

SEQ ID NO: 120888 - DNA, 590 bp, Arabidopsis thaliana
  unsure (1)..(590): unsure at all n locations
gctctctaaagcaaaaatacatatctcaaaataaaaaggtggtccataattaagtccccaaagtatcatcatgattaaaaagttcagcaatatggattacaaccagaaacgagagagatgtgggcaatacatcgaagccctcgaagaggaacgtcgcaagattcatgtatttcaacgtgaacttcctctttgcttagaccttgtaactcaagcgatcgaggcatgtaagagggagttaccggagatgacgacggagaatatgtacggacaaccagagtgctcggagcagacgaccggagaatntgggccggtcttggagcagtttctaactattaaagattcatcggcatccaacggaggaggaagattnaagaattcgncgntgagcatgggaatcacggtccngacaattnatttccngggccaagacncggaatctgatttggcttaagccttttcanctttggattaacccggccacccantttttccaaaangggaaggttcagcaggggncggtttcaagnngttgggttttgnaagnncccttgtancggttgcaaggngaagaaancggaaaccgggngggc

SEQ ID NO: 120889 - DNA, 790 bp, Arabidopsis thaliana
  unsure (1)..(790): unsure at all n locations
cggtgtattgtggaatgtacgatacaattcaccagnnnnnnnnnnnnnnnnnnnnnnnnnnnnnnnnnnnnnnnnnnnnnnnnnnnnnnnnnnnnnnnnnnnnnnnnnnnnnnnnnnnnnnnnnccacgcgtccgaagatcttgaacagaaagtgcagctcgcagatgctaaaactaaggaaacggaggcaatggatgtaggtgtcaaatctcgagacattgacttatcctttttttctccaacgaaacgtaagagcaagaagaagccagaagcatctctttcttcttcttcgtcttcgggcaatgttactactcctactcaaacagcatcaacttcacatctcatgacagtgaagatcgtcactggagtggcgctgatctctgttatcatcggtataattcttgggagaaagtattagtctcgtcttctcagtgtggcttgatgatgttcatatctgaaatgaagatctctccttcttcatttgttttttttgggggtttttgaattttgatagcagaactaagaagctttgcgtgaatatgcttctctctctgctaatatttgcttgtggttgggttttgttttaccgggtctgggagattttgttgtaccagcccttgcttgtaggtcaagcaattgtccagatattgtattaaattaaatcaaaggtgaattaatttgataattatccaactaaaaaaaaaaaaaaaaaaaaaaaaaaagggcggccgctctagaggatccaagcttacgtacgcgtgcatgcgacgtacatagctggtcgatagt

SEQ ID NO: 120890 - DNA, 850 bp, Arabidopsis thaliana
  unsure (1)..(850): unsure at all n locations
ctatgacgccgcatgcacaccatttgacttcacatagagagagatagagagatggcgacggaaacggaagttgtagctccggtaacggtaagcaacggcggaagcaaaggatgttgcaagtacggtggtcctggttacgcgactcctctcgccgctatgtctggtccatcggagaaacttatctacgtaaccgccgtctacaccggaactggaatagataaaccggattatttggcgacggtggatgtagatccaagctcgccttcgtattcaagtgttattcatagattaccaatgccttttgttggtgatgagcttcatcattctggttggaactcttgtagttcttgccatggtgatgcttctgttgatagacgttatctcgtgttaccgtctcttatatctggtcgcatttatgcgattgatactaaggaaaacccgagggctccgtctttgtataagtatgttgatcctaaagagattgctgataagactggattggcgtttcctcacacggctcattgcctcgccacgggcgagatcttggtgtcctgtcttggagatgaagaggggaatgctaaggggaatgggtttcttcttcttgactctgattttaacatcaagaataggtgggagaaaccaggacatagtccctttgtatgggtatgatttttgggtaccaacctccggcacaagaccatgattcagcacatctttggggaaccaccctaaagcccttctcctaaaggtttccaatccttccancaacgtttgctgaatggcttgttatggaaanttcctcctacatgttttttataatttgggcccacgaaggttnaaaattaaacca

SEQ ID NO: 120891 - DNA, 422 bp, Arabidopsis thaliana
  unsure (1)..(422): unsure at all n locations
aaaagattatatgcgacaaactcgctatttagcgcatgggaccgtcagttttacccggaaatcatggagaaaggctcacacataattcaaatcgatgttgatacagccaaaggtggtctcactctaaaccctgacttctttgtggactttggtgatgaaccagacggtcctgcactagctcacgagatgagatatcccggcggagactgcacttccgatatctggatctgattttggctccctaagagtgtaagctggatttgtggctagattcgtgatcaagacaattaaagttgttcttactcctttgtggcttattccggtgataataaaactttctattttatgatgtgtgcccnctatcctttcgaggtanccgannttganccggtncntntccggggncgaatttttnggntcat

SEQ ID NO: 120892 - DNA, 1119 bp, Arabidopsis thaliana
agcgagatcttggtgtcctgtcttggagatgaagaggggaatgctaaggggaatgggtttcttcttcttgactctgattttaacatcaagaataggtgggagaaaccaggacatagtcctttgtatgggtatgatttttggtaccaacctcggcacaagaccatgatcagcacatcttggggagcacctaaagccttctctaaaggtttcaatcttcagcacgttgctgatggcttgtatggaagtcatctacatgtttatagttggccaggaggtgaaataaaacaattaattgaccttggaccgactggtctcttacctttggagattagattcttgcatgatccatctaaagatacagggtttgttgggagtgccttgtcgagtaatatgataagatttttcaagaacagtgatgaaacatggagccatgaggttgttatatcggttaaaccgttgaaagtcgaaaactggatacttccagaaatgccggggctaatcaccgacttcttgatctccctcgatgaccgatttatttactttgtgaactggctccatggagacattcgtcagtacaacatagaggaccctaaaacccctgtattaacagggcaaatttgggttggaggattactacaaaagggcagtcctgttaaggcggttggagaagacggcaacactttccaattcgaggttcctcagatcaaggggaactctctacgaggtggacctcaaatgattcagctgagcctcgatgggaaaagattgtatgcaacaaactcgctgtttagcgcaatgggatccgtcaggtttttatcctgaaaatcaatggagaaaaggctcacacataaattcagatttgatgtttgatccaggaaaagggtgggctcaccataaaccctgatttctttgtggactttggtgatgaaccagacggtccttcactagctcacgagatgagatatcccggcggtgactgcttttccgattcttggattctgggcaagtgttactactcctactcaaacagcatcaacttcacatctcatgacagtgaagatcgtcactggagtggcgctgatctctgttatcatcggtataattcttgggagaaagtat

SEQ ID NO: 120893 - DNA, 578 bp, Arabidopsis thaliana
acgataaggaaatatctaaccagaccggcccaaggagcgggcaaaatcagaaagcatttgatcttcaaactcttgggttcttctctgattgaaaatgagcttatcatcgccaaccagtgcttgtagctcgtccagatgttactcctcgggattatcgtttccgattggatttggatcgaatcccatcaatgtgggattggtttgttacccaaaaagatacagtattgctgctcggaagttcgtagtggcttgctcctcctcctcttccgatccacttttggttaaggctgcaaaagggcaagccataagtcgtcctccagcttggatgatgaggcaagcaggaaggtatatggctgtttaccaaaagctcgccaagaaacatccgtccttcagagagagatcagagaacactgatctaatagtggaaatctctttgcagccttggcaagcattcagaccagacggtgtcatcactttctctgacatcctcacccctttacctgcattcggtgtcccttttgatattgaagaggtaaaaggtcctgtaatctaatctcctatccgaactgaagaagata

SEQ ID NO: 120894 - DNA, 706 bp, Arabidopsis thaliana
ctcaaaacaacttaagaagttgtctgcgatacaatcaagcttgaaaactgtgaagaacattatttacattgaagaagatggagtagatgttgcttctagtgatgtcaatagtatgggtgatataactgtttcgtcgatctctgaagttgagaaacttgggcagaagaacgctgttcaaccgatcttaccttcgaagaatggagttgctgttataatgtttaccagtggtagtactggtctaccaaagggagttatgattacccacggaaatcttgtcgcaactgctgcaggagttatgaaggtggttccaaagttggataaaaatgatacatatattgcgtacttacctttggctcatgtgtttgagctggaagctgagattgtggtctttacctcaggtagtgccatcggttacggctcagcaatgactttaactgacacttcaaataaagttaagaaaggaaccaaaggagatgtttcagctctgaagccaactataatgactgcagttccagctattctggatcgtgtccgagaaggagttcttaaaaaggttgaggaaaagggagggatggcgaagaccctttttgactttgcatacaagcgccggttagcagctgtggaatggaagttggtttggtgctggggtttggagaaaatgttatgggatgctcttgtcttcaagaaaatacgcgctgtgcttgga

SEQ ID NO: 120895 - DNA, 512 bp, Arabidopsis thaliana
  unsure (1)..(512): unsure at all n locations
cagctcnnnnnnnnnnnnnnnnnnnnnnnnnnnnnnnnnnnnnnnnnnnnnnnnnnnnnnnnnnnnnnnnnnnccacgcgtccggtttactctatattaattactttacaaatttttgatccagttttctcaattttttctagactcgtatcgatatggcgaatcatgaaacgatatttgatcagctaaagaagcagattccagtagatgaggaagaacctctgattttgaatcgagactcaagcgttggtctcgtcatcgttgacgttgttaatggcttctgcacaattggctccggcaatatggctccaacaaagcataatgaacagatatcgaagatggtggaggaaagtgcaaagcttgctagagagttctgtgatcggaaatggccggttttggcgtttattgactctcatcatccagatattccggagagaccttatcctcctcattgtattataggaactgaagaatcagaacttgttcctgctctgaaatggcttgaaagtgag

SEQ ID NO: 120896 - DNA, 441 bp, Arabidopsis thaliana
ttttaagaaccaatcccaaagctcatttattctttccttttcaattattctttcaatttttccgatcgacggaggttgatcggcgacggcgtaatggccggaggaatcgtctcaccggcctctctactcgacctaatcgctgatatcgtcgagattccactcaacaccggaatgttcaagaaggattgcgcagatctcactcgacgagtttgtctcttaacgcatttgttagaggagattagagactcaactcctatcgattccgccgcttcgtcgtcgtcggagaatgattggtggtctgatctcgtggtcggacttcaagccgcgaagcgtcttctcttccacagctcgagtcccagctcgcgattccctctgagggtgctgcgaagagaattccatttcaggtccaatgtgttacatgggaagcttgagaaagccttt

SEQ ID NO: 120897 - DNA, 559 bp, Arabidopsis thaliana
  unsure (1)..(559): unsure at all n locations
cggacgcgtgggcggacgcgtgggggaagagagactcaaaacggcaattagcgaaagtgggcgggaggattcttttccggcgactcttttatgtcttctcttcctcttcgctccggtgagaagatggaatcgccttccatctccgacgccgttccacttcacgcaccagaagacgcgaccgcggatttttcccaaccgcaatcgccgttacatgaagttgattcgtttccagttactgaatcctccgatgatgttgttgttaacgtctcggagataccgaatttatctccgtctgatgatgattttgaccacgagcgaaatagcggcgaggatcgcgatcaggatcacggcgagaatccggttgagaccgatggtgttgttgttccaatcgatgagttgaatcagaagatcattagacaggttgaatactactttagtgacgagaatttgcctactgacaaatttcttctgattgcaatatgggggaacaaaaaaaggnttttttccccntttttaccattttacggtcccaaaatnaggngntttttttnggngaanc

SEQ ID NO: 120898 - DNA, 744 bp, Arabidopsis thaliana
tgcttcgcgtgagggtttctgagattctgatcgacgaaaactaatctctctcctttttcttctcatctccttactagagatctctgtcttcgataatttgtttcaatcactgagaaaatggcggccgtaggagtagattcgaggcgtcctgagacagcgatggaggaaacctgtaacgtgaaaggagcggcggcgaaacaaggggaagggcttaagcagtactatctccagcacatccatgagctccagcgccagcttcgacagaagactaataacctcaatcgccttgaagctcaaaggaatgaactcaattctcgagtgagaatgctcagagaagagttacagctccttcaagaacctgggtcctatgtgggagaagtggtaaaagttatgggaaagaacaaggtcttggttaaggttcatccagaggggaagtatgttgttgatattgacaaaagtatagacattacgaaaatcactccatcaacgagagttgctcttcgtaatgatagctatgttctccacctggttctgccaagtaaagtagatcccttggttaaccttatgaaagttgagaaggttccagactccacctatgacatgattggtggtcttgaccagcagattaaggaaataaaggaggtcattgagctgccaatcaagcatcctgaattgtttgagtctcttggaattgcgcagccaaagggtgtgttgttatacgtccacctggaactgggaagacac

SEQ ID NO: 120899 - DNA, 611 bp, Arabidopsis thaliana
tttagttgtggttttggtattgcagacattaaaaataacaaaaccaagtggtttatagactcggtttattttgggtcgttcgttttccattttattctcacaaaacaaaaaatagtaaattgaacttacaaaaaaaaaaaagatgtcttgttggataatccaaggttcttttctatataaaggttctttgctcatgatcttagtccctgtgatctatctttgaatctcaaaagcatacttgagagagatctgcttcgataatttgcttcaatcaccgtgttcgatggcggccgctggagtggaggcgacacctcctgtgacagccatggacgaaacctgctacgttaagggagccgccgccaaacacggagaagggcttaacaagtactacctccagcatctcgattagctccagctcctgcctcgcgaaaagtcgtataaccttaatcgtattgaagctcataggaatgaactttattttcgagtacaaatgctcatagaagagttacagctcctttaccaacctgtgtactatgtgtgtgaagagcttaaagtgatggaaacaaacaaggtcttggttaacgttcatccagatgggaagtctgttgtcc

SEQ ID NO: 120900 - DNA, 601 bp, Arabidopsis thaliana
  unsure (1)..(601): unsure at all n locations
cttgaggattccgatagaggtagtccagcagtgatgaaatttagatctagattatcaaaggttcttgaatctgtatctcctgatgctgacatacaaaagatagtgggggatataaaatgcattttgcaagatgtgaatgcttgtatggaccaggaaaagccttctnaggtgcatgtncatcctgaagaagtgtcagatttatgtccagaacaaaatctggttgaagattgtcatttggcagaacaaaagctgcagagcattcaccaagatttgaaaaatgctgtatctcggattcatgattttgttttgttgctaagaaatgaggtaaaggcaggtcaggacacctctattgagggaaatgattttgttgagctgattgagggcttctccgtcacgttcaaccatgttttaagcggtgataaaagtttggacgattttgtttcgaatcttgctaatgtcttcaacgaggcgatggagcgaaaggtaagttttaggggtctagcttcctctgaggttgaaactctgagtccagattgcatagacaaggttgcattacccgagagcaaggttgtagataaagattcatctcaagaaatatatc

SEQ ID NO: 120901 - DNA, 510 bp, Arabidopsis thaliana
  unsure (1)..(510): unsure at all n locations
atgatactgccnnnnnnnnnnnnnnnnnnnnnnnnnnnnnnnnnnnnnnnnnnnnnnnnnnnnnnnnnnnnnnnnnnnnnnnccacgcgtccggatctgtgacctctcttcttctattgtgagaaagagatcaacaaatggagacaaagagcgaggagaagctaagtgtcatcgaactactaaaacgagctcttaagctactctttggtaacatcaatctcgctctcttcctctttctttgctctctcccactgttttgtttcttgatcttcttcgagctctccctccaaaccactgtctcactcgcttccacatacatctccaaactagtcaattctgaggaggacttgtcggagaatgatcttcttccttggctgattcagacaactctgctctacttctttccctatactattcttgacctcctttccaccaccacgatcgttgcagcatcatcgattgcttacacatctgaggaagagccgttaggggttgctttatttgggaagg

SEQ ID NO: 120902 - DNA, 393 bp, Arabidopsis thaliana
gactgacgatacaaactcgacgaagcaatgtggtctcttgcactaacgttaccatctccgtctttggtgtcggtgaggagcactaaactcggacgaagtgttagtaatggtggccggaattggtcgggacttactaagttgtcggagaaatcgaggactaaacgaggtaatggtctctgctgcaaggcggagctgtcggagctagctccagtcgtctctgctacttatggtgtacttcttctaggacgcggtctcttcgcttatagcaaatctggaagcaaaggttctctctttgggggtttgaccggttctgttcttatggcatctgcctacttccttactaaatcaccagagacaagagttctctgcgataccataggtcttggtgctgcc

SEQ ID NO: 120903 - DNA, 1385 bp, Arabidopsis thaliana
cgggcaccccctcggtgtcgacggtatcgataagcttgatatcgaattcgcggccgcttgcagcgctcctataatgagcttatggagtacaagttggttcttcagaaggctggtgagttcttttcttctgctcatagaagtgccgcagatcaacagagagagacagaatcacaacaagcgggtgaagatctgctggagtctcctttgttacaggaagagaagtccattgattcgacaaagcaagtaaagcttggatttcttaccggattagtgcctcgtgaaaagtctatggtctttgagaggattctgttccgtgcgaccaggggcaacatttttatccgacagactgtcattgaggagccagtcattgatcccaactctggggagaaggctgagaaaaatgtttttgttgtcttctattccggggaaagagcgaaaagcaaaattctgaaaatatgtgaagcttttggggccaatcgttatcctttcagtgaggaccttggaagacaagctcagatgataaccgaggtttctggtcgattatccgagcttaaaaccacgatagatgctgggttaggtcagcgtaacattcttttgcagaccattggagataagtttgaactatggaacctcaaggtacgcaaagagaaagctatctatcatacattgaacatgcttagtcttgatgtgacgaagaagtgcctcgtggccgagggctggagtcctgtctttgcatcaagagaaattcaagatgcattacagcgtgccgccgttgactccaattctcaagttggatcaattttccaggtcctaagaaccaaagagtcgccaccaacttattttcgcacaaacaaatttacttctgcaatccaggaaattgttgatgcgtatggtgtggccaagtatcaggaagccaatccaggtgtattcaccattgttaccttccccttccttttcgctgttatgtttggtgattgggggcatggaatatgcattctgcttgcaactatgtacttgatattgaaagaaaagaaacttgccagccagaaacttggggatattatggaaatggcttttggtgggcgttatgtcattttgatgatgtcactcttctcaatatacactggattaatctacaacgagttcttctctataccattcccattgtttgctccttcagcgtatgattgccgggatgtctcttgcagcgaagctacaacaattggtttgataaaggtcagagacacttatccatttggtctagatcctgtgtggcatggatcccgcagtgagctgccattcctgaactcgctgaagatgaaaatgtcaatccttctcggagtttctcaaatgaacctcggaatcataatgagctactttaatgc

SEQ ID NO: 120904 - DNA, 460 bp, Arabidopsis thaliana
tattctgactcactttagggaaagctggtacgcctgcaggtaccggtccggtattccacgggtcgacccacgcgttcggtgacgttgacgtaggatgatcgttgaggtataagcttggagagctagaagctgaacttgtggaaatcaatgctaataatgacaagttgcagcgctcctataatgagcttatggagtacaagttggttcttcagaaggctggtgagttcttttcttctgctcatagaagtgccgctgatcaacggagagagacagaatcacaccgagcgggtgaagatctgcatggagtctcctttgtttctggaagagaagtccattgattccgacgaggcaggtgaagcttggatttcttaccggattagtgcctcgtgaaaagtctatggtctttgagaggattctgttccgtgcgaccaggggcaacatttttatccgacagactgtc

SEQ ID NO: 120905 - DNA, 677 bp, Arabidopsis thaliana
  unsure (1)..(677): unsure at all n locations
nnnnnnnnnnnnnnnnnnnnnnnnnnnnnnnnnnnnnnnnnnnnnnnnnnnnnnnnnnnnnnnnnnnnnnnnnnnnnnnnnnnccacgcgtccggttgagagtaattcactacacacacacaaaaaataaattgagtgcctcccccaaaaacaaaattggtagataacgagcaattgttttttttcagatttgatcctgaatttttacatttttttttttgcaatctccccctaatctgttgtttctcgcttcttcttctgttaatcatctgtctttcaaaaagaaagaaaaaagaaaaattcgatttctgggtttgtttttgtcatacagaaaaaaatcaagcttatgaatttgtgtttaattttttgttttaatttgaaaggcaggttttttcagaacgagatcgttttttcaaatttcttctgattttacctctttttttcttcttagattttagtgaatcgagggtgaaatttttgattccctcttttcggatctacacagaggttgcttatttcaaaccttttagatccatttttttttaattttctcggaaaaatccctgtttctttacttttttataagtctcaggttcaattttttcggattcaaatttttattttaaatggcagcttctatgaatttgtacacttgtagcatatcgttttatgactct

SEQ ID NO: 120906 - DNA, 753 bp, Arabidopsis thaliana
  unsure (1)..(753): unsure at all n locations
cggaactctatacgattcatatagggcaagctggtacgcctgcaggtaccggtccggtattcccgggtcgacccacgcgtccgcacatatgtgatgaaatgcgggcacacaatgcactgtagaatgctacaacgagaggatcaaacgtgacaagttttgttgtccaatttgctcgaggtcagtgattgatatgtctaaaacatggcagagactcgatgaagagatcgaagccactgctatgccttcagattaccgtgacaagaaggtttggatacttttgcaacgattgtaacgacacaacagaagtgcacttccacataatcggacagaaatgtggacattgcagatcatacaacacacgagcgattgcgcctcctgttcttcctcaatgacaaaaccaatatcttcccatgtattgcctccagaaagcaagcaaaattttttttgctaaaaaagctgggggcttggttgggtggtcttcccaaggaaagagaaaaaaggggtgggggtcttttggtcttggccacaaagaaaaacccctttgtctttttatttgagggggggggtcttaaactgacattttccttnagggtggggttggaatgcaagatttcaaaaacccttttttttgggccgaaaagaaaaaagagtaatgactatcaaggggggggggggcgctttaagactaaattacaccggtggtggaggtatattttttatgggcccatattattccgggccggtttaaagggg

SEQ ID NO: 120907 - DNA, 834 bp, Arabidopsis thaliana
  unsure (1)..(834): unsure at all n locations
agcaaaacacacatttgtcttcttcatttgatttgttgttgttcttatactgtctctttggctttttctcctcctgttctcatggaagcttcacccaatgatcgacttcattttggcaaaatgggtttcgggtgtaagcattacaagaggagatgccaaatcagagctccatgttgcaacgaagtcttcgattgtcgccattgtcacaacgagagcactagcacattgcgcaatatctacgaccgtcacgatcttgttcgtcaagacgttaaacaagtgatttgttctgtttgcgatacagagcagccggcagctcaagtttgttcgaattgtggtgtcaacatgggagaatatttttgcagcatctgcatattctatgatgatgatactgaaaaacaacagtttcattgcgatgactgtggaatttgcagagttggtgggcgtgagaatttcttccattgcaagaagtgtggatcttgttatgcggttggtctgcgcaacaaccatcgctgcgttgagaattcaatgcgtcatcactgtcccatttgttacgagtacctttttgactctctaaaggacacaaatgtgatgaaatgcgggcacacaatgcacgtagaatgctacaacgagatgatcaaacgtgacaagttttgttgtccaattttctcgaggtcagtgattgatatgtctaaaacatggcagngnctcgatgaagggatcgagccactgtatgcctcagattccgtncaagaggtttgnactttncacggtttaacgcacacagngggccttcccanatnggcaaatttngcattnagnnttcaccnggnggng

SEQ ID NO: 120908 - DNA, 598 bp, Arabidopsis thaliana
acccatttctttaaagcttcaaatctatctctcacgaactcccaagctaacaacattcacaaggagagagaaacaataaagggcaaggaaaaagatcaaacctttttctttctttctttctcctgctctctgcaatttagaagaagatcgaagaatttgtttgttgtttatcttcttctataaaaacaaaccgtggggtctgttttcatttctggccttgcgattccgataaaactctcagcttcccattcaatccaatccaattccacttctcaaacatatatataattctatatttttgagagacagtttactttttctccttctctctctctctctctttctctttctctgtctctttggcttttctcctcctgttctcatggaagcttcacccaatgatcgacttcattttggcaaaatgggtttcgggtgtaagcattacaagaggagatgccaaatcagagctccatgttgcaacgaagtcttcgattgtcgccattgtcacaatggagagcactagcacattgcgcaatatctacgaccgtcacgatcttgttcgtcaagacgttaaacaagtgatttgttctgtttgcga

SEQ ID NO: 120909 - DNA, 503 bp, Arabidopsis thaliana
cagacgcgtgggcggacgcgtgggagccactgctatgccttcagattaccgtgacaagaaggtttggatactttgcaacgattgtaacgacacaacagaagtgcacttccacataatcggacagaaatgtggacattgcagatcatacaacacacgagcgattgcgcctcctgttcttcctcaatgacaaaaccaagatcttcccatgtattgcctccagaaagcaagcaagaactttttgttgctaaaaaaactgaggcatagattgatgatcataacaaagaaagaaaaagaaaaagattgatgatcaatttgatcattggtcacaaaagcaaaacacacatttgtcttcttcatttgatttgttgttgttcttatactgttacatttttccatttgtgtttgggtgttggaaatgcgaggattatgtataatatactctatattcttgatccaggaaaagttacctggataatatgttttcaggattttttacggggtta

SEQ ID NO: 120910 - DNA, 1069 bp, Arabidopsis thaliana
  unsure (1)..(1069): unsure at all n locations
ccttgccgtaccggtccggaattcccgggtcgacccacgcgtccgcaagtgtggcagttgatctaaaagctaatagtgaaacaaaccaggtcaatgtgggtatcaagagcataccaattgtcagttacccgcctaaggccaaatcaaagtcatctactttattggacttaggaattgaaaagtccatatttattaagccaagtacttttcacttgactgtggttatgctgaagttatggaacaaagatcgtgtcaatgcagcgtgtgatgttctgaagagtatatttcctagtgtgatggatgctttggataacaaaccagtattcattagacttaaaggattggattgtatgagaggaccattagacaagactcgtgttctctatgctcctgttgaagaaattggtgatgaaggccggcttttacgtgcttgtcttattactgatgcatttgtgaaagctgggcttgttctcgagaaagatgcaaagcaaagcttgaagctgcatgtgaccgtgatgaatgcgaggcacaggaaaaggagaaagaccaataagaagaagatggagacgtttgatgcaagagagatacacaaacagtttggaaacgaagactggggagaatatctgatccaagaagctcatctctcacagcgttttgtgttcgaccagaacggttattaccgttgctgtggttcaataccatttccaggagaacagagagcctgagaagaatcatctaaccagcggccacagtctcaaatctcaagcatcttcacaggttttggtcccgtggtatgagcacttacaactttgagaagagaacctgataaaattgtaaagttgtaccggtcatcttgtgttaaccaaatagttgtcttcggtttggttctttcttggtctttgttcaataaaccgagccaaaacgttcttgtactctttctacaaggtaataaaaaggttcttagtacaaaaaaaaaaaaaaaaaaagggcggccgctctagaggatccaagcttacgtacgcgtgcgtgcgacgtcatagtactactatagtgtcgacctaannnncgn

SEQ ID NO: 120911 - DNA, 1565 bp, Arabidopsis thaliana
  unsure (1)..(1565): unsure at all n locations
nnnnnnnnnnnnnnnnnnnnnnnnnnnnnnnnnnnnnnnnnnnnnnnnnnnnnnnnnnnnnnnnnnnnnnnnnnnnnnnnnnccacgcgtccgcgtttgcagaaagaggttataaaaggctccgaaatatttcatccgaaccataaacttgttaacacacctaaagaacaatgatgcagtaatgggaatgaatacacacgtccatttgactgctgtgatggaaaggattttataagcaaatagtcgtaaatactggcggaagaaaatgatattttacggctgaatcatcaccggagaatgagaggaagatgttcgcttacaggactctgtttaggattgaccgtgtatttgggtttacgagtagatgttttcaatcgaaaccggaatcttttagtatcctgagctttaggggaagtgagaagagtgccatgggtggatatatgaagcagaagatggtaaatttagtgtggagacccatctccactcaaacctcttcagttattgctgaagctggaaatgaagtccaagaagtagctcagtgtagcaaatcaagtgatgtttctaaggaagttattgaaggagagacagcttcagttgtttcagctggaaagcattcagtttctcttgaggttggggcttctttgattaagttcattagagggaaagaaggaacgacgcagatgaaacttgaagaggaaatgggagtgaagatcattcttccatcatcaaggaacaaagatcatatcagcattgaaggcggttcagtggattgtgtgactaaagcttcaaaaagaatagcaaccattatcgatgaggttgtaaggagtccaagtctcgactactcacactttgtatcacttccattagccatacatcctgagttagtggacaagctagtgaattttcagaattctatcctcgggatccatagcatagctagtgataagcaagacgaccaagctaatagagcaaccacaagtgtggcagttgatctaaaagctaatagtgaaacaaaccaggtcaatgtgggtatcaagagcataccaattgtcagttacccgcctaaggccaaatcaaagtcatctactttattggacttaggaattgaaaagtccatatttattaagccaagtacttttcacttgactgtggttatgctgaagttatggaacaaagatcgtgtcaatgcagcgtgtgatgttctgaagagtatatttcctagtgtgatggatgctttggataacaaaccagtattcattagacttaaaggattggattgtatgagaggnccattagncaagactcgtgttctctatgctccctgttgaagnaattgggtgatgaaggccggcttttaccggggcttgncctaattnctgatgcattttgtgaagctngggcttnttccncgggaaaggttcaaannaaaggtttaagnttnaangtgcccctgnttgattccggggccccggaaagggggnanggccnttngggggnnggttgggccggttttttcaagggggtcccaacccgtttgaccggggcctggggnantttncccgggg

SEQ ID NO: 120912 - DNA, 409 bp, Arabidopsis thaliana
cttctccttagggtctatctctcttatcttaagcagcagcagcagcagcagctagaacaaaaacgtcaccgatggcgtctcaagctgcgaatctctgggttcttctaggtttaggtctcgctgggattcttatgcttaccaaaaagctgaagaagaccgtccgtgaagatttcggcgcttttatcgataaactcatgcttcttccccctccgcaacctgctcctcccaaagctcctcatcctctcaccggtctaacctttgccgtttccgacgtatttcggtattacagggtatgtgactggatttggtcatccagactggggtcaggacccatgaagctgcttcgtcaacatctcctgtggtttcaactctcgttgaaggtggagccacttgtgttggaaaaactgta

SEQ ID NO: 120913 - DNA, 716 bp, Arabidopsis thaliana
  unsure (1)..(716): unsure at all n locations
nnnnnnnnnnnnnnnnnnnnnnnnnnnnnnnnnnnnnnnnnnnnnnnnnnnnnnnnnnnnnnnnnnnnnccacgcgtccgcccacgcgtccgcggacgcgtgggggaagagttgtgttcaataccaaaggccttctctacccagacagcgtggttggaactgattcacatacaactatgattgatggtttgggagttgctggatggggtgttgggggtattgaagctgaggcaacaatgcttggccagcccatgagtatggtattgcctggtgttgttggattcaaacttgccggaaaaatgcgtaatggtgtaacagctactgatttggttctaacagtgactcaaatgctgaggaagcatggcgttgttggaaagtttgttgagttttatggtaatggcatgagtgggctgtccctagctgacagggcgacaatttgccaataatgtcctccccgagtatgggtgcaaccattggggcttcttcccctgtggatccatgttacctctacaatatcctcaaaattgacctggaagaagccatgngacaagtggctaatgnatttaagnataantttcggggctaacaaaaatggtttttgnccncaaatnggccttagcaagacccgggttactncgcaaaatttgncctnatntggntnatgttanccttnattttggccaagggcccatncncggtncnttaaggattanggc

SEQ ID NO: 120914 - DNA, 766 bp, Arabidopsis thaliana
  unsure (1)..(766): unsure at all n locations
nnnnnnnnnnnnnnnnnnagggaaagctcgtacgcctgcaggtaccgggcccgaattcccgggtcgaccccacgcgtccgacaatacacacttcttctcttaacaacacaacacaactttgaatttttcaccctcactttcatttatctcaaatctccttccagaaaagcgagggaatagtgttgttgagaggtttgtgatttccttttgaaaaaatgatggcttgtggcttaagcaagagccttggcttgtcttcctccttgaagaagcaacaaggcatagtgagtatccttggtggcatttcgtcgaacacttcatctgcaccttcacttaggcgaactttctccgccgatttgtcctccaagacttgggtttcccaaaatgggttttctcctatgaagagaatctcttcctctgagaagcttcgtcctgacgaagaagaagcagaggaagaatcaagatccggagtcgatatctgggcacagattcaacaagacaagaacgataagaagaaagaggaagagatcgagccgggtcaatccgatgtatggagctcgattttgtctgagaagaagaagactgaatcgagcaaggacactgttcctccaccgtatgttcatccattgatgaaacgtgcgagttccttgagtgagaaaagcctcgagatttgtactgagagtctcggatccgagactggttgcgatggtttctcttcgcatgcatcgtcggagactggagatgctgagatcgagattcatgatgagac

SEQ ID NO: 120915 - DNA, 636 bp, Arabidopsis thaliana
tacggctgcgagaagacgacagaaggttacggctgcgagaagacgacagaaggggccagcgaagaagaaagaaaaaaaaaaagcgtattcctcgtgagcactaacttctcactcattcttcttcttcagctgaatccaaatacccatttccatttttaaccgtggttggattgttttgagagttgaaggaagaagatgacgtctgacggagcaacgtcgacgtcagctgcagctgcagcagcagcgatggcgacgaggaggaaaccgtcgtggagagagagggagaacaatcggagaagagagcggcggagaagagctgttgcggcgaagatttatactggtcttagagctcaaggtaactacaatcttccaaaacattgtgacaacaatgaggttcttaaggctctttgttctgaagctggttgggttgttgaagaagacggaactacttatcgcaagggacacaagcctctacctggtgacatggctggatcatcttctcgagcaactccttactcttcccataaccaaagtcctctttcttccacttttgatagccccatcttatcttaccaagtcagtccttcctcttcttcattcccgagtccttctcgagttggtgatccacacaatatc

SEQ ID NO: 120916 - DNA, 430 bp, Arabidopsis thaliana
ctatgacgccgcatgcacgcgtacgtaagctcggaattcggctcgagaaagcgtactgcttcttcaaaacgcgaaaccacactgtaagttacgtacaccaccacctatcctcaccattcatcatcgacacgtggctggtttaactcatatcaccggaagaagatgacgtctgacggagcaacgtcgacgtcagctgcagctgcagcagcagcgatggcgacgaggaggaaaccgtcgtggagagagagggagaacaatcggagaagagagcggcggacaagagctggtgcggcgaacatttatactggtcttagagctcaaggtaactacaatcttccaaaacattgtgacaacaatgaggttcttaaggctcttggttctgaagctgggtgggttgttaaaaagacggaactacttatccgaagggaca

SEQ ID NO: 120917 - DNA, 433 bp, Arabidopsis thaliana
accacgcgtccgctaattcaaattttctccattctctcgttccaattattatttacttttttcacccaataaaaaaaaaaccatgcattcacttccggtgaatctcgtcctcaccgtacttacggtgttcctaacatcaccggcgcaagttatcggataccgtccatatccaccaaaaaccaacggctccgatcaaatcttcgacgcttcaaaaaaattcgaaggctcatcgaatctcgtccgcctccgttaccacatgggtccagtcttaaccaacaacatcaccgttcacccaatctggtacggcacgtggcaaaaatcccagaagaaaatcatccgtgagttcattaactcaatctcagccgttggatctaaacacccttcagtctccggttggtggaaaaccgtacagctttacactgaccaaactgga

SEQ ID NO: 120918 - DNA, 963 bp, Arabidopsis thaliana
  unsure (1)..(963): unsure at all n locations
aatacgactcactttagggaaagctcgtacgcctgcaggtaccggtccggaattcccgggtcgacccacgcgtccgtaaaatcaagaaaccatgtctgcgagtgttctaagtgatccaacaatgctaatttcaacatccggaggtaatactcgtctctccggtatcggttactcaaatctccggagatgagccagattcggtgacgtgtgattgttgcggattaaccgaggagtgtacccaatcgtacatagagatggtcagagagcgttacatggggaaatggatctgtggactttgttctgaagctgtgaagtatgaagtcatgagaacgaaaagattgttaacgacagaggaagctatggccagacacatgaacatgtgtaataagttcaaatcctcaagcccaccaccgaatccgacaggacatttgatctctgccatgagacagatcttgagaaaaagcttagattcaccaagaatgcttagatctatgcctaatagtccatctaaagacgaccaagatcatcatcatgattgtgtttctaatgttttgtctaggtctgatagctgtttcgctagtttgacttgaaaaaagctcatcgttgaaaaaattgttttaaaccgtcggtttagggacccacttggatcaaatccggttttctgatttgaaattttcgtcggtaaatcaaaaattggtttctgtatgtgtttttgccggatttgttgttgtacttttggaaaattttgggctaaaagaataatttggtgctctgtttctgtcttttattctttctccaattgctagctaatattcggaattctgttgctgtgagcttagttaaacaagaacaaaatgaaatgaaaatatgtttatactaaaaaaaaaaaaaaaagnnnnnnnnnnnnnnnnnnnnnnnnnnnnnnnnnnnnnnnnnnnnnnnnnnnnnnnnnnnnnnnnnnna

SEQ ID NO: 120919 - DNA, 456 bp, Arabidopsis thaliana
ggcactacatcttctctctcttcttcgctcattctctcttcctcatatatttccaaaacaatacctttcttcttctctcttcagaagaaacgagagattcgagtgatgttttatgaactactactagtgtttttttccgtgaagtaaagagaaacgaaacagagacataagaagaaaatagatcacaagctaattgcgttctcttctcttcttcttctactgggttttaaaatcaagaaaccatgtctgcgagtgttctaagtgatccaacaatgctaatttcaacaccggaggtaatacttgtctctccggtatcggttactcaaatctccggagatgagccagattcggtgacgtgtgattgttgcgggttaaccgaggagtgtacccaatcgtacatagagatggtcagagagcgttacatggggaaatggatctgtggactttgttctgaag

SEQ ID NO: 120920 - DNA, 639 bp, Arabidopsis thaliana
  unsure (1)..(639): unsure at all n locations
ctaccgcggacgcgtgggttcacgctcattctctcttcctcatatatttccaaaacaatacctttcttcttctctcttcagaagaaacgagagattcgagtgatgttttatgaactactactagtgtttttttccgtgaagtaaagagaaacggtaactttttctatttgttttcaagaaaagccaaagaaaaaaagaatttttaatatactctgttttttgcaatgattttgttttgtgaaatttttctcggagaagaaagtaatttagaagacggagagtggcaaaacgaaatataaaaaaaaaagttttcaatttcttttaagaaaaaaaaagctttttcccttcttaaaacccttcctctgtttcagaaacagagacataagaagaaaatagatcacaagctaattgcgttctcttctcttcttcttctactgggttttaaaatcaagaaaccatgtctgcgagtgttctaagtgatccaacaatgctaatttcaacaccggagggaatactcgtctcgccggtgccggttactcaaatctccggggatggagccagattccgggacctgtgtgctgttgcggattaaccgagggggtcacaatcgtccatagggtgnnnagggnggtncatggg

SEQ ID NO: 120921 - DNA, 746 bp, Arabidopsis thaliana
  unsure (1)..(746): unsure at all n locations
nnnnnnnnnnnnnnnnnnnnnnnnnnnnnnnnnnnnnnnnnnngcctgcaggtaccggtctcggattcccgggtcgcaactctttataccagcctctgtaacgttcgatcatcttgtatttcatttcaaccactcattgtttttagtttgttttacgaagaatcaactatggcgacgaagagaagcgttggaactttgaaggaagcggatctgaagggaaagagtgtgttcgtgagggttgatctcaacgttcctttggatgataactctaacatcaccgatgacaccaggattcgtgccgctgttcccaccatcaagtacttgatgggtaatggatctagggttgttctctgcagtcacttgggccgcccaaaaggtgttactcctaagtacagcttaaagcctcttgtgcccagattgtctgaacttcttggtgttgaggttgtaatggcaaatgactctattggtgaggaagtccagaagttggttgcaggactacctgaaggtggtgttttgctcttggagaatgtgaggttctacgccgaggaagagaagaatgaccccgaatttgcaaccacgcttgctgctcttgccgacgttcaccatacccgcacgccttctgaacctgctcccagagcttcactgcttccccctgcagggagtttgcccaaaattccttgcaaacccctttaaacccggcgcttggtttttacctcccatgcgccaagaatcggtgaaaacttctg

SEQ ID NO: 120922 - DNA, 1547 bp, Arabidopsis thaliana
agctgctacgcctgcaggtaccggtccggaattcccgggtctacccacgcgtgcgcaccaactctttataccagcctctgtaacgttcgatcatcttgtatttcatttcaaccactcattgtttttagtttgttttacgaagaatcaactatggcgacgaagagaagcgttggaactttgaaggaagcggatctgaagggaaagagtgtgttcgtgagggttgatctcaacgttccttttggatgataccctctaacatcaccgatgacaccaggattcgtgccgctgttcccaccatcaagtacttgatgggtaatggatctaggggtgttctctgcagtcacttgggccgcccaaaaggtgttactcctaagtacagcttaaagcctcttgtgcccagattgtctgaacttcttggtgttgaggttgtaatggcaaatgactctattggtgaggaagtccagaagttggttgcaggactacctgaaggtggtgttttgctcttggagaatgtgaggttctacgccgaggaagagaagaatgatcctgaatttgcaaagaagcttgctgctcttgccgatgtttacgttaatgatgccttcggaactgctcacagagctcatgcttccactgagggagttgccaaattcttgaagccttcagttgctggtttcctcatgcagaaggaacttgattaccttgtcggagctgtggcaaaccccaagaagccttttgctgccattgttggaggctcaaaggtttcaacaaagattggtgtcattgagtctctcttgaacacagttgacatcctcctgctcggtggaggtatgatttttactttctacaaggcacaaggactctcagtcggatcttcccttgtggaggaggacaagcttgacttggcaaagtcactcatggagaaagcaaaggccaaaggtgtctctctcttgctcccaaccgatgtggttattgctgacaagtttgctcccgatgctaacagcaagatagtgccagccactgccatccctgatggctggatgggtctagatattggtccagactccatcaagacattcagcgaagctctggacacaaccaaaaccatcatctggaatggtcccatgggtgtgtttgaattcgataagtttgctgctggaactgaggccgtagcaaagcagcttgcagaactaagcggaaagggagtaaccacaatcattggaggaggtgactctgttgctgccgtcgagaaggttggtttggcagacaagatgagccacaatcttctaccggaggcggtgcctagtttggagcttcttgagggtaagccacttcccaggagtcctcgctctcgtcgaagcttgaaaaccctcacggtggatttctcctgcttttttgtggtagccaatgatagcacaagcctgtacggatatctttgtgaaccgacaaaccagcctttatatattacttagatattttcgctgtacggtatttttttatgagtgttaaagatgggagcctttttttaattttaagagatgaaactctgt

SEQ ID NO: 120923 - DNA, 547 bp, Arabidopsis thaliana
  unsure (1)..(547): unsure at all n locations
caaaaccatcatctggaatggtcccatgggtgtgtttgaattcgataagtttgctgctggaactgaggccgtagcaaagcagcttgcagaactaagcggaaagggagtaaccacaatcattggaggaggtgactctgttgctgccgtcgagaaggttggtttggcagacaagatgagccacatctctaccggaggcggtgctagtttggagcttcttgagggtaagccacttccaggagtcctcgctctcgacgaagcttgaaaatcctcacgttggatttcatcgctattttgtgttgttatatgtataacaagtcgtctggttatcttgtgaccagacgagcaagccattatttatcagcttgagattttcgtctacggctctctttttatgagttttttagtttggagcctttttttaataataagagatgaaactctgattgacgacaaaaaaaggaaagaagtgaaactctgattagcaaaaaannnnnnnnnnnnnnnnnnnnnnnnnnnnnnnnnnnnnnnnnnnnnnnnnnnnnnnnnn

SEQ ID NO: 120924 - DNA, 507 bp, Arabidopsis thaliana
aatcaccttaccctatttaatattcatatcgcaacttctctcccccgttcgacccacgcgtccgcgaagcaggaacgagtgaaactgaaaaccatggagatggagaaaaaccaacacatttcttcgctggacatccccgttattgatctaagtaatcccgatgaagagcttgtggcaagtgcggtggtcaaagcgagccaagagtggggaatatttcaggtggttaaccacggaatcccgaccgagctgatactgcggttgctacaagtgggaatggagtttttcgagctaccggagacagagaaggaagccgtagcgaagccagaagactccttggacatagaaggatacagaaccaagtaccagaaagatctagaaggtagaaacgcatgggtggatcatctctttcaccgcatctggccaccgtctagagtcaatcacaaattctggcctaagaatcctccagaatccattgaagtgaatgaagagtacgcaagtcacataaag

SEQ ID NO: 120925 - DNA, 368 bp, Arabidopsis thaliana
  unsure (1)..(368): unsure at all n locations
gnaaaaatcataaagaaaaaaaagtaaagagatgaagacagcagagctcatattcgttcctctgccggagaccggccatctcttgtcaacgatcgagtttggaaagcgtctactcaatctagaccgtcggaggtctatgattacaatcctctccatgaatcttccttacgctcctcacgccgacgcttctcttgcttcgctaacagcctccgagcctggtatccgaatcatcagtctcccggagatccacgatccacctccgatcaagcttcttgacacttcctccgagacttacatcctcgatttcatccataaaaacataccttgtctcagaaaaacatccaggatttagtctcatcatcatcatc

SEQ ID NO: 120926 - DNA, 458 bp, Arabidopsis thaliana
ccacgcgtccgttactctaattaaaatggctgttcccacgggaagcgccaatctctttctccggcctctcatcctcgccgttctctcctttcttcttctctcttcattcgtctcctctgttgagtggctcgatatcgattcctcagatctcaaagctcttcaggtcatcgaaacagagctcggagtcaacagtcaacgttcttcggccagtgatgtcaacccttgcggtcgccgaggagttttctgcgagagacggcactctgccaccaccggagaatacgttctccgtgtcacgaggctcgtctaccgatccaggagcttgacggggactatctctccggtcatcggaatgttgtcggagctcaaggaacttactttgtctaataaccagttggtcaacgctgttccggtggatatcttaagctgtaagcaacttggaagtcttgatctttcggaaa

SEQ ID NO: 120927 - DNA, 1272 bp, Arabidopsis thaliana
  unsure (1)..(1272): unsure at all n locations
atacgactcactttagggaaagctgctacgcctgcaggtaccggtccggaattcccgggtcgacccacgcgtccgcgttgatcctatcataagctttttttcgtttatcaatcttctcgattcagccacaattcttgtttctcagataattcatctcctttctttgattcgtttccttctcttctgtcactcagatctagatctagatctaggtttttttctttctcatcggaaatttggcttagaggcttgttttgatctagggtttggtttttgggaattttgaaaaaaaaacaaaattaggaatgaatctatgagctactcaatcctgtttcgtcggattcgaattctacactctttctccgtcgtttacctctactacacctacgttttctcatgaagtaatcgttctcgatctcagttttcgtttttgatctaacttattctttgatagatttagaaatcggggattttcagattgtgtttttgagaggtttttataggaaaatatctctagaagaagaagaataatattatattgattttaattttggtgagaagaagtcaaaaagtcaacgagaaatggggtcgttgcaaatgcaaacaagtcctgaatccgataatgatccgaggtacgccccggtgacggatgagaggaagaggaagagaatgatctctaacagagaatctgctcggaggtcaaggatgaggaaacagaagcaacttggtgatttgatcaacgaagtcactcttctcaagaatgataacgctaaaatcactgagcaggttgatgaagctccaaaggaaatccattgaatgggagtctaaagaacaatgttcttgggggccaccaggctccggagttggccggatgggttgagatcattggaactcctgtgcttgagattggttgaaggaaattaggtggtcaggctttggatattcctgagatccctgaatctatgcagaccccttggcagatgccttgtccaatgcaaccaatcagagcttctgctgatatgtttgattgctgaagatggatgattcatatctgaaggatcaaaaatgaagcattgagttcgagtctttggtctgttttacttactgtccttgttgtaacaattagtgtgtcattggtgaattgagtcttgtgttgtcaatggacaacgcaatctttatgcaaaaaaaaaaaaaaaaaaaaaaagnnnnnnnnnnnnnnnnnnnnnnnnnnnnnnnnnnnnnnnnnnnnnnnnnnnnnnnnnnnnnnnnnng

SEQ ID NO: 120928 - DNA, 820 bp, Arabidopsis thaliana
  unsure (1)..(820): unsure at all n locations
nnnnnnnnnnnnnnnnnnnnnnnnnnnnnnnnnnnnnnnnnnnnnnnnnnnnnnnnnnnnnnnnnnnnnnnnnngtgggtcgacccacgcgtccgtacggcggcgtgatgacgacagaagggggaggtcaaggatgaggaaacagaagcaacttggtgatttgatcaacgaagtcactcttctcaagaatgataacgctaaaatcactgagcaggttgatgaagcttcaaagaaatacattgaaatggagtctaagaacaatgtcttgagggcacaggcttcggagttggcggataggttgagatcattgaactctgtgcttgagatggttgaagaaattagtggtcaggctttggatattcctgagattcctgaatctatgcagaacccttggcagatgccttgtccaatgcaaccaatcagagcttctgctgatatgtttgattgctgaagatggatgattcatatctgaaggatcaaaaatgaagcattgagttcgagtctttggtctgttttacttactgtccttgttgtaacaattagtgtgtcattggtgaattgagtcttgtgttgtcaatggacaacgcaatctttatgcaatttcaatttgttcgtgtctttgtatggttttgtagcctcagtcctctagtcttgtgtctcatgtaattggtgtctaatgtgtttcttattgaattcaagctttcttatttnnnnnnnnnnnnnnnnnnnnnnnnnnnnnnnnnnnnnnnnnnnnnnnnnnnnnnnnnnnnnnnnnnnnnnnnnnnnnnnnnnnnnnnnnnnnnnnnnnnnnnnnnnnnnn

SEQ ID NO: 120929 - DNA, 986 bp, Arabidopsis thaliana
agctctggtatctaacaatcatgaggcgtactcaagttgtctacctaaatgtgtcaaaatattagaacgccttgctaggaaccaggatgttcctcaggagtacacatactatggcatcccatctccttggctccaggttaaggcaatgagggctcttcaatattttccaaccattgaagatcccagtaccagaaaagctctctttgaggtccttcagcgaatattgatgggcacagatgttgtgaaaaatgtgaataaaaacaatgcgtctcatgccgtgctgtttgaagctctctccctggtcatgcatcttgatgctgagaaggaaatgatgtcacagtgtgttgctcttcttggcaagtttatttctgtccgtgagcccaacatcagatatctaggcttggaaaatatgacgcgaatgctgatggtcacagatgttcaagatatcataaagaagcatcagtctcagataatcacctccttgaaagaccctgacatcagtattcgtaggcgcgctcttgatttgttatatgggatgtgcgatgtgtcaaatgcaaaggatatagttgaagagttgttgcagtatcttagcacagcagaattttctatgcgggaggaattatcacttaaagctgctattcttgctgagaagtttgctcctgatctttcatggtatgtagatgtgatccttcagttgatcgacaaggctggggattttgttagcgatgacatttggtttcgtgtggttcagtttgtaacaaataatgaagacctgcagccttatgcggcatcaaaagcaagagaatatatggacaaaattgcaatccatgagaccatggtgaaggtcagtgcttatattttgggggagtatggtcaccttttagctagacaacctggatgcagtgcaagtgaactctttagcatcttacatgagaagctccctacagtatctactacgaacattcctattcttctttctacatatg

SEQ ID NO: 120930 - DNA, 780 bp, Arabidopsis thaliana
  unsure (1)..(780): unsure at all n locations
cagctactcnnnnnnnnnnnnnnnnnnnnnnnnnnnnnnnnnnnnnnnnnnnnnnnnnnnnnnnnnnnnnnnnccacgcgtccgctcgcggctcagcagcagcagcttataacgacggatcttacttccattatcatacagcttatttcaactgcagagtcagaacaataacaactgtggtgctcgagagttcgatttgcctaagccggttcttgttgatgagagggaaggtcatgttgtggaggaacatgagatgaaagatgaagatgatgtggaagaaggagagaaccttcctcccggttcgtatgagatattgcagcttgagaaagaagagattctcgcaccgcatactcacttctgcacgatatgtggcaagggtttcaagagagacgcgaatttgaggatgcatatgagagggcatggagatgagtacaaaacagcagctgctctggcgaaaccgaacaaagaatccgtacccgggtctgagccgatgctgatcaagaggtactcgtgcccattccttggttgcaaacgtaacaaggagcacaaaaagttccagcctttgaaaacgattctatgcgtgaagaatcactataaacgcacccactgcgataaaagcttcacttgcagccggtgccataccaagaaattctctgtcattgcagatcttaaaacccacgagaagcactgcgggaaaaacaagtggctttgttcctgtggtacaacattttcaaggaaagacaagttgtttggtcacatagctctgttccagggacacac

SEQ ID NO: 120931 - DNA, 397 bp, Arabidopsis thaliana
ctctctctctctgtgttttttttaactccgtttaaattttccgtctgaattttacaaaggaacactaatgtcagcttttgacggcgttgaaaatcaaatgaacggtccagattcatctcctcgtctctctcaagatcctcgtgagcctcgctcattattatcatcttcttgtttcccaatcaccctcaagttcgttgatgtgtgttaccgagtcaagatccatggcatgagtaacgattcttgtaatatcaagaaactattaggattaaaacaaaaaccgtccgatgagacaagatcgacggaggagaggacgatactaagcggagtcaccggaatgatatcacccggcgagtttatggccgttcttggaccatcgggaagtggcaaatctacgcta

SEQ ID NO: 120932 - DNA, 529 bp, Arabidopsis thaliana
aaaatttcagcgtttccgaactttccattagagtcgcgagacgatagatgagactcgttccagaaatttaatcgttgcttctcttccccgcgcgtccgcgtccaacatcactgtttccaggatcttcagaatcagcgaaggaagaagataagaggacgacgaagtaattgaagttggagaatcgcacatttggctctcgatatttgctcaatgacttcttattcgaggtagccttcaatttaggatcggagttcgtaaataaggtgatttagcgaagatgatggtcgaagatcttggtgtggaagcgaaggaagcggctgtgcgagaagtggcgaagctcttacccttacctgaacttttgcagtctatttcttcaatcaaggccgattacatcgctcgtcaacaggcaaatgatgcacagctcagtactatggttgctgagcaggttgaacaagctcaagctgggttagagtcactttcatcatctgagaaaaccatttatgaactgcgggataatttcatttctatg

SEQ ID NO: 120933 - DNA, 437 bp, Arabidopsis thaliana
gacatacatctgatctcaagtgatttcaagtggttggttctgttccttttctcgtccccgatcaagtttcttctcctaaactccagaatttggtcttgaagatctctaaaggctcttcctttttgttcatttctctacccagatatcgatgggtacatacctaagttctccgaaaactgaaaagttatcagaagatggtgagaatgataagctcagatttggtttatcgtctatgcaaggttggcgcgctaccatggaagacgcgcatgctgcaattcttgatcttgatgataagacatcgttcttcggtgtgtatgatggccatggaggtaaagtcgttgcaaagttctgtgccaagtatctacaccagcaggttatcagtaatgaagcgtataaaactggagacgtcgaaacatctcttcgaagagcattcttta

SEQ ID NO: 120934 - DNA, 1353 bp, Arabidopsis thaliana
cagctctactacgactcactatttggaaagctggtccgcctgcaggtaccggtccggaattcccgggtcgtcccacgcgtggcgccacgcgtccgcccacgcgtccgcccacgcgtccggattgatgtgtttgatcccaagttcaacattgtctctcctggtgctgatatgagcatctacttcccttacacagaggagaagcgtagattgactaagttccactctgagatcgaggagctcctctacagcgatgttgagaacaaagagcacttatgtgtgctcaaggacaagaagaagccgattctcttcacaatggctaggcttgatcgtgtcaagaacttgtcaggtcttgttgagtggtacgggaagaacacccgcttgcgtgagctagctaacttggttgttgttggaggagacaggaggaaagagtcaaaggacaatgaagagaaagcagagatgaagaaaatgtatgatctcattgaggaatacaagctaaacggtcagttcaggtggatctcctctcagatggaccgggtaaggaacggtgagctgtaccggtacatctgtgacaccaagggtgcttttgtccaacctgcattatatgaagcctttgggttaactgttgtggaggctatgacttgtggtttaccgactttcgccacttgcaaaggtggtccagctgagatcattgtgcacggtaaatcgggtttccacattgacccttaccatggtgatcaggctgctgatactcttgctgatttcttcaccaagtgtaaggaggatccatctcactgggatgagatctcaaaaggagggcttcagaggattgaggagaaatacacttggcaaatctattcacagaggctcttgacattgactggtgtgtatggattctggaagcatgtctcgaaccttgaccgtcttgaggctcgccgttaccttgaaatgttctatgcattgaagtatcgcccattggctcaggctgttcctcttgcacaagatgattgaagagaagagaaaagactcggaaccagtaaagagtttgaagagagtggttccggtgtttgaagaataaaacaagatctccttttgattcttattatcattcggattgggaagcgcattttgtgttcctctgcttctttgttatttcaatcatttgtctttgttttcctttgcctctgtggcattgctttgaattctggctgttgggagattccccttctaattgcagtaaagtgtcttttgcaaaaaaaaacaaaaaaagaaaaaaaaacaaaagggcgaccgctctagaggatccaagcttacgtacgcgtgcgtgcgacgtcatagtcttctatagtgcaccta

SEQ ID NO: 120935 - DNA, 800 bp, Arabidopsis thaliana
agctgctatacgactcacttagggaaagctggtacgcctgcaggtaccggtccggaattcccgggtcgacccacgcgtccgtctctctacaaaaaaaacagtagagagagatatagagagcatcaatggcgtcgtcgtcaagactttgcgattcgtgcaaatcgacggcagcaactctattctgccgcgcagacgccgcgtttctctgcggcgactgcgacggtaagatccacacagctaacaaactcgcatcacgtcacgaacgagtttggctatgtgaagtatgcgaacaagcaccagcacacgtcacgtgcaaagctgacgccgctgcgttatgcgtcacgtgcgaccgtgatatccactcagctaatccactctctcgccgccacgagcgcgtaccaatcactcctttctacgacgctgtaggtccagcaaaatccgcttcctcctccgtcaatttcgtagatgaagatggcggtgacgtcactgcttcgtggcttttagctaaagaaggaatcgaaatcactaatttgttctccgatcttgattatccgaagattgaggtcacgtcggaggagaatagctccggtaacgacggagttgttcctgtgcagaataagttgtttctcaacgaagattacttcaatttcgatctctctgcttccaaaatttctcaacaaggattcaatttcatcaaccaaactgtttcgacgagaacgatagatgtaccgttggtgcctgaaagtggaggagtgaccgccgagatgacgaacacggagacgccagctgtgcagttatca

SEQ ID NO: 120936 - DNA, 1235 bp, Arabidopsis thaliana
  unsure (1)..(1235): unsure at all n locations
gccggctctatacgactcctatagggaaagccggtacgcctgcaggtaccggtccggttaacgtctgtctctttcttcttctttactttttcttcttcttttagatcaaagaaatcgttttgtgcagatttgatcttgcgttaattttctaagcaaaatatggcgggagaagatagccgtgaagctcaacgaggcgacgaatatgaggaatcgagtcctctcttgaaggtgaacgagaatgacggcaagatctgctcgaaaagagatgccaaggcggcgcctcttgtgcctcctcccgcggcggaggaatacggctggacggcggatggattgcctgtgagccatggtagcgtgattggcgagccgatcaggagaaaccagtggaattctggtctttttacctgtcttggtcgcaatgatgaattttgcagcagcgatctcgaagtttgtcttcttggaagtgtggctccttgtgtgttgtatggaactaatgcagagagacttgggtctgctccgggaacattttcaaaaccattgcttgacgtatttgggattgtactttgtttggtaattctttgtttggctggaactgtcttgctccatgggtctcttattctagccgttctgctattcgccgaaagtttaaccttgagggaagctttgaggctatgaacaggtcttgtggttgctgcggtggctgcatagaggacgagatgcaaagggaacacttggagacgacttgtgactttgtgacacatgtcctttgccatacatgtgccctttgccaagaagggcgtgagctccgcaggaaggttcttcacccaggtttcaatgctcagtccaccgttgttgtgatgccacccatagaacaaaccatgggtcgtaagtgaagcttacatagagtcgagtggtctaaagagcacttgtaatattgagtcgactgaagcttacacacgttgtgaaaacaagtgtttctgtggaacttgaatcatgatccttgtcttttgcttactttttgaataaggccttctctggatgtaatttgtcgtgtgtctttcttttgctatcgaaaaacaaacatatgtatatctttattgcttacgcatttcttttgacattgtctaaaaaaatcatttgtttcacaaaaaaaaaaaaaaagnnnnnnnnnnnnnnnnnnnnnnnnnnnnnnnnnnnnnnnnnnnnnnnnnnnnnnnnnnnnnnnnnncgtcctcaat

SEQ ID NO: 120937 - DNA, 962 bp, Arabidopsis thaliana
  unsure (1)..(962): unsure at all n locations
atgatatgccagctactnnnnnnnnnnnnnnnnnnnnnnnnnnnnnnnnnnnnnnnnnnnnnnnnnnnnnnnnnnnnnnnnccacgcgtccgctggtttcggcgatctaagtcacctcacttctctttcgatttatagaaacaacttctccggtgaatttccggttaacatcggccggttctcgccgctcgacacggttgatatatctgaaaacgagtttactggtccatttccaagattcttatgccaaaacaagaaactacaattcttgctcgccttgcagaacgagttttccggcgagattccgagatcttacggcgagtgcaaatctctattgagactaaggattaacaacaaccgtctaagtggtcaagttgttgaaggattctggtctctaccgcttgctaagatgattgatctcagcgataacgaactcaccggagaggttactcctcagattggactttcaacagaactgagtcagctctttttacagaacaacagattttccggcaagattcctcgtgagctcngaagattgactaatatagagaggttttatctgagcaacaacaatctttccggcgaatttccgatggaagttggagatttgaaagagttatcatctctgcatcttgaaaacaattcattaacaggatttatccctaaggaattgaagaattgtgtcaaacttgttgatctgaatctcgctaagaacttcttgaccggagatatccctaacagtttatctcagattgctgctttaaactcggtggatttctcagggaataggcttacaggggaaatcccggcgagcttgtgaagctgagctgagttcatattgacttgtctggaaatcaactttcaggaagaataccaccggatcttttagcggtgggaggatccaccgcgttcttacgtaacgagatgctctgtgttgataaagagaacgctgaaacaaa

SEQ ID NO: 120938 - DNA, 556 bp, Arabidopsis thaliana
  unsure (1)..(556): unsure at all n locations
tataggcgattgggtaccggacccccctcgaggtcgacggtatcgataagcttgatatcgaattcgcggccgcgcaagattcctcgtgagctcggaagattgactaatatagagagggatttatctgagcaacaacaatctttccggcgaaattccgatggaagttggagatttgaaagagttatcatctctgcatcttgaaaacaattcatttacagggtttatccctaaggaattgaagaattgtgtcaaactttgttgatctgaatctcgctaagaacttcttgacccggagaaatccctaacagtttatctcagattgcttctttaaactcgttggatttctcagggaataggctaacaggtgaaatcccgggcgagtcttgtgaaggtgaacctgagtttcattgacttgtctggaaatcaactttcaggaagaataccaccggatcctttagcggggggaggatccaccgcggtctcacgtaacgagaagctctgtgttgataaagagaacgctaaaacaaatcagaacttgnggttgagtatttgcagt

SEQ ID NO: 120939 - DNA, 502 bp, Arabidopsis thaliana
  unsure (1)..(502): unsure at all n locations
nnnnnnnnnnnnnnnnnnnnnnnnnnnnnnnnnnnnnnnnnnnnnnnnnnnnnnnnnnnnnnnnnnnnnnnnnnnccacgcgtccgcccacgcgtccgcccacgcgtccgcccaaatctgacgcttctctctctctttctggtatctgcgtttgattcggagaagaaaaaaaaaaaaaaggcaaagagagagcttcaatggagttagcttctttccttggtagagctctgtttgtttccgtatttcttctctccgcatggcaagagttcaatgattttggtgaagatggtggccgatcagctaaatctttgaaaccaaaattcaatgcctttgtaaaccatgtgacaactcacactggccagcaattgccaccagtcgatatgaagattcttgttgctgctgctatagccttgaagggtattgggggactattgtttgctttcgcactccattgtgagcttaatctcttgcttctgcatcaagccgttgccaccccaattct

SEQ ID NO: 120940 - DNA, 436 bp, Arabidopsis thaliana
ccacgcgtccgcaaaaatcctggcgttgatagcgattggttaattgtccgtgaatcaacgtttttctgttacacatatcaatcaatcatcatcctcttcatactctcttcttcttcttcatcgtaatcattagcttcaattccgagttttctcttcgtcgccgttgtgctagagttttgtcagatctcgccgggaaattagcaatggcgttttagtctgtttacctgtgaagcttttgcgtaaacgctggattcttctcaaatctctctcacctgatctcttattagattccgaggatggcgctaaagcgagggctatctggagttaaccggattagaggaagtggtggtggatctcgatctgtgcttgtgcttctcatatttttctgtgtttttgcacctctttgcttctttgttggccgaggagtgtatatcga

SEQ ID NO: 120941 - DNA, 685 bp, Arabidopsis thaliana
cccacgcgtccgcccacgcgtccgcccacgcgtccgaacagattctcataatcatctcttcttttttcctctttacgaaaagaagaaagatcaaaccttccaagtttacacaaaaagaaaaaagaacgatggctcttgtcaccttcttgtttattgctacccttggagcaatgacgtcacatgtcaatggttacgccggaggaggttgggtcaacgcacacgccacattctacggtggtggtgatgcttccggcacaatgggaggtgcttgtggatacggaaacctatatagccaaggctatggaaccaacacggcggcgctaagcacggctctattcaataatggtctaagttgtggtgcttgcttcgagataagatgtcaaaacgatggaaaatggtgtcttcctggctcaattgtcgtcacagccacaaacttttgccctcctaacaacgccttaccgaacaacgcaggaggttggtgtaaccctcctcagcagcattttgatctctctcagcccgtatttcaacgcatcgctcaatacagagccggcattgtccccgtcgcttaccgaagagtgccgtgcgtgagaagaggaggaataaggtttacgataaacggacactcttacttcaacctagttctgatcactaacgtcggaggagccggagatgttcactcagcgat

SEQ ID NO: 120942 - DNA, 486 bp, Arabidopsis thaliana
  unsure (1)..(486): unsure at all n locations
acgactcacttaggaagctgcacgntgcagtccggccgattccggtcgaccacgcgtcgccgagaaaacgcgcggggaatgcaatttgttcaatctgctacgaagatcttaaacccgtgggttgagaatctgcaatcattctccgcttgtggccatgtctttcacgaactttgtttgcagcatgggtttgagtattgcccgtgttcgaacaggcgaaattgtccgatttgtaagcagaagtgctctctaaaggatccttgtcgactttactttcagtcttctgggaatcaaaccgattcgattgcctcggataaggttgttggaatcgaagaagatccggttttgttgagaggagaagtgaagcggcttgaagggaaggtacagaatcttacttcggctctggaggcgaagaaaaaggagaatgttgaagtctctgataagttgcatcaatgcaatgagcaattgaaggaggataaagtgaaaagg

SEQ ID NO: 120943 - DNA, 831 bp, Arabidopsis thaliana
  unsure (1)..(831): unsure at all n locations
gtgacgtcctttgcggtaccggtccggaattcccgggtcgacccacgcgtgatgaaggttgaaaccattagtaaagaaatcataaagccatcttcgccaactccaaataatctccaaactctccaactctcaatttacgatcacatccttcctccagtttacacagtagcctttctcttctacaccaaaaatgatttgatctctcaagaacacacttcccacaaactcaagacttctctgtctgaaaccctgaccaagttctaccctcttgccggaagaatcaccggagtaaccgtcgattgtaccgatgaaggagctatctttgtcgatgctcgtgtcaataactgtcctctcactgaatttctcaagtgccctgatttcgacgccctccaacagttgcttcctctagatgttgtagacaacccatacgtggctgctgccacgtggcctttgctgctcgtgaaggcaacttacttcccatgcggaggcatggccataggaatctgcatcactcacaaaatcgcggacgcagcctccatctcgactttcattcggtcctgggccgccacggctcgaggagagaacgatgccgcagcgatggaaagtcctgtatttgctggagcgaatttctacccaccagccaatgaggcttttaagcttcctggccgatgaacaagccggcaagagaagcaagcggttaccaaaagagatttgggttccnaagcttnttaaggnggnaaatctcngggccaaaancccttttnaaaaancagttngccaancccnggggggggnnagngtttcncgggtntttttggaattgtttggngc

SEQ ID NO: 120944 - DNA, 586 bp, Arabidopsis thaliana
  unsure (1)..(586): unsure at all n locations
gagacgacgacgaggaaggaggaaaccttgctccntgttttcangaagccancgncgccggggcgaattttggggaaactctgcaaccctcaattcacgagcacatgcttcctccagtttacacagtagcctttctcttctacaccaaaagcgatttgagctctcaagaacacactgcccacagactcaagacttctctgtctgaaaccctgaccaagttctaccctcttgccggaagaatcaccggagtaaccgtcgattgtaccgatgaaggagctatctttggcgatgctcgtgtcaataactgtcctcgcactgaatttctccagtgccctgatttcgacgncctccaacagttgcttcctctgaacgtaggggacaacccatacttggctgctgccacgtggncttttgcttgctcgtgaagggaacttactttcccatgcggnggcatggccatagggatctgcattanttaaaaaaatcgggggcgnagcctccattttnggctttaatttggggcctnggnccgccangggtnttgggggggaanaatttccccaangnttggaaancccnctnnttt

SEQ ID NO: 120945 - DNA, 478 bp, Arabidopsis thaliana
ccacgcgtccgaaaaaaatgcaagaggggaagcagaagaagaaagaacaaaaatcaggagttggcattttgaagacgaaactcatcatcatcttcttcctcagacaacaaaaaaagcttttcactttctctccacccttctctctctccttctgaaagtctctctctttgccgtcgttagcctcttcctacacttggggctgcgattcttccaatcctccgatttcaatttcatcctctcaatcatagtttgaaatcatcgagcttttacggtgctgttggtgtttgacgccgtaaaattcgatccttttttatacatttgatgttgattttatcgatagttttgtgagatcgattttttagggtttcgagtttggcgctgacttgagggtttgattggatgagaataaggggttatgggacttgagtcaattgggtttgtctccctaatcatcgcaaattcctgatttctcagctct

SEQ ID NO: 120946 - DNA, 850 bp, Arabidopsis thaliana
cgaaggaggatgtctcgttcggcgacttgacctctctctctctctctcttttaccttcattgttcactgtttccagacattgaaagaaagatcattagtttctgaggggataaccatttttttttcttcttaaaaagtttttttttttgtcaattggtcttcttcttcctcatccgctcgcttatatttaatttaataataataaaaatcggtgttcatttttatataaaagtataaattttgtgtttggttgatccatccgtagtcgtagtagatctacaagctctgaaattccacgcccacatctcctccgtcctcttgagatccttctcttcattcattttcttgctcaacttgagttgcttccaacatcttgcaagattgtctttgagttcattcaggtcttgaagaagagcactcttttaagctgtgtgaaacttgcgccgttcctgtgaagaactacttttggcattgcagatttcagagagctgtgatttgtgctatcttaaaaacggacaagttctatgttgtggcggatgagatgagggatgctatctgggttgatgaattttctgaatgcctgtctctggccacggtcagatcagcaggctcgttctgcctcagattctggtggccgccaagagggtttgctctggttcagagactccggccagcacgtctttggtgacttctccatggccgtcgttcaagccaacagcttgctagaggaccagagccagctcgagtctggctctcttagctcccacgactctggtccctttggcacctttgttggcgtctactacggccacggtgggcctgagacatctcgcttcatcaatgatcatat

SEQ ID NO: 120947 - DNA, 546 bp, Arabidopsis thaliana
  unsure (1)..(546): unsure at all n locations
nnnnnnnnnnnnnnnnnnnnnnnnnnnnnnnnnnnnnnnnnnnnnnnnnnnnnnnnnnnnnnnnnnnncccacgcgtgcgagcaaagcctctctaaataaaaacaaaaagctaactgaataagaagaagtagtgatgcatatcacaaaaccacacgccgccatgttttccagtcccggaatgggccatgtcatcccggtgatcgagcttggaaagcgtctctccgctaacaacggcttccacgtcaccgtcttcgtcctcgaaaccgacgcagcctccgctcaatccaagttcctaaactcaaccggcgtcgacatcgtcaaacttccatcgccggacatttatggtttagtggaccccgacgaccatgtagtgaccaagatcggagtcattatgcgtgcagcagttccagccctccgatccaagatcgctgccatgcatcaaaagccaacggctctgatcgttgacttgtttggcacagatgcgttatgtctcgcaaaggaatttaacatgttgagttaatgtgtttatccctaccaacgcacgt

SEQ ID NO: 120948 - DNA, 756 bp, Arabidopsis thaliana
  unsure (1)..(756): unsure at all n locations
gaagaatgtgaatcatcttctccaagtttaatcgttggttnnnnnccccactgngatcgtgagctttatatattatatacacgagaatcttgtacccaattaacatatacatacatgtaaatgtgtgtatgtatataatataaaattattctccttttcactaatttttcttcaaatactttaatgcccaccacctgttcgatcaaattccccatctcgaaaagctagaactttcttcgtctctattggtctctcactctctctcttacctcttctcatttgttctttctccttctaaattgggttatcaagtatattggatcaacgggtttgattcacgatttgtcatttcatcttcgtggagagagtttgatctgatttgttgatcgtcagcgttatgtctagtccgagaagtaacaagccgaagattgtcaacggccctggtggttatgttctacaagacgttccgcatctctccgattaccttcctggtcttcctacttatcctaatccattgcaagacaatccagcttactcagtggttaagcaatactttgttcatgctgatgacagtgttcctcaaaagatcgttgttcacaaggatggtccaagggggattcattttagacgagccgggccacgtcagaaggtatacttcgaatctgatgaagtgcatgcttgcatagttacctgtggaggtctttgtcctggccttaataccgtgattagagaaatagtgagcagtctatcttatat

SEQ ID NO: 120949 - DNA, 548 bp, Arabidopsis thaliana
cagacaaattcacaccattctttattttcatttttccccctttgcccagattccgacaaaatccactcgtttgattccaccactatatataattgagcggagaagcttgacatgaagagcagagtcattcttaaccatagagacagaagagataagaatcataacaacaacaacaccaatcattacacacaggttgatactatggagagaaagcctcttgaggttgagccatctactacgacgactaacaccgatgtggtcgattctttcgaggaagagcagagaaaaatcgtttatagaggatggaaagtcatgccttttatcattggtaatgagacatttgagaagcttgggatcatagggacattatcaaaccttcttgtgtacctaacttctgtattcaaccttaagagctacacagctgcaactatcatcaatgcctttagtggtacaatcaatttcgggacttttattgctgcctttctttgcgacacttactttggtcgctacaagactctcagtgtcgctgtcatcgcttgttttctggg

SEQ ID NO: 120950 - DNA, 675 bp, Arabidopsis thaliana
  unsure (1)..(675): unsure at all n locations
cgggncggcccaggccttccgaactaagcaaaaaataagatctttctctctctgacgacgcaatccctaatttctggttctccgttcgtcggcggagaagatgggattcctttccaataaaatctccagagacgatgtgaaaccaggcgatcacatctattcatggcgtcaagcctacatttacgctcatcacggaatctatgtaggtaatggacaagtcaaccattttactcgtggtgatggtcaagagactggaactgggactttcttggacaacatcattgttagttcatctcataatcatggagacaacccatgtcctgattgtggagatcgatccaatcttggcggtgttatatcttcctgccttgaatgtttccttgccggaggtgatctctatgtctttgagtacagtgtttcccctgctatctttcttgccaaacctcgaggcggcgtatgcactatagcatcttcagatcctccagaagaagtcatctatcgagcaaattttctcttgcaaaatggttttggtgtgtacaatgtcttcaagaacaactgtgaagattttgccatctattgcaaaacgggtttgctagtggcaaacaccgacgtgggaaggagtggtcaagctgcttcaattgttgcagctgccagtgttcttctttcttcaccact

SEQ ID NO: 120951 - DNA, 507 bp, Arabidopsis thaliana
  unsure (1)..(507): unsure at all n locations
cnnnnnnnnnnnnnnnnnnnnnnnnnnnnnnnnnnnnnnnnnnnnnnnnnnnnnnnnnnnnnnnnnnnnnnnccacgcgtccgatgatgatgattcagagattttgatttttcaagaaaactctgtttttcctctttttgtttttgcctcttggggcatttggagagcaatggcgacttttgctgaacttgttttatcgacttctcgctgtacatgcccttgccgttcattcactagaaaacccctaattcgtccccctttatctggtctgcgtctccccggtgataccaaaccattgtttcgttccggacttggtcggatttctgttagccggcgtttcctcacggccgttgctcgagctgaatcagaccagcttggtgatgatgaccactcaaagaatggggaagataagcagaagaaagcaagccagcttaagaaaagagtgatctttggtattggcattggtttacctgttggatgtgttgcgttagctggaggatgggtttt

SEQ ID NO: 120952 - DNA, 410 bp, Arabidopsis thaliana
atctaacacaaaaaacaatctcagatattaaatgaagtgtttatcaaccggagaactctccgacaaaacctcgccgacgattttccgacgatgaaagatgggctttttcgggagactgttcgggagtaaaaaaaagtctgataaagctgcttcgtcgagagataaacggaggtggagcttcaccaccagatcttcaaattccagcaagagagctccggcggtgacgtcggcttcggtggttgagcaaaatggtttggatgctgacaaacatgcgatagctgtggctgctgcgacagccgcggtggcggaagcagctcttactgctgctcatgcggcagctgaagtcgtgagactaacaagcggaaacggcgggagaaacgtcggtggcggtggaaactcgtcggtgtttc

SEQ ID NO: 120953 - DNA, 608 bp, Arabidopsis thaliana
cgtccgtggtttggtaggctctcacgtgtttctttatgattggttgttacacaaaaaaaatcatattaagtggggtttactctaagcatgagaaacagaagcttctgccgcaaaaaattaaaaattacaggatctcatttcccgaccaaactcatcgaactaagaactcactgtaataaaacttttaaaaggtgtaaacaccaatggcagtttattacacaagtaatgtcggttgttaccagcaagaaccaatctttctcaaccatcaacaacaaaaccaacaagcttcttcttcatccgccgccgcttctttcaccgtcaccggcggcgatactgttcgaaacgagatggtttttatcccaccaaccaccacaggagacgttgtaacaggaaacggtaccgtttcaagcagcgatctaagctttcacgatggtcaaggactgtctttgagccttggtactcagatctctgttgctccgtttcactttcatcaataccaattggggtttactagtcagaatccttcaatttcagtcaaggaaacgtcaccgtttcatgtggatgagatgagtgtgaagagcaaaagaatgatcttgtgggtcaatctg

SEQ ID NO: 120954 - DNA, 517 bp, Arabidopsis thaliana
  unsure (1)..(517): unsure at all n locations
nnnnnnnnnnnnnnnnnnnnnnnnnnnnnnnnnnnnnnnnnnnnnnnnnnnnnnnnnnnnnnnnncgacccacgcgtccgcaaaaactgaattatcttcttcccttgtaaaccactcaatcaatcattgatcatgcctcgtaacttcaacttgttgttagttctggtgatcattgctctgtttattactaaaaactcacttggcaggcttcttgagggatccactggtattatcaatggtttcctgacgtggacaaacaccaagaagcccgtggacgctgaaagctgtgtcgaggtcggttgtgcaattatatatgacgttgttgctctatatattttatgttgttcattgtattgaatgtatcgtgtggtctgttatctactcaagtcggctgtaacattgtgaactactttatctgtagaagctattactttatcttcggattttggtttgggaactgctctaacatgcgctgttaccatcaggcgcctggacaaacaagcagacatgatgccag

SEQ ID NO: 120955 - DNA, 297 bp, Arabidopsis thaliana
  unsure (1)..(297): unsure at all n locations
ggaataccatatgttgtgagccttgaattaaatggggaactgtgttgaggggaatattatcaagggtcaagcagtggttgcatggtgtggtgggacaccaggaaagtgtattaccagttggttgaggagaaagtggaatgggagccctgtggtgatcgatggagctgaagatgaggaatatatgttatctttagatgatgtgggatcaagtttggttttcatgtacacaccagtcacagaaggaggtgcaagaggagagcctcagtataagtacacagagttcgtanaagcagcgcc

SEQ ID NO: 120956 - DNA, 621 bp, Arabidopsis thaliana
  unsure (1)..(621): unsure at all n locations
tccctcgcgtccgtacggcgaagacgacagaaggggaacacacaaagattccattacaaataaacaattttcatatatatctataacaaaaaaaaacaatggctacctcaagcatgaagagcattccaatggcgatcccaagtttctccatgtgtcacaagctcgagctccttaaagaaggcaaaactcgcgacgtcccgaaagccgaagaagatgaagggctaagctgcgagttccaagagatgttggattctcttcctaaggagagaggatggagaactcgttacctttacctattccaagggttttggtgccaagccaaagagattcaagccatcatgtctttccaaaaacatttccaatccctcgaaaacgacgtcgttctcgccaccatacctaaatccggtacaacctggctaaaagctttaactttcaccatccttaaccgtaaccggttttattccggttgcctgggggtcccaccaacccttttttaattttcaaacccttttggcctttgtaccttttttttggggtaaaggtttttngngaacgggggntntcccgntnntttngggggtttgccngnccaagganggttggaaaccctttnccggttgg

SEQ ID NO: 120957 - DNA, 530 bp, Arabidopsis thaliana
gccagctctatactgactcacattagggaaagctggtacgcctgcaggtaccggtccggaattcccgggtcgacccacacgtctctctcctttgccctcgttttttttcggttctcgtctttcgttcttcacttttagacaagcaaatatgagacccccagttacaggaggacgtggtggtggaggattcagaggtggaagagatggtggtggaagaggttttggaggtggaagaagctttggaggaggccgtagtggtgacagaggccgtagtgggcctcgcggcagaggacgtggtgcgcctcgtggtcgtggaggaccacctcgtggaggaatgaaaggaggaagcaaagtgattgttgagcctcacagacatgcgggagtgtttattgctaagggtaaagaagatggctctcgtaattaaaaatgttggttcctggcgatctctgtgtacaatgagaagagtatgtttgaggcgattcaatattgatctaagaggagatttcaggatgtggggatggtgttagatc

SEQ ID NO: 120958 - DNA, 486 bp, Arabidopsis thaliana
cacacgcgtccggaagtgagagacactgagactttgtagttgaccggatcattctcacttcgccggccgacgttcttccttccgccgtcggtatctatatttacgatccacgatctctcttgctgtttctgtcttcatcgtgacgaaaatggctgctcgtatcgggatcttctccgtcttcgtagctgtattgttatctatttctgcattttcctcagctcaggatctccagatcgtaaatgccgagcgaaggattgatttaagctcacatatcgtgaaggccttcttgactctcaaggttgaaaatattgggaaagatcctgctgcagaaatgcttcttgctttcccacctacccagatcaagaatttggctatggtacaagccctggcaactactggcaagaagaagaagaaaacttatttgccattagatgtaaaaccaactgaacaacctgatgcaccaaatgacactggatactaccgtgt

SEQ ID NO: 120959 - DNA, 551 bp, Arabidopsis thaliana
acaagagcttctacatctagcagagtctctccagctttcactttcctcgtcatcttcttcctcttatctctcactgcttcagtagaagctgctggtcgtggagttaacaaccacgcgtccggcggcggattaggagcttctttcatattcggagattctctagtcgatgccggaaataataattatctatcgacgttgtctagggctaatatgaagcctaatggtattgatttcaaagcctccggaggaactcctaccggccggttcaccaatggacggaccatcggtgatatcgttggggaagaactcggatcagcgaactacgcgatcccgttcttggcaccagacgcgaagggaaaagctttattagccggagggaactatgcatctgggggaggaggaatcatgactgcccccgggagaatctttgggaatagattaggggtggatgcccaagttgatttcttcaccactacacggaaacagtttgatgatctcctgggaaagagaaggcaaatattccttcccccagagttcgttttctcatccct

SEQ ID NO: 120960 - DNA, 517 bp, Arabidopsis thaliana
atcaaagccacaataaaatacgttaaattaataattaccaacctcaaaactataatctatatatatatatatatataatcagcattttcttcagtgtctctctactctctctcagatttgcatttgtttttttttggtttggttatggagcgtgcaaggagacttgcttacagagggatcgtgaaacgtctcgtcaacgagacaaaacgccaccgtaacggcgaatcctctcttcttccgacgacgactgttactccctcaaggtatgtctcctccgtctcctcctttctccatcgccgtcgtgatgtctctggatcggcttttaccacctccggtagaaatcaacaccagacacgatcgatctccgtcgatgcgttgaagccaagcgacactttcccgcgccggcacaactcagcaacaccggatgaacaagctcagatggcgaattactgcggattcgataatctcaacacgttgattgatttgactgtttcgaaatgtatctgttagattcgat

SEQ ID NO: 120961 - DNA, 459 bp, Arabidopsis thaliana
atacgactcactttagggaaagctgctacgcctgcaggtaccggtccggaattcccgggtcgacccacgcgtccgttccaacaaaaccacaaagacgactctcttcagagagttttgagagggtgagagagccgtgctcggcgttgttagaaagaaagctgagaattgcaactgcttacaagagcaatgtcgacaagctgatcaagagtctcttggatttgtgcttctgtgcttcttaagaggaaggtcccgcaagataccatcttctcaaaagtccaatcaatctacgcttttcaattcgccacgtcacagaatcctgaccgttagatacaaacgcgccaactcgtttgtacccaggcggaaaatgactatattacccttattcattatcatctttatccatgtgacggtaaactaaaattctctctcaggtcaaactttgctttctggtacggcggc

SEQ ID NO: 120962 - DNA, 539 bp, Arabidopsis thaliana
aaacgactctcttcagagagttttgagagggtgagagagccgtgctcggcgttgttagaaagaaagctgagaattgcaactgcttacaagagcaatgtcgacaagctgatcaagagtctcttggatttgtgcttctgtacttcttaagaggaaggtcaaactttgctttctggtacggcggcgatgtcgacgatttcgatccatcggactgagactctacgagtcactcacgctcggtcacgaatcttccggcagagatatcggagaactatccctctttggaaattaacaatcaattcgagatcttctgatacatctaagaaggaagaactctctgtacaaatatcaattcctcctcaagttgatcaatcaagacctgaaggtttgagattcgatcgtttacaacctccggagccagagtttggtcatgaggatagatttgagtttggtaaattcgtagctagagaagctatgcatgatgaagaatattggactgcagcttggcttcgtgcagagagtcactgggaagatcgctccaa

SEQ ID NO: 120963 - DNA, 797 bp, Arabidopsis thaliana
aatttatgctctctgttccttcaaaatcatttctttctcttctttgattcccaaagatcacttctttgtctttgatttttgattttttttctctctggcgtgaaggaagaagctttatttcatggagtctctgctctctagttcttctcttgtttccgctgctggtgggttttgttggaagaagcagaatctaaagctccactctttatcagaaatccgagttctgcgttgtgattcgagtaaagttgtcgcaaaaccgaagtttaggaacaatcttgttaggcctgatggtcaaggatcttcattgttgttgtatccaaaacataagtcgagatttcgggttaatgccactgcgggtcagcctgaggctttcgactcgaatagcaaacagaagtcttttagagactcgttagatgcgttttacaggttttctaggcctcatacagttattggcacagtgcttagcattttatctgtatctttcttagcagtagagaaggtttctgatatatctcctttacttttcactggcatcttggaggctgttgttgcagctctcatgatgaacatttacatagttgggctaaatcagttgtctgatgttgaaatagataaggttaacaagccctatcttccattggcatcaggagaatattctgttaacaccggcattgcaatagtagcttccttctccatcatgagtttctggcttgggtggattgttggttcatggccattgttctgggctctttttgtgagtttcatgctcggtactgcatactctatcaatttgccac

SEQ ID NO: 120964 - DNA, 502 bp, Arabidopsis thaliana
tttccaggtacatacgactcactttagggaaagctggtacgcctgcaggtaccggtcccgaattcccgggtcgacccacgcgtccccccacgcgtccggtcttttagagactcgttagatgcgttttacaggttttctaggcctcatacaggtattggcacagtgcttagcattttatctgtatctttcttagcagtagagaagggttctgatatatctcctttacttttcactggcatcggggaggctgttgttgcagctctcatgatgaacatttacataggtgggctaaatcaggtgtctgatgttgaaatagataagggtaacaagccctatcttccatgggcatcagggagaatattctgttaacacccgcattgcaatagtagcttccttctccatcatgagtttctggcttgggtggattgttggttcatggccattgttctgggctctttttgtgagtttcatgctcggtactgcatactctatcaatttgcca

SEQ ID NO: 120965 - DNA, 540 bp, Arabidopsis thaliana
accacgcgtccgcggacgcgtgggcaaaataaccatttttaattcccagcctctttttatacgtagtctaaattgacaaacacatcattcgctctctttctcttctttctctagctctcttggttttttgctaaaaacagagcattttctctctagctctcactgtttctttaccataagtttcgtcatattagtacatgcaagtgtaagggatggtgatggaggaaggaagaagcatagaagaagggcttttgcagctcaagaacaaaaacgacgattcagagtgtcgtattactgcttgtgttatccttagcacttttgtcgccgtttgtggctccttctcttttggtgttgctactggttacacttcaggtgctgagacaggagttatgaaggacttggatctttctatcgcgcaattttcagcttttggctcattcgccactttaggagctgcaattggtgcactgttctgcggtaatctggcaatggtcattggcagaagagggacaatgtgggtctccgatttcctatgcatca

SEQ ID NO: 120966 - DNA, 571 bp, Arabidopsis thaliana
ccagcactaatacgactcacttagggaaagccggtacgcctgcaggtaccggtccggaattcccgtgtctctcatcagaaatcaaaaaccctaaaaaaagtcctttctgattcatctatacagacacatactgtattctcaaaacaatggagattccttctctgaataagcagcaagagttcactctcgcctccgtcactgatctcacttctccttcctcatctctttcgtcctctcctgttgtagctacgttttcatgcgttaatgaagtcaaggaactccgatttcaggaatcgaaatcgtctgatggtttcagttttgatcttagttcgactcagttgttcaagttggggccacttcagttcacttgtgtatctgatggttcgatttcttctgcaaaggagaaatcgtcattttctcgaggagttgtaataaaatttagagatgagacggatagcacggagttttgtgactcatttgaggaacgccaaaaggatgatgctgttaacaaggatcagccttgccgaacggaacagttgtttcagctaataaaagcaagttcgatgataag

SEQ ID NO: 120967 - DNA, 512 bp, Arabidopsis thaliana
  unsure (1)..(512): unsure at all n locations
cannnnnnnnnnnnnnnnnnnnnnnnnnnnnnnnnnnnnnnnnnnnnnnnnnnnnnnnnnnnnnnnccaccacgcgtccgctctcttgcaacggcgaatccgccgtcgcaatctgcgatacttataactggaatcctcgtcgacgatctaaagtaccggagaaacgtcatcctcctaagcttcgggttttcaactacgacgaactcgccgtcgctactaacggcttctccgccaataacttcctcggaaaaggaagtcacggcagagtttacaaagcagttctcgacgacggaaagcttctcgccgccgtcaagagaacaacaatcaccactaccgttggtaataacaataacaacgtgagtcaggtagacaatgagatcgagattctttcacgggttcgtcaccgttggatggtcaacttaatcggttactgcgttgaccaccggaggaaaacaaagctgttagtcgtcgagtacatgcctaacggtacgcttcacgatcagttacattct

SEQ ID NO: 120968 - DNA, 495 bp, Arabidopsis thaliana
  unsure (1)..(495): unsure at all n locations
nnnnnnnnnnnnnnnnnnnnnnnnnnnnnnnnnnnnnnnnnnnnnnnnnnnnnnnnnnnnnnnnccacgcgtccgctttctcagtcttcttctagaatcatctttgctctttctcgtcgactatttgctcgccggagaatctctctcagaatggctaggtcaccgagcaaacacggccgcgatcaaactcaggattgggaactctcattgaaggataaagacaagaagattaagcaacaacctgctaattcgtcgaatccgagtagtgagacgttcagaccaagtgggtcagggaaatatgactttgctaaaaagtatcgttccattagggatttgtcgagtagtttgattggagaaagtctattggattctagttcagagaaggagcagggtaatgaattcttcaagcagaagaagttcaatgaggcgattgattgttactctcggagcattgctttatcgccaaatgctgtgacttatgcaaatcgagcaatg

SEQ ID NO: 120969 - DNA, 750 bp, Arabidopsis thaliana
tcgacggtatccataattctcgatatgaccttcgcggccggtaggcctatgacatatacctgttttggtctctcagtcgagcgcggggagagtcaaagctccattgttgcagagcaatactggtggattagttttcagcaaatccttcaattcgatctatgatacttctatgtacggacgcttgcagctcaacaatggccttgctcgaactccacaaatgggatggaatagctggaatttctttgcttgcaatatcaatgaaactgtcataaaggaaactgctgatgctttggtttcatctggcctggctgatttaggatacatacatgtcaatattgatgattgctggtccaatttgttacgcgattcagagggtcaattggttcctcatcctgaaaccttcccatcaggaattaagcttcttgctgattatgttcattcaaagggtctcaaactcgggatatattctgatgctggcgttttcacttgtgaagttcatccggggtccccttttcccatgaaggtgggttgatgcagacattttttgccttctttggggcgtgggttaacctgaaatatggcaatttgtttcaaacctgggaataaaaccaatcggaaggtacccccccaatgcgggaggctctaaacgcaactggccgctcaatcttctattcactatgtgaatggggcgttgatgatcctgccttgtgggcaaaagaagttggaaacagttggcgcacaaccgatgac

SEQ ID NO: 120970 - DNA, 639 bp, Arabidopsis thaliana
  unsure (1)..(639): unsure at all n locations
accgtccgattcccgtcgacccacctcgacgaagacacatagaggaagaagtcgccggagaagtgaaaagacgttgatggtgattatgaagaagatgaaagattcagtcttgttcctcgtcgtaggcctcttctctttatctgttttggtctctcagtcgatcgcagggagagtcaaagctccattgttgcagagcaatactggtggattagttttcagcaaatccttcaattcgatctatgatacttctatgtacggacgcttgcagctcaacaatggccttgctcgaactccacaaatgggatggaatagctggaatttctttgcttgcaatatcaatgaaactgtcataaaggaaactgctgatgctttggtttcatctggcctggctgatttagggtacatacatgtcaatattgatgattgctggtccaatttgttacgcgattcaaaggggcaattggttcctcatcctgaaaccttcccatcaggattaagcttcttcctggttatgttcattcaaaggggctcaaactcgggatatattctgatntggggttcacttggnaaggtcacccgggcccctttncataagggggttntcaagnattttgcttttnggggggggnntctnaaatg

SEQ ID NO: 120971 - DNA, 686 bp, Arabidopsis thaliana
aggaatcttctgctgcattggtcttggatggacatgacttgaagctactttctgtcaaggttgaggggaagcttcttaaggaaggggattaccagttggactctcgccatctaactcttccttcgcttccagctgaggagtcctttgttttggagattgatactgagatatacccccacaagaatacttcacttgaggggctttacaagtcttctgggaatttctgcacacagtgtgaagcagaaggtttccgcaaaattacattttaccaggatcgtcctgatataatggctaagtacacgtgtcgtgtggaaggtgacaagacactttatcctgtgttattgtccaatggaaacctcatttctcaaggagatatagagggtggtcgacactatgccttatgggaggatccattcaagaaaccgtgctatctatttgctttggtggctggacagctagtgagcagagatgatacatttaccacacgctctggtaggcaggtttccctgaaaatctggactcctgcagaagatctaccaaagactgcccatgccatgtattccctaaaagcggccatgaagtgggatgaggatgtgttcgggcttgagtatgacctggatctcttcaacattgttgctgttccagattttaacatgggagccatggaaaacaagagtttgaatatt

SEQ ID NO: 120972 - DNA, 679 bp, Arabidopsis thaliana
ctctcctcttcctctggctccggcgaaaaaccccttttcgatttcattgataaaacgcaaatcgatctctcgtgtggaagaagaagaagaacacgatgggaacaatgggtaaagcattctacagcgtaggattctggatccgtgaaactggtcaagcacttgatcggctcggttgtcgcctccaagggaaaaatcatttccgagaacagctatcaaggcaccgcacactcatgaatgtttttgacaaaacccctaatgtggataagggggcttttgtggctcctaacgcttctctctctggtgatgtccatgtgggaagaggttcttccatttggtatggatgtgtcttgagaggagatgctaacagcattagtgttggagctgggaccaatattcaggacaacgctcttgtccacgttgctaagaccaacttaagtgggaaggtcttacctactgtcattggagacaatgtcaccattggtcatagtgctgttttacatggctgcactgtcgaggatgaggcctatattggtacaagtgcaactgtcttggatggagctcatgttgaaaaacatgccatggttgcttcaggagctcttgttaggcagaacactagaattccctctggtgaggtttggggaagcaacccagctaaatttctgaggaaggtgacagaaga

SEQ ID NO: 120973 - DNA, 463 bp, Arabidopsis thaliana
ccctacgacttatatagggaacagctggtacgcctgcaggtaccggtccggaatttccgggtggggccacgcgtgcgattttatgcgggctataaacacagatttcgataggattattgcaatggtgcaaaaactggcaggacgataattggggacttttcaccagtgaacatggatactgctgttgctattcccactctcgaggcgacttatagggcgtgctgcagatgctgattctgtccaagctatgataataaaacttacccgaaggggagggcccacagcttaaatccaggggaaaggccggtcctcctacacgtgttgcagtgctcacatggcgatcacttttagttatgtcaagagaatggaaatactattggctccgacttatcctctacatgattcttacacttagtattggcacattatattctggcttaggtcactctttgtcttctgttgc

SEQ ID NO: 120974 - DNA, 363 bp, Arabidopsis thaliana
  unsure (1)..(363): unsure at all n locations
aattgtttgtntgaagaaagaaaccgaatcgattcaatttcaacgtctcgtccttcaattttcgttttccgagaaaatttaggaaagaaagagaaagagagggcagagacaaaaatttcttcgccgtctgagtgggaaagatggcggaggatttcgctagagcggtagacgatgggcttaaactcgcgaaacggatttatttcggcaaagaccgagccgttgcggcgccgagaccacctgctccgatggacagatcttccactacgcagccttacctttcctacagcacctatgggttacggcgttatacccgncccggggatttttggtaancccgggtttncctaggtnttaagcttaang

SEQ ID NO: 120975 - DNA, 957 bp, Arabidopsis thaliana
  unsure (1)..(957): unsure at all n locations
aggattctcattgttcctttgttagacttatccatttcacattccatttaaactaagagattggattaaattttcagaggaatggttcgaaggcaagcgacaacaacagactgtaccctgctcacagggagacattctcagccacagacgaagaagaaaagattcttcaaatcgacaggaaacacatcagttcttacacaagacgcaacagaccagacatgttctactcatcccacctcatcctagacagtgctggcctgtctgaaccagttttcgccacgccttttagcccgtcctcgtcgcatgaagagattacaagccagttttgcactgcagagaacagtcctcagttatactcagctacttctagaagcaaacgcagtgctttcaccgctagttctatagcaccgagcgattgcacaaaaagctgctgtgatggtgaccatccaagctacatggcttgtacagagtcctctagggctaaggctaggtccgctagtgccccgaagtctcgaccacagttattttacgagcggccttcatcaaaacggtttggatttgttgatttgccgtactgtggtgatacaaagtccggtccccagaaaggctctgctctgcatactagttttatgaacaaggcttatcccggttcaggtcggttggaccgtctcgggatgccaattgggtataggtactgagaacgttgttggaccctttaacctggttttgttgtagatcagtggattgagctttgcttctaattttctttgtttgtagtttggagctaagtggatttaatctaaaatgcaaatagaacttgcttaatccaaaaaaaaacacaaaaaagggcggccgctctagaggatccaagcttacgtacgcgtgcatgcgacgtcnnnnnnnnnnnnnnnnnnnnnnnnnnnnnnnnnnnnnnnnnnnnnnnnnnnnnnnnnnnnn

SEQ ID NO: 120976 - DNA, 503 bp, Arabidopsis thaliana
agcccacgcgtccgcggacgcgtgggttgcaatggcttccttcacaacaacttcttcttcctcgcttctcctcaaaactcttctccccgtaagccacctgaatcgtttctctacactctctggtatccgcgttggcgattcatggactcctctgctccggaacatctccaccgctgggtctcggcgtcgagtggcgattgtgaaagctgcgacggtggattcggattactcgtcgaaacggagcaatagcaatgagcagagagagacgattatgcttcctggttgcgattacaatcattggctcattgtaatggagtttcctaaagatccagcgccaagtagggatcagatgattgatacttaccttaacactcttgctactgttcttggcagcatggaagaggcgaagaagaacatgtatgcattcagtaccacgacatatactggattccaatgcaccatcgacgaagaaacatctgagaagttcaagggtttgcctggag

SEQ ID NO: 120977 - DNA, 478 bp, Arabidopsis thaliana
  unsure (1)..(478): unsure at all n locations
cagctannnnnnnnnnnnnnnnnnnnnnnnnnnnnnnnnnnnnnnnnnnnnnnnnnnnnnnnnnnnnnnnnnnccacgcgtccgctgaagggttacatggtaggaaatgggctgatggacgatttccatgacaggcttggtcttttccaatatatttgggcgttgggttttatatctgaccaaacatacagcttactgcaacttcaatgcggtttcgaatcgtttattcactcctccaaacagtgtaacaagattctggagatagcggacaaagaaataggtaacatagaccaatacagggtcttcaccccagcttgtgttgccaatgcttcccagtcaaatatgttgctaaagaaaagacctatgactagccgcgtgagcgaacagtatgatccttggacggagaaacacactacaggttattttaatcttccagaggttcaaaaagccctccatgtcccaccaggacttgccccat

SEQ ID NO: 120978 - DNA, 506 bp, Arabidopsis thaliana
acattttccccagggaaacaggtatggccattggttcccccaagctttaatacccctcccctatagggaaaattgggttcccttcaggtaccggtccggaatttccggggtggccccacgcgtccgttttttttttatgtatactcaattttttcaaggccaaaataaaatattgtatgtcaaaatacaaatacagatactccactgatccactcaaagcttgcaaactttgaattgaagactataaataagtggagaaaatgaaataaacaatgaggacgaaactctgaagtaaggaacatatagccaagccaaaacaggaatacacccacttaccctcaaatgctaaaattggatatttaggaaagaagaagaaaaaaaaacaagatttgagactcaattgagcaaagaatagtcttcaaaaaaaaaaaaaaagggcgaccgctctagaggatccaagcttacgtacgcgtgcgtgcgacgtcataatcttctatagtggacct

SEQ ID NO: 120979 - DNA, 593 bp, Arabidopsis thaliana
  unsure (1)..(593): unsure at all n locations
cnnnnnnnnnnnnnnnnnnnnnnnnnnnnnnnnnnnnnnnnnnnnnnnnnnnnnnnnnnnnnnnnnnnnnnnccacgcgtgcggcagagcaaagagtttttgtgtggctagtggcatcaatggagctctcgatctcacaatcaccgcgtgttcggttctcgtctctggcgcctcgtttcttagcagcttctcatcatcatcgtccttctgtgcatttagctgggaagtttataagcctccctcgagatgttcgcttcacgagcttatcaacttcaagaatgcggtccaaatttgtttcaaccaattatagaaaaatctcaatccgggcatgttctcaggttggtgctgctgagtctgatgatccagtgctggatagaattgcccggttccaaaatgcttgctggagatttcttagaccccatacaatccgcggaacagctttaggatccactgccttggtgacaagagctttgatagagaacactcatttgatcaaatggagtcttgtactaaaggcactttcaggtcttcttgctcttatttgtgggaatggttatatagtcggcatcaatcagatctacgacattggaatc

SEQ ID NO: 120980 - DNA, 983 bp, Arabidopsis thaliana
cagctactcatacgactcactttagggaaagctcgtacgcctgcaggtaccggtccggaattcccgggtcgacccacgcgtccgcaaaaccactcccactttatttcttcttctctggttttcttaccaaaagaaactttcttcgtcttcctctgtatttaagctttaacaccctgtttttggtttccaacgttcaatcttcatcttcttctcgctgaaggtgtgtttggctctaacggtttaaagctttcttgaaacaccaattgaatcttttctctctaccggcaaaaaaaaaaagattagtccttttaggtctggaaacgccaagatcactcgttctaaaccttagattttgtctgcatttcgggataatcatttcatcgtcagggttcttcaaccaaactacatttacagaagaagaagaagaagaaaagttcgttactttttatgcgtttggataaacaaactcaagtttcttcttcatacatcgatctgattttccagatcaaacttcgaaaagagaaaaagccttctttaaatgattcgtgagttctccagtctacaaaacgacatcataaacattcaagaacattattctctcaacaacaacatggacgtgagaggagatcataaccggaaaaacccgagttttcgtggttcagctccagctccgattatggggaagcaagaattgtttcggacattgtcgtcgcagaacagtccaaggaggctaatatcagcgagttacttcagtttagaatcaatggttgtgcttgttggtctcacagcatctctcttgatcttaccgttgattcttcccccattgcctcctcccccttttatgctgcttttgattcctattgggattatggttttgcttatggttcttgctttcatgccttcttctaattccaaacatgtttcttcttcttccccttttatgtaataaacgtttctttaattgaagaaagaaatccttaacc

SEQ ID NO: 120981 - DNA, 403 bp, Arabidopsis thaliana
cccgcggccccccccgcgtccgagaagaagaagaaagatggagaagaaatctcagatttcgtcaacggaagctgttttccttggagctctagctccaggcgttaatggtccaacatggaacacattgagattcgcgtttctgctactgggtctatgtctagctttcatgctctctgtagctttcaccagtggccaatcaatgttgcttgttcatgttggctttctcattgttatcgcatctactctctttatcctcctcaattggtttcttgctcagacaggcttagtacaagtggaaacacatatgcaggagctgaatttgttacccgatgataaaaccacatgatcatggtcaaacgggtaaaagcaaagcttgtgtaacagaacaacagttaacaacaga

SEQ ID NO: 120982 - DNA, 502 bp, Arabidopsis thaliana
aaaaccaatttcttcttcttcttctctcaagtttgagtctgaggcatcacaacagataaagtcttgaactttgatcaagaattctaaacggagtttttgctcttctcgtcggtgaaagaaaaatcgagatgggttcaactccgttttgctactctatcaatccatctccatcaaagcttgatttcacgaggacccatgtgtttagtcctgtttctaaacagttttacttagatttatcatcgttttccggaaaacccggaggagtatctgggtttaggagccgtcgagctttgctcggagtaaaggcggcgacggcgttagttgagaaggaggagaagagagaggcggtgacggagaagaagaagaaatcgagggttttagttgccggaggtggaatcggaggattgggtgtttgctttagcggctaagaagaaaggattcgatgtgttagtgtttgagaaagatttgagtgctataagaggagaaggaaaatacagaggcc

SEQ ID NO: 120983 - DNA, 1168 bp, Arabidopsis thaliana
atgatcctgccagctacaatacgactcaccttagggaaagctggtacgcctgcaggtaccggtccggaattcccgggtcgacccacgcgtccgtggcgctctcactccggtctcaccgacggcaaatcaagcggcgtgaatctggtcggaggttactacgacgccggagacaatgtgaaatttggattaccgatggctttcacggtgacgatgatggcgtggagtgtgattgagtacgggaatcaattacaagccaacggcgagcttggaaactccattgacgccattaaatggggtactgattatttcatcaaagcccatcctgagcccaacgtcctttacggcgaggttggagatggcaacaccgaccattactgttggcagagaccggaagaaatgacgacggaccggaaagcttacaggatagatccgagtaatcccgggtcggatcttgccggagaaacagcagccgccatggccgccgcatcaattgttttccgccgatctaaccctgtttactctaggctactactcactcacgcctatcagttgtttgatttcgccgacaaatacagaggaaaatacgacagcagtatcactgttgcccagaaatactaccgatccgtcagcggttactatgacgagttattgtgggccgctgcgtggctataccaagcttccgaacaatcagttctacttggactacttgggttcgcaacggtgacgccatgggttggtaccggttggtccatgactgagtttggttgggacgttaagtacgctggtgttcaaacccttgttgccaagtttttgatgcaaggcaaagcaggacgtcacgcacctgtgttcaggaagtatcaagagaaagctgattcctttatgtgttccttgttgggtaaaagctcgaggaacattcagaagacaccaggtggtttgattttcagacaacgttggaacaatatgcagtttgtcacaagcgcttccttcttgaccacggtttactcagattacctaacttcttctcgaagcaacttgagatgtgccgcgggaaatgtcgcaccttcgcagcttctttcctttgctaaatctcaggtggattatattcttggagataacccgagagctaccagctacatggttggttatggtaacaatttccctcagagag

SEQ ID NO: 120984 - DNA, 479 bp, Arabidopsis thaliana
ccatcttcttcttcttcctctctccttctccggccactttcctcactctctggtctccctatatcagcgctttttagctgatcctctctccggcatttctctctctctcttttttttagccatggagaaatttgcgcctgtcgctgctctgttactgcttcttctctgttttccggtagctttctccggtcatgattatggtcaagctctttccaagagtcttctcttcttcgaagctcagagatctggtgttcttcctcgtaaccagagagtcacttggcgctctcactccggtctcaccgatggcaaatcaagcggcgtgaatctggtcggaggttactacgacgccggagacaatgtgaaatttggattaccgatggcttttacggtgacgatgatggcgtggagtgtgattgagtacgggaatcaattacaagcccacggcgagcttggaaactccattgacgcctttaaatggg

SEQ ID NO: 120985 - DNA, 373 bp, Arabidopsis thaliana
catttcttcaatttcggttaaaccattttcgttctttcttcttttaacaagaaaccaccgctctgtacaaaacaaagtctccgtcgtttcttctccgttctccggtcaattcgaattcctcagagagaaatttgtgctcgcgagttccgcgtgaaatacatggaaatgttggcggcgttggactcgcgttcttctctccatcttcatcgttccatgtctcgcgttgacctttttgccggtgttcgtatgaaaccatctcctacaagtcctgttccgaatacgcctcgaatatgtggaagtaaactctgttgattcgactcttcctcttccctttagtagttcctccgtttgtttttcctttgcatctgaattt

SEQ ID NO: 120986 - DNA, 585 bp, Arabidopsis thaliana
  unsure (1)..(585): unsure at all n locations
gcggtaccggtctcggattcccggctcgacccacgcgtccggagcctaatccaagattctcttccatggcttctattttcagaccttcttcagcttcacttgatttacgaccaaaggttatttgcacgaatctctctacgaaagagcggtttgagtttcagaagaagagtgtgaggaaagaaaggatcaatgttaggttttatagcttgaaggctaaggcacaaggatcgtcaattgaagggattagtgttgtacaagagaaagagcttaacaacaaaaccgattatggagttgttggggttcatcatgtcggtctgctctgcgagaacctagaacggtcactcgagttttaccagaacattttaggccttgagatcaacggagcaaggcctcacgacaagcttccatatagaggagcatggttatggggtaggttcagaaatgattcatcttatggagcttccaatccagatccattaacaggtagacccgagcacggaggccggatcgcacggttttnttcaaancgngntnttaaatctgaagggtntttgcaaantggnttcatttcatgggngncgggtc

SEQ ID NO: 120987 - DNA, 528 bp, Arabidopsis thaliana
  unsure (1)..(528): unsure at all n locations
gaaaaatgggacgcctccaggaaccggtccgggaattcccgggttgacccacgcgtccgtccggttgggagaaggcgacagaagggggggcatgaacccgtaagctcccaagcagtgggaggagccctgggctctgaccgcgtgcctgttgaagaatgagccggcgactcataggcagtggcttggttaagggaacccaccggagccgtagcgaaagcgagtcttcatagggcaattgtcactgcttatggacccgaacctgggtgatctatctatggccaagcttgatttcagtctatttgtagatgaatcctctaaactttcacttgatgatcagttgtgaaggctcttcatatagagcgtgcaaaaagcaaaccaaatccttgttgacttattatataatacccccaatacattgtcccgtgaaaaaaaaaaaaaaaaaaaaaaaaaaaagcggccgctctagaggatccaagcttacgtacgcgtgcatgcgacgtcatagtactctantagtgtcgtcctaaa

SEQ ID NO: 120988 - DNA, 601 bp, Arabidopsis thaliana
  unsure (1)..(601): unsure at all n locations
angccatttggttnncttaggtgccaggcccccatggggttngtttttcagggaaggcttcnacaaccngttttggattttgggntcaccatgccggtctgcctgcgngaccntngacggtcacncgggtttttcccaggacntttttgggccttgngatcaacgaagcaaggcctcacggacaaggcttccattatagggggagcatggttatgggtnggttcagaaatgattcatcttatggagcttcccaaatcccagatccattaacaggtagacccgagcacggaggccgggatcgacacgcttgtattgcaatccgtgatgtttcaaatctgaaagagatcttagacaaagctggaattgcatatacaatgagtaagtcagggaggccagcgatatttactcgtgatccagacgcaaacgctcttgagttcacccaagtttgatttgagtctatttgtagatgaatcctctaaactttcacttgattatcagttgtaaatgctcttcatatagaactgcaaaaagcaaaccaaatccttgttgacttattatataataccacaatacatattcacaggggnancagacaagnaag

SEQ ID NO: 120989 - DNA, 1014 bp, Arabidopsis thaliana
  unsure (1)..(1014): unsure at all n locations
cagctactaatacgactcacttagggaaagctcgtacgcctgcaggtaccggtccggaattcccgggtcgacccacgcgtccgcttcttcctagattcgctcctccactgtcttaaatttcactatcttcttcttcattttccttccttctcacttcaaatccataatcgctctacttctctctctctctctagattcgaaaaaatggcgaaactggtgatgttgttggttctctgtatcttaccggcgatagccatggcggcaaggaggggaaatattggaaagaatacaatggtggttcaaggtagcacctactgtgacatttgcaaattcggcttcgagactcctgaatcctcctacttcatccccggtgcaacggtgaagctatcatgcaaagacaggaagacaatggaagaggtttacacagacaaagctgtatcagacaaagaaggaaagtataagttcattgtccacgacgatcacagagaccagatgtgcgatgttttgcttgtgaaaagctcggataaaacctgctctaaaatctccgttggacgtgagaagtctcgtgtgatcttgaaccattacagtggcattgcctcgcagatcagacatgctaacaacatgggatttgagaaagaagtgagtgatgtgttctgctctgctttgtttcagaagtatatggttgatgaagatgaggatgatattaaaaaccatctctaatctctctgtttaatcttatgatctgctgttttcttcattaatgagtttcgagttatggaagagatatatttgtatttgtttgattacttatttgttgtctttagagatgttgactctggtgatcggataactatctgtttgtgtaagcttcttatatattgatgtgtcatttccttgcttaggaagtgtcttttattnnnnnnnnnnnnnnnnnnnnnnnnnnnnnnnnnnnnnnnnnnnnnnnnnnnnnnnnnnnnnnnnnnnnnnnnnnnnnnnnnnnnnnnnnnnnnnnnn

SEQ ID NO: 120990 - DNA, 542 bp, Arabidopsis thaliana
  unsure (1)..(542): unsure at all n locations
atgatattgccnnnnncccctgngcctcagagggtataccaaagcttgatatcgaattcgcagccgcccggcgatagccatgccgcccggccggggaaatattggaaagaatacaatggtggttcaaggtagcacctactgtgacatttgcaaattcggcttcgagactcctgaatcctcctacttcatccccggtgcaacggtgaagctatcatgcaaagacaggaagacattgctagaggtttacacagacaaagctgtatcagacaaagaaggaaagtattagttcattgtccacgacgatcacagagaccagatgtgcgatgttttgcttgtgaaaagctcggataaaacctgctctaaaatctccgttggacgtgagaagtctcgtgtgatcttgaaccattacagtggcattgcctcgcagatcagacatgctaacaacatgggatttggagaaggaagtgagtgatgtgttctgctctgctttgtttcagaagtatttggttgatgaagatgaggatgatattaaaaaccatctc

SEQ ID NO: 120991 - DNA, 592 bp, Arabidopsis thaliana
ttcggtctcgtccgcccacgcgtccggtttttgtttacagagcatattacagatgcacgcatcgattcacacaagactgtttagcagtgaagcaagttcagaaatcagacacagatccttcccttttcgaagtgaagtatctcggaaaccacacttgtaacaacatcacatccccgaagacgacgacgaacttctctgtttcattgacgaacacgaacatctttgaaggaaacagagtacatgttacagagcaatcggaagacatgaaaccgaccaagtccgaagaagtgatgataagccttgaagatctggagaacaagaagaacattttcagaacgttttctttctctaaccatgagattgagaacggtgtgtggaaaagtaaccttttcttgggaaatttcgtggaagatctttctcctgcaacatcagggtctgcaattaccagcgaggttttatctgcacctgctgctgttgagaattccgaaactgcagattcgtatttctcgtctttggacaatattatcgatttcggacaggattggttgtggtcgtagctttgaataattgatttggtgaatgtaatgtctct

SEQ ID NO: 120992 - DNA, 552 bp, Arabidopsis thaliana
  unsure (1)..(552): unsure at all n locations
gtntctgggncttggattccgtccnncccgggaaccccaaagggnccggaangggntttccggtgacatggccngggtgngaccagtccggtggtggaaactgtaangggaaggaccgcccaggagttctcgatgtgtatggagggaatgtgacggactcgaggagcagtggaatagatatgggcatcggtggtcggagtttggccagcgaagattccagatggactcactccaagtgctgtgttttctcagatcatgaatcccaaagggacgttagagaagtcttataacacggtacaacactactacctttctaaaccggctccatccaaaggagaccggttcgtttctcttttttatattttttttcctcttaactatttattattattctctttgctgttatttatttagaattttggatttgtgtatttgatactgccacgatggagagtgtaaaaaataatgtatttttttttcttctttctacaaaaacattaaacatgaatcgcgtcaatgtactatttggtttgttatctataacgtttttgg

SEQ ID NO: 120993 - DNA, 612 bp, Arabidopsis thaliana
atcttgacccagagtatttcagacggcagcaactgactgagaaatccgatgtctactcctttggcgttgttctattcgaagctctatgcgctcgtccagccttgaacccaacacttgcaaaggaacaagtgagcttagctgagtgggcaccatactgctacaagaaaggcatgctagatcaaatcgttgatccctacctcaagggcaagatcacaccagaatgcttcaaaaagtttgctgaaaccgcgatgaagtgtgttctagaccagggcattgagagaccatcaatgggagatgttctgtggaacttagaatttgcgttgcagctccaggaaagcgcagaagagaacggaaaaggagtatgcggtgacatggacatggatgagattaagtacgatgatggaaactgtaaaggaaagaacgacaagagttctgatgtgtatgaagggaatgtgacggactcgaggagcagtggaatagatatgagcatcggtggtaggagtttggccagcgaagattcagatggactcactccaagtgctgtgttttctcagatcatgaatccaaagggacgttagagaagtcttataacacggtacaacactactacct

SEQ ID NO: 120994 - DNA, 1085 bp, Arabidopsis thaliana
  unsure (1)..(1085): unsure at all n locations
tgannnnnnnnnnnnnnnnnnnnnnnnnnnnnnnnnnnnnnnnnnnnnnnnnnnnnnnnnngaccgtaccgaaatttccggccccacgtcccgagacacgcaaacatatccattagggtcacaacggttcttacagcttctattaccagaaaggaaagaaagccgaaatttgtttcaagataaagtaatttaagttggagcttgtttcttggtcgtacagtgtcaggtgaatagagaagaagaagatggaaaacacagacgagcttgtctccattgagctaccagctccagcttcatggaagaaactgttttatccgaaaagagccggtactccgagaaagacggagattgtgtttgtggctccaacgggtgaagagattagctcgcggaagcagttggagcagtacctgaaggcccatcctggcaatcctgtcatctctgagtttgagtggacaactggggaaactccaaggaggtcttcaaggatcagccaaaaggttaaggctacaacgcctactcctgacaaagagcccctcctgaagaagagacgatcttctctcacgaagaaggacaataaggaggctgctgagaaaaatgaagaggctgctgtgaaggagaacatggatgttgataaggatgggaagacggaaaacgcagaggctgagaaggagaaagagaaggagggagtgacagaaattgcagaggcggagaaggagaacaacgagggtgagaagactgaggctgagaaggtgaacaaagagggtgagaaaactgaggctgggaaggagggtcaaacggaaattgcagaggctgagaaggagaaggagggtgaaaaggctgaggctgagaacaaagaggcagaagttgtgagagacaagaaagagtccatggaagtggatacctctgagttggagaagaaagctgggagtggagaaggagctgaagaaccttccaaagtttgaaggcctcaaggacactgaaaatgaaagaggcgccaggaagttgtttactgaagcctgatgtaaagaaagaagccctgccggaggaaaaagactgagaacaagggccacgtgacaaccgaagct

SEQ ID NO: 120995 - DNA, 963 bp, Arabidopsis thaliana
tgatacttctaatacaactcattatagggaagagctggtccgcctgcaggtaccggtccggacccgcggtcccacgccccaccaatctccagaaaaggggagaagcaaaaatggtttctctgaagctccagaagcggctcgccgcatcagtgatgaagtgcgggaagggcaaagtttggctcgatcccaacgaaagctccgacatctccatggccaattcccgccaaaacatcaggaagcttgtgaaggatggtttcatcatcaggaagccaaccaagattcactctcgttccagagctcgcaaaatgaagattgccaagatgaagggtcgtcactctggatacggtaagaggaagggtacccgtgaagctaggttgccaacaaaggtactgtggatgcgtaggatgcgtgttcttaggcgtctgttgaagaaatacagagagacgaagaagattgacaagcacatgtaccatgacatgtacatgcgtgttaagggtaatgtgttcaagaacaagcgtgtcttgatggagagtatccacaagtcaaaggctgagaaggctagggagaagactctgtctgatcagtttgaggctaagagggcgaagaacaaggctagccgagaaaggaagcatgctaggagagaggagcgtttagctaagggtcccggtggagatgttgcgcctgtagctgctccagcacctgctgctacacctgctccaactgcagctgtaccgaagaagaagtctaagaaggcctttttattacaccaggagttgacggggtccaatatttctgtaggtaaccctccggactgggttgggactttggttccaaagattaagggcctcaatgtgttttgagactttcaagaaaaatttccaaaatggaatgggaacaccgagaatcattatcttacgtgttttgcaccaaacttatgaattcttttgttttctcaaatcatgt

SEQ ID NO: 120996 - DNA, 667 bp, Arabidopsis thaliana
  unsure (1)..(667): unsure at all n locations
ccttgcnnccatcgccgtcgtacccctcctgatcctctggacctctacgccccctctgccatctagaaaagtggatccttgggatgcgtgttcttaggcgtctgttgaagaaatccagggagacgaagaagattgacaagcacatgtaccatgacatgtacatgcgtgttaagggtaatgtgttcaagaacaagcgtgtcttgatggagagtatccacaagtcaaaggctgagaaggctagggagaagactctgtctgatcagtttgaggctaagagggcgaagaacaaggctagccgagaaaggaagcatgctaggagagaggagcgtttagctaagggtcccggtggagatgttgcgcctgtagctgctccagcacctgctgctacacctgctccaactgcagctgtaccgaagaagaagtctaagaagtgaagaggatatatagtgtgaagctatatcgatcatcagttcacggattagactctgaagaaggttttgaatgttttatcgaatgcgtttgtggaataacttttattttcgcaaagaacataacttatgtcagttaatctttatgctttcagatttttagcttacagtgtttcaacagacctactttgcaagttgttctttttttggtttcttattgttttttgttcgtcaaaaaa

SEQ ID NO: 120997 - DNA, 673 bp, Arabidopsis thaliana
  unsure (1)..(673): unsure at all n locations
ccccntnnaggccccccccccccccnnannctnaaaanntgggncccnnngggncccnngttttcctaaggcgtctcttttggaaaggaattcccggggggggcccgaaggaaggtttttgccaagccaccttgttcccccttgcaccatggtcccatgccgttgttaaggggtaattgtgttcaaggaccaagccgtttcttgatgggagagttctcccacaaggtcaaaggcctgagaaggctagggagaagactctgtctgatccagtttgaggctaagaggccgaagaacaaggctagcccgagaaaggaagcatgctaggagagaggagcgtttagctaagggtcccggtggagatgttgcgcctgtagctgctccagcacctgctgctacacctgctccaactgcagctgtaccgaagaagaagtctaagaagtgaagaggatatatagtgtgaagctatatcgatcatcagttcacggattagactctgaagaaggttttgaatgttttatcgaatgcgtttgtggaataacttttattttcgcaaagaacataacttatgtcagttaatctttatgctttcaaaaccttcttcagagtctaatccgtgaactgatgatcgatatagcttcacactatatatcctcttcacttcttagacttcttc

SEQ ID NO: 120998 - DNA, 758 bp, Arabidopsis thaliana
  unsure (1)..(758): unsure at all n locations
tntccccgtccccaacctttttggggaaggcgaacnnggtncggggccttttccnattttccccnagcttncaaaaaggggggattttnctccaangncgnntttaagtttgggtacccnccagggttnccccagtccaccgccgttttaatttgacccccgcccagtgattgaattttgggtgccccttttggaagcgcttttgccgtcccattccacccgtccgtaagcttggaccctctaggccgcccgctcgcgatctagaaagtggatccttaggatccgtgttcttaggcgtcctgttgaagaaattccagtgagacgaagaagaattgacaagcacatgtacccatgacatgtacatgcgtgttaagggtaatgtgttcaagaacaagcgtgtcttgatggagagtatccacaagtcaaaggctgagaaggctagggagaagactctgtctgatcagtttgaggctaagagggcgaagaacaaggctagccgagaaaggaagcatgctaggagagaggagcgtttagctaagggtcccggtggagatgttgcgcctgtagctgctccagcacctgctgctacacctgctccaactgcagctgtaccgaagaagaagtctaatccgtgaactgatgatcgatatagcttcacactatatatcctcttcacttcttagacttcttccaggactctgtgggntgcccaggnagtncaggccnggtccatcagagggtaannaagggacccggtc

SEQ ID NO: 120999 - DNA, 764 bp, Arabidopsis thaliana
  unsure (1)..(764): unsure at all n locations
gcgnttcctcagcnttagtggtacccaggttcccngnncgcgtttaaccgcgccngtgattgatttngnnccctttngagggctttgcntcccatncccccttcctaagcttggancctcnagaccggccgtcgcgatcttgaagtggatncgtaggatgcgtgttcttaggcgtctgttgangaatacagagagncccgaaggaaggattggccagccaccctgcacccattgccaatgttaccatgccgtgttaagggtaaatgtgttcaaggaccaacgccgtgtccttgatggcagngtatcccaccaggtcaaaaggctgagaaggctaagggagaagactctgtctgatcagtttgaggctaagaggccgaagaacaaggctagccgagaaaggaagcatgctaggagagaggagcgtttagctacgggtcccggtggagatgttgcgcctgtagctgctccagcacctgccgctacacctgctccaactgcagctgtaccgaagaagaagtctaagccgtgaactgaggatcgatatagcgtcacgctatatcgcccatcagttcacggattagactctgaagaaggttttgaatgttttatcgaatgcgtttgtggaataacttttattttcgcaaagaacataacttatgtcagttaatctttatgctttcaaaaccttcttcagagtctaatccgtgaactgatgatcgatatagcntcacactatatatcctcttcacttcttagacttcttc

SEQ ID NO: 121000 - DNA, 895 bp, Arabidopsis thaliana
  unsure (1)..(895): unsure at all n locations
tagggnngnccccanttcccatttaagggntccaacctttttgggaanncnacnnggtcgggcccttttcnnntttttccccagnttncnaaaaggggggtttttcttcaangccgnttaagttgggntaccnccagggntttccccaggttacggccgttgtaaacctgccccccgcccagtgaatttgaatttggggcgccccttttgaagcgcttttgccgccggcatgcccccgtccgtaagcgctttggaccctctaggcgcgccggccccctcgacgactctagaagttggatcccgttaggattgcgtgttcttaggcgtcttgtttgaaggaaattccagagagccgaagaaggtttgacaagcacttggtcccatgcatgtcatgcgtgttaagggttaatgtgttcaagaacaagcgtgtcttgatggagcgtatccacaagtcaaaggctgagaaggctagggagaagactctgtctgatcagtttgaggctaagagggcgaagaacaaggctagccgagaaaggaagcatgctaggagagaggagcgtttagctaagggtcccggtggagatgttgcgcctgtagctgctccagcacctgctgctacacctgctccaactgcagctgtaccgaagaagaagtctaagaagtgaagaggatatatagtgtcacagctatatatcctctcctcactacttagaccctgaagaaggttttgnntgttttatcgaatgcgtttgtggnataacttttattttcgcaaagaacataacttatgtcagttaatctttatgctttcaaaaccttcttcagagtctaatccgtgaactgatgatcgatatagcttcacactatatatcctcttcacttcttagacttcttc

SEQ ID NO: 121001 - DNA, 789 bp, Arabidopsis thaliana
  unsure (1)..(789): unsure at all n locations
taacggcggcctttnttttcccactncnaggggtttccncagcnattagtggnnccccgggtttcccagtccgccttntaaccgccgccagtnattgatttgggtccccnttggagngctatncgtcgcatncacgcgtccgtagccttgctccgctgccggcccgccnctcatcgcgaaattctagacgtgattccgtaggatgccgtgttctttagccgtctcgtttgaaggaattacagagngaccgaagaagattgccaagcacattttccatgacatgtacatgcgtgttaagggtaatgtgttcaagaacaacgtgtcttgatggagagtatccacaagtcaaaggctgagaaggctagggagaagactctgtctgatcagtttgaggctaagagggcgaagaacaaggctagccgagaaaggaagcatgctaggagagaggagcgtttagctaagggtcccggtggagatgttgcgcctgtagctgctccagcacctgctgctacacctgctccaactgcagctgtaccgaagaagaagtctaagaagtgaagaggatatatagtgtgaagctatatcgatcatcagttcacggattagactctgaagaaggttttgaatgttttatcgaatgcgtttgtggaataacttttattttcgcaaagaacataacttatgtcagttaatctttatgctttcaaaaccttcttcagagtctaatccgtgaactgatgatcgatatagcttcacactatatatcctcttcacttcttagacntcttc

SEQ ID NO: 121002 - DNA, 834 bp, Arabidopsis thaliana
  unsure (1)..(834): unsure at all n locations
gaccggtcccggnaattncccggngtgcgnacccacgcgtccgnaatcagggagaggctaaaatggtttcgttgaagctccagaagcgtctcgcatcctcagtactcaagtgcgggaagagaaaagtatggctcgacccggacgaaggaagtgatatctccatggccaattcgcgtcaaaacatcaggaagcttntnaaggatggattcatcatcaggaagccaacgnagatccactcacgatccgccgcacgctcaattgattatggtgcccttagaggcttggccgtcgcatgcactctcgtcatggtaagcgggaagggtacccctagaccgcccaggcttcgccatcttagagttgttttggattccgtaggggtttgcgtgttcttcaggcgtcagttgaagaaataccagaggagacgaagaagattgacaagcacatgtaccatgacatgtacatgcgtgttaagggtaatgtgttcaagaacaagcgtgtcttgatggagagtatccacaagtcaaaggctgagaaggctagggagaagaccctgtctgatcagtttgaggctaagagggcgaagaacaaggctcagccgagaaaggaagcatgctaggcagagaggagcgtttagctaagggtcccggtggagatgttgcgcctgtagctgctccagcacctgctgctacacctgctccaactgcagctgtaccgaagaagaagtctaatccgtgaactgatggatcgatcatagcttcgcactatatatcctcttcacttcactcctcctactcctcccacaaaacaaacaaaccaaaggaangaantctggca

SEQ ID NO: 121003 - DNA, 570 bp, Arabidopsis thaliana
  unsure (1)..(570): unsure at all n locations
atccccnnnaaggttnccaangnttattgggncccggttncccanccgcttttaacccccccctggattgtttgggccccttttgaggctttcccccccatcccccttccacacttggccccctaggccccccaccctctttaaatttggattccttaggatccctgttcttaggccgtcttttgaaggaattccgggggccgaagaaggtttgccaagcacatttcccttgacatgtacatgcgtgttaagggtaatgtgttcaagaacaagcgtgtcttgatggagggtatccacaagtcaaaggctgagaaggctagggagaagactctgtctgatcagtttgaggctaagagggcgaagaacaaggctagccgagaaaggaagcatgctaggagagaggagcgtttagctaagggtcccggtggagatgttgcgcctgtagctgctccagcacctgctgctacacctgctccaactgcagctgtaccgaagaagaagtctaagaagtgaagaggatatatagcttcacactatatatcctcttcacttcccggattagacttcttc

SEQ ID NO: 121004 - DNA, 627 bp, Arabidopsis thaliana
  unsure (1)..(627): unsure at all n locations
cccacgcgtccgcccacgcgtccgcccacgcgtccgcggacgcgtgggtaactatcatcagatcaataaaaaccagaagaagtcatggctcagaacgatacagtgaagctgataggttcttggtctagcccttattcccttagggcacgtgtggctctacacttgaaatctgtcaagtacgagtacttagacgaacctgatgttcttaaagaaaagagtgaactccttctcaaatctaaccccatccacaagaaagtccctgtcctcctccatggtgacctctccatctctgagtccctcaacgttgttcaatacgtcgacgaggcttggccctccgttccttcaatccttccttctgatgcctatgatcgcgcatctgctcggttttgggctcagtacatcgatgacaagtgttttgcggcggtggatgcggtggtcggagcaaaagacgacgaagggaaaatggcggcggtgggaaagctgatggagtttttggcggtactttaagaaacgttcaaagagcaacaaaagggttaggggttttttgaggggggaccattggtacctttaaatttctttttcggccttttaggcccaaccttttaatcnaggggttccggggaaatt

SEQ ID NO: 121005 - DNA, 740 bp, Arabidopsis thaliana
  unsure (1)..(740): unsure at all n locations
accaatctccagaaaaggggagaagcaaaaatggtttctctgaagctccagaagcggctcgccgcatcantgatgaagtgcgggaagggcaaagtttggctcgatcccaacgaaagctccgacatctccatggccaattcccgccaaaacatcaggaagcttgtnaaggatggtttcatcatcaggaagccaaccaagattcactctcgttccagagctcgcaaaatgaagattgccaagatgaagggtcgtcactntngatacggtaagaggaagggtacccntgaagctaggttgncaacaaaggtactgtggatgccgtaggatgngtgttcttaggcgtctttttntgaaatacaggcgggcctggaaggaaggatttgtcaacgcaacaatggtacccttgaacatgtcacatgcccggtgtttaaggggtaatttgtgttcaaggaccaagcgtgtcttgatggagagtatccacaagtcaaaggctgagaaggctagggagaagactctgtctgancantttnaggctaagagggcgaagaacaaggctagccgagaaaggaagcatgctaggagagaggagcgtttagctaagggtcccggtggagattttgcgcctgtagcttgctcccagcacnctgctgctacacctgntnccaactncaagctntacccncagaaagnaagtctnaangaaaggtttaagaggggttatataagttgtgaaagctaat

SEQ ID NO: 121006 - DNA, 637 bp, Arabidopsis thaliana
  unsure (1)..(637): unsure at all n locations
ggaanacccgggacggcgcccgcgtgcgagagactaaaatggtttcgttgaagctccataatcgtctcgcatcctcagtactcaantgcgggaagggaaaaatatggcggggcgccggcgaangaagtgatatctccatggccaattcgcgtcaaaacatcaggaagcttgtgaaggatggattcatcatcaggaagccaacgaagatccactcacgatccagggcacgttcaattgaatatagccaagagaaaagggacgtcactctggttatggtaagaggaagggtacccgaggggggcaaggtttgccaacaaaagttttggtggatgaggaggaggtatgagagtcctgaggcgtctgttgaaagaagtaataagggagacccaagaagattgacaagaccatatggtcccttgacatgtacatgaaggtaactcaagggaaacacgtcttcaagaacaagcgtgtnttgatggaaagtattcacaaatccaaggctnagaaggctntgngagaaggncattntnttgnccngtttnagggcttagaggggcttaggaccaaggttttcccnggagggggaaacatttttccccgggngggggnttttttcccaagggtccncggggggnaa

SEQ ID NO: 121007 - DNA, 520 bp, Arabidopsis thaliana
cagctctctacgactcatatagggaaagctgctacgcctgcaggtaccggtccggaattcccgggtcgacccacgcgtccgcccacgcgtccgcggacgcgtgggttcatcaatccctcctgctaccgcgagagagtaacaactcaccggacgtttcaaatccatcctccgataactatattcgtttcgttagatctagatctgagcgtcggtgagagattttctggatctgtgatacgttccaggaaacatggcgacgatgaaaagtttgataggtctgataaacaaaatccagagggcgtgtactgtcctcggagatcatggcggtgaaggaatgtcgctttgggaagctctcccaaccgtcgctgtcgttggtggccagagttccggaaaatcttcagttctagaaagtgttgtgggaagagattttctgcctcgtggatctggtatcgttacaaggaggccattggtgttgcaacttcataagactgaagacgggacaactgagtacgctgagttt

SEQ ID NO: 121008 - DNA, 411 bp, Arabidopsis thaliana
aagtttcagacataacatctcttcccatctctctcccctctaagcaattaagcagacaagacactgatgatatgagacgaagagaaagaagtcttatcactcatcctttcctcttatgaatctctccgccgaccaagctcccgtcaccgccgtcgacgaactagctccgccttctcaaccgcatcgcttatctacatcatgtgatctccacccagaagagcgtttctccggtttctgtccttcttgtctttgcgaccgcctctccgtcttagatcacaacgccgctccgccaccgtcttcttcttcccggaaacctccctctatctccgctgtttcgttaaaagctctcttcaagccctcctctagtggtaccaacaactccaacggaaacggtcgggtcagacccggttt

SEQ ID NO: 121009 - DNA, 667 bp, Arabidopsis thaliana
  unsure (1)..(667): unsure at all n locations
atgatgatactccagctctctctcactatatggaaagctggtacgccctgcaggtacccggtccgggaattaattccctgggtcgacgagctcactagtcggcggccgccctttttttttttttttggagttagaatgctatgaattccaaaccagagaagattcaaataaaacagagactaaaaaggctgttcaaacagtaataattcttgcacatgaacactaaaccagaacgataacaggaaacaaagatacagtcagtactcagtagtttgagggcacctacggaaagcaagtaatactacagagggtagacgttccagtgcttaatgatgaaacatcatcagtacaagcaaacgtgtttttcatcatacaccgtatcactttcacaagtggctgcagtcattccgcagcataaggagattgacttcgagaagcagcatcaactttgcgcagaggagcagggctaccaggagatggggacctctcattgctacgcctttcaggagacatctccttagaaggagaggccttttgcaaagcagggcttcttgggctgaggctgcgacgaggagatggagacctctcattgctacgcttatcaggagaaacttctctagcagtgacaggttctggggagactctaggntnggnaacaggaatnctt

SEQ ID NO: 121010 - DNA, 549 bp, Arabidopsis thaliana
  unsure (1)..(549): unsure at all n locations
atgatactgccnnnnnnnnnnnnnnnnnnnnnnnnnnnnnnnnnnnnnnnnnnnnnnnnnnnnnnnnnnnnnnnnnnnnnnnccacgcgtccgcggagaatctcagtcgcgccgtcaactttttgttgagaagagatatcatctgttttcgatccaaagaatagaaagcttggattccgaaatctccctttttgcttccccaattcgttttcctttacaagctcggcgcttgatctcgctatctctcagagagctgagagctgaggatattggaaatttggaaggtggaatctcaaatggctgaacttcctggtcaaataagacatataggcggtcgaatgagtcaactgctagagcagatatatgggttttcgagaagatctttgtttcgggtcatatctatgggtcctataccttgtcatattgcctttatcatggatggaaatcggagatatgcaaagaagtgtggtcttttagatgggtctggtcacaaagcggggttttctgcgcttatgtcgatgctgcaatactgctacgagctgggtatca

SEQ ID NO: 121011 - DNA, 579 bp, Arabidopsis thaliana
  unsure (1)..(579): unsure at all n locations
nnnnnnaatacgactcactttagggaaagctcgtgcgcctgcaggtaccggtccggaattcccgggtcgacccacgcctccgcaaatatcttcactcacaagttttgagtatgttgaaccaaatgggaaagatgtgggaatcaacgtgagaaagaaggcggaaaacatagtcgctcttttaaataataaagagaaaatctcagaaatcagagacaaagcagtagcaaatcgtaacaagtatgttggcctctcatcaacgggaataacatataaatctggttcctcagcttcatttggtggtagttttcaaagtggttcaagcaattttgacagctacaaggatagagattccagagaagacaagaatgactacgagtcttttcaaaagtcaagacgtggtgttaaaactgaggagcaaagctacacttctaagaagagtttttcacgctatggcagcacggaccatgacaatctatccagtggtaaaaagtcacccgattctgccaaacataggtcatatgtatctgcagctccttcaaacaacgatgatgattttgatgattttgatccacggggaac

SEQ ID NO: 121012 - DNA, 660 bp, Arabidopsis thaliana
caaacatagacgagtatctatggttaatgggcttatctcattacaaacccgtaatcgagtattgtggcggaactgagattggaggcagttttatctcaggttctttgcttcaacctcagtcgctggctgcttttagcacagctgccatgggttgcaagcttttcattctcgatgaagatagcaatcctattcctccatatgctgcaggagtaggcgaattggctctttgtcctcacatgtttggagcttcaagcactcttctgaacggtaatcacttcaaagtttacttccaaggaatgcccaccttccaaggacagatcttacgaagacatggggatttatttgaacggacttcaataggatactaccgtgctcatggacgtgctgatgacacaatgaatcttggtggtataaaggtcggttctagtgagatcgaacgagtctgtaattccgttgatgacagtgttctggagacagcacccattggtgttccacctcctagtgggggtcatgagcagctagtaatcgctgttgtgttcaagagcccataattttcaaatcccgactttaacctgttcaagacgtccttcaactccgagatacatgacatactgaatcctttagttaaggtatcatctgttgtgactcttccttctctac

SEQ ID NO: 121013 - DNA, 539 bp, Arabidopsis thaliana
  unsure (1)..(539): unsure at all n locations
nnnnnnnnnnnnnnnnnnnnnnnnnnnnnnnnnnnnnnnnnnnnnnnnnnnnnnnnnnnnnnnnnnnnnnnnnnnnnnnnnnccacgcgtccgcggacgcgtgggttcattcttcatcgaatagtcgaaaaatatttgaactttcttaggaaaccaaaccaacaaaacaaaaaggaaaacgagataatggtgttaccttggagatcaagaggaggagtagcaaagagacgtaatcaattgatttccggcgatatctccgtcgtggaaaccaagattccagttcaactccgatcgccatcaaggatagagcggattcagtcaccgcgcgtgctgttgacgccgcgtgatgcggtggagataagtcggagattgcaaaacgcagcggcgcgtgaggagtatgccgagtgtttggagattgtgagcaaaatcaagaaccttgggaagaggaggggacacgaacaagaagtgtttggtcccaaaacggaagcggtttcggctttgtcttcttgttttgaaagattcgcggcggcgcgtgatgg

SEQ ID NO: 121014 - DNA, 510 bp, Arabidopsis thaliana
  unsure (1)..(510): unsure at all n locations
ccnnnnnnnnnnnnnnnnnnnnnnnnnnnnnnnnnnnnnnnnnnnnnnnnnnnnnnnnnnnnnnnnnnnnnnnccacgcgtccgaccagctatgctctccgtcgcaagacgtctcggttcggcgacgccgtcgcttcaaaacggagcttccttactccggttcatgagaacggaggcaagtcagccaagacggcggaacaaatttccctctctatcgccactcaagaagaaagaggagaaatcagagtggtggatcgtcgacggagagatgcacgagatcggagatcacgtacctctgcgtgagcgtttcacaatcccgagagacaatatccccaataagcgccggaaacagctccgggagcagttcatgcgacgaactcgtctcgttcttaaagaatcggagcatgagccatggggcaagaagtacatggaattgtataatgaggttagagaaaactgggagaggctttattgggatgaaggatattctaagaaaattgcgagagatct

SEQ ID NO: 121015 - DNA, 630 bp, Arabidopsis thaliana
  unsure (1)..(630): unsure at all n locations
ctcttcccatctcgagatccgccgttaaactctttttgcccaaactctgagcttctctctctgtcttcttcttcttcatctcctcttttgtattcaatcacagagagactctcttctccagatctatcatttggtttaatcaaggttagctagtgaacatggcaacgggggctgagaaccaatggcttaaaggaagagtgaaggctgttacctccggagactgcttagtgatcacggctttgagccacaacagagctggacctccaccggaaaagaccattactttttcttctcttatggcacctaagatggctcgcagaggaggtatagatgagccttttgcatgggaaagcaaagaatttttgaggaaactttgcataggaaaggaggttgcattcaaagtggattacaaggtggaagctattgctggaagagaatttggctctgttttccttggcaacgagaatcttgctaagcttgttgttaaaactggttgggcaaaggttagggagccaggtcagcagaatcaggacaaggttagtccttacattaaagagttgctacagcttgaagagctggccaagcaggaaggatatggtcgttggagccaggttcctggtgctgctgngg

SEQ ID NO: 121016 - DNA, 597 bp, Arabidopsis thaliana
  unsure (1)..(597): unsure at all n locations
nnnnnnnnnnnnnnnnnnnnnnnnnnnnnnnnnnnnnnnnnnnnnnnnnnnnnnnnnnnnnnnnnnnnnnnnccacgcgtccgcgcaaggactccaggatcatttccaccaaagcatcatatgccagtgattgactcttctccaaaacttaagcctagaaacgacagaatttcaccttctcctgctgctaaacatgaggctgaagaggcgatgtcagttaagcgtaggcaaagaacacctcctactttgccaagaagaacgtctttgatagcgcaccagtcgagacaactaggagcagatatttcaaatatggcagcaaaggaaaccgcgaagctacatccatctgtgccatcagagtctgaaactaattctcatcaatctcgtgttcatgcttctcctgtgagtacgacgccagagccaaagagaacctctgttggatctgccaaaggaatgcagagtgaaagcagcaactctatctcgtcgtcgttgtccatgcaggcatttgagctctgtgatgaatgcttcaccccatatattggcatgacagaacatacaaactcttgtggaccacagaaaaacctgttacatgtgaattac

SEQ ID NO: 121017 - DNA, 578 bp, Arabidopsis thaliana
atacgactcactttagggaaagcacgtacgcctgcaggtaccggtccggaattcccgggtcgacccacgcgtccgcccacgcgtccgcgcagagtcacaacaatgacattcaccttccttctccaatcaccaccactcccaatttctccatctcctcctcaattctctctttcctcttctcctttatcaaaaacgcagcgattcatcactccaagccagggctctcgtctacggactttgtgtaccaaagtcatcataccaaacatgcaagattcaggatcaccaccactctcttatcttactcagcgagaagccgctgagattgatgagaccttgatgggtcctcttggtttctccattgatcagctcatggaattggctggtcttagtgtggcagcttcaattgctgaggtttataaaccggaagaatatagccgggttctagctatctgtggtcctgggaacaatggtggtgatggtttggtggcggcgaggcatttgcaccactttggatataaaccgtttatttgttatcccaaacgtacagccaagccactttatactggactggtcactca

SEQ ID NO: 121018 - DNA, 494 bp, Arabidopsis thaliana
atacgactcactttagggaaagctcgtacgcctgcaggtaccggtccggaattcccgggtcgacccacgcgtccgcccacgcgtccgagacgacgaagtcgagagaaagaaataatggcggaggagacgatggagaacgaagagagggtgaagctgttcgtcggacaagttccgaagcacatgacggagattcagctcctcacattgtttcgagaattctctctatcgtcggtgaagtcaacatcattaaagagaagacaacacgagctcctcgaggatgttgttttctgacatgtcctacaagggaagatgctgacaaggtgatcaatagttttcataacaagaagacattgcctggggcatctagtccgttgcaagttaagtatgcagatggcgacttggaaagactagatgttcttgactgttgcggcaatccagagcacaaacttttcgtcgggatgcttccaaagaatgtctctgaaactgaagccccg

SEQ ID NO: 121019 - DNA, 387 bp, Arabidopsis thaliana
  unsure (1)..(387): unsure at all n locations
cacaaactaaacaaaaaaccctagttctctctctctagttagccgccgcaaaccagatcaaatcttcaaacgccgttttgcctctttggtggtcggtttcggccggcaccgtgagagggcctctcttctctttttagttttttttttcctttgtgtcgattttttttagccggcggcggctcctccttctttgtggcttaatcaaagagttttaagtcgacggcgagcggagatagttctctcagatggaggttcgttggtagatctacaatggggaactatgactctcgacgacggcagcagatctggtggatttcttcgtcagtctcttcgcggaggtacctctcctccgatgaacctccttgggtagtggtgggtcccaatntt

SEQ ID NO: 121020 - DNA, 777 bp, Arabidopsis thaliana
  unsure (1)..(777): unsure at all n locations
ngcaatgacctttttttctgcaggggggctctaaagcaaaacccttttcctgaaatcgccgtcgcaaattagaagaatcacctacagtcttttgtagggttttcaagacgaggcaatatgagattggagaagtgttggttttgctcttccacaatatatcctggtcatggtattcaatttgtccgtaacgatgccaagatattccggttctgtaggtcgaagtgtcacaagaacttcaagatgaagagaaacccacgtaaagtgaaatggactaaagcattcagagctgcacacgggaaggacatgactaaggatacaacatttgagtttgagaagaagagaaacagacctgagagatacgacaggaacgttacagagaatacactcatggccattaagaagattgctaagatcagaaccgcaagggaagccaaacatatcgaaaataggttgaagccaaacaagcagaagaaactcaatgacgatatgaaagaacttgatcagaacattcatatggtccaggctcccggggcacagaagatcaaagttgatgtttccgaaaagaagtctgttcaaaacgaagccatggaagagtgattctgtggtaacaatatgatccgtctaaaagcctctcccttactctgatgctggtgtcatcttaaagaacaagtcttctttagtttctcttaccatttgtttttggaagtctttaaaaaaaaaaaagttttggtttttgtactgataaaacggctttaagttgctatccttttgcaatgt

SEQ ID NO: 121021 - DNA, 490 bp, Arabidopsis thaliana
  unsure (1)..(490): unsure at all n locations
nnnnnnnnnnnnnnnnnnnnnnnnnnnnnnnnnnnnnnnnnnnnnnnnnnnnnnnnnnnnnnnnnnnnnnnnnnnnnnnnnnnnnnnnnnnnnnnnnnnnnnnnnnnnnccacgcgtctgcccacgcgtccgcccacgcgtccggttttagggaaacggctatgtcacagttgaataattcgtggttggtgcagactggtcaatgagcagtgattgtcaaaggatttgcactgtaaattatttatactctttgggttttgattatgaaacccttatggatgatcaaattacatttgttattaatacagaacattttttaggaatttggattggtgatataaatgtaaataaaatggtcaaagttggttggttatagtgatttgtttaatcaaaaaaagaacaaaacaaaagnnnnnnnnnnnnnnnnnnnnnnnnnnnnnnnnnnnnnnnnnnnnnnnnnnnnnnnnnnnnnnnnnnnnnnnnnnttcat

SEQ ID NO: 121022 - DNA, 703 bp, Arabidopsis thaliana
cgagactctgtcactctcttacactcatcactttctcatttcttttccgcatttcgaagccatggctaaacaactgcttcttcttctccttctcttcatcgcccacggcgttgaatcagctcctccgccgcactcctgtgacccttcaaatccaaccacgaaactctaccagttctgccgcacttgacctcccaatggccacccggcccgtgatctcgtctcgaggctaaccatagacgagaagatctcgcagctggtgaatacagctccagggataccgcgtcttggagttccggcgtacgaatggtggtcagaagctttacacggcgtagcctacgccggtccaggaatccggtttaacggaacggttaaagctgctaccagctttcctcaagtcatcttgaccgctgcttcattcgactcctatgaatggttccgcattgctcaagttataggaaaggaagcaagaggagtgtacaacgcagggcaagcgaatggaatgacattttgggcaccaaacattaacatatttagagatccacggtggggaagaggccaagaaactcccggcgaggatccgatgatgaccggaacttacgcggtggcttacgttagaggactacaaggtgactcttttgacggtcggaaaacactctccaatcatctccaagccttcgcttgttgtaagcattttacagcgtac

SEQ ID NO: 121023 - DNA, 490 bp, Arabidopsis thaliana
gacccacgcgttcgcccagagctctataagacgacttctcttttcttctttgttctccttttctcgtctcttctcataagcaatggcgatgccaacccaaattacaaagaagctctctccaagtcattgctcttcttccaaggtcagcgatctggtcctcttcctagaggccaacaaatttcctggagggctagctctggcctttccgatggctctgctgctcatgtggacttaaccggcgggtactatgacgcaggagacaacgtcaagttcaatttaccaatggcgtttaccaccacaatgctctcatggagcgcactggaatacggtaaacggatgggtcctgagctggaaaatgcacgtgtgaacatccgttgggccacagattatctgctgaaatgtgccagagccacgccggggaagctttatgtcggtgtaggagatcctaatgttgatcacaaatgctgggaacggcctgaggacatggaca

SEQ ID NO: 121024 - DNA, 757 bp, Arabidopsis thaliana
  unsure (1)..(757): unsure at all n locations
atgatactctnnnnnnnnnnnnnnnnnnnnnnnnnnnnnnnnnnnnnnnnnnnnnnnnnnnnnnnnnnnnnnnnnnnnnnccacgcgtccgaatcaacgcaacgccgagaagctttttcaggggtttggtgcgttgaatttgtggatcaagaaacaatgcaaattcaatgcaaaaccctaacttttacagtttcttcgattccttgtaacccaaagctaccattcccatcttccctcactttacggtcatggaatccttcattcccgagtttcaggagctccgctgtttccggaccaaagtcatcactgaagctgaacaggtttttaagaaactgtgcaagtacgaatcaggagcttgttgttgatggagaaaccggaaatgggtcgatttcggagctccaaggagatgcagcaaatggttcgatttcgccggtggaagtggaagcagaagtagaagaagtgaaggtagatgatttggcgactcagagcatttggggacagatgaaagagatcgtcatgtttaccggacctgccgcgggattgtggctatgtgggccgttgatgagtctcattgatacggcggtgattggtcaaggaagctcactcgaactcgctgctttaggtcctgctaccgtcatctgtgattatttgtgttatacgttcatgttcctctcagttgcgacttcaaatcttgttgctacctctcttgctcggcaggataaagatgaagtacaacatcagatatcgatcttgcttt

SEQ ID NO: 121025 - DNA, 460 bp, Arabidopsis thaliana
cccacgcgtccgacagagctttcaaatatatccctctcctgcgagagcagagaaagggagagagactagtgagtgagagagtccatcgctttctttctttctctctctcgctctctcttcatctccaacagagacttctttctagagaaagagatcttcacaaatatgactgtgatgaatcaccgacacaagcaatgtcattttctcctcctccttctgatcactgtcttctctgccgcgttggatggtgtttcttccgagacagacgtcggagggtttgactacggtgaagcattgtctaaaagcttactctactttgaagctcagagatcaggaagacttccgtacaaccagcgcgtgacttggcgtgatcactctggtctcaccgatggtcttgaacaaggggttgatttagtgggaggatatcacgacgccggagaccatgttaaatttggacttc

SEQ ID NO: 121026 - DNA, 574 bp, Arabidopsis thaliana
  unsure (1)..(574): unsure at all n locations
agcgacgcgcacggagtactttgctgcgccatatccccttcccaaaatggatatgattgcaataccagattttgctgccggagctatggagaattatggttgagttacataccgtgaaacagctcttctctatgatgaacaacattcagctgcttctaacaaacagagggttgccactgtagttgctcatgaactggcccaccagtggtttggcaatcttgttactatggagtggtggactcatctatggctgaatgagggttttgctacttgggtcagctacttggctactgatagtttgttccctgaatggaaaatctggacccagtttttagatgaatctactgagggtctaaggctagatgggcttgaggagtctcacccgatagaggtggaggttaatcatgctgctgaaattgatgaaatatttgatgcaataagctacagaaagggtgcatctgtcatccgcatgctacaaagctatcttggtgctgaggtttttcagaagtctcttgctgcatacattaaaaatcacgntttntccaaacggggnggccagnaggtttntgggcct

SEQ ID NO: 121027 - DNA, 859 bp, Arabidopsis thaliana
  unsure (1)..(859): unsure at all n locations
ataaaccctttcttcttccttgttcaaatccactcactcttggagagagacgactcaaacgcatagtctctcctctgtatttactcgttatcgtcactgtgagagagagagagagagcgcgcgcattcccccaattaaagcctctctgctccaaaccgtgatatactctttacgttgtttgtttttgcctttatccttccctagttgtgtataattttgttcttttctcctcgcgttcgatctcagcaagggtactcttgacattttcacctaagctcggacagaaatgggctctctcactgcgactcctcccggaagaattggattcttaagattgaccggggggggaccaattggattggcggccgttgtttttattttcaactttaagcaccaaatccgccttcaaaccggcgaccctcacgctcacatctttaatttcttcgacattgtcgccggaactggcatcggaggcattctcgccgccctccttgtcgccgacgacggctccggcaggccgatgttcactgccagagacgcggttaagtttgtcgcggagaagaactcggagctcttcgagatcaggtacaccggagttttcaggaggaacaagagatactcggggaagagcatggagagggttttggagacggcgtttaggagagaggacggtaaggtgttgacgatgaaggacacgtgtaagcctctccttgttccttgctacggcctcaaaaacctctgntcctttcggtttttttaaaggggccggcggtttaattatccgagctttgactttnagcttttggaaagtttccgtncaangtaagaaacnccaagctttttaangccgttaanttag

SEQ ID NO: 121028 - DNA, 689 bp, Arabidopsis thaliana
  unsure (1)..(689): unsure at all n locations
aaaccctttcttcttccttgttcaaatccattcactcttggagagagacgactcaagcgcgagagtctctcctctgtatgtactcgttatcgtcactgtgagagagagagagagagcgcgcgcattcccccaattaaagcctctctgctccaaaccgtgatatactctttacgttgtttgtttttgcctttatccttccctagttgtgtataattttgtccttttcttatggagatggatctcagcaaggttactcttgacattttcacaaagcttgaacagaaatggctctctcactgcgactcctcccggaagactcgtatccttagcatcgacggtggcggtaccactggcattgtcgccgctgcttctattctccacctcgagcaccagatccgccttcaaaccggcgaccctcacgctcacatctctgatttcttcgacattgtcgccggaactggcatcggaggcattctcgccgccctccttgtcgccgacgacggctccggcaggccgatgttcactgccagagacgcggttaagtttgtcgcggagaagaactcggagctcttcgggatcaaggtacaaccggagttttcagggggaacaaaaggattcttggggaagagcattgnanagggttttttgaangnnttttagggnaaagnccggaaaaggttttncggtta

SEQ ID NO: 121029 - DNA, 824 bp, Arabidopsis thaliana
  unsure (1)..(824): unsure at all n locations
ccccgcccccccccctttgattttgcaatggcatttggnaccccccccgaggtcgactgtatcgataagcttgatatcgattcgcggccgctgcaaatatagctcatggaaattcatcgatttttgctgataaaatcgctttgaagctggtgggacctggtggatttgtggtaactgaagcgggttttggttctgatattggaacagagaagttcatgaatattaagtgccgttacagtgggctaacgcctcagtgtgcaattgttgtggcgactgttagggctttgaaaatgcatggaggtgggcctgatgttgttgccgggagacctcttgatcgtgcttatgtaagcgagaatgtttccttagttgaagctggctgtgtgaatctggcaaagcacatctcaaacacaaaggcctacggtgtgaatgtaattgttgctgtgaatatgttcgcaacagataccgaagcagaactaaatgcagttaggaaattttcaatggatgccggtgcttttgatgctgtggtctgctcccaccatgctcatagtggtaaaggagcggtggatcttggtattgcgggtgaaaaagcttgtcaaaacattacacagcccctcaggtttctctacccattggacattggtatcaaagaacaaaatgaggcaatagctaaatcatatgggacccagtggtgttgaaatatttcagacccaggcagaagaaaacaagattgaggatgttccaccacaaacaaaggcttttcttcgaaaatcttttccccattattgccatggttcggaaaaaacaacagggtacctctcaatttc

SEQ ID NO: 121030 - DNA, 1145 bp, Arabidopsis thaliana
  unsure (1)..(1145): unsure at all n locations
acnnnnnnnnnnnnnnnnnnnnnnnnncacttccgcagtaccggtccggaattcccgggtcgacccacgcgtccggttgcgggttttggttctgatattggaacagagatagttcatgaatattaagtgccgttacagtgggctaacgcctcagtgtgcaattgttgtggcgactgttagggctttgaaaatgcatggaggtgggcctgatgttgttgccgggagacctcttgatcgtgcttatgtaagcgagaatgtttccttagttgaagctggctgtgtgaatctggcaaagcacatctcaaacacaaaggcctacggtgtgaatgtaattgttgctgtgaatatgttcgcaacagataccgaagcagaactaaatgcagttaggaaattttcaatggatgccggtgcttttgatgctgtggtctgctcccaccatgctcatagtggtaaaggagcggtggatcttggtatcgcggttgaaaaagcttgtcaaaacattacacagcccctcaggtttctctacccattggacattggtatcaaagacaaaattgaggcaatagctaagtcatatggagccagtggtgttgaatattcagaccaggcagagaaacagattgagatgtacacacaacaaggcttctcgaatcttcccatatgcatgtcgaaaacacagtactcattctcacatgatgcatcaaagaaaggagcaccttcagggtttgtattgccaattagggatgtaagaggaagcattggagctggtttcatatatccactggttggtacaatgagtacaatgcctggacttcctacaagaccttgtttctacgagattgatattgacactgaaactggaaaagttcgtggcctttcttaagtttggtagatctgtcaaagcttcaaggctttccttcatcgtcgtttctcacttccacaataaaaatttggcgattgtactttgatactgagtgtttttccattttaagatgaataataataaagtatcttttcctaaaaaaaaaaaaaaagggcgacagcannnnnnnnnnnnnnnnnnnnnnnnnnnnnnnntnnnnnnnacgggagtgcaannnnnnnnnnnnnacaatccnnnnnnnnngagcagctggcagtatcat

SEQ ID NO: 121031 - DNA, 1034 bp, Arabidopsis thaliana
  unsure (1)..(1034): unsure at all n locations
taggtgcactatagaagagctatgacgtcgcatgcacgcgtacgtaagctcggaattcggctcgagcttgtcttcgccaaccgtcacaaggacccacctttggaatcaaaggaggtgcagctggtggtgggtatagtcaggtgattcctatggatgagttcaatcttcatctcactggagatattcacgcgattaccgcttccaacaacctcttagctgctgcaatcgacactcggattttccatgagacgtctcaatccgacaaggctctttttaataggctgtgccctccgaataaagaagggaagcgtagtttcagtgacattatgttcaggagattgacaaagcttgggatatccaagaccagtcctgaggagcttactcccgaggagataaagaagtttgcgaggcttgatattgatcctgcttctatcacttggagaagagtgatggatgttaatgatcggttcttgaggaagattactattggtcagggacctgaggaaaaggggatgactagagaaactggttttgacatttctgttgctagtgagattatggctgttttggctttgacaacctcactaggtgatatgagagagaggcttggtaaaatggtgattggtaacagcaaggcaggggatccgataacagcagatgatctcggtgttggaggagccttgactgttctgatgaaagacgctattaacccgacactcatgcagacactggaagggacccctgttctagtgcatgctggtccttttgcaaatatagctcatggaaattcatcgattgttgctgataaaatcgctttgaagctggtgggacctggtggatttgtggtaactgaagcgggttttggttctgatattggaacagagaagttcatgaatattaagtgccgttacagtgggctaacgcctcagtgtgcaattgttgtggcgactgttanggctttgaaaatgcatggaggtgggcctgatgttgttgccgggagaactcttgatcgtgcttatgtaagcgagaatgtt

SEQ ID NO: 121032 - DNA, 508 bp, Arabidopsis thaliana
ccaatatttagggaagctggcccccgcgcggcccggcccgaatttcccggttcaacccacgctgtccgaaagatctaaccacccgcccgcttcactacgatctctatggcaggtataaagctaaggttttgttgtctgcgttggatgagcttcaaggacaagaagatggatcctatgttgttgttggagggatcactcctactcctcttggtgatggcaagagtgctaccactgtttggactttgccaagccttaggcgcttacctcgataagaaggttgttacttgtcttcgccaaccgtcacaaggacccacctttggaatcaaaggaggtgcagctggtggtgggtatagtcaggtgattcctatggatgagttcaatcttcatctcactggagatattcacgcgattaccgcttccaacaacctcttagctgctgcaatcgacactcggattttccatgagacgtctcaatccgacaaggctctttttaataggctgtgccctc

SEQ ID NO: 121033 - DNA, 610 bp, Arabidopsis thaliana
  unsure (1)..(610): unsure at all n locations
attaggatgtgctttaaagttttataaaacatcatcaattcatcagagtccctcatccatcttctcatcctccaacgcgagatcagacttcgacagagagtgcgatgagttcatcaacaagaaagcttgaggttgtttcaccagttcccgccgatatcgacatagctaattccgtcgagcctttacacatctctgagattgccaaagatcttaatatcaaccctcttcactacgatctctatggcaagtataaagctaaggttttgttgtctgcgtttgatgagcttcaaggacaagaagatggatactatgttgttgttggagggattactcctactcctcttggagaaggcaagagtactaccactgttggactttgccaagccttaggcgcttacctcgataagaaggttgttacttgtcttcgccaaccgtcacaaggacccacctttggaatcaaaggaggtgcagctggtggtgggtatagtcaggtgattcctatggatgagttcaatctcaactcactggggatattcacgcggtacgcttccaaaaccctnanngtgaanggacncgntttcatanngcnatcgnaggctttaaagnngtc

SEQ ID NO: 121034 - DNA, 721 bp, Arabidopsis thaliana
  unsure (1)..(721): unsure at all n locations
cagctannnnnnnnnnnnnnnnnnnnnnnnnnnnnnnnnnnnnnnnnnnnnnccgcgccattattgccgggacccacccgtccgcccacgcgtccggtctccttctcgacttcttcttcttcttctcatttctcaatctcaacttttctcttctcttctcttcttcgctaacggcaggagagagagagacccagaaatccgatccctcctctccttggattatcggagtcagcgattcatcgtcgctgataaagcttctacctttctcttcgatttttgttgtgagattcgattcgatcttaaggcggattagatcgaggtatgcagcaaggcgatcaaacggttctgagcttgagacctggtggcggtcgaggaaacagactatttggttcctcttcttcttcttcgtctctctcttttggctctctttcatcttcggatctacctctccttcgtcctcatggtggtgctcctgcttcctcttttcccttcaagggtggagactcgaggttcgatggccgtgaacgtgtgaagtacacccgtgagcagctcctggcagcttaaagaggcccactcaaactctctgatgaaattctgagggtccaacgggaaactgcagcttgaactgttttgggtgaggaagggctttgggcaccgtggagaantttncgaagaaatttnggtncccgtnaanncgaaagcgtttttttngccaactttg

SEQ ID NO: 121035 - DNA, 492 bp, Arabidopsis thaliana
acgactcactttagggaaagcatcgtacgcctgcaggtaccggtccggaattcccgcggctgatctctgtattggatttttgatataaggtttgaaatcatggaggtcgttgatattgatgcccgagctgctaagttagggattgattggtctcaggttaattttgattccatccaacttcctcctggagaagactttgggatcgagagtgatgatgaagctgtttaccaggatgaccagtctgaattcgacactggattcggtaacattatcgtggtcgatcacctccctgttgttcccaaggagaagtttgagaaacttgaaggtgttgtcaagaaaatttacaaccagttaggtgtgattaaggaaaatggactgtggatgccctgtgatcccgataccaagatgacattgggctactgttttattgagttcaacactcctcaggaagcacaataacgcttaggtaaagtcttatggtttcaagtttgt

SEQ ID NO: 121036 - DNA, 1622 bp, Arabidopsis thaliana
agctaccatacgactcactttagggaaagctcgtacgcctgcaggtaccggtccggaattcccgggtcgacccacgcgtccggcctttcgtctatctctcacctgaaagaaagacgttcagctttctctttccaaaatcaaaagctctccgatcagtttctccggcttaggaaattaattgaaggaaggtgatgagaggtactactgagaatacggatctgttcgatcccaaaacccaaatggatcctgacttcactcgtcatggttcttcctccgacggcgattttggattcgcttttaacgacagtaacttctctgatcgtttgcttcggatcgagatcatgggtggaccttcggattctcggtctgaagttgaagggtgtacgagtatcgctgattgggctcgtcatcgcaagagaagaagagaagatatcaagaaggaatctggtgtcacgatttcagacattgtggcatgtcctgaggagcagattttaactgatgaacaacctgacatggatggatgtcctggtggtgagaatcctgatgatgaaggaggagaggcaatggttgaagaagctttatcaggtgatgaagaggaaacgtctagtgagccaaactggggaatggattgttctacagttgttagggttaaagaacttcatattagttctcctattttagctgccaaaagccctttcttttacaagttgttctccaatggaatgagggaatctgagcaaaggcatgtcacccttaggattaatgcatcagaggaagctgctttgatggagcttttaaactttatgtatagcaatgcggtatctgtcaccacagcacctgccttattagatgtgttgatggctgctgataagtttgaagttgcctcttgtatgaggtactgcagtagacttctccgtaatatgcctatgactccagagtctgccctgctctatctcgagcttccctctagtgttccaatggccaaagctgttcagcctttaactgatgctgcaaaacagttccttgcagcccgctacaaggatattaccaagtttcatgaggaggtaatgtctctacctttggctggaattgaggcaattctatcaagcgatgaactccaaattgcatcagaggatgcagtttatgattttatcttgaagtgggcaagggcgcaatacccttgtttggaagagcgaagagagattctcgggtcacgccttgcactctccatccgcttcccattcatgacatgccgaaagctgaagaaagtgctgacttgcagtgactttgagcatgaaatagcatcaaagcttgttctagaagctcttttcttcaaagcagaagccccacacagacaacgtagcctagcctccgaagaatctgcatccctgaaccgccgcctgatagagagggcttacaaatacagacccgtcaaagtggtcgagtttgagcttcctagaccgcagtgtgtagtctacctagacttgaaaagagaagaatgtgggggactgttcccgtcgggtagagtgtattcgcaggcctttcacttgggaggtcaagggttttttcctgtcagctcactgcaacatggaccaacagagctcgttccactgtttcgggct

SEQ ID NO: 121037 - DNA, 573 bp, Arabidopsis thaliana
gaaaaatgatagtgaagttaagaaagtatatatgtgaaaattaaattcagttgagcgtaaatagaaaacccttacaaaaaaccaaatccctttcttatttttatttttgtgccattttctatatatattaaaaaaaaaacattcttataatctgaaatcggaaaaattcacttcactctcttcgttttgcgtttttttgtgtgtgtgttttaaatatcaaagccatgttttgggtaaggaattaaagagcaaaaacctcgattccgatttcaaatattcgaaggtgaaatttcttcattttctgcgaatttggtagctatcacgttctcaatctggtgaattagggcttttgttgagctgtggaagctaatgatgggtgtacccaccgctgaggaaggtggggtttctctttgttgctatgtcttgaaaccttagtttgcttttgtcaatgggtaaaaccgaggatgatgtgagtctccgtgtcgccggcggcgaagctaccggcgattcgacggtgaggaatgctcggtgtgggtgttgcaaatggatctcaagcttcgttgggttcaaatg

SEQ ID NO: 121038 - DNA, 501 bp, Arabidopsis thaliana
ctctcatggctgttgtcgttgcagagacgtcgttgattttcgatttggatttcaagcttttcacgtactcattggaacgatccaatctcaaaagtctctgattttgggagagagcttcgttaaactcagcgcgaattgtaatttcccttttgccgcgattttggattacaaggtgaaataatttgacagctgaggatttaagcatttatgtgctgcaactctgcaagcttgtcatgtaccactgtttgtatattgtttataaataaaacagtggacttaaagttaagggaatgtcagcacctgcgaagtttgattattcttctggtgggccagagaggcctttatacaggtccaacttacctgcacaaatggaaagatctagtacctttcgtgagacgatggaacatcctgtctcgtcatctcacccgagcatgttgaggagcacttcaccaatagcacaaaccgatgtaacaaacttttttcagtgtttgcgttttgatc

SEQ ID NO: 121039 - DNA, 479 bp, Arabidopsis thaliana
aaaaaaacgaattttgataatttagggttttgcccttttcttctctcttgcgttatcatcggtgttttgattctccggccaagtcccggagacttgtgatctgggggaatttggtgttcaatttcattaagacgcgatgatctcgtccaaaaacggagctgccatgatctcccgacctgtctttctttccgatcgagttgatgaagtcttctctagaaagcttgatttgtctgtctcttcttcgtcttcttcgagcctcctccagcagttcaataagactcatgaaggtgatgatgacgcacgcctggctcttgctcatcagctatacaaaggaggcgatttcaaacaagccctggagcacagcaacatggtttaccagagaaacccattacgcactgataatcttcttctaattggtgctatttattaccagcttcaagagtatgatatgtgcatagctcgaaatgaagaagctcttc

SEQ ID NO: 121040 - DNA, 928 bp, Arabidopsis thaliana
agaataaactcggtaggtttgcgaaaacctcgccgccgggaaaaaaaaaaatcaatggaaggaggaggaagaggaccaaatcaaacgattctcagtgaaatagaacatatgcctgaagctccacgtcaacgtatctctcatcaccgtcgagctcgctctgaaaccttcttctccggcgaatcaatcgacgatctcctcttattcgatccttccgatatcgatttctcttctctagacttcctcaacgctccaccaccaccacaacaatcacaacaacaaccgcaagcttctcccatgtccgttgattcggaagaaacctcatcgaacggtgttgttcctcctaattctcttcctccaaaacccgaagctagattcggtcgccatgttcgtagcttctcggttgattccgatttcttcgatgatttgggtgttactgaggagatgtttatagctacaggttcaggagagaagaagaaagggaatcatcaacatagcaggagtaattctatggatggagagatgagttcggcgtcgtttaatatcgaatcgattttagcttctgtgagtggtaaagatagtgggaagaagaatatgggtatgggtggtgatagacttgctgagcttgctttgcttgatcctaaaagagctaaaaggattttagcgaatagacaatctgcggcgaggtcgaaagagaggaagattaggtatactggtgagttagagaggaaggttcagacacttcagaatgaagctactacattgtctgctcaagtcactatgttacagagaggaacatcagagctgaacactgaaaataaacacctcaaaatgcggcttcaagctttagagcaacaagctgaacttagggatgctttgaatgaagcgctgcgggatgaactgaaccgacttaaggtggtagctggagaaa

SEQ ID NO: 121041 - DNA, 588 bp, Arabidopsis thaliana
  unsure (1)..(588): unsure at all n locations
caaaaatacaaatcatactaaaaagaatgcttgattaaatacatcatcttaaagatctttaccaaactcgactttnccaacgttttaatcatacattaaaatcactacaaccagattgcnattgatttagacttgtttcatattcaaaaacgtgtgaaacaanncacaaggaacacgaaactngtaccaacatcaaatttgaataantcaacggcaaattttacccttagtatgcaaaatgactagaatacccctatatgtatctttggtttagtgtcacggagaatgagatggaaaaatacggaatccatctactggctttatcacacgtgtatatggtgactcaggttaaagcaacgggtgcactaaaggcgtcggtgaggggggtaacccccgaaaacgttgtcgatattctccagctggttcgtctctgcgaagnacctgacctctgtntcaagtgtntgcgattcattcactacaagttcaagaccgttgaacaggcagaaggatgggaagtttcttcaaagaacaagantccttttcttngacctggacaatcntncnanttnattcgacggntggagaatt

SEQ ID NO: 121042 - DNA, 570 bp, Arabidopsis thaliana
caacaacaaaatttaccaacactctctctttctctttctctctgaaaacttaaaacgatggctataaccgccactcaaaacgacggcgtttcactaaacgccaataagatttcgtatgatcgtgtggaaactgatgttgagatcatcacctccggtcgtcgtagtattccggcacactccggcatcctcgcttcggtctcaccggtactgacgaacatcatcgagaagccgaggaagattcacggcggatcatcgaagaaagttattaagattctcggtgttccatgcgacgccgtttcagtcttcgtcagattcctctattctccgagtgtcacggagaatgagatggaaaaatacggaatccatctactggctttatcacacgtgtatatggtgactcagttaaagcaacggtgcactaaaggcgtcggtgagagagtaaccgccgaaaacgttgtcgatattctccagctggctcgtctctgcgacgcacctgacctctgtctcaagtgtatgcgattcattcactacaagttcaagaccgttgaacagacagaaggatggaagttt

SEQ ID NO: 121043 - DNA, 538 bp, Arabidopsis thaliana
  unsure (1)..(538): unsure at all n locations
nnnnnnnnnnnnnnnnnnnnnnnnnnnnnnnnnnnnnnnnnnnnnnnnnnnnngaaaaacagaacacaaccacgcgcccgttgtaacattagtttaagcattaagcttctttatgtcgaataataataattctccgaccaccgtgaatcaagaaacgacgacgtctcgtgaagtctcaatcacattgcctactgatcaatctcctcaaacctcaccaggatcatcttcttctccttcaccgagaccttccggtggatcaccggcgagaagaacggcgactggattatccggcaagcactctattttcagggggattcgactacgtaacggaaaatgggtatcggagattagagagccacgtaaaacgacaagaatttggctcgggacttatccggtaccggagatggctgccgccgcttacgacgtggctgcgttagctttaaaaggacccgacgccgttttgaattttcctgggttagctttgacttacgtggctccggtttcaaactctgctgcggatataaaaacgctgctatta

SEQ ID NO: 121044 - DNA, 518 bp, Arabidopsis thaliana
  unsure (1)..(518): unsure at all n locations
cagctcnnnnnnnnnnnnnnnnnnnnnnnnnnnnnnnnnnnnnnnnnnnnnnnnnnnnnnnnnnnnnnnnnnnccacgcgtccggacgcttttagctctctcttcttctctgtcttctccttccttcttctgccgcaattctcgtattcgtttctctcctgtgtcgcgtatttcttctcttaatggtgataataagcttacaaattctccgccacagtttttaaatgccggcgcgagtctccgtcgttttgtggctccggggaagtttccaagtgtgagacttagggttttgacgaggtgcgagaaagaaaatgcacccaaaggtgggattgaagatgacgcggagcgatttgcgagacgagagagcacgatgcctgatagattcagatatttgaccaaagaagctccagatagtccaattatatggccatggtttgttgcgctggggtttctcgtttatgcgtggagagctgttttgtttgagctatccaactggagaaaagcggttttcgctatcc

SEQ ID NO: 121045 - DNA, 956 bp, Arabidopsis thaliana
  unsure (1)..(956): unsure at all n locations
ntgatatnnnnnnnnnnnnnnnnnnnnnnnnnnnnnnnnnnnnnnnnncggacgcgtgggttcgcttccaaaaaaaccgcccgcccctctctctcacggcgataaaaacagagaaccttccatttgtttctttgagcgcgtgaccggcgcgtggcggcttagttagcgccggcgtcggtcctccagtctggttttctttagggtttcattctctacttagtctggttcgtttttagatcctgatttgatgttggcaaggtgaagaatttttggatcttagatctgtaagagccatcgttgtgggctttgattcgtcgaaggttttgtgcgatcggaactcccttttctctgttttgagaaaattatgggtttctcctttgttcttgcagatcttgtttccgacgaaggttgcaaacgaaagttatgacggcggctaatgttattggtggtctggctccttctttgggatagggtggcaacggtacaccggtattttagtgttagttgtctcataattgggttttgcgctttcgttaaccttgttctcttcatttctcttttgggttcctatcctttagtcttcattgttggcttgttggtagcgtttatggaatcaactttattctcagtcttttgtggtctagtatcttgaactcttgcctattctatgtcctgccgagtttgcttgtttctcgatccgattcgttctcttgccgtctccagtctttcggttggtcgccaattgtatgggcttcggtccttgtctctacggtttagacttgatcgagggtctctcttttgcantgggtgtcttaactaggcgtgaaccaatnttgggttttnnttncttccgatttcggccggttncagaaagttgtgtgggnattccnaggcggctcccatncttngctggaatgnatcctttggtccnnttnaatttgnaaggaggctcaatt

SEQ ID NO: 121046 - DNA, 630 bp, Arabidopsis thaliana
  unsure (1)..(630): unsure at all n locations
ttatatgatatgatctacttgtatgcngatgatgtagcaagcaagcagcttagtaaatctttgaacattagagtgagtcagtccgatataaaatacgatcgctcttccggatttattctacggatatgaccactcctcagtttaaagaaatgtatggttcagatttcatactttcggaatcagtgagtcgatgcgcaaaagcgatcttcagaggtattggtagaggagaggcatacgtcatagagccatcttggataaaatggatctttttgataaaaaatgtttgtcctgagatcgttgactacttactcgactatatatttgttagttatctaaaaccttatttcaagcgtgattgatcatatcgatctatccaagttctctctggttttcaactgtggttgtgttgtcattatggccatgaaacttatactttatgttgtattagttattgcactaagtcttggcctttttccctttcttcgtatatgtttcaatttgttttagaaccaaacatttcatatagatagaggatttcttaattatttaaaaaaaaaaaaaaaaggacggccgctctagaggatccaagcttacgtacgcgtgcatgcgacgtcaaagctcttctatagg

SEQ ID NO: 121047 - DNA, 553 bp, Arabidopsis thaliana
gttattgcactaagtcttggcctttttccctttcttcgtatatgtttcaatttgttttagaaccaaacatttcatatagatagaggatttcttaattatttaataaagatgattcaaatgtatataattgttcaactagttcagttcgcttccaaaaaacagcgacgtcttctctctcacggcgataaaaacagagaaccttccatttgtttctttgagcgcgtgaccggcgcgtggcggcttagttagcgccggcgtcggtcctccagtctggttttctttagggtttcattctctacttagtctggttcgtttttagatcctgatttgatgttggcaaggtgaagaatttttggatcttagatctgtaagagccatcgttgtgggctttgattcgtcgaaggttttgtgcgatcggaactcccttttctctgttttgagaaaattatgggtttctcctttgttcttgcagatcttgtttccgacgaaggttgcaaacgaaagttatgacggcggctaatgttattggtggtctggctccttctttgggata

SEQ ID NO: 121048 - DNA, 889 bp, Arabidopsis thaliana
ccctttttaaaatgatcatcatcttcttcttcactcgcctcaatttttgttcccttcttcttctataattcaactgtgaatttcaccgacgaaacaaaaaagagagagagagagagagaaacgatgagttctcagatttcggagattgaacaagagcagctgatcgagaagcttgagatcttcaagatccatggcagagacaaacgtggccgtaagatccttcgtattatcggaaaattcttcccagctcgatttctgtcactggatgtgttgaagaagtatctagaggagaagatatttcctcgattaggtagaaaaccattcgccgtactctacgtccacaccggcgtacagagaagcgagaacttcccaggtatctcagctctacgagcgatctacgacgcaattccggtaaacgtcagagacaatcttcaggaggtttacttcctccatccaggtcttcaatcacgtctcttcctcgccacctgcggccgatttctattttccggcgggttgtacgggaagctgaggtacataagcagagttgattatctgtgggaacatgtgaggaggaatgagatagagatgccggagtttgtatacgatcacgatgatgatctggagtatcgtccgatgatggattacggtcaagaaagcgatcacgcgagggttttcgccggagccgccgtggattcatcagtctcaagtttctccatgaggtgtatctcatagcgtaaaaggctaaaactccacccactagatatcggatcgtatcttataaaccatataatatacgaatacgattaatgatatatcaaaaaaaaaaaaaaaaagggcggccgctctagaggatccaagcttacgtacgcgtgcatgcgacgtcatagct

SEQ ID NO: 121049 - DNA, 974 bp, Arabidopsis thaliana
  unsure (1)..(974): unsure at all n locations
gagagagagagagaaacgatgagttctcagatttcggagattgaacaagagcagctgatcgagaagcttgagatcttcaagatccatggcagagacaaacgtggccgtaagatccttcgtattatcggaaaattcttcccagctcgatttctgtcactggatgtgttgaagaagtatctagaggagaagatatttcctcgattaggtagaaaaccattcgccgtactctacgtccacaccggcgtacagagaagcgagaacttcccaggtatctcagctctacgagcgatctacgacgcaattccggtaaacgtcagagacaatcttcaggagggttacttcctccatccaggtcttcaatcacggctcttcctcggcaactgcggccgattttctattttccggcggggttgtacgggaagctgagggacataagcgggggttgattatctgtggggaacatgtgaggggggaatgagttgaaaaaatcccggagtttttanccgcccccgctgttgaccttgagtatcgccccatgatgggtttcggcaagaaaccgaccccccgagggttttccgccggaacccgccgtggattcatcagcctcaaagtttccccatgaggtgtacctcataccgtaaaaggctaaaactccacccactagatatcggaccgtatcttataaaccatataatatacgaatacgattaataatatatcaaaaagattggaaataggtgtgctttttgaaattagtgagcgttttttatggaaaagaaaagaaaagaaagcagttggcgtctggataaagggaaggaggagaatctttagattttttctttaatctgtttttcttttgtcttgattagttttttctttagtggtggtggttgtgagttagtgtgtaaaatgtatatcgtcatatgtgaatttaataataagtccttttgtaagaaaaaaaaaaaaaaaaaaag

SEQ ID NO: 121050 - DNA, 872 bp, Arabidopsis thaliana
aggtggagcactatgatttttattaaaatacaaaaacgtgtaatacagaactagagatcatataagatcctgcagaggcaatcaaagatgaccagaaaaaaaaaaaccatgcaacaaaaggaaacatccacacccataggccacaacacatgcaaatatactagaaacaccaaagataaaggtttctaagtgaacttattattttgacttcacttgatcgatatggacttgtatttttgaacagtgtttgttattgcttgttctacaggtagcctttccatgcttgatgctccgtagaagccatggacacaaccctgtgttctcttcaacacaaactctgcctcttctggacccgatatcggacctccgtggcagaggacgataatgtctgggttgaatctacgagcagcatctgcaatagcttgtacacgaacaacgctttcttccactgaaactgcggttttcgccccaatatttccggatgtcgttagacccatgtgggctactatgatatcagctcccgcttttgccatttcttctccttcttttgggttgaaagcatatggagtggtcaacagccccattttgtgcgcttctgagatcattttaacttcaagaccatatcccattcctgtctcctcaagattttgtctaaaattaccatcaaagagaccaacagttggaaagttctggacaccaacgaacccaatggactccaactgcttcaggaaatagtccatacgacgaaatggatctgttgcgcacaccccagccagaacaggcaccgccttcactacaggtaaaacttcatttgccatttcaagcacgactgcattggcatcagcaaatggaagtgagcaagctaaggatcc

SEQ ID NO: 121051 - DNA, 381 bp, Arabidopsis thaliana
ccggatggaaggaccgagccgagcgacgcgttcggaaaagaaagaagtaaagaagaattagaatctccacacaaatggtgctccaacaacaaacgcattttctcacaaagaagatagatcaagaagacgaagaagaagaaccttctcatgatttcattttccgatctaagcttcctgatatcttcatccctaaccacctccctctcaccgattacgtcttccaaaggttctccggcgatggcgacggagattcctcaacaacctgtatcatcgacggtgccactggccgtattttgacctacgccgatgtacaaaccaacatgcggaggatagctgccggaatccaccggctcgggatccgccacggagacgtcgtaatgc

SEQ ID NO: 121052 - DNA, 581 bp, Arabidopsis thaliana
atcagttttatatgctatacgatgactttaatatcacaaagcttcctctgcttccggaagaggtgacaggggttgaagccttaaaggcgttttcacataagttcttgacgccgtaccatcctaccactagcaggagcaatgtagaggagctggagaggaaagtacacacattgcgtttgcagttaaaaacagctgaagaagaactcgaacgggtcaagagtggctaaagataaggctctgttcttccctttaattgtaagtttctttcctcgccatattcttggaactcacttgctttctacatgggggtcttctggatctgcgttgtcatttgggtttattgttgtttatgttttgaacaatttataggtggaaaattaaaactgaatctttttctctctagttcttcatctagcaacaactctttataggacaggaaagaagatcaagcagaatcttcttttgcgttgttttattgttatgcattggatttgtttttatatttgtaataatcatgactacatagactcatatctaccaagaaatcgttgttttacgacttaatcagctttttatatatt

SEQ ID NO: 121053 - DNA, 1019 bp, Arabidopsis thaliana
  unsure (1)..(1019): unsure at all n locations
aaaanaaaaatngggngnttntgaaccgaaaaaanttttggggggtttnccaanccgaaaggggtttaggggggaanngagnaatngagaaattggatttaancttttttcaggttcccggntttttgggngantcccccnggggaatcnaaaaccnggggggngttttggtcttnaaaantattgggtnaggcgtttttagtagaaaatatgtccagcaaaagaacacacgggggcaacaaattcacccntttttaggaagngaggagaagcnnngtaaagaggatttgattgtatcaaacaagctgagagaaaaagagangtttggagaagctnttgtaattttgcagccatccgggntgagnttgaaaagaagaagcagaagagattggaagaacaacaaaggttagatgnagaaggagctgcaattgcagaagctgttgcttctgcacgtcctactgggcgaagatttctgatgattcatctcgagtcaagtttggtgaagaaaagggtttcacaatggatctgtttagagatgaaagaactaactacgttcctcgccaaagctgtgctagctatgcggttcaagggattgggtttgtgtcaaatggctatggactaggagatagtaactggtcgccattcacgaggaggggtgcttgggataacaacatgggaatatcagctgatttgattgctgctcaggctgtctcggcgctacagatatctgaaaatgctgatgggaacgcctttgtgttcaatgggatgttccggggatgacagatgccacgactcgtcctcattcggtttttaaaataaacatttgccttctgcttgctttggtgtcaatgctctgtttttttctcttgacgttagaccttatactctgttttcgttcgctgtaatattaaagacgcattttgagttgtatctattatacatgttgaagtctcttcatactgcattgttgcttatcttaaaaaaaaaaaatttnnnnnnnnnnnnnnnnnnnnnnnnnn

SEQ ID NO: 121054 - DNA, 614 bp, Arabidopsis thaliana
  unsure (1)..(614): unsure at all n locations
cggtcgcgtgggcggacgcgtggggcgaagaaacgggtttcggaatggatctgtttagagatgaaagaaccaactatgttcctcgccaaagttgtgctagctatgcggttcaagggattgggtttgtgtcaaatggttatggactaggagatagtaactggtcagtgtcatataagccattcatgaaggatgtctgggataacaacatggtaatatctgcagatttgattgctgctcaggctgtttcgtcactacagatatctgaggacgctgataggaacgcttatgtcttcgagacgatgttcgggggatgacaaaagccatcgtgccaaacttggctgcagaaacaagtgtttgctatgagtagagttgcagtttttttctttattctagaaccccctttggtgtgaaaattcctcctcgttgtttatctcttgatgttagactagctgaaaagatgttttctgaattctctttgtaacattcacaaatacgttctaagttttatacagattacagagtacctcttgaaaaaaaaaaaaaaaaaagnnnnnnnnnnnnnnnnnnnnnnnnnnnnnnnnnnnnnnnnnnnnnnnnnnnnnnnnnnnnnnnng

SEQ ID NO: 121055 - DNA, 652 bp, Arabidopsis thaliana
  unsure (1)..(652): unsure at all n locations
ttccnnnnnnnnnnnnnnnnnnnnnnnnnnnnnnnnnnnnnnnnnnnnnnnnnnnnnnnnnnnnnnnnnnnnnnnccacgggctgcgcttttttatctctcgaaattcctctctctttctctctgcatcaaaacagcaactttacttctgcgtttttgtttatctctctgtattatccgattaatttaaaggagttctttgaaggcagctgcttctatgccatattgccgagaaaatgggcgagtctaaggggtgcgggaatgttggacgaatgatttcgaagaataagtctgcgaattcttataacctctctcttcagttgtctcctgttgtttctttctgggattgtattgtccgcaccatgaggtattcctatataccagagtgggtgtagttcttgagttcctctacaacatcatcgagtttagtgcagttttttagttagaaatttatagtcaagcaataatggatcacacggtgtgcaagcaaagttcagccagtcgttagggaagcgaaggagggagcatggttaaagatgaattttgatcggatcaaacaagcttgggagggaaaaggggccggtttgggggaaagcccctttcttactttctgcagccattccggggcttagctttgaaaagnanggngcnag

SEQ ID NO: 121056 - DNA, 432 bp, Arabidopsis thaliana
ccctcgcgtccgctctggtctatcggactacctcatggtgcggacaatacaatcccagagtgggtgtagttcttgagttcctctacatcatcatcgagtttagtgccgttttttagttagaaatttatagtcaagcaataatggatcacacggtgtgcaagcaagttcagccagtcgttaggaaagcgaagaagaagcatggtaaagatgaatttgatcgtatcaaacaagctgagaagaaaaagagacgtttggagaaagctcttgctacttctgcagccatccgggctgagcttgaaaagaagaagcagaagagattggaagaacaacaaaggttagatgaagaaggagctgcaattgcagaagctgttgctctgcacgtcctactgggcgaagattctgatgattcatctcgagtcaagtttggtgaag

SEQ ID NO: 121057 - DNA, 644 bp, Arabidopsis thaliana
  unsure (1)..(644): unsure at all n locations
tcactatagggaaagctggcacgcctgcaggtaccggtccggaattcccgggtctgacccacgcgtgcgaaagtttttcaaatggcgattgctttcaaatccggcgtcttcttcctccaatccccaaaatctcaaattggattccgccattcttctcctcctgattcatcgctttctttcaagagattcactcccatggcttctctctccacctcttctcctactctcggtctcgctgatactttcacacagctcaaaaaacaaggcaaagtagcattcataccatatatcacagctggtgatccggatctctctactactgctgaagcattgaaagttcttgatgcttgtggttctgacataatcgaattgggtgttccttactctgaccctttagctgatggacctgttattcaggctgcggcaacaagggtccgttggagagggggacaaaccctcggtagccatccttgagattttggataagggttgttcccacaaatatgctcggcccgatttcgttgttcacgggattacaaacccggttntttaaacgnggggttggggaagtncatgnccagcatcnanggntntttggggaaaggggcttttgggtcccgnttgtcccttttaggaaactagng

SEQ ID NO: 121058 - DNA, 586 bp, Arabidopsis thaliana
gccggcacgcctgcaggtaccggtccggttttcccggggggacccacgcgtccgtacggctgcgagaagacgccagaagagagatacagagagagcgatgatgattcgaacggcgttagtgttcgttgtcttcttcgtcggaacagtcgtacaagcgcagctgatacctccggcgaggcgtgatggatttttgtatccaccgggtcggaaaatcgaccgggatacgatacttatcgaggcgtatattgacccggtttgtccggattgtagagacgcttgggagccgctaaagctagcgattgatcactatggatctcgcgttgctcttgttcttcacctcattcctttacccttccatgacaatgcatttgtagcatctcgggctttacacatcgttgataccttaaacgccaatgccacgttcaatttgctggaagggatcttcaagcatcagacattgttctacaactcgcaaacacaactcatgtcaagacctgcagttgtggaagaattaatcaagcttggaacagttacgttaggaaactcatatcattctcctttgaaatctggcttcagcaactcaaaa

SEQ ID NO: 121059 - DNA, 1253 bp, Arabidopsis thaliana
  unsure (1)..(1253): unsure at all n locations
nnnnnnnnnnnnnnnnnnnnnnnnnnnnnnnnnnnnnnnnnnnnnnnnnnnnnnnnnnnnnnnnnnnnacggacgcctgggaaccaaaaaaaatattcttgtttcaaacttcaatggcgttctcgagttccatcttctctgttactcagttttcttcttcgttagcttcgcgtccttcttctgcaatcagtaggcagactcgttttcccgctcaaattgcttctccagatctatcgcctgctttgttcgatgatcgccggaagttcgtcggaggtgtaatgtctctcttgacgaagagtattaaaaaccgtgtatatgcttcgattaacagcattgattcggccgctactccatcgtatccgaaatcggaagacgatgacgacgttgttccaatgccaatggttatgatagaccaggatgctgaccctgaagctactattgtacaactcagttttggaaatcgtcttggggctcttattgacacaatgcgggcgctgaaagatttgggattggatgtaataaaaggaactgtctcaactgaaggatccattaagcagaccaaattttctataacgaaacgagacactggccggaaagtggaagatcctgacttgttgggaacaaatccgatttaacaatcatcaaccaatcctcttgaaataccatccggaatgcagtgagcaacttgcaatgggtgagacttttggaataaaggctcccgaaaagaagattgatgtcgatatcgcaactcatatacatgtgaaagaagatggaccaaagaggagcctgcttgtcatagagacagcggacaggccaggtcttgtcgtagagatgatcaaagtgatggctgatgtcaacatagacgtggaatccgcagagatagatacagagggactggttgcgaaagacaagtttcacgtaagctaccaagggcaagctctaaacagatctttgtcacaggttttggtgaactgtctgcgttacttcctgagaaggcctgaaactgacattgacagctactaaatgagcttttgtttgctctaaaacaaaactgctctttatcctttaaagcaatcatatctgtgcttgcgaaactttcagacttctgtttggaagattatgtggaaattcgtgatactataattgaaccactgtggctaaaaaataaaaaaaaaaaggacnnnnnnnnnnnnnnnnnnnnnnnnnnnnnnnnnnnnnnnnnnnnnnnnnnnnnnnnnnnnnnnnnnnnnnnn

SEQ ID NO: 121060 - DNA, 1810 bp, Arabidopsis thaliana
  unsure (1)..(1810): unsure at all n locations
tgtnnnnnnnnnnnnnnnnnnnnnnnnnnnnnnnnnnnnnnnnnnnnnnnnnnnnnnnnnnnnnnnnnnnnnnnnnnctttgggtttgtttttttttgcaagaaggctctcttattccttttcaaaaacaataatattcaactcttgcaagttgcgaaacatgggagcctaagcgtgtaagaataacccactgaaactcatatattgcatgagatcactcaccttttaacctaatcctagacagacttatctgccttttaaaaaagacattttaaaacagaaacaaacactcttttattttgctccataacttgtgtattgcttccttcactattgcttgctcaagtttctgataacatatggaagtatgcctccatggttaaagtatgccaattccacctctgtgtcgaagcggactgtgcaagtgaaagattttccgttgtcggtagtgacggtaacatcttggccaggtcttatctctgagatatcggttgggagatggatcgtgtagcgttcgtgaccagtcaatccaagagtatctgcgtcttcaccggacttaaagcacaatgggatgattcccattcccaccaagttgcttcggtgaatcctctcaaaactctttgcaatcaccgctttaacaccctgtagcatgggtcccttggcagcccaatcacgtgagctaccacttccatactcagctccagccagaataattgtgtcttcaccagatgacttgtacctcatggcagcgtcaaagactgagagcttctctccagatggaatgtgaacagtcttagggccaacttcaccattcatgagcttgttaacgatacggatattagcaaaagtacctctggccattatttcatcattcccacggcgacttccatatgagttgaagtccttacggtcaaacgccacgctccatgagaaactttgcagcaggactgtccttttggatgtttccagctggtgagatgtgatcagtggtgatactgtccccaaaattgagtaaacagtaagcatccttcacattgtgtggaccaggaggatccatggtcatgtccttgaagtatggaggctcgtgaatgtaagttgagttgggatcccatgagtagagggtattctcaggaacagacagcttattccacatggggttacccttggtgattgactcgtacgttgctcggaacatgtcaggcaaaacactggattgaacaacctcagcaatttcttccgtggttggccagatatctcttaagaagacgtccttgccattctttcctttgccaataggctccgtttcaaagtcaatgttaaccgtgccagcaagagcataggcaaccaccaacggaggagatgcaaggtaattggctcttgttagtggatgaacacgcccctcaaagttcctgttaccggatagcacagcagccgccacaatgtcattttcggtaatagcagctcccactgattcattaatttccccagaattcccgatgcatgtagtgcacccgtagccgacaatattgaaaccctgttcattcagatattcttgcaatccactctttaataagtattttgtaacaactcctgagcctggagcaagacttgtctttatccaaggcttaacctgtagcccaaggtcacaagccttctttgcaacaaccccagcaccaagcatgacgctgggatttgatgtattagtacagcttgtgattgcagcaatcaccacacttccatgtttaagctctgctggttgtccatcgaacgaaaaatttaccactttttcttgtgcctctttaggtatagc

SEQ ID NO: 121061 - DNA, 433 bp, Arabidopsis thaliana
cggacgcgtgggcacgaacgctacacgatccatctcccaaccgatatctgcgtcttcaccgggcttaaagcacaatgggatgattcccattcccaccaagttgcttcggtgaatcctctcaaaactctttgcaatcaccgctttaacaccctgtagcatgggtcccttggcagcccaatcacgtgagctaccacttccatactcagctccagccagaataagctgtctgttcctgagaataccctctactcatgggatcccaactcaacttacattcacgagcctccatacttcaaggacatgaccatggatcctcctggtccacacaatgtgaaggatgcttactgtctactcaattttggggacagtatcaccactgatcacatctcaccagctggaaacatccataaggacagtcctgctgcaaagttcc

SEQ ID NO: 121062 - DNA, 681 bp, Arabidopsis thaliana
  unsure (1)..(681): unsure at all n locations
nnnnnnnnnnnnnnnnnnnnnnnnnnnnnnnnnnnnnnnnnnnnnnnnnnnnnnnnnnnnnnnnnnnnnnnccacgcgtccgataatctctcaccattgtttttctctgcaaaactaaagaaacaaaaaaagaaaaatcggagaaaccaagaaaaaagaaatgggaagtgtagaagcaggagaaaagaaggctttaggatgggctgcaagagatccttctggtgttctctctccttactcctacactttaaggagcacaggagcagatgatgtgtatataaaggttatatgctgtggaatatgccatactgatattcaccaaattaaaaatgatcttggaatgtctaattatcctatggttcctgggcacgaggtagtaggtgaggtgttggaagtgggatcagatgtgagcaagttcaccgtaggagatgtagtcggagtcggcgtggtcgttggatgctgcggtagctgcaaaccatgcagctcagaacttgagcagtattgtaacaagagaatctggagttacaacgatgtctacaccgatggaaaacctactcaagggggcttcgccgacaccatgatcgtcaatcaaaagtttgtggtgaagattccagaaggaatggcggtggagcaggctgcaccgctactctgccgcggggagtaaccggtttatagtccgtt

SEQ ID NO: 121063 - DNA, 929 bp, Arabidopsis thaliana
gatcttctccatgacgattccgtttcattgatcgatcaatcaaaatctcgccggagtttcttcccgccggcctgaatcatgcctctgcctatattcccgtcgcggttacagtgttcgtcttcatcgtcttcgtcgtcgtcgcgatcttcgttttttaggcctaagcttcgaatcgatccaagcttgaccttaattccaggcttatccaacgacgtcgggagactgattctctccttcgtcccttaccctcacatctctcgtatcaaatcaacctgtaaatcatggtacgctttcctctcttccaaaaccctaatttcactccgccatagcagagacaacagcaacaccaacaatctctcgcatctcctttgtatcttccctcaggatccttcgatttcgcctccttttctcttcgatcccgtgactctctcttggagatcgcttcctcttatgccttgtaaccctcacgtttacggtctctgcaatttcgtagctgtagctcttggtccttacgtttatgtcctcggtggctctgcttttgatactaggtcttatcctcttgatgttcctttgcctacttcttctgtgtttcgttacagcttcgtgaaatcggtttgggaacggttatctccgatgatgtctccgcgtggtaagctttgctttgcgctgcgatgccttggttcttgtcggtcggattaattgtggcgggaggaggatcaccggcacaactctgttttggtgctgccgggagtagagtgagttctgtggagatgtatgatgttgagaaagatgagtactataaagacgcggtagtgatggatttgagagtagatggtggtgagaaatggagggtagttggagatatgtggggagaagaagagagacctaagctagggaagattgttgctgttgattgtgggaagcctgtg

SEQ ID NO: 121064 - DNA, 429 bp, Arabidopsis thaliana
tcgaaatcttaaaactttgctgattgattgattttcgattccgggagaagaaaaatggtatctgggttgattaatgagaaccctatcatttacccaaagaaagagaggcgtcttcgtactgatacaagcattactgatgagcttacaccagaaccaattgatcaacttgagatttttgatcatataagagatatcaaagatccagagcatcctaatactctggaagatctcagagtagttacagaagactcagttgaagtggatgatgagaacagttatgttagggttacgttcactccaactgtcgaacattgtagcatggcaaccgttatcggtctttgtgtccgtgtgaaacttctacgaagcctttcttctcgatacaagattgatataagggtagcacctggttctcatgcaacagaagatgca

SEQ ID NO: 121065 - DNA, 738 bp, Arabidopsis thaliana
actcactatagggaaagctggtacgcctgcaggtaccggtccggaattcccgtgtcgacccacgcgtccggaaaaagtatttctccagttttggaattcgccatggctgttgatagcagaatggatctgctaagcgaaagagctgtgttgatgagagcatctcttcaaaagagtcaaaccatcaccgataatgttgtttctatcctcggctccttcgatagtcgtctgtctgctcttgaaaccgccatgcgtcctactcagattaggactcatgctataaggaaagctcatgagaatattgataggactcttaaggctgctgaagttattttgtctcaattcgatctcctccgtcaggcagagactaaagtactcaaggggccacatgaggacctggaaagttatctggatgcaattgctcaactcagaaagattattcgttattttatgagcaacaaaagctttaagagtagtgatggagttctcaaccacgcaaatagtttgcttgctaaagcacagtcaaagctggaggaagagtttaagcagttgctagcttcttacagtaaagcggtggagcctgatcgcctatttgatggccttcccaactcactgagaccatcctcagacggggatggaggtggaaaaccccacggaggacatcacaatgatgacgcggaaactgctgcttatacacttccaatcctcattccgtcacgggtgttgccacttttgcatgac

SEQ ID NO: 121066 - DNA, 517 bp, Arabidopsis thaliana
  unsure (1)..(517): unsure at all n locations
atgannnnnnnnnnnnnnnnnnnnnnnnnnnnnnnnnnnnnnnnnnnnnnnnnnnnnnnnnnnnnnnnnnnnnnnnnnnnnccacgcgtccggtttcatactatttatgtaaaaggaagcaacgggtgagaagaattaaaaagccgcaattttgggatcataagagttctcttcttcatctgtgattcattccgttgttacccgccaggcaccagccaccgtactttttctctctccggcaaaatccgagtctaaaaatgacgagtaaaagcaaaatcctgttcatcggaggaacgggttatatcgggaaatatatagtggaagcgagcgcaagatctggccacccaaccttagttctcgttcgaaattcgacgctcacaagcccttcacgatcctccaccatcgagaatttcaagaacctcggcgttcagtttctcctcggagaccttgacgaccatacgagtctcgtgaattcgataaagcaagcggatgtggtcatctctactgttgggcactc

SEQ ID NO: 121067 - DNA, 622 bp, Arabidopsis thaliana
  unsure (1)..(622): unsure at all n locations
agctannnnnnnnnnnnnnnnnnnnnnnnnnnnnnnnnnnnnnnnnnnnnnnnnnnnnnnnnnnnnnnnnnnccacgcgtccggggagagaccaccgccgccgaagaaaagggggcggcggaaggaggaggaaggtgaggctgaggaaattagttggtctgcggcggcgccttcgttggctgtggcggaggaggaatttgaggaggagaattgggcttcggtggtggataatgaagctggagagaggttgagaaaaagagaagcagaggaagaagaagataggaggatgaagagaaaggagaagaaagttagctactttagtgatgagagtgatgatgaagattagcttcttagattcattttatggtttgtgaatactgaaagagagagattgatcaaagttcaggagcaattacaatcttctggtttcgtcttcgtatgtgatcatgtttgatgactctggctgttctgtcgtgagtgatatagttcttggtttgaagattacattgttgttcatcaatgcattttagctcttgattttaaaaaaaaaacccaaagggcgaccgctctagaggatccaagcttacgtacgcgtgcgtgccacgtcataatcttctagagt

SEQ ID NO: 121068 - DNA, 507 bp, Arabidopsis thaliana
tacgactcactttagggaaagctcgtacgcctgcaggtaccggtccggaattcccgggtcgacccacgcgtccggaaataagagacactctcttactcttactcttcctcttgctcattttcgtaagagacgatggcggaagtatcagcaaaatcggtgacggttgaggaaatggcggaagaggacgacgctgcgattgaggagcggtggagtctttacgaagcttacaacgagttacacgctttggcgcaggaattggagacgccgttcgaagcaccggcggttcttgtggtgggacagcagaccgacggtaaaagtgcgcttgtggaagctcttatggggtttcaatttaaccatgtcggcggcggaaccaagactcgtcggccgattactctccatatgaagtacgatcctcagtgtcaattcccgctttgtcatctcggatctgatgatgatccttccgtttctcttcccaaatctctctcacaaattcaggcatatattgag

SEQ ID NO: 121069 - DNA, 525 bp, Arabidopsis thaliana
  unsure (1)..(525): unsure at all n locations
acgattttccagctannnnnnnnnnnnnnnnnnnnnnnnnnnnnnnnnnnnnnnnnnnnnnnnnnnnnnnnnnnnnnnnnnnccacgcgtccgaaaagctttaagacatttgcaccaaaaagatctcaaattcacgttcacatagaaaaattaacaagaggcagaaggaaaaaaaatgtggaggtcattcgcaagaagcttcaaactcattaatgtaccaaatggtttgatatccaagccaattcgctctactctcctctattcaacttcttcaagaaagttagaaggaaaagtagcggtcataaccggcggggcaagcggaatagggaaggccacagcggaggaatttgtgagccaaggtgcgcaagtgattatcgtagatatagatgaagaggctggtcatatggtcgcgaccgaacttggctcagccgcacatttcttaagatgtgatgtcactgaggaggaacaaatcgctaaggccgtggagaccgccgtgactcgtcatgggaagctcgacctaatgct

SEQ ID NO: 121070 - DNA, 556 bp, Arabidopsis thaliana
  unsure (1)..(556): unsure at all n locations
aacacactaagaatacagcaaatcgtctcttcgccattaaaacaccttcctttgcaaacaaagcttcaaactttctcttaaaacacccccaaatcagcagagatagggttaatcgaagaacctcaccgtaagtccactgaggattcaagttcttgctttggtttaaggaagaagaacagcagaaacctcaaggagaagaagaagtcaaagatgactcagagtcaaaccaacgacggagctggagctggagctgttacgacggtagaatctgttcctcctcagcctcaatctcagcctcagcctcagccgcagcagcagagcaacgagatggttctgcatacgggaagcttgagttttagtagtcatatgtcgagagaagacgaagagatgactccgttcttgctcttttcgggcgtttagagctaaagaaaggttgagatttgagaagaggcaggatggaaagtcccgttaanngttccccaagctcaatttgggncggggntgancaagaaacccaacgtttttntanttttncgttnggngntttggctnttnc

SEQ ID NO: 121071 - DNA, 636 bp, Arabidopsis thaliana
  unsure (1)..(636): unsure at all n locations
caaaggtcttacctcattgctacatgttgatgtctccaacaatcagttcacaggtccaataccagataacttggagggtcagttgttatctgagccgtcgtcgttttcaggaaatccaaacctctgcattccacattccttctctgctagcaacaatagccgcagcgcgttaaagtactgtaaagatcaatctaaaagcaggaagagtggccttagcacctggcaaatcgtgctaatagcggtcttatcgtctttattagtcttggttgtggtccttgctcttgttttcatttgcctacgtcgtcgcaaaggaagaccagagaaagatgcttatgtcttcactcaggaggaaggcccatctttgttgttgaacaaagttcttgcagcaactgacaatctaaatgaaaagtacaccattggaagaggagctcatggaattgtgtacagagcttctttaggctccggaaaggtctacgctgtgaagagacttgtattcgcgtctcacatccgcggtaaccagagtatgatgagggagattnatacaatcggtnaagtcaggcacaggnatctnnttaanttagaagggttttttgctttaggaaaanncgncgggttttaatnctgtntngntacnat

SEQ ID NO: 121072 - DNA, 500 bp, Arabidopsis thaliana
aatacgactcatttagggaaagctcgtacgcctgcaggtaccggtccggaattcccgggtcgacccacgcgtccgcggacgcgtgggtgcgtgcggggtttaaaaagcttgttgtctcactgtttagaaaggaaatgatggatgtttccagcagatttgatgagctgctcgaaaggatccttgtggaacatgaagataaactggacatgcatcatcaaggtacagacttagtggacgcgttgttggcagcttgtcgggacaaaaatgcagagtataagatctctaggaaccatatcaagtcgtttttcgcggatctcttatttgcaagcactgacacctttgtgcaaacaacacagtggacagtggcggagatcattaataaccctaatgttcttgagagattgagaggagaaatcgattccgtggtcgggaaagcaaggttgattcaagaaactgatttgccaaacctcccttatttgcaagcgggggccaaggaaggg

SEQ ID NO: 121073 - DNA, 413 bp, Arabidopsis thaliana
ctaaaaaatcaccgtgtctctcgtccctggttcggtccttcgagaagtgtgaacaaaaatgggttttctctttggtgttgctcataggaatcgcggtttctttcggctcggtcgtcgcatttgctcgctactctagtgtcagatccactcgtccagctgatttggcaaagaccattgctgcatttgcaagaatgacagttcaagattcgagaaaacttctcccgggagatttttatccttcttgggttgtgttttctcagagacaaaagttaaattggcttaatcttgaacttgaaaagatctggccttatgtaaatgaggcagcttctgagctgattaaaagcagtgtggaaccagtacttgaacagtatacaccagctatgttagcatctctcaagttctctaaattcaca

SEQ ID NO: 121074 - DNA, 626 bp, Arabidopsis thaliana
  unsure (1)..(626): unsure at all n locations
nnnnnnnnnnnnnnnnnnnnnnnnnnnnnnnnnnnnnnnnnnnnnnnnnnnnnnnnnnnnnnnnnnccacgcgtccggaagaatccgaatccaattcaatgagtcttcttcgtcttctcctcgttgttgttgttcttcatctttctgcggtggccggcgacgacgccatcgtctccagattccaggagtacctccgaatcaacacggttcagcccaacccggaatactacaaagccgttgactttataatatctcaggcgaaaccactgtccctcgaatctcagacgatcgaatttgtaaaaggaaagccgcttctcctcctcaaatgggttggctccgacccaaccctacctgcctttttcctcaactcccacaccgatgtcgttcccttcgaggactccaagtggactcaccatccggtccaagctcacatggaccaccatggggacatctatgccaggggtttccagggcatgaagtgcgttggggatgaagtaccttgggggccataaggaaagttccgggtttttggtttaagcaatttcgggtccggttattttttcttggcccccttaaanatttgggccaaatttggaaaaaattttttaatccanttttaagggtgt

SEQ ID NO: 121075 - DNA, 725 bp, Arabidopsis thaliana
  unsure (1)..(725): unsure at all n locations
aggcgaaaccactgtccctcgaatctcagacgatcgaatttgtaaaaggaaagccgcttctcctcctcaaatgggttggctccgacccaaccctacctgcctttctcctcaactcccacaccgatgtcgttcccttcgaggactccaagtggactcaccatccgctccaagctcacatggaccaccatggcgacatctatgccaggggttcccaggacatgaagtgcgtcgggatgcagtacctcgaggccatacgcaagctccaggcttctggcttcaagccactccgatccgtctatctctccttcgtccccgatgaagagattggcggccacgatggcgcagagaagtttgctgaatcccaattattcaagagcttgaacatcgcaatcgtgctcgacgaaggcctgccatcgcctactgagagttacagagtattctatggagagaggagtccctggtggctggtgattaaggctaaaggtccacctggccacggtgccaagctctatgacaactctgccatggagaatctgctcaaaagcatttgagagtattccgcagattcagagcttctcagttcgatcttctcaaagcttggtgggntnagctnaaggcgatgtttctcttntaacatggncttctnaaagnntggacaccttntcaactggnttcgtatgatnttcaaccatntaaggaaaagntggnttcnnattgngttcncc

SEQ ID NO: 121076 - DNA, 524 bp, Arabidopsis thaliana
  unsure (1)..(524): unsure at all n locations
cccacgcgtcgagagagagaagagaactactcagatataaaaaccctagatttcttctcttaaaacccacatcgaatctcaactcagaaccaacaatgctccaacctttctcttcctcctctgttttctcgagaatcctctggactttcttggtttaagaagattcgttgttgaatcagagagaaagaaagcatccatttttctatcattgcttgcttgctatggaattgggtaaatctcgattctacttatgttgcaattgcttttctcctgttagattttccgattattctttagctggaagtgattatccagacgccatctccatcactttcaattgtattcctataccttcttctgaagattcttcgtatttctcgattcgatgtttataaacttcaaattctcttccaaatcttgaaacgaatttctcccaaaaatctctgtttcttcacaaaaaagacccaaaaaaaaagggggngggccggtncttggnngggtccaaaggtttnccggncgggggt

SEQ ID NO: 121077 - DNA, 580 bp, Arabidopsis thaliana
  unsure (1)..(580): unsure at all n locations
nnnnnnnnnnnnnnnnnnnnnnnnnnnnnnnnnnnnnnnnnnnnnnnnnnnnnnnnnnnnnnnnccacgcgtccgctttttgtctatgagagcatccgaccggattttggaatcttcagtcactctaactaagaacttacggagccgagaagaagaagataaggtgtcaagctgtgcactgatccaggctatggccaaggcatgccaagtttctgggacacttgactctggcttgaccgagtctgaggtgccttatgagtctgaaacccactttactgaagaacaagaactagagcagcttataaatgggcacttgtgctgtaagatttatccattttctggggaagcacacgggtctgatgaagacagaaagattatactacctggctcttttaacccattacatgaaggtcatctcaagctgttagaagttgctatgagtgtttgtgggggcggctacccatgttttgaaatatccgcaataaatgccgacaaaccaccgcttacaattgcacagattaaagatcgtgtcaagcaatttgaagtagttgtatccggttggcaggaaagacgataatag

SEQ ID NO: 121078 - DNA, 1325 bp, Arabidopsis thaliana
  unsure (1)..(1325): unsure at all n locations
cacaacacgtctaagcttgctgtgcttttggagatttttattaagaagtttgttcagtgttatggatgtggtaacccggagactgagattattattacgaagacgcagatggtgaatctcaagtgtgctgcttgtgggtttatctctgaggtcgacatgagggataagttgactaatttcattctcaagaacccacctgagcagaagaaggtgtcaaaggataagaaagcaatgaggaaagctgagaaggagaggcttaaagaaggcgagctagctgatgaggagcagagaaagctgaaagctaagaagaaagcattgtctaacggcaaggattctaagacgtctaagaaccattcttctgatgaggatataagcccgaagcatgatgagaatgctctagaggtggatgaggatgaagatgatgatgatggtgtcgagtggcaaactgatacttcccgagaagctgctgagaaaagaatgatggaacagttgagtgctaaaactgccgaaatggtgatgctctctgcaatggaagtagaagagaaaaaggcgcccaaaagcaaatctaacgggaacgttgtgaaaactgagaatcctcctccgcaagagaagaatctcgtgcaggatatgaaagagtatctgaagaaagggtcaccaataagcgcgctcaaaagtttcatctcgtctctctctgaacctcctcaagacatcatggacgcactcttcaatgctctctttgatggtgtgggaaagggattcgccaaagaagtgactaagaagaagaattacttagcggctgctgcaacaatgcaagaggatggatcacagatgcatctgctcaattcgattgggacattctgtggaaagaatggaaacgaagaagctttgaaagaggtggctctggttcttaaagcattgtacgaccaagacatcattgaggaagaggtagtgttggattggtacgaaaagggtctcaccggagctgacaaaagctcgccggtttggaagaatgttaagccttttgtggagtggcttcagagcgctgagtctgagtccgaagaggaggattgagtcacttttttcttccctcctaacttttctttgcggcatttcttataatacttcgtcagttttcagaattcttaaatctttttgctgtgttcttataaagaaacatcatctattaaagttgtcttcgtttggatttggttttgacgactttgggaaatatttatgtttaagaaggtttcattggtcnnnnnnnnnnnnnnnnnnnnnnnnnnnnnnnnnnnnnnnnnnnnnnnnnnnnnnnnnnnnnnnnnnnn

SEQ ID NO: 121079 - DNA, 540 bp, Arabidopsis thaliana
  unsure (1)..(540): unsure at all n locations
gaggtggtttacgactcactctatggaaagctggtacgcctgcaggtaccggtccggaattcccgggtcgacccacgcgtgcggatattttaactttgttaagcacagagtgctgatgatcggtgaagccttattttagaaagcaactgaggacgaaccttatccgtcacagtggcaatggaggacaaatcaccgacgttactgatttctgaagatttatcccggaaaataatctctcttgccgccggtgaaagctcatacaatcgtctctgaccgggcgatggaatgtgtttactcatcgggaagtaggcatgcttggcccgtctctggtacgcgtataggagtcggacagagctttgtcccagttcttggtcgagtgcccaaatccagcggaaggggaatcggtgtcgattcggtgcggtcgctgctggtccttacctaaatcgttgtatattaggtagtcnctttttataattagtgaaacgtcatttacgatataacttaggttagttaatagatcatagtgaagcttttagtaat

SEQ ID NO: 121080 - DNA, 384 bp, Arabidopsis thaliana
cgaaccttatccgtcacagtggcaatggaggacaaatcaccgacgttactgatttctgaagatttatcccggaaaataatctctcttgccgccggtgaagctcatacaatcgctctgaccggcgatggatgtgtttactcatggggaagaggaatgtttggccgtctcggtacgggtaaggagtcggacgagcttgttccagttctagtcgagttcccaaatcaagcggaaggagatcggattcgaatcgttggtgttgctgctggtgcttatcacagtctcgctgtctcagatgatggctcggtttggtgttggggttacaacatttatggccaacttggttttgatggggaaaactccttggcaccatgcttgatcaaaaat

SEQ ID NO: 121081 - DNA, 536 bp, Arabidopsis thaliana
  unsure (1)..(536): unsure at all n locations
cttttgcttacctttctctcgacttggtctacttttgttactctttgagttgggtgattatggcagcagcaccacaggaggaacgatctccgtcgcttgacgattgccttaagctattgaaaggggagagagacgagcagaggctcgccggtctacttctcgtcaccaaattctgtaagaacgatgacatcgtttctctcaacaaggtctacgaagccgttggtactcactttctcgaccgtcttttccgtactggtagtggcagtggcgatggggttgataatcgtgatgtgtatctgcagatatctatcactgttcttgctgcattctgccgtgttccggcagataagcttcttcagaagagatggtctccagaattnccccttatttctcgaagtaattgtccaaagnattactacaaaacattntccnagattgctnttganttctgantttggngccacggctttttnaagntggccnaatnctttagttaacnttggnggctttanngnanagctcccanatncttagtt

SEQ ID NO: 121082 - DNA, 767 bp, Arabidopsis thaliana
  unsure (1)..(767): unsure at all n locations
nnnnnnnnnnnnnnnnnnnnnnnnnnnnnnnnnnnnnnnnnnnnnnnnnnnnnnnnnnnnnnnnnnnnnnnnnnnnnnnccacgcgtccgcccacgcgtccgtacggctgcgagaagacgacagaaggggatccaaaaagacgaagaaaaggaaaaaagacaaatcaaagagagacgattcgatcgcatcaatggcagaagaaaagagcttcaagtatgtgatcgtcggaggtggtgtcgccgccggatacgcggcgagagagttcttcaaccaaggtgtcaagcctggtgaacttgctatcatttccagggaacaagttcctccatatgagcgtcctgcacttagcaagggatatatccacctcgaaaataaagctacacttccgaatttctatgttgctgctggaattgggggagagagacagttccctcaatggtacaaagagaaaggtattgagctgattttgggcacagagattgtcaaagcagatcttgctgcgaagacacttgtcagtgggactggacaagtcttcaagtaccaaactttgctagctgcaactggttcttctgtcataaggttgtcaagattttggcgtcccaggtgcagatgctaagaatatattctacctgagagaactcgaagatgctgattaccttgcttatgcaatgggaccaaagggaaaagggaaggctttggttgttggtggcggttaaactgggtcttnnacnnnggtgntgctcttgaagggtaacaaaccttcnaggtt

SEQ ID NO: 121083 - DNA, 405 bp, Arabidopsis thaliana
cccacgcgtccgcccacgcgtccggatttcgatattctttgtacacatccaatgtttggtcctcagagtgtgagttcaaatcatggctggagaggattaagatttgtgtatgataaagttaggattggggaagagagattagagagtctcaaggtgtgagagttttcttgagatttttgttagagaaggatgtgagatggtggagatgagtgttactgatcatgataagtttgctgctgaatcacagtttataactcatactcttggtaggcttttggggatgttgaagttgatatcgacgccgattaatacgaaagggtacgaggcgttgcttgatttagctgagaatatttgtggggatagttttgatttgtattatgggttgtttgtgtataataacaactc

SEQ ID NO: 121084 - DNA, 605 bp, Arabidopsis thaliana
  unsure (1)..(605): unsure at all n locations
nnnnnnnnnnnnnnnnnnnnnnnnnnnnnnnnnnnnnnnnnnnnnnnnnnnnnnnnnnnnnnnnnnnnccacgcgtccgaccacatctacagagtcagaaaataaaaagtagaagaagcagaagcgagagtgcaaaaaggaaattaggttttgagtggtcatgtctgctcctatctattctccgatagatatgcaagagattgttcaaaatcctcctgggtttgatacggaaccagtcccaatcagtacttaccgagacaatgaacctgtcccgctttcaacttaccgagaaaatgattcagatcatctcgacgccactcagcaagagaacgatgacttttgggaaaacggtttcagtagggaagaggccattgaagatccagagccttctcaggcaaaggaaaatggaaagagaagtgtagacaacagcgctttcactcatggggaaactgatctcaatcaacttcctgcgattcctccggtttcaactggtcaaggtttgccgtatgcccctgttgattggccaagccctggtgatgtatggacttggagagttgggaggagagtgactgctatggggtatcatcaggataggtttcttattc

SEQ ID NO: 121085 - DNA, 415 bp, Arabidopsis thaliana
tataatattggaaatttctgaagcttttctatagttgatctcgagccatgcctccaatgaaagctgtgttgcaattgagcattcacgaggaaagaatcaggaagaaagcgtttgtcaccgtttctcgatgtccaggtgttacttcgataacaatggatgacaaaaccgggaaaatgacagtagttggtgaagttgatgtaccggttatcgtgatgaagctaaggaagctatgtaacacagagcttgtttcgggtgaaagttgttaaaccacctgagaaaaagcctgaaccagagaaaccggctccacctaaaccagctccagctccagctaaaccggctgaaattgttgcctggccggttcagatgaacaacccttaccaatacaatcctgcctatgcaaattcttactatcaac

SEQ ID NO: 121086 - DNA, 526 bp, Arabidopsis thaliana
  unsure (1)..(526): unsure at all n locations
tgannnnnnnnnnnnnnnnnnnnnnnnnnnnnnnnnnnnnnnnnnnnnnnnnnnnnnnnnnnnnnnnnnnnnnnnnnnnnnccacgcgtccgatctatgagtgagtgactgagaaacagagaaggattccaagctgctaaagattttttgtcaagatttttaatttaagtttcctggaggaggagatcacagatcttcttttcatatgaagagatctttccttctcttgtatgtgctcctggtacaggccttctatggggcttggtgtagtgttggagaaagcctgcattgtgaatattccaatttagcgagtcttcaccggcctcacagcgtatcgattacagagtttggagcggttggagatggtgtgactctaaacactaaagcctttcagaatgctctgttctacctcaattctttctctgataaaggcggggccaagctttttgttcccgctggtcagtggcttaccgggagtttcgaccttatcagtcacctcaccttatggctagataaaggtgcaacg

SEQ ID NO: 121087 - DNA, 1068 bp, Arabidopsis thaliana
  unsure (1)..(1068): unsure at all n locations
cnnnnnnnnnnnnnnnnnnnnnnnnnnnnnnnnnnnnnncttttggattttgttcatggatggaatgacacatgggttggctacgacgagcagttctggtatgctgctttgctcgttgtttctcttgtatgttacttggcaacattcgtcttctctgggtttctcttccactggtttactccatctggacatgattgtggactcaacaccttcttcattatcatgactttgatatttgtattcgtctttgccattgtagttttgcatcctactgtcggtggaagcattttaccagcatcggttatatctctgtactgcatgtacctctgttacagtggacttgcaagtgaaccccgggattacgagtgcaatggtctccacaatcactctaaagctgtttcaacaggcacaatgaccattggcttactcacaactgttctctcggttgtttattctgctgttcgtgctggttcttccactactcttctctcccctcctgattctcctcgcgcagagaagcctctgcttccgatagacgggaaagcagaagagaaggaagagaaagagaataaaaaaccagtttcatactcatacgcattcttccacatcatcttctcccttgcgagcatgtactctgcaatgctcctaaccggctggtcaacttcagttggtgaaagtggtaagctggtggatgtcgggtggccttcagtgtgggtccgtgttgtgaccagctgggccactgctggtctcttcatctggtcccttgttgctcccattctcttccccgaccgtgagttctgagctaatgcatctacttgagattctgaataacttttcatgaatcttcaatttgtaaaaaaatattcgatctttctactataatagaacatcgtgtgcttaatcacgaatggcctttgttggcccttctggaatatgaagatgatataaataaattccttttttggaaaaaaaaaaaaaaaaaagggcggccgctttaaaggattccaggcttaggtaggggtgcatgcaacgtcaagctcttctatagtgtcacgtaatacaacgcgc

SEQ ID NO: 121088 - DNA, 678 bp, Arabidopsis thaliana
  unsure (1)..(678): unsure at all n locations
gnnactnaanacccgggattgagtaaaggcccaaaanncccnaactntnaaaggaaaatgccaatgntttccaaaactgnccccggntgtaaccgctgncgtgtggtctccactacnctctcnccctcctgatnccctcgcgnaaaaacctctgcttccgatagcgggaaagcagaagagaaggaagagaagagaataaaaaaccagtttcatactcatacgcattctnccacatcatcttcncccttgcgagcatgtactctgcaatgctcctaaccggctggtcaacttcagttggtgaaagtggtaagctggtggatgtcgggtggccttcagtgtgggtccgtgttgtgaccagctgggccactgctggtctcttcatctggtcccttgttgctcccattctcttccccgaccgtgagttctgagctaatgcatctacttgagattctgaataacttttcatgaatcttcaatttgtaaaaaaatattcgatctttctactataatagaacatcgtgtgcttaatcacgaatggcctttgttggcccttctgtaatatgaagatgatataaataaattcctttctcgtaattttcatctgtctcgacttctccacaattgcgttttgcccgattcgcgtttgtgttttgtttggtcaaaaaaaaaaaaaaaaaa

SEQ ID NO: 121089 - DNA, 531 bp, Arabidopsis thaliana
  unsure (1)..(531): unsure at all n locations
nnnnnnnnncnnnnnnnnnnnnnnnnnnnnnnnnnnnnnnnnnnnnnnnnnnnnnnnnnnnnnnnnnnnnnnnnnnnnaccccacgcgtccggttccctgagagagagagagagacaacaccttcgcattcgctaactttctctgtaaccgccatgggtattaagggtttaacgaagcttttagccgacaatgcgcctagttgtatgaaagaacagaaattcgagagctattttggtcggaaaatcgctgttgatgctagcatgagcatttaccaattcctcattgttgttggaagaactgggactgaaatgctcactaatgaagctggtgaagtcactagtcatttacaagggatgtttaatcgaacgattcgtcttcttgaagctggaattaagcctgtctatgttttcgatgggaagcccccggagttaaagagacaggaactggctaaacgttactccaagagagctgatgcaactgcagatttgactggtgcaatgaagcaggaaacaaggaaaacattgagaaga

SEQ ID NO: 121090 - DNA, 461 bp, Arabidopsis thaliana
attcagtctttaaagtcttaaaggatcttcattgtactttgaagtatagtttctgtaacaacaatggccaaaaccagagggtcttgttgtctcgtcaacgctctaatcgctatagcttttttggcgacagcccatttgtgtgaagctggcttgtctcagaaagaacaggacaaggtctcgaaattgcctggtcagaattttaatgttagttttgctcactactctgggtttgttgctactaatgagcaattgggaagagctctcttttactggttatttgaagccgttgaagatgctaagtctaagcctcttgttctctggctcaatggaggaccaggatgttcatctgttgcatatggtgaagcagaagagataggaccatttcacattaaggcagatgggaaaactccttgtccctaaaccaatattcttggggcccaaggggcaaaaatttttttccc

SEQ ID NO: 121091 - DNA, 408 bp, Arabidopsis thaliana
  unsure (1)..(408): unsure at all n locations
gggaaagctgctacgcctgcaggtaccggtccggaattcccgggtcnacccaggctgcggggtaagcgaaaaaacttgttggcaagagtgtccttttgtccaagtcccaaagattttgcttcagattgggcagtgaagatgcaacactttcccaatggtaagagtactctttacaatttttagatttgtgttggcacacatattgaaatatagggggtggaatattttggacgaaaaaaaaaaaaaaaggnnnnnnnnnnnnnnnnnnnnnnnnnnnnnnnnnnnnnnnnnnnnnnnnnnnnnnnnnnnnnnnnnnnnnnnnnnnnnnnnnnnnnnnnnnnnnnnnnnnnnnnnnnnnnnnnnnnnnnnnnnnnnnnnnnnnnnnnnnnnnnnnnnnnnnnnnnnnnn

SEQ ID NO: 121092 - DNA, 411 bp, Arabidopsis thaliana
acgagattggtttgcaacagatctaaagcatctgatatagtcttccttgtctaaatgtttctcaacatgttagattttcagtttctacagacaaatctgtgcgctattttttcattcttggttttctctgttttggcaaattttggaggaaaggaatctgaagaggaaacaagaatggtcgtggtcgattggcttggtttgggattaggctctgttgctggagctttggtctcggaaggcctgaaagctttgatttcagaggcaatgaacgtgttagctttcaaatctgtgtctaacgagctcgcatcgacgatggagtcattgcttccggtgatcaaagagatcgtatcgatgcaagatggtctggtacttcaagatcttaaagacacgatcgataaagctcttttactg

SEQ ID NO: 121093 - DNA, 240 bp, Arabidopsis thaliana
cccacgcgtccgcggacgcgtgggctttttatcaaaattctctctttttcccatcaaagattcacagatttgttgtagtctcgccgttaagatggcgccggcgacggagcagcagagctcgttcttgagtcgactgagccgtcgcaatcaagtggtttccatggaggttaaccacgagctagagcaagaagaactcgatgattttcaagaactcgtacctgaacgtgtcgcggagctctt

SEQ ID NO: 121094 - DNA, 416 bp, Arabidopsis thaliana
ctctgagatacaagaaggaggaaattgttataaccccaactcgttgagagcacatgcctcttttgccttcaatagttattaccagaagaatccaatccctagtagttgcaattttgatggaactgctatcactatcagtgctgacccaagtttaggttcatgccactttccatctacaagcacgagtgaatcgatattgaacgtaacaagtgaagatggattagggcttttcgggggaataccatctcatccaactcccaagcctgaagcttcaacctcccccccaagaactttggtctcatttctctacttcctttgcttttgtgttttaaaaccccttgttataaccttaacaaagtcatgtaataaaaaataggcaactttttttagggtaattcaagccgatagttttttcc

SEQ ID NO: 121095 - DNA, 539 bp, Arabidopsis thaliana
tacgactcactttaggggaagcacgtacgcctgcaggtaccggtccggaattcccgggtcgacccacgcgtccgcccacgcgtccgattttcttagaattcagtctctctccttccttagcaatggcttgtagactatatttggctttgatcttctcttgcgtttatctgatttgcctgtcaagtcaacaagaaaccgggtttgtctacaatggcttcgagcaagcagatctttttattgatgggatcgccaaaatactacctgatgggcttttgcagttgacaaatactacagagttgcaaatgggtcatgctttcttcaagaagccgtttgattttgatccatcttcatcactatcgttctatacacattttgtgtgtgcgcttgtgcctcctaagttgggagctgatggtggccatgggattgtctttgttgtatctccttccattgatctctctcatgcatacgcaactcagtacttgggggtcttcagcaacttaacaaatgggacttcctcttcacatctgctagctattgag

SEQ ID NO: 121096 - DNA, 581 bp, Arabidopsis thaliana
  unsure (1)..(581): unsure at all n locations
ggggaaanctttcccccccggttccgtccggantcccgggggnccccccgntccnanattnccangccntccccaaagggcgntactnaggcaaccccngtnttaaacccggngaagcttgccaaaatctgaaaaactaagtaaacttctctggtttcatccaggtggcctggtgttcccttcccctgtctgtgtctggttcaagtattctcatgttaaaaaggttttatataaggtcgaatgaaagcgtgcttgatctttagcgtcttccatctctctgtggtgtggaactttctattatctgtgtttgcaagcagagaaacgtgctcttaaaaaaaatgctttgtgtgtttttatctttctactatttttgagcactgtgttattgtttcctgtttggtctgtatcatattgagattgtctctgtagctacatgaagcttatttaaaaaggcctgtgtttgtccttcaaaaaaaaaaaaaaaaaaaaaggnnnnnnnnnnnnnnnnnnnnnnnnnnnnnnnnnnnnnnnnnnnnnnnnnnnnnnnnnnnnnnnnnnnnnnnnnnnnnnnnnnnnnnnnn

SEQ ID NO: 121097 - DNA, 925 bp, Arabidopsis thaliana
  unsure (1)..(925): unsure at all n locations
gggagacaaaccaaaaaaaagcctaaaaagccgaccttttttctttctttctctcctctacctctcagcttctgctggatctctccagcagacacgatcttgttcggagagattcgtaggggaccgatctatcaaggcttcaagggcaaacagaaatggaccacgacaagacaggatgccaaagcccacctgaaggtcccaagctatgtactaacaactgcggtttctttggaagcgctgccacaatgaacatgtgttctaagtgtcacaaggatatgttgttccaacaggagcagggcgctaagtttgcatctgcagtgtctggaacatcgtcatccagcaacatcataaaggaaacctttaccgctgcgttggtcgatattgaaaccaaatccgttgagccgatgactgtttctgtacagccatcctctgtccaagtcgttgcagaggtagtagcaccagaagaagctgcgaaaccaaagggaccaagccgatgtactacttgcaataagcgggttggcctgactggattcaaatgtcgctgtgggagcctcttctgcggaacacaccgctatgcagacgtacatgactgctccttcaattaccatgctgctgcgcaagaggcgatagctaaggcaaacccggttgtgaaagcagagaagcttgacaaaatctgaaaatctaagtaaacttctctggtttcatcaggtggcctggtgtttccttctcctgtctgtgtctggttcaagtattctcatgttaaaaaggttttatataaggtcgaatgaaagcgtgcttgatctttagcgtcttccatctctctgtggtgtggaactttctattatctgtgtttgcaagcagaggaacgtgctcttaaaaaaaatnctttttggtggttnncttnctacctattttngnngccctg

SEQ ID NO: 121098 - DNA, 678 bp, Arabidopsis thaliana
  unsure (1)..(678): unsure at all n locations
nnnnnnnnnnnnnnnnnnnnnnnnnnnnnnnnnnnncttcatgcttcgatcaatcaaaccatcatcaaacccctcgcgtccggaccaacagtgttcctgtaggaagcggcaaacttgcagctctgttctcttgaaatggagaaaacagtgagatgtgttcggtggggttatgaggttaatacctcttctgatgcttgcatcgacgcaattaactcctattttcaacaggttcttagttatgggaggaagaggaaagtgattctagaagcaccactctacgataaagattgtgttttgggcagcattttagctgctcatttcctttcttcatctgatccttctagagctaattcctatgttgaagctgcggcatctaatctcgaacaatctacaccttatgagaaagcggtttacgaggctgttacttacctaatctctgaggatagggatgacgacttggcttttgaaatgcacaccaagctacttaaaagattcccaaaggacttggcttctttgaaaagagcgcagcttttaagtttctacatgggtcaacctgatcccttcttgggtcttgttcagcaggttctacctgcgaatcaagaagaaagttatattcatggtttacttgcgttcccattgttagaacttggtcgaatggaagaagctgcggcagcttcc

SEQ ID NO: 121099 - DNA, 524 bp, Arabidopsis thaliana
  unsure (1)..(524): unsure at all n locations
nnnnnnnnnnnnnnnnnnnnnnnnnnnnnnnnnnnnnnnnnnnnnnnnnnnnnnnnnnnnnnnnnnnnnnttcccgggaatgtttcctcgcaatcatcatcatcatcaccatcttcgtcttcttctttgaaacctccagcgacttcctcgtagttctctcacttatacacttactaatacagagtaacagagagagacagagtggactcttcttagagtaagatgggaggtgtgacttcttcaatggcggcgaagttggcgttttttcctccgaatccgccgtcgtacaagctggtcagagatgaaacaacggagctttttctaatgagcccttttccccatcgagaaaatgtcgacattttgcggctgcccacgcgccgaggcaccgaaatcgtggccatgtacatcagatacccaatggccgtcaccacccttctctactctcatggaaatgctgccgacatcgggcagatgtatgagctcttcatcgagctcagtattcacctccgcgtcaatttgatggg

SEQ ID NO: 121100 - DNA, 672 bp, Arabidopsis thaliana
  unsure (1)..(672): unsure at all n locations
caaactcggatctccttctcttctctctctcgctaagaactatagaagatgggattgttctcccacaagatctccagagatgatctgaaaccaggcgatcacatctattcttggcgtaacgcttatatctactctcatcacggagtctacgtaggagatgagaaagtcattcatttcactcgtggaggtggtctagaattcggaacaggaacagttttggacaagatcatcgatatttcaataccaaatcatggaagaagagacaaaaagtgtattgattgtggagatcaatccaatctcggtggtgtaatctcttcttgtcttgattgttttctcgccggaggaaatctacatctcttcgaatacagtgcctctccgtctatctttctagccaaacgnggtggtacatgcacggtagcatcttcagatccctngtgatgaaggcattttctcggtgctaaatttctcccttttgcaaaaattggatttggtgagtacggtnctttttagncaacaatttttgaggttttncggnttttttcaaaaactgggtttgttttgtgttncgggttnannccaaggtttggnttnnggggccaagccaattcttnattctncagctggngggntttttccttttncggntaaaggttttgggngaaaaaaaannaa

SEQ ID NO: 121101 - DNA, 524 bp, Arabidopsis thaliana
tttctcttctctctctcgctaagaactatagaagatgggattgttctcccacaagatctccagagatgatctgaaaccaggcgatcacatctattcttggcgtaacgcttatatctactctcatcacggttccatctcttaacgtttgatcttagttatttctgggtttatcaacaaagatcacaaaatttgggttattccataacacgatatttccctgttttgcaatttttcaggagtctacgtaggagatgagaaagtcattcatttcactcgtggaggtggtctagaattcggaacaggaacagttttggacaagatcatcgatatttcaataccaaatcatggaagaagagacaaaaagtgtattgattgtggagatcaatccaatctcggtggtgtaatctcttcttgtcttgattgttttctcgccggaggaaatctacatctcttcgaatacagtgcctctccgtctatctttctagccaaacgaggtggtacatgcacgatagcatcttcagatc

SEQ ID NO: 121102 - DNA, 475 bp, Arabidopsis thaliana
cggacacgtgggcggacgcgtgggcggacgcgtgggcgagacccaagaaaaagatctcaaaatgctcacgacacctccacgaacctttgtctctgtccctttcttcttcttcttcctcctcttcctttctctacctctctcatctttctctcaatcgaactctgtatacaactctttcctcaagtgtttctccgacaagacgaaatctccacaatcccaaatcactgacaatgtcttctctcagacaaaccctgctttctcctccgttcttcgtgcttacatccgcaatgcgaggttcaacacttcctctactcttaaacccaccatcataatcactcctcgctccgagagccacgtcagcgccgccgtcacttgctcaaaaaccctaaatttcctcctcaaaatccgaagcggcggccatgactacgatggtctctcttacatttccgacaaaccatttttcatcctcgacatg

SEQ ID NO: 121103 - DNA, 530 bp, Arabidopsis thaliana
cagttcgggcacgcgcacgctctcttttgtaaacctgcgatctgaatcttcccggcggtgaaaaatggttgcggagaagaaggcgaagaagtcccatgaaggaatcaacagcagattagctcttgtgatgaagagtggaaagtacactcttggatacaagtctgttctcaaatcccttcgcagctccaaaggtaagctgatattgatatctagcaattgcccaccgttgagaaggtcagagattgaatactatgcgatgcttgctaaagttggagttcatcgctacaatggcaacaatgttgatttgggtactgcttgtggtaaatacttccgagtttcttgcctcagcatcgttgatcctggtgattccgacatcatcaagacacttcctggagatcagtgattctgattttgatgattttgccatgttgttctctatgcttgattatgctttgtgttcttcaaagacttaatgttagatttctttggtttcccgacttcctcttaatggttataattaattactacaa

SEQ ID NO: 121104 - DNA, 538 bp, Arabidopsis thaliana
  unsure (1)..(538): unsure at all n locations
atgannnnnnnnnnnnnnnnnnnnnnnnnnnnnnnnnnnnnnnnnnnnnnnnnnnnnnnnnnnnnnnnnnnnnnnnnnnnnccacgcgtccgcccacgcgtccgcggacgcgtgggtaaaacacaacccaaaaatggagttactaacgacggtcgcgagctttttcactccgacgactcttttcctccttcttaatcttatgatcggtacaatcgtcgtaacctctcgactcgggtcaggttcaagaaaacattaccagcatcacgatggattcgggtcaggtcatgctccggctccgttagctagagctccatcgattatcgaccgagtcaagtccatcaattttcatctctacaaatttcctcatccagaaactgagcttttctcgatgacagctcaccacgacataatcgggtcggatcttcatgtttacccggatccaaatccggctccgttacaacgtgctccttctcttttggatcgggtcaaatctatcaacatgtcttatttcaagttcccacacgacgtaaccgggtcg

SEQ ID NO: 121105 - DNA, 922 bp, Arabidopsis thaliana
  unsure (1)..(922): unsure at all n locations
nnnnnnnnnnnnnnnnnnnnnnnnnnnnnnnnnnnnnnnnnnnnnnnnnnnnnnnnnnnnnnnnnnnnnnnnnnnnnnnnnnnccacgcgtccgcccacgcgtccgaaatcgtgtcaaattttagggttttttcttttcgtacttcatcaaattctggaatctggttttttcttagttttcttctatatacctttgaatcgcatctttgatccaaattcattttagatatcaccttgaagtcgaatttgtgattttttcttttcctctcgaattctcaaagtctcacgcaactatgaaagaagacatggaagtactatcgctcgcttcactaccggttgggttcagatttagtccaacggacgaagagttagtccggtactatctccggctcaagatcaacggtcacgataacgacgttagagtaattcgtgagatcgatatctgcaaatgggagccttgggatttgcctgatttttctgtggtgaagacaacagactcagagtggctcttcttttgtcctttggaccggaaatatccgagtggaagtcgaatgaatagagctactgtggctggatactggaaggcgacgggaaaagaccgtaagatcaaatcaggaaagactaagattataggtgttaagaggactctagtgttttatacaggtcgtgctcctaaagggacacgaacttgttggattatgcatgagtatcgtgctactgagaaggatcttgatggaacaaagtctggccagaatccgtttgttgtttgtaagttgtttaagaagcaagatattgtgaacggagctgctgaaccagaagagtcaaagtcatgtgaagttgaaccagcggtatcgtctccaactgttgtggacgaggttgaaatgtctgaggtatctcctgttttccctaaaacagaagagac

SEQ ID NO: 121106 - DNA, 471 bp, Arabidopsis thaliana
gtctccgtcgccgtcgtagctcctccgcatcgttgcccattctctagtcatctgaatctgaacaagctttctcttcaaattcctagaaccggctggcggaggaaacagctagggtttgctttagcttctactgcggcttcagaatcgccatcggaagctacatatgatccggagctccgtttagttttcgagctcgctaccgattccgagttatatgagcttgagaaaatcctttttggtcccagctacttcagccctttgctgaaatcaatcccaaacaaaggaggaggtgaccggcttatgataggccaagacattgaagtgcgagatggttttatcgaagctcttgaatcgagattcttgtttctagctgcagatgctcgttcaacactcaggggttggaggccttcatacagaaacgtgttacttgcggtgagaaataatttgaatattccctgctccagccaattg

SEQ ID NO: 121107 - DNA, 443 bp, Arabidopsis thaliana
cacagatcggagaatctcctctgagagctctaatctctcagctttcttcaccggcgtctccggatctaataatcctgtaaggcctctactgcagaaaaaagattgaatttttacaatttggggtgactcaattttgttgactagagtgtttggagatatttctaactaaatgggaacaatgcaccgcagtggtgctcctcgaagaacgaatgaaaatgcaaaggttattattactactattttggggatagtgtttgggacttttattggtatcacattaccttcactttcgtttaagattaacttaccctcgcgccttatatcatctcttgatgtagccatatctggtgacaaatcccctgaagatttcggttcaagaaagtttcctgagatatatgttccaactaacccgcgttgtgcagaactactacctccaggaatcg

SEQ ID NO: 121108 - DNA, 545 bp, Arabidopsis thaliana
  unsure (1)..(545): unsure at all n locations
atctccctctctctctctttttctctctcacacgtttcttttttgtctctctccctgattcatcgccgtagctgtgtgaccgaacattgctgcgagttcctcaaaacccaaatctttcttcctcaaagactctgttttttctttcttcctttcttcaatggcgttatcgaaaaacagtaacagtaacagctttaacaagaagaaagtttcgtatatctcagtcccttctcagatcataaactctttatcatcttcctcattacaatctcttcttgtttctcccaagaaatcatcaagaagcaccaacagattcagcttctcttataggaaccctagaatctggttctttactctcttcctcgtctcactctttggaatgttgaaactcggttttcaacgttgacccaatctctctccctttctcacggtacccttgttcaacggcccaacaaccactaagcttcggcggggaacaaaacggtggatcccattttgggttggctaagnggcggttttgtttcnnggcatggattngatgnggtatc

SEQ ID NO: 121109 - DNA, 783 bp, Arabidopsis thaliana
ggagaagagtggtaccgaagagagtgaggttgaagagaagaaagacaatggtagtagcgaagagagtgaggttgaagagaagaaagaaaacagaggtatagacgagagcgaggagagtaaagagaaagatatagatgagaaagcgaatattgaagaggcaagagagaataattacaagggagatgatgcttctagtgaggtagttcatgagtctgaggagaagactagtgagtcggagaacagtgagaaagtggaagacaagtcgggtataaagactgaagaagtggaagattctgttatcaagagtgttttgcctaacacaacagataatggggaaagcagttgtgatgagaagagtactggttcgtcgtcaggtcatgaatcggattccttggagggaataaaatctgagggtgaatctatggagaagaatgagttgttggagaaggagttcaatgattctaacggtgagtcctctgtgaccggtaaatccacgggttctggagacggaggttctcaagaaacttctgaagtgtcatctcaagaggagagtaaaggcaaggaaagtgagacaaaggataaggaagaatcttcgtctcaagaggaaagtaaagacagagaaactgagacaaaggagaaagaagagtcttcatcgcaagaggaaactatggacaaagaaaccgaagcaaaggagaaagtagagtcttcttttcaagagaaaaacgaagacaaggaaactgagaaaatagagtcttcgtccctagaggaaactaaagaaaaaga

SEQ ID NO: 121110 - DNA, 1518 bp, Arabidopsis thaliana
  unsure (1)..(1518): unsure at all n locations
nnnnnnnnnnnnnnnnnnnnnnnnnnnnnnnnnnnnnnnnnnnnnnnnnnnnnnnnnnnnnnnnccacgcgtccgctcttcaccaactggcataagcagaagaagaagaagaagacaacgacgacgactttgaagaagaacaaactcttccttcaatctcaatctctctctcagatgggttgtggtggaactttgttctacccacttctcataactctctccgttgctctaatcacttacaacatcatcatctccgctaatgctcctctcaaacaaggcttcccaggccgatcttcttcctccgatatctccattgacccagtcatcgaattaccacgtggcggcggatccagaaacaacgatggtaaaaggataagacttttccacacggcggtgacggcgtctgattccgtctataacacttggcaatgtagagttatgtactattggttcaaaaagattcaagcttctgctggacccggttctgaaatgggtgggtttactcggatcttgcattccggtaaaccggatcagtatatggatgagattcctacttttgttgctcagcctttaccttctgggatggatcagggttatgttgtgttgaataggccatgggcatttgtacaatggcttcaacaaacagatataaaagaagattatattttgatgtctgagcctgatcatatcattgttaaacctataccaaatttggctaaagatgggcttggagctgcgtttcctttcttttacattgaaccgaaaaagtatgagaaggtgttgaggaagtattatcctgaagtgagaggaccggttactaatatcgatccgataggaaactctcctgtcattgttggaaaggatgctttgaagaagattgctccaacttggatgaatgtttctttggctatgaagaaggatcctgaagcagacaaggcttttggatgggttcttgaaatgtatgcttatgctgtctcatctgcattgcatggtgttagcaatattctacacaaagacttcatgattcagcctccatgggatatagaggttggtgacaagtacatcatacactacacttatggatgtgattatgatatgaagggtaaattaacttatgggaaaatcggggaatggagatttgacaaaagatcgtatgatagcaaaccaccaccaaggaaccttacaatgcctccacctggtgtttcacaaagtgtggtaacactagtgaagatgataaatgaagccacggccaacataccaaactggggatcataaagagacagagagagagaaaccgtaatctatatgtacctgtgagttgctcctttcttttcaaaataccttgtcctgctctttagtttctcctttggttgtggctaggtttgtaacatatatagtgattcaaacaaagcctttctttggcaaaaaaaaaaaaaaagnnnnnnnnnnnnnnnnnnnnnnnnnnnnnnnnnnnnnnnnnnnnnnnnnnnnnnnnnnnnnnnnnnnnnnnnnnnnnnn

SEQ ID NO: 121111 - DNA, 443 bp, Arabidopsis thaliana
gttcatctaccaacaaatcctcaactccttcttcttcactaatagtataccacaaaacctcaaaattgtaatttattagattatcgtgatggccttagctaaagagttaatgggttatcctctcatcacagaaaggtcatcacttgtctcgtcggcgtcgcatttcaagaagaggacacagtcaacacagttctcgatcaacccttttgaccggagaccaagaaaaaccaaatccggcgtcgttgcagccatcagcgaggatttggtcaaaacgctgcgtttttccacaacgaccggagacagaaagagcgaagaggaggagaaagcggcggtgaagttcaaggtgagagctgtggttactgtgaggaacaagaacaaggaggatttgaaagagactcttgttaagcatttggatgcttttgctgataaaattggtcgaaaca

SEQ ID NO: 121112 - DNA, 367 bp, Arabidopsis thaliana
ctagcggtcaactgttgtaattcactgcaattccatgagagtcgggagcatcagccgcgtcgccaacggcgaaaagcttcaattttggatcttccagactcttagccttggcgcagcagctgcgtgtatacaagccgccgctttcgtcatccttcgacgagagggaagagctgcttgcgtacaaggaaagcaccaggaaatcgataacccacgttgggtttcaggaatctatggctccggtgaggttcagaccgaagaaagctgctgtcttgatatgtctcttcgaaggagacgatggtgatttgcgtgtgattcttactaagaggtcttccacattgtctactcactcaggagaagtttctttgcc

SEQ ID NO: 121113 - DNA, 996 bp, Arabidopsis thaliana
  unsure (1)..(996): unsure at all n locations
atgatcctccagcaactatacngactcaccttagggaaagctcgtacgcctgcaggtaccggtccggaattcccgggtcgacccacgcgtccgcccacgcgtccgctcaaaacaaaatttgtttgttcgtttgatctttcttaaaaatatgaaaattaacatcagagattccaccatggtccggcctgccaccgagacaccaatcactaatctttggaactccaacgtcgaccttgtcatccccagattccatacccctagtgtctacttctacagacccaccggcgcttccaatttctttgaccctcaggtcatgaaggaagctctttccaaagcccttgtccctttttaccctatggctggtcgcttgaagagagacgatgatggtcgtattgagatcgattgtaacggtgctggtgttctcttcgttgtggctgatactccttctgttatcgatgattttggtgattttgctcctacccttaatctccgtcagcttattcccgaagttgatcactccaccggcattcactctttcccgcttctcgttttgcaggtgactttctttaaatgtgggggagcttcacttggggttgggatgcaacatcacgcggcagatggtttctctggtcttcattttatcaacacatggtctgatatggctcgtggtcttgacctaaccattccacctttcattgatcgaacactcctccgagctagggacccggcacagcctgcttttcatcatgttgaatatcagcctgcaccaagtatgaagggtccctcttgatccatccaaatcaggacctgagaataacaaccggggacaatattcaaattaacacgagaccaggcttggtgccccaangngaaaccaaggngggatnggnacactggcagcaaaagcncaaatgantgttgnangcatgtgtggannagtgggaaaggccaagggtccaacggcaagggcgaacgnnatgaacgntgngggtacgc

SEQ ID NO: 121114 - DNA, 647 bp, Arabidopsis thaliana
  unsure (1)..(647): unsure at all n locations
ctatgacgacgnctgcacgcctacgtaagctcggaattcggttcgaggaaggaatcaaaacttaaaaactatcagaatgggaacgttcttaggacactttgtgcctggtctctcacttgctcttcttggtctttggcatctcttcaacaccataagatcttactgtcttaaaggccctgaagctttctctgcaaaattctggttccctttccctaaactcaaacatcttgagcttatcttgattctcttcttctccttcctctccatcactctcctcaccctagatttccctaatttcaacttctcctctctcaaaccagacaacctagaacatgcttccatgttcctccacctcattatctttgcgtgtttcgctctcttctgcgagctaaccctttgctcagatctcttctccggtctaatcggagttctttctgcctctgtcttcgctcaagaactcttccttcttcattttnattccactgatcattcaggtcttgaaggtcactaccatttccttctccaactcattgctttcgtctccttctcctcggcgctagttcntgcttcgttccctaaatccttctntgcggctctattcctcccganatcggtaatgtttcaaggatgctggttcttgaacatgg

SEQ ID NO: 121115 - DNA, 527 bp, Arabidopsis thaliana
  unsure (1)..(527): unsure at all n locations
nnnnnnnnnnnnnnnnnnnnnnnnnnnnnnnnnnnnnnnnnnnnnnnnnnnnnnnnnnnnnnnnnnnnnnnnncataaattggacagaacatatcaagcatgtaatatacagaagccgacaaattgcaaaatttacctaaaccccatcttacaccaccgtcagattctgatgtaagtattatcaaagctcaagaacaatcacatcatcagaatctaacttatatatcaaaggtccagaattttctccattgaagctggattctaaggaaagttatcaaaagttttgagagctttggatagtgaagctcaaagaactaaacaatgggcttcagagtttgtgttattgtcgtcttcttgggttgtcttcttctagtccctgagaaaacaatggctcaagaaatgaaacgtgcatcgatcgttatccaaggagctcgacgagtttgtgagaccgatgagaactttgtctgtgcgacattggactggtggcctcatgacaagtgcaactatgaccaatgtccttggggtta

SEQ ID NO: 121116 - DNA, 439 bp, Arabidopsis thaliana
ctctctatctgtatcttcttcttcttcttcaaccttcagacttttctagttgcaactctcattcaattgttcaatttctctgtaaaaatcaaagctttttggaatctttcttcggcgagatatttcttcaccggcgcaagcttctcttgagcgtgattcatcactgggtttgcattttttcctggtgggtattcttcaaattgttcaaagctccgaccttttcttccttagaatctgattactggaatcttgaagctggagagactcgagtttatatggtttcaagcatcgttgagtcagtcggatgatgtgaaagtgctagagaatgtgaatatggttgtagataataacaattacaagacgcagattgagtttgcgggatcatcagttgctgcttcttcgaatccatctacaaacactcagcaagaaaaatcagaat

SEQ ID NO: 121117 - DNA, 636 bp, Arabidopsis thaliana
agtcaggagaaacaaagtgcgaatttctttgacaagacctgagccttttcgtgaaattatagccatgtctgatgtgggatcctttacaggcattactggctctgcttgctttgtgtaaacgactcttccatcaaggaaaggaggcttcgtatcatgaaaaggctcaggtcttgtcaaagaaattcgggagaaacaaagtgcgaataattcacgacagcgattctggaagcttgcaggttctaatcttggtaatatccttggtattgaaaaatcagccgagcagattgatgccgatactgctgtagttggtgacgacggtgaagtagattttaaaggtgaggctaaatttccacaacatatgaagaagggagaagctgtgagtgaatttcccatgtcaaagaccatggcagagcaacggcagtatcttcccatatttcctgttagagatgaactattgcaggtaataagagaaaaccaggtgatagtggtggttggcgaaactggttcgggaaagaccactcaacttacacagtatctttccatgagggttggttacacttataaatggtatagttggttgcacccaaccaaggcgtgtagcagccatgagtgttgcaaagagagttagtgaagaga

SEQ ID NO: 121118 - DNA, 522 bp, Arabidopsis thaliana
  unsure (1)..(522): unsure at all n locations
nnnnnnnnnnnnnnnnnnnnnnnnnnnnnnnnnnnnnnnnnnnnnnnnnnnnnnnnnnnnnnnnnnnnnnnnnnccacgcgtccgattcgattcagaatcaaaccatttttgaagaaccctaaaagttctcttcttcccccaaatttgaatttgttcttgcaatcggattcgaaatccgaaagtcttagtctcgaatttgagctcaacagtttcttatggctccgaagaagtctgaaggaggcgctttgctttccgtttacagggatgaagatgaccaagagatggaagacgccgaggaagaggaagaagaggatgacaaccagagaaatcaggaggagagggaaaaaatatttgaagaagatcagggagaagaagcgaattatttggatgaagaagagaaaggaggaggaggaaaatattctaaaaccgccgagggctattagatggggggggggcttcttttaggcgtcagggggactcctcggtctttggagacgcaggatcatgggggcccggttggg

SEQ ID NO: 121119 - DNA, 373 bp, Arabidopsis thaliana
catcgaaaagagttttctctgataatctttctcggacaagatggcacctgatatgaacaacaagttgagctacggagaaaagaagagagcgtacgttacgttcctcgccggaaccggagactacgtgaaaggagtggttggtctggctaaagggctaaggaaaactaaaagcaagtacccattagtggttgctgtgttacctgacgtgccggccgatcaccggagacagctattggaccaaggctgcgtcatcaaggagattcagccggtttacccaccggataaccaaactcagtttgctatggcttactacgtcctcaactactctaaacttcgtatttggaagtttgtagagtacagcaagctgatatac

SEQ ID NO: 121120 - DNA, 432 bp, Arabidopsis thaliana
ctgcagtaccggtccggaattccgggttacccacgcgccgggcaacaaaaataatctcagactctcggtcaacggaatcgaagcaaaactctgcctctagttccgtagaattcaccggagactgaacaaaaatcccgtgagttttttagttttccgttacattctctgtctcaattctgaaacttttcacatgggttgtgctcaaatttcctttttaatggttgtcgagatttatctataaagtcaatgatctgggtttgatcaaagtctcaatctttctcttaaatttcgaatatttgatgatcccacgagttagtctctctaaatctgatctggctatgcttaatccgccacattgttgctctcaagctctggatttgattgtatcatgaaaagttatccaatttgatccgattaaggcttttattcctt

SEQ ID NO: 121121 - DNA, 551 bp, Arabidopsis thaliana
ctctcatacgactcacttagggaaagctgctacgcctgcaggtaccggtccggaattcccgggtcgacccacgcgtccgctcgattatacagttttcctctctttcactctctccgtagtctgagactcgccggaaaagcttgtattggcttctcttcgatttctggcggaagtaaggatatcacgtgagctatgaagttcctcatgcaatccatttctgggaggaatcgatctctggttcgagctctagttagtcggcgttacttcgcttcatcgccggaggaaatcgcaaagagaaattacgccaacgatctgtcggaatacaacaccgctgtcaactccgtcacagctcagcgcaggcactatttgctgagggatgtttatgatgatatgaagcttgatggtgtgcagcctacagctgatatcttccattcatttgtcgtgggaacgatgaagggtgctcggttaagcgatgcgttctttttccgggaagaaatgaaagccatggggattgctccagatgtgaacttgtacaactttttaatttccac

SEQ ID NO: 121122 - DNA, 477 bp, Arabidopsis thaliana
  unsure (1)..(477): unsure at all n locations
cgcggacggacgcgtnccgcacgnaagaagcagcatgcagcacgcacactttctcaagaaatctctctctgtctttgtcatcaccactgctatcgtctactaggagggaagagatcatcattctacagtttcaagaagataccatttccaagacttgaaactgtggaagaagcaaaaatggggactttgagtaaggtgctatgtctcatgctgctttgctgtatcgtggctgctgctgagggtactttgaagtacaaggacccaaagcagcctttgggtgcaagaatcagagatttgatgaaccgtatgactctacaagagaagattggtcagatggttcagatcgaacgcagcgtcgctacacctgaagtcatgaagaaatacttcattgggagtgttttgagtggtggaggaagtgtgccctcggaaaaagctactcctgaaactggggtgaacatggtcaatgagattcaaaag

SEQ ID NO: 121123 - DNA, 380 bp, Arabidopsis thaliana
ccaacgcgtccgctcaagatctctctctgtctttgtcatcaccactctatcgtctactagagggaagagatcatcattcgacagtttcaagaagataccatttccaagactatccccctatctgcacttgtagtgaaactgtggaagaagcaaaaatggggactttgagtaaggtgctatgtctcatgctgctttgctgtatcgtggctgctgctgagggtactttgaagtacaaggacccaaagcagcctttgggtgcaagagtcagagatttgatgaaccgtatgactctacaagagaagattggtcagatggttcagatcgaacgcagcgtcgctacacctgaagtcatgaagaaatacttcattgggagtgttttg

SEQ ID NO: 121124 - DNA, 602 bp, Arabidopsis thaliana
gcaccccccccgaggtcgactgtatcgataagcttgatatcgaattcgcggccgtacgatcaaagacaaaaaccaaacctctttcactattacacttttcctcaaaaaaaagaaaaatgtatttgttagtgtttaaactctttctatttttgtctcttcttcaaatctctgtctctgctagaaacctagcttcacaagaaccaaaccagtttcaactactcaagtaccacaaaggagctcttctctccggcaaaatctccgttaacctaatctggtacggcaaattcaaaccatctcaaagagcaatcatctccgacttcattacctcactcacacacacttctcctacgtccaaaactctccaccaaccatctgttgccacgtggtggaaaaccacagaaaaatactacaaactcgcaacacccagcaaaaactcatcacctctgtctctaactctcgggaaacaaatcatcgacgagtcttgctctctaggaaaatctttaaccgattaaaaagattcaaacccctaacctttcgaaaagggaagacccaaaccgccaaaccgcccaattcaaaccggttccggttttttggaacctttc

SEQ ID NO: 121125 - DNA, 726 bp, Arabidopsis thaliana
  unsure (1)..(726): unsure at all n locations
nnnnnnnnnggtgtcactactacaagaatctatgacgaagctgtgcacgcgtgcgtgagctgggatcctatagaggggtcgacccacgcgtccgcccacgctgttcgatcaaagacaaaaaccaaacctctttcactattacacttttcctcaaaaaaaagaaaaatgtatttgttagtgtttaaactctttctatttttgtctcttcttcaaatctctgtctctgctagaaacctagcttcacaagaaccaaaccagtttcaactactcaagtaccacaaaggagctcttctctccggcaaaatctccgttaacctaatctggtacggcaaattcaaaccatctcaaagagcaatcatctccgacttcattacctcactcacacacacttctcctacgtccaaaactctccaccaaccatctgttgccacgtggtggaaaaccacagaaaaatactacaaactcgcaacacccagcaaaaactcatcacctctgtctctaactctcgggggacaaatcatcggcgggtcttgctctctaggaaaatctttaaccggtaaaaagattcaaaccctagcttcgaaaggggacccaacgcaacgccatccaacgtcggtttgacttcagctgacgttacgggtacaggatttggtatgagtcggtgcgggactagggcacgttggggtttggaannggggncaggttgttnatttgggtggnctttgg

SEQ ID NO: 121126 - DNA, 599 bp, Arabidopsis thaliana
  unsure (1)..(599): unsure at all n locations
atcctttcttcttatttctgagcaaagttttttcttcctttcatattgtgaggatgtccaaaaccaatatgaaattttgcaatagttattttctggtcgatccgaccaaagcaagttttcttgatctccttttgcttttgttttcctccaacctgaccagtgcaagattcatcgattctcctccggatacgcttaaaggcttccggagaagtttcgcgagtcgatggatccttgcgttggccatcttccttcaaaaagtattaatgctcttaagtaaaccttttgcattcattggtcaaaagctcacatattggctcaaccttcttacggcaaatggaggcttcttcaacttgatacttaaccttatgtcaggaaagcttggtcaagcctgacaaattctttgggcgacggaatactttctttttatagggtgctcaggtccggcggatttggagctttgccggggaaggtaaaatggttgggtacgnatcggatncaaattcgattttgtcaaaaaatgggtnctaagngcctnttattggggggancccttnnataactntccgtggnaaaaacantttgnnggtggccttggtggg

SEQ ID NO: 121127 - DNA, 596 bp, Arabidopsis thaliana
  unsure (1)..(596): unsure at all n locations
ctctaccacgactcactatagggaaagctgctacgcctgcaggtaccggtccggaattcccgggtcgacccacgcgtgcgcacaaacacacacacacacagcctttttccttcgttgatcgattgttaagctcgatccaatggcggataacaccgataatcggagatccttatggggagttccggagaagcttcagcttcacatagcgatgctgacgttgcaattcggttacgccggattccacgtggtgtctcgagctgctcttaacatgggaatcagcaaactcgtcttccctgtttatcgtaacatcatcgccttgcttcttctccttcccttcgcttacttccttgaaaagaaggagagaccagcgattactctcaactttctcatccagttcttctttttggcactcataggaataacagcgaaccaaggattttacttgttgggactggacaaacacttcaccaacatttgtttcctccatgcaaaactatgttccggcattaccttttttatggntgctnttttagggtnngnaagnagggtaaccagnggggcggttttccaaaatnttnggccagttttgtntgcnc

SEQ ID NO: 121128 - DNA, 400 bp, Arabidopsis thaliana
cccacgcgtccgtccagttcttctttttggcactcataggaataacagcgaaccaaggattttacttgttgggactggacaacacttcaccaacatttgcttcctccatgcaaaactctgttcccgccattacctttctcatggctgctcttctcaggattgagaaagtaagaataaacagaagagacggtatctccaaaatcttaggaacagctctttgtgtcgccggagcttccgtcatcaccctctataaaggtccaaccatctacactccggctagccacctccacgctcatctactcaccacaaactccgccgtcttagcgccgctaggaaacgccgcgcctaaaaactggacccttggttgcatctacctaatcggtcactgtctctcgtggtc

SEQ ID NO: 121129 - DNA, 588 bp, Arabidopsis thaliana
  unsure (1)..(588): unsure at all n locations
atgatactgccnnnnnnnnnnnnnnnnnnnnnnnnnnnnnnnnnnnnnnnnnnnnnnnnnnnnnnnnnnnnnnnnnnnnnnnccacgcgtccgctcaccatatccacaatcctcaagctatctcctttgtgtccataatcgaaacgctttttgcgatttatcctaatcttttttctatcttctgctacaaatttggttcttttttggttgaatttggataaaatcataatctcctcttcaattttcttgtgaaatggaagtttcagtgattggaaatcctcaagcgaggatctgcagagcagaattagcttacagagagcttggatttagatttggctctgatgtaatctccggtgaatcgagaaatagggttagtttctgcaaccaaagctctaaatggaaagagatcgcgatacgttgctcttcgagatctgtcaaatgtgaagccatcgtctccgatgacgcttctccgtttctcaaatccactccaaaatctaaatcgctcgagagtgtaaaattatttgttgggcttccgttagacacagtttcagactgcaacaatgtgaatcacttgaaagctattacagc

SEQ ID NO: 121130 - DNA, 513 bp, Arabidopsis thaliana
ttttaggtgacactatagaagagtcttgacgtcgcatgcacgcgtacgtaagctcggaattcggctcgagggaattttctctgaaacgtcacgaacgtgtgaattgggttaaaaaattcatctcattgatccaaacttgaaaccctaatttcgaatctctttgctgatttggtgagatctcaatttcggaaagaagatgacgaaggatttcgcagttccacctgtagttttcccctccggtggatcttcaggcggtgctaatgtccagcaacgaagattcccagcgacaccgtttcaaccgccgcgtccctcttcttccgcaatccctttcatgtcattcgacattggatccgcagccgcgtcttccgctacacctgccggaccattcggcgggacaatcgcttcctcttcttcttttggtggaggttcagcttcgtttgaagatgaagagccattacttgacgagctcggtattcatccagatcaaatctggaagaagactagatcgattct

SEQ ID NO: 121131 - DNA, 518 bp, Arabidopsis thaliana
  unsure (1)..(518): unsure at all n locations
atgatatgccnnnnnnnnnnnnnnnnnnnnnnnnnnnnnnnnnnnnnnnnnnnnnnnnnnnnnnnnnnnnnnnnnnnnnnccacgcgtccgcccacgcgtccgcggacgcgtgggcccacgcgtccgaaaaaaagaaaggaattttctctgaaacgtcacgaacgtgtgaattgggttaaaaaattcatctcattgatccaaacttgaaaccctaatttcgaatctctttgctgatttggtgagatctcaatttcggaaagaagatgacgaaggatttcgcagttccacctgtagttttcccctccggtggatcttcaggcggtgctaatgtccagcaacgaagattcccagcgacaccgtttcaaccgccgcgtccctcttcttccgcaatccctttcatgtcattcgacattggatccgcagccgcgtcttccgctacacctgccggaccattcggcgggacaatcgctttctcttcttcttttggtggagggtcaccttcgtttgaagatgaggg

SEQ ID NO: 121132 - DNA, 477 bp, Arabidopsis thaliana
  unsure (1)..(477): unsure at all n locations
cagctannnnnnnnnnnnnnnnnnnnnnnnnnnnnnnnnnnnnnnnnnnnnnnnnnnnnnnnnnnnnnnnnnnccacgcgtccgaaaccttctttagcttcttccgtagctgacgtctctctctatctgtctcttaggtgcctctttcttttcttcaacgatttctctccccctcttgctttagctgatcgatttcgaaaaattgagcttgccaagtcaagcaaccagattttgttgggtgtatttactataggatccaaatacaatggatgaaaaccataggaatccatttgcaaatgcaagtacaagtgctagagcaagcggcagtacaagtgcgagctcaaactcgagttttagtagcagtgtggcggatacagatgatgatcacacccttgcccgtatattacctgaagatgagagcttgagaagagaaggcacgctggggaaagattatctcatttggattctatcccccac

SEQ ID NO: 121133 - DNA, 674 bp, Arabidopsis thaliana
  unsure (1)..(674): unsure at all n locations
nnnnnnnnnnnnnnnnnnnnnnnnnnnnnnnnnnnnnnnnnnnnnnnnnnnnnnnnnnnnnnnnnnnnnnnnnnnnnnncggaccacgcgtccgaaacactattagatcatcacttctcagatttcgatattcccaataaataataaatactctcagttcttctcttctccaagaacaaaaaaaaaaaaatgaattcagaatcgctagaaaatcttcaccgtccattaatcgaatcatcgaagtcgttcgtcgattatcgtctcgagactgtgttaacagatcgagagttaccgtattttcgccggatttatctagcgatgatgattgagatgaagtttctctttcatctggcggctccggcgatctttgtttacgtcatcaacaacggcatgtcaattcttacacgtatcttcgctggacacgtaggaagcttcgaactcgccgccgcttcacttggaaacagtggtttcaacatgttcacctatggacttctgcttggaatgggaagtgcagtggaaacattatgtggtcaagcacatggagctcatagatacgaaatgcttggagtttaactccaaagatcaacagttgttctaatcctaacatgtctaccaatgtcatttctcttcctcttctcaaatccgatcctcacagcacttggagagccagagca

SEQ ID NO: 121134 - DNA, 430 bp, Arabidopsis thaliana
cccacgcgtccgcccacgcgtccgccataaccgaaaccgagagaaaatatagaaaaagatgattgagacggttaaacacctgatcggctccggtggtcccagcggattcgggtcaagatccaccgccgatcatgtcacttgtaattctgatctccgttctctaactgccatcatcactggcgcgacgtcggggataggagctgagacggcgcgtgttcttgctaagcgtggcgcaagacttgtgcttccggctagaagcgtcaaaaccgccgaggaaacaaaggctcgtatactgtcggagtttcctgatgcggagatcatcgttatgcatcttgatctcagctcacttacctctgttcgtcgattcgtggacgatttcgaatctctcaatcctccactcaacatcctcataaacaatgctgggaaatat

SEQ ID NO: 121135 - DNA, 623 bp, Arabidopsis thaliana
  unsure (1)..(623): unsure at all n locations
nnnnnnnnnnnnnnnnnnnnnnnnnnnnnnnnnnnnnnnnnnnnnnnnnnnnnnnnnnnnnnnnnnnnnnnccgggcgtgcgcccacgcgtgcgcccacgcgtccgcacatttccatttttctctcttccataaaacccaaaagaaactaggaagaggagtaaataatatttgttttaaagaaatgattctccacaaaatggcgttcttggccgttattctcttcttcttgataagcagcagcagcgtttgcgttcatagccgtgaaacgtttgcttgcgatacaaaggacgcagcaacagctacactgagattctgccagctttcagttcctataccggagagagtcagagatttgatcggacggttgacattggccgagaaagtgagcttgttagggaacactgcggcggcgataccacgtctaggaatcaaagggtacgagtggtggtcggaggctttacacggcgtttcaaatgtgggacccggtactaagttcggtggggtttaccctgcagccaccagtttccctcaagtcatcaccccggtgcttttttaatggccccttggggagaacctcggcgggttggtcaaagagggccgggcctgtccaacggggagttg

SEQ ID NO: 121136 - DNA, 2038 bp, Arabidopsis thaliana
  unsure (1)..(2038): unsure at all n locations
agctctctacgactcactattgggaaagctggcacgcctgcaggtaccggtccggaattcccgggtcgacccacgcgtgcgcgtctttctcccgtcaccgtcgaataaagcctgagatctccgaattctgatcagcaactatgcattcaagtcatctccttctcgaggaaccgatcaggatgacttcaatcctcgaaccttctaaatcaagtttcttcccggctttgactaagattgttgggactctaggtccgaaatctcgatccgtcgaggtgattgctggttgtctcaaagctggaatgtccgtggctcgattcgatttctcttggtgcgatgctgattatcaccaggagacgctggagaatctgaagatagctgtgaagagcactaagaagctttgtgctgttatgctagacactgtaggacctgagttgcaagttattaacaagactgagaaagctatttctcttaaagctgatggccttgtaactttgactccgagtcaagatcaagaagcctcctctgaagtccttcccattaattttgatgggttagcgaaggcggttaagaaaggagacactatctttgttggacaatacctcttcactggtagtgaaacaacttcagtttggcttgaggttgaagaagttaaaggagatgatgtcatttgtatttcaaggaatgctgctactctgggtggtccgttattcacattgcacgtctctcaagttcacattgatatgccaaccctaactgagaaggataaggaggttataagtacatggggagttcagaataagatcgactttctctcattatcttattgtcgtcatgctgaggatgttcgccaggcccgtgagttgcttaacaagttgtggcgacctctctcaaacacaaatatttgcgaagattgagaatgaagagggactaacccactttgacgaaattctacaagaagcagatggcattattctttctcgtgggaatttgggtatcgatctacccccggaaaaggtgtttttgttccaaaaggctgctctttacaagtgtaacatggctggaaagcctgccgttcttactcgtgttgtagacagtatgacagacaatctgcggccaactcgtgcagaggcaactgatgttgctaatgctgttttagatggaagtgatgcaattctccttggtgctgagactcttcgtggattgtaccctgttgaaaccatatcaactgttggtaggatctgttgtgaggcagagaaagttttcaaccaagatttgttctttaagaagtctgtcaagtatgttggagaaccaatgactcacttggaatctattgcttcttctgctgtacgggcagcaatcaaggttaaggcatccgtaattatatgcttcacctcgtctggcagagcagcaaggttgattgccaaataccgtccaactatgcccgttctctctgttgtcattccccgacttacgacaaatcagctgaagtggagctttagcggagcctttgaggcaaggcagtcacttattgtcagaggtcttttccccatgcttgctgatcctcgtcaccctgcggaatcaacaagtgcaacaaatgagtcggttcttaaagtggctctagaccatgggaagcaagccggagtgatcaagtcacatgacagagttgtggtctgtcagaaagtgggagatgcgtccgtggtcaaaatcatcgagctagaggattagaagaagcagagtgagtcgttgtctcggtcttttttgttctgttactaatcaattttatttccttcactaaaactcttggtgccgtccaagaaaaatccttgcaatcattgtttctcgccggctatatgctagataccggagtgaaaatatatctcctgggcttttgttttcgtatttaggagattgatgtttccaagttatgatataaaccactttccactttaaaaaaaaaaacaaaaaacaggccgctctagaggatccaagcttacgtacgcgtggatgcgacgtnnnnnnnnnnnnnnnnnnnnnnnnn

SEQ ID NO: 121137 - DNA, 402 bp, Arabidopsis thaliana
agcgtatcaaatacccaatcacgcgatcttttctccgcctcttctccactccaaaattcttctccgtctttctcccgtcaccgtcgaataaagcctgagatctccgaattctgatcagcaactatgcattcaagtcatctccttctcgaggaaccgatcaggatgacttcaatcctcgaaccttctaaatcaagtttcttcccggctttgactaagattgttgggactctaggtccgaaatctcgatccgtcgaggtgattgctggttgtctcaaagctggaatgtccgtggctcgattcgatttctcttggtgcgatgctgattatcaccaggagacgctggagaatctgaagatagctgtgaagagcactaagaagctttgtgctgttatgctagacact

SEQ ID NO: 121138 - DNA, 1079 bp, Arabidopsis thaliana
  unsure (1)..(1079): unsure at all n locations
nnnnnnnnnnnnnnnnnnnnnnnnnnnnnnnnnnnnnnnnnnnnnnnnnnnnnnnnnnnnnnnnccacgcgtccgcccacgcgtccgtcatcactcaccaaacaactctcatcaatataaagagaagagagtggtagagttatatattacacacataaacttagatatagtagtgttatattcttgattaagtaataaagatgaaaggtggaagcatggagaaaattaagccgatattggcgataatttcactgcaatttgggtatgcaggcatgtacatcatcaccatggtctcgttcaaacatggcatggaccattgggttcttgctacataccgtcatgtcgtagccacggttgtcatggctccctttgctctcatgttcgagaggaaaattaggcccaagatgacactagcaatattctggaggcttcttgctcttggaatattagagcccctcatggaccagaatttgtactacataggattgaaaaacacatcagcatcgtacacttctgcctttaccaatgcacttcccgccgtcaccttcattctcgccctcattttcaggcttgagacggtgaactttagaaaggtccacagtgttgcaaaagtggtaggaacggtaataacggttggaggagcaatgatcatgactttgtacaaaggtccggccattgagattgtgaaggccgcacataattctttccacggtggttcgagcagcacacccaccggccaacattgggtccttggaaccatagccattatgggcagtatctctacatgggctgctttcttcattttacagtcatacacattaaaagtctatccagctgagctatcactagtaacgttgatatgtgggatagggacgatcctaaacgctattgcttcgctaataatggttcgtgacccgagtgcatggaaaatcggcatggattcagggacactcgccgcggtttactctggagtggtttgttcgggaatagcttattacatacaaagcattgtgattaagcaacgtggaccggtttttacgacgtcgtttagtcctatgtgtatgatcatcactgccttc

SEQ ID NO: 121139 - DNA, 566 bp, Arabidopsis thaliana
  unsure (1)..(566): unsure at all n locations
nnnnnnnnnnnnnnnnnnnnnnnnnnnnnnnnnnnnnnnnnnnnnnnnnnnnnnnnnnnnnnnnnnnnnnnnnnnnnnnnnnnccacgcgtccggagaaagtaaatgggaaacgacgactgagactcttcttctccttctccttcttcttctacttatttcatcgtttcatttcttaggtttctgatttcatcacaacctctggatttgatttttgattcggaggtatataaaaaaatgtttagtggggtttgcgattcgatgaactagggtttgtaatttcactatcttcttcttctcttcgatcgtttactcatcgggtgagaaggaagcgtctttcatgtgttcttccgtgtaatcgactgttttattgggcttagtagctctagtttggtcaaagaattcgtaacaagtgaatcttagattgggaagatgctagaaggagcaaagttcaacgtgcttgctgttgggaatcatcacaacaacgacaacaattactatgcttttacgcaagagttttatcaaaaacttaatgaaggttcaaacatgtccatggagagtatgcag

SEQ ID NO: 121140 - DNA, 400 bp, Arabidopsis thaliana
gctttctgcttcttccttcttcgtcctttgttttaattctctcatatcacttacgaaaagaagaaagaaaaaaaacaccaaaactaaagagaaatttcgttatcactctcttgccaaaactcacatacatataatcatatatcatcgcaaaatgtcttgcctagagatttataacaaagacacgatgaagaagaaagaaggagaagaagaaacaagagatgggacagtggattactatggtcgtccctctattcgttctaactcaggccaatgggttgctggcatcgtcattcttctgaaccaggggctggctacactagccttctttggagttggagtgaacttggtgctcttcctaactcgcgttttgcagcagaacaacgcagacgcagctaacaac

SEQ ID NO: 121141 - DNA, 451 bp, Arabidopsis thaliana
cgcaggtttttgtctgctcaccaaatcaaaccaatttctcctgatagccaaagtttttgtccccaacaagaaactcatgcaacattcttcacccactagctaactaacgacttccattcttattaatctctctcaattcttcatttctgagattcatcgctctctcttctctttgtcacaatgaatttcaattcttcttacaatctcactttcaatgacgttttcttctcttcttcttcctccggtgaccctatggtttcacggaggctgtttctcttgagagatgttcagattcttgagctccttattgccattttcgtctttgtcgcaatacatgccttgcgtcagaagaaataccaaggtcttcccgtgtggccgtttcttgggatgcttccttctctagcttttggcctcagaggaaacatatacgagtggctatccgatgttctct

SEQ ID NO: 121142 - DNA, 586 bp, Arabidopsis thaliana
gtcatctctaacaggtcggacgagagatagagagagagagagaggaagaggaaggatagatttaccgcatcggcgttccaaaaggcagacgaactcggagagacagatagcgatagcgagacatggtttctcattgatttttgtttgacaatcctttcttttcttttttttttgtcctttcgaaaaacgaaaattttcgttggttccctccgatttggcctgctggtgaagatatggccggagctaaagattcgggttgcgatgatgatctccgaattgctggtggatgtgaccctggaaaacgcgggaacccggaggattcctcgtctcctgtcgaagtctcgtgctcgatttgcctcgaatcggtgctcgatgatggtaccagatccaaggctaagctccaatgtggtcaccagttccatttggattgcattggatcagcatttaacatgaaaggagccatgcaatgccctaactgtcgcaatgtcgaaaagggtcagtggttgtatgcaaacggttctactcgcccctttccagagttttccatgggaggttggatccctgaagaagctttacggttaaggtt

SEQ ID NO: 121143 - DNA, 841 bp, Arabidopsis thaliana
atcctatggatgttgaatataagaagaatacaagtgtttccatctgctcttctgctaaaagcagccaagaatgcgcattgctccagaccatggaagtccagagggttgctgaaagtaccgaattcaagctgagtggagagaggagagatgatgtggcagcatcaatggctctgcggatcgcgggctcatctggtcaagcgagaaaagttgattttgacttcaatctgaagacagacacagcaagagcagttacaggggagatggttgaagagcttgatctgtcaagccatgaggttactgtgatagctgagatgatagatgaactgataatgaagctgaaggctaatcgaagcctgcctaatgcaaacagtgtatatcagtccaaggatgaagaagctggagaatcaatgaagtcagagatatcagcggactactaccatcgggtctcctcaaacgaggggtcacggctcggctgctgctgcgaggcagtagagtcattgttgtcctccgttcctggattcatgctcaatggtgtcaaacaagcagtcggaggatctgaagacggagctgaatgtgatagagtcacaatataaccaatcgtgtcaacgactgcttagaatgaaagaggaagctatagagaaggcgaaacggaagtggatgaagctgagttgatgattccttcatttcatttaacgtagccacagttttgggatttactcaactttttgttttgtttctttgccttttatttcatttctcgtagcttttggttacatgtaaaaatatgcattgcatcaggaatcacagattgaaagaatgaaatgtatttgacgctaattca

SEQ ID NO: 121144 - DNA, 499 bp, Arabidopsis thaliana
  unsure (1)..(499): unsure at all n locations
atgannnnnnnnnnnnnnnnnnnnnnnnnnnnnnnnnnnnnnnnnnnnnnnnnnnnnnnnnnnnnnnnnnnnnnnnnnnnnccacgcgtccgaacacatctcatttctccgctgtttcgtcggcaaattttcccatttttgattccgaagataatagatattatcaacagaggataaggataaaacccagaacaatcattataatttagtggtgaagttgaccaaatttataaactgatccaattttaaaatctaagagatatggagaacatggacgatttctcaccggagaatgttttagcaccaccaccaccacctcctccaatgaagaagtcaacgcatctgtttatgcaaagaagcaatagctttgtttctaaagctacgagagattcatgggatcgtatgttcgacgaagctcatggagctgatgttttgattcatactgatgattatggggttgatttacccacattctaatggcatcggaatggcttcagat

SEQ ID NO: 121145 - DNA, 567 bp, Arabidopsis thaliana
agttggcgactcacgcgctggtgactccgattccaaagttgactgctttcgtactctctctatctactactccatcaagattgtctggttctgttccgggtttgattgatttctaccgtcgccggagattttgtcgtgtaatcacctccatggctgaagcgggatcggtttacgtcgatgtagctggggaatcgaagtcggagcatgttactgggaagtggttttcggtgccggagctccgactgcgtgaccaccggttcatagttcctcttgattattccaaaagttctcccaaaattaccgtctttgctcgagagatcgttgcggttgggaaagaggagcaagcaatgccgtatttattgtatttgcaaggtggtccaggatttgaaggtccaaggcctagtgaagctagtggatggattcaaagagcttgtgaagagtttcgagtggtcttactcgatcaacgaggaacaggcttgtccactcctttaacatgttcctctatgcttcaattcaaatcagcaaaggaattagctgattatttggttcactttcgagctgataata

SEQ ID NO: 121146 - DNA, 528 bp, Arabidopsis thaliana
  unsure (1)..(528): unsure at all n locations
nnnnnnnnnnnnnnnnnnnnnnnnnnnnnnnnnnnnnnnnnnnnnnnnnnnnnnnnnnnnnnnnnnnnnnnnnnnnnnnnnnnccacgcgtccgcgagttttactcctcttaacactcctcgaaacaaaaagaagatgttcttcttcttcttcttctttcttctcctctcttcttagttcatctttcttctctttacttcacaatctcttacttttaaaattaatcttactcgccggaacttttctctctcacaaccgcttcaaacaaaatttctaagtttatccgaatatgaataaactagttgtagaaatcgttgacgctagcgatttgatgccaaaagacggacaaggctcagcgagtcctttcgtagaagttgaattcgacgaacagcgtcagagaacgcaaacgcggtttaaagatctaaaccctcagtggaacgagaagttggtttttaccgtcggtgacttgaagcgtttgaataacaagactgtcgacgtcactgtttacgatgaccgncgtgataatca

SEQ ID NO: 121147 - DNA, 582 bp, Arabidopsis thaliana
ccggcactatccgactcatttagggaaagccggtacgcctgcaggtaccggtccggaattcccgggtcgacccacgcgtccggtcgtcatcttcaatttggacttccaacgccgacaccgtttaactccgatggttcccccgccgtctaatccgcagcaggttcagcagttcctctcctctgccctctcccagcgcggcccatcttcagtcccctacgaagagtccaacaagtggttgatccggcaacatctacttaacctaatctcttcttacccttccttagagcccaaaacggcatcgtttatgcacaacgatggtcgctccgtcaacctccttcaagcagatggtacgattccgatgccttttcatggagtcacctataacatacctgtgattatctggctcctcgagtcatatcctcgtcatcctccttgcgtctatgtgaatcccaccgctgatatgatcatcaagcgacctcacgcacatgtcactccttctggtctcgtttctcttccgtaccttcagaattgggtctaccctagctccagtctcgtagatctcgtctccgatctcagcgctgc

SEQ ID NO: 121148 - DNA, 402 bp, Arabidopsis thaliana
cgtcatctgatttcatactgtggaatttaacagctgggacaaaggttacacaaatctcatgtggtggctggcgccgaccccattccttttatctcggggaaatccctgagtggcaaaactgttttgcatatgtgaaggatgatgtcattcatattcatagacactgggttggaggacagaagaccaaagtctttcctctaaatttgcatacacagtttcatggcagagaattgcattccttatgcttcatctctacagatacaaaagcgggattcgattctgaagaaagtaaaatatctgatcggtctagttggattgcaacagggtgtgaagatggatctgtgagattgagtaggtatgcatttgagtttggaaattggtcaacatcagagcttttaggag

SEQ ID NO: 121149 - DNA, 724 bp, Arabidopsis thaliana
cccacgcgtccggcttgacatcaagaaccaacagtttcaagagagacgatactaataggcaccagaattctcctaagagtactatggagcggtcgttgagtttcaacagctgggaggttcctaaagagaccaagactgattcagattttgaggtcttggagacaaagaagtcaacgcctaacactttgaatggaagaaactgtgagagaatccaaatcaagaaacctacagttactccaccagagccatttgtgttcttctctcctagacctgtcaccgagcttgatgcagctgcaactacgttacaaaaggtgtacaagagttacaggaccagaaggaacttagcagattgtgcggtcgttgttgaggagctctggtggaggactttggaaggtgcagctttggatttgagctctgtgtctttctttggagaagaaaaacatgagaccgctgtttcgaaatgggcacgagctagaaaacgagctgctaaggttgggaaaggcttatctaaagatgaaaaggctcagaaattagctcttcagcattggcttgaagctattgacccacgtcatcgttacggccacaacttgcacttctattatgatgtctggtcagcgagcaagagcacacaaccattcttttactggttggatataggagacggcaaagatgtaaatcttgagaaacaccttagaagtgttctgcaaaaacaatgcatcagata

SEQ ID NO: 121150 - DNA, 485 bp, Arabidopsis thaliana
  unsure (1)..(485): unsure at all n locations
nnnnnnnnnnnnnnnnnnnnnnnnnnnnnnnnnnnnnnnnnnnnnnnnnnnnnnnnnnnnnnnnnnnnnnnnnnnnnnnnnccacgcgtccgcccacgcgtccgggaactgtgagagaatccaaataacgaagcctactattactccacctacgccttttgtgttcttctctccaagaccggtcaccgagcttgatgcagctgcaactacgttacagaaggtgtacaagagttacagaacaagaaggaacttagcggattgcgcggttgttgttgaggagctctggtggaagactctggatgctgcagctttaaatttgagctcagtcgccttctttgaagaagagaaacatgaaaccgcggtttcgaagtgggcacgagctaggacacgagctgctaagggttggaaaaggattgtcaaaagatgaaaaagctcaaaagttagctcttcagcattggcttgaagctattgacccacgccatcgt

SEQ ID NO: 121151 - DNA, 900 bp, Arabidopsis thaliana
agaatcatcttccctcctccttcttctctctctctcgtttctcaactaccgtctctctgcttcttctgttcccaaaaccggaaactttacttcgtggaattttcccttgtttctgaaatggaagacacaacatttaccaaagtgttcgttggaggattagcttgggaaacacacaaagtctctctcaggaattactttgaacagtttggtgacattgttgaagctgtcgttatcactgataaatctagtggtagatctaaaggctatggctttgttactttttgtgatccggaagcagctcagaaagcttgtgtagatccagctcctgttattgatggaagaagagctaattgtaatcttgctgcttttggtgttcagagatccaaaccttcttctcctattcatggacatgtaggaggaagaggcatgaaggtgactagccctttcaagacacactttgggaccgcggctactgctattccttccccacttccattctcccactacacacttccttacactaatccttttgggttctcttcatactcaatggattacaattaccccacgcagagctattacaatgtttatggaggggcaactgctcagcatccaatgtatggaagcggaccaatgactggtgtagcagcagcaccagcagcagggttctacccatatctccagtttgctgaaggaaatggacctgtcactggttatgctcccctccactaccccaaccacatgtttcactattctgctcccgggggaaactacccgcatcacaatggttcaccagtgtctcttgcaccttcaccagtcataccatcagtttgctttgcagttccacaggctagaccatgaaagctcgaggttcataggtccatgatgctatgtagggga

SEQ ID NO: 121152 - DNA, 1064 bp, Arabidopsis thaliana
  unsure (1)..(1064): unsure at all n locations
cccgtccgacttattcttcttcttctttctctttctaatatcttttttctcttcccaattttctcatcgatcactgaatcttcttcttcttcttcttccttctctcaagaacagattttttttaaacgagcttgatcaataaattctctcaagatctatggcggaagagcatcgatgtcagacaccagaaagcaaccgtctctgtgttaacaactgtggcttcctcggcagctccgccaccatgaatctctgttctaattgttacggcgatctttgtctcaaacaacaacaacaatcctcctccatcaaatccaccgttgaatcttccctctctgtatctcctccgtcgtcatcatcatcggagatctcttctccgatcatccctcctctccttaaaaatccatcagtcaagctagaggtaccggagaaaaaggcggtgatttcgctgccgacgacggagcagaatcagcaacagaggccgaatcggtgcacgacgtgtaggaaacgggtcgggttaaccggattcaagtgccggtgcggtacgatgttttgcggggttcataggtacccggagatccatggatgcagctacgatttcaaatcggccggacgtgaagagatcgcgaaagcgaatccgttggtgaaagcagcgaagcttcagaagatatgatcagagccgttcgatgcgttgacttttcctctcgtaagtcttcatttctacgcgtatgtgtgtcctccgtcccccgagaaatacggatggtgtcgatttgattgatctcagccgttggatcaaaaatggtttattattgtaaaagattgattatgtatttatcaaagggacacgtgtcacgtggttttaggatggagacgctttcgctttttctccttcattttattttctttttcctttcagaaagaaataagattattcgcgttggctttttctttttattaaattccggcttattattnnnnnnnnnnnnnnnnnnnnnnnnnnnnnnnnnnnnnnnnnnnnnnnnnnnnnnnnnnnnnnnnnnnnnnnnnnnnnnnnnnnnnnnnnnnnn

SEQ ID NO: 121153 - DNA, 569 bp, Arabidopsis thaliana
  unsure (1)..(569): unsure at all n locations
cttcttcttccttctctcaagaacagattttttttaaacgagcttgatcaataaattctctcaagatctatggcggaagagcatcgatgtcagacaccagaaagcaaccgtctctgtgttaacaactgtggcttcctcggcagctccgccaccatgaatctctgttctaattgttacggcgatctttgtctcaaacaacaacaacaatcctcctccatcaaatccaccgttgaatcttccctctctgtatctcctccgtcgtcatcatcatcggagatctcttctccgatcatccctcctctccttaaaaatccatcaagtcaagcttagaggtaccggaggaaaaggcggtgattttcgctgccgacggcgggagcaggatcagcaacagaggccgaatcgggtgcacgncgggttaggggaacgggtcggggtaaccggcttnagggcccggtggggtacgntggttttccgggggtaataggtcccgggggtccttggttaaggtcgggtttaaattgcccgccgtaggggtcggaaagatcccttgtgaagagcancttaaagna

SEQ ID NO: 121154 - DNA, 474 bp, Arabidopsis thaliana
agtcttctgggtttttcctattcctctttctctctctctccttcaagttgctgcaatcccttgaaaacccaataaacccccaattttccatttctcataaagttcacatttttccttcttcttcttctgccaattctctgattccctcgtttcaatctccgttttgctttgcctatcagataaatttcttcttgctttcctttctatctcataacgataagttgaattaatctttgcgtcttagttcatcagtagagagagtagggttttttccgcttatttttagggaatttcattttgttggaggtgagaatctctattcgagtccccaagattctctttatatccctagtttagttgtatggttgggttttgattggaatatcaaggggtagtttttagctaggttcactgatacttggaagatctgagttctttgggattctgttaagtttgtggagatctaaaagacac

SEQ ID NO: 121155 - DNA, 502 bp, Arabidopsis thaliana
gcgtccgatttcatctctttctctctctgcgtccttctgaggctggaagcgatgaccatgacagcatttctcgcgagacggcttatcggtaacggatcgagccagattctcgggacttcgagttctagctccggtccgttcatttccgtttctagggctttcttctcctcctccactccgatcaaagctactctctttcccggtgatgggatcggtcccgaaatcgctgaatctgtcaagcaggtgtttactgccgctgatgtggttattgattgggacgaacagtttgttggtactgaagtagatcctagaaccaatagtttcttgacatgggataatcttcaatctgtgcttaaaaacaaggttggtttgaaaggaccaatggctactccaattggaaagggtcaccgttccttgaaccttactcttaggaaagagctgaatttgtatgccaatgttaggccttgttacagtcttcctggttacaaaacccgttatgatt

SEQ ID NO: 121156 - DNA, 625 bp, Arabidopsis thaliana
  unsure (1)..(625): unsure at all n locations
atccccccttggttttgtcattccttatnatcaatttcgggccctnccttttctttattgcttgttcatcatcacagcaggaggaggctgttgtaaagaagaagtatggagggctcatgccaaagaaaccacctctcatttccaaggatcatgagcgagcatactttgactcagctgattgggctcttggaaagcaaggtgttgcgaagccaaagggacccctggaagcccttcgtcccaagttacagccaacgcagcagcagacacgttacaggaagtctccatgtgctccatctgagggtggtgaagatggaggagctgctcaggccgagggaggttcaggcaactgaggcgtagagagacagagagatgtatgaaaactcttgtgtaagaagtctgttataatcggatattttctgtccatttgaaacatcagatatggctttcaattaaaatcttaacttgatcgagaaattatagtttaccctttggtcccggaaaaaaacaaaaacacaanaaagggggggggcccggtaccccnattccncccctaatagtgaattcccttattnacaattcnccttggcccgtcccntttttacaaccttcccttgaacttgggaaa

SEQ ID NO: 121157 - DNA, 589 bp, Arabidopsis thaliana
  unsure (1)..(589): unsure at all n locations
cnacagcattggaaacgtcccaacgagctcagagagccacaccaatcctcctttttcttcttcttcttcctcctgcatttttggttttggtggcgttgagacatcatcatgtctagcgcagaggatgtgaaagagcaaggaaacctcaccaacgaggcagagaagtcaatgccatcatcacagcaggaggtttccttttaattctcacactagatgttgatcaaataccgtaatgaatacaatatcgtgacctaactctttctttaattgcattgtgtaggaggctgttgtaaagaagaagtatggagggctcatgccaaagaaaccacctctcatttccaaggatcatgagcgagcatactttgactcagctgattgggctcttggaaagcaaggtgttgcgaagccaaagggacccctggaagccctttggccccaggtcagcccccggagcagcaggcacggttcaggaggntccatgtgctccatctnagggtggtnaagttgnggnntttttaggccngggnggttangaactttggggtgggggcnnngggtttttaaacctttttaaaggnttttnnggntt

SEQ ID NO: 121158 - DNA, 534 bp, Arabidopsis thaliana
  unsure (1)..(534): unsure at all n locations
atgatttnnnnnnnnnnnnnnnnnnnnnnnnnnnnnnnnnnnnnnnnnnnnnnnnnnnnnnnnnnnnnnnnnnnnnnnnnnccacgcgtccgcccacgcgtccgcggaccgatggcgaagaaacgtcccaacgagctcagagagccacaccaatcctcctttttcttcttcttcttcctcctgcatttttggttttggtggcgttgagacatcatcatgtctagcgcagaggatgtgaaagagcaaggaaacctcaccaacgaggcagagaagtcaatgccatcatcacagcaggaggaggctgttgtaaagaagaagtatggagggctcatgccaaagaaaccacctctcatttccaaggatcatgagcgagcatactttgactcagctgattgggctcttggaaagcaaggtgttgcgaagccaaagggacccctggaagcccttcgtcccaagttacagccaacgcagcagcagacacgttacaggaagtctccatgtgctccatctgagggtggtgaagatggaggagct

SEQ ID NO: 121159 - DNA, 437 bp, Arabidopsis thaliana
  unsure (1)..(437): unsure at all n locations
aatcatttcaccaagatcttcttcttctcccatttctccattgacgacaacggagaaacgtcccatcgtgcgtcagagagccacaccaatcctcctttttcttcttcttcttcctcctgcatttttggttttggtggcgttgagacatcatcatgtctagcgcagaggatgtgaaagagcaaggaaacctcaccaacgaggcagagaagtcaatgccatcatcacagcaggaggaggctgttgtaaagaagaagtatggagggctcatgccaaagaaaccacctctcatttccaaggatcatgagcgagcatactttgactcagcctgattggggctcttggaaagcaaaggtttttgcgaagccaanagggacccctgggaaggcccttttgtnccaaggttaaagccaaacgggagcannagncnacggttnaag

SEQ ID NO: 121160 - DNA, 803 bp, Arabidopsis thaliana
accactcacatttatggaaagctgctacgcctgcaggtaccggtccggaattcccgggtcgacccacgcgtccgggatgtcgcttctgctcggagcatctcttcacatccttcatattatggaaaaccgatttgttcatcacaatcatcgttgattcggatttcgagggataaagtttgttgctttggtcgcatttctaatggcatgacgagctttactacttcccttcatgctgtcccgagtgaaaaatttatgggcgaaacaagacgtactggcattcaatggtctaaccgctctttaagacatgatccttacagatttcttgataagaaatcacctagatcaagtcaattggcaagagatatcactgtgagagcagatctttcaggagctgcaacccctgactcttcttttcctgaaccagagattaagttgagctcaagactcagagggatattcttttgtgttgttgctggcatttcggctacttttctcattgtcctgatgattattgggcatccgttcgtccttctcttcgatccctataggagaaaattccaccacttcattgctaaactttgggcttccataagcatttatccgttttacaaaatcaacatcgagggtttggagaatctgccatcatcagacactcctgctgtatatgtttcaaaccaccaaagttttctggatatctacacacttcttagtcttggaaaaagctttaagttcatcagcaagacagggatattcgtaattcccatcatcggttgggccatgtccatgatgggtgtcgttccctt

SEQ ID NO: 121161 - DNA, 501 bp, Arabidopsis thaliana
gtttcgattcctagacactctcactacggttttacaactatggcaaccactcgaatggttagggtttcgcaagatggttcgggagattactgctctgttcaagacgcaattgattcggtgcctttaggtaacacttgcagaactgtgattcgtctctcacctgggatttatcggcaacctgtgtatgtacccaagaggaagaatttcattaccttcgccggaatctcaccggagatcacggttttgacttgggacaatacagcttccaggattgagcatcaccaggcgtctagagtcattgggactggtacgtttggttgtggtagtgttattgttgaaggtgaagattttattgcagagaacattacttttgagaactctgctcctgagggatcagggcaagctgtggcgatacgagtcactgcagaccgttgcgccttttataattgtcgatttctcggttggcaggatacattgtatttacatcatgggaaacaatat

SEQ ID NO: 121162 - DNA, 650 bp, Arabidopsis thaliana
accacgcgtccgcccacgcgtccgcccacgcgtccgtaagtagtaaccacatttttctcgctttgccgtcttctccggcgattttcagacactaattttctctccggttgttgcaatcatattttctgtcggaagatattgaaatcagaaaccgggaaaaatgacttcgtttcttagtttctccgccatttcagctcatccacctactttttccggcgcttcatttcgtcctcgctctttctctccccgattgttcaagtcttgtgttaagtgcacttatgctgaagctggattaagcagcgcttcatggtcagcccctattgacattgtggcagatgtcaaatccgaaagggttgtagttcttggtgggaatggtttcgttggctcagctatctgcaaagcagcaatctccaatggtattgaggttgtgagtgttagcaggtcaggtcgtcctaacttcgaagattcatggttggatcaggttacatgggttactggtgatgttttctatttgaattgggatgaagtacttcttggtgctactgctgtagtttcaaccattggtggttttggaaatgaagaacagatgaaaagaatcaatggtgaagctaacgttactgctgtgaatgctgctaaggattttggggttc

SEQ ID NO: 121163 - DNA, 589 bp, Arabidopsis thaliana
  unsure (1)..(589): unsure at all n locations
cgtccgngcgaaatcaaccaatttaatccacctgtcttttatcatctcacgacccacctctgggggcgcagctctcatcacgagtcaacccctttctccgtcgaaattcgcatgcttaaactctgagagaagaagatgactatgacggaggagaaaccaacttccgacggcaaacgacgttggggtctcttcaagattccatttcgcaactcaagccgtcacagaaacgccgcttcaagtgctgctacttctccgcttccatctggagcttcttctatcttctacttcttctcatctacataaccaccatcgacatcatcatcaacatcaccatcagcaccatcatcagcttggctataacggtcctcacggcgatgcatcgggtcaaaatcaacatccggactcctttcctcctttaaggtttaaactggtgcctaaggctttntttttcccacttaaacnggagggttnnaagntttttattccnttcttngggaaactcttatttttcccttnntnagccctnggggaggnaagttttnggggggnctttttaaggnttnaaanttnccccggaaatctcaattgt

SEQ ID NO: 121164 - DNA, 657 bp, Arabidopsis thaliana
  unsure (1)..(657): unsure at all n locations
acaagagtcaacccctttctccgtcgaaattcgcatgcttaaactctgagagaagaagatgactatgacggaggagaaaccaacttccgacggcaaaggaggttggggtttcttcaagattccatttcgtaactcaagcggtcacagaaacgccgcttcaagtgctgctacttctccgtttccatctggagcttcttcttcttctacttcttctcatctacataaccatcatcaacatcatcatcaacatcaccatcagcaccatcatcagcttggttataacggtcctcacggtgatggatcgggtcaaaatcaacatccgactccttctccttcagtttcatctgttgctaagtcttttcttcctactaaacgaagattgaagcttgatccttctgagaaactctattttccttatgagcctgggaagcaagttaggagtgctattaagattaaaaatacaagcaaatcacatgtagccttcaagtttcaaacaactgcgccgaagagttgctttatgcgtccacctggtgctattcttgctcctggngagactattattgctactgtgtttaaatttgttgagcctcctgcgaataatgacgacgccaatggattcaaaggngcagagtgaagttttaaaaactcatgaggcct

SEQ ID NO: 121165 - DNA, 1065 bp, Arabidopsis thaliana
  unsure (1)..(1065): unsure at all n locations
atgatctnnnnnnnnnnnnnnnnnnnnnnnnnnnnnnnnnnnnnnnnnnnnnnnnnnnnnnnnnnnnnnnnnnnnnnnnnnnnccacgcgtccgcccacgcgtccgcggacgcgtgggcaagcacaaggttctccggggattggtggcttgggtccttcttctccttctttgacgactcctggaagtttaaacatgaagagattccagcagaaaccgccgatgcgacctcctggtgctcctgcgagtaacaacactatctccccaatgagaacaatggagttaactcctgctgctcggaaaaagaaacaaaagcttccagaaaagtcattgcaggagcgggtggctgcaatcttgccagagtctgccttatacacacaacttctggagtttgagtctcgggttgatgctgcgttaactagaaagaaagttgacatccaggaagcccttaaaaaccctccctgcatacagaagactcttaggatctacgttttcaactcgtttgctaaccaaaacaacacgatccctgggaatcctaatgctgacccgccaacatggactcttaaaattattggtaggatactggaagatggggtggatcccgaccagccagggtttgttcagaaagcaaacccattgcatcccaaattctcgtctttcttcaaaagggttacagtttccctggatcagaggctgtatcctgagaacccattgatcatatgggagaatgctcgatcacctgctcctcaggaaggctttgagatgaagaaggaagggaatcaggagtttgctgctagtatactgatggagatgaactacggccgtgaaaaaggcaagcttcctactgccttgatggatgttcttcggaatggagggtgaaacccccgcccaagaatcaattcgtggaaatgtggggggtttcgtttaaaggcgaaggaaaacttggcaaaaccccaaaaggacacccctttttttctttaaacgtggggatgggcttggtaccttttataaaaaaaggttttatttgtggggaaaaagaaaacaggttggaaaaaatttccaattta

SEQ ID NO: 121166 - DNA, 336 bp, Arabidopsis thaliana
ctcatatcccttatgatctcttacctgaatcagttgtgaaatctggttgcaagattgtttacatatggagagacccaaaggacacgtttgtgtcgatgtggacttttgctcacaaggagagatcacaacaaggaccagtggttagcattgaggaagcttttgataagtactgtcaaggtttatcagcttacggtccttatcttgatcatgttttagggtattggaaagcttaccaagcaaacccggatcagattttgtttctcaagtatgagacaatgagagctgatccattgccttatgtgaagagattagctgagtttatgggttatgggttca

SEQ ID NO: 121167 - DNA, 372 bp, Arabidopsis thaliana
cgcagtgccggaacttcgagtcgatcatcagtttcggcgattcgattgccgacactggaaacttgctaggtctctcagatcataacaatcttcctatgagcgcgtttccaccgtacggagaaactttcttccaccacccaaccggtcgtttctctgacggtcgcctcatcattgacttcatcggtacttctctttatttatgtgtaaattgactgttttggcgcagttttgttaggttaaatttacataaaagcattctaattttgtgtgttctgttcactgaattcttaggtttcttatgtcaaatctttctctgtttttctattttcttgaacagcaagttaacattgtgaaacctcaagtgatgctcca

SEQ ID NO: 121168 - DNA, 775 bp, Arabidopsis thaliana
  unsure (1)..(775): unsure at all n locations
ggccgacaacgattatccttacaaagctctcaatggagtctgcggcgcccgcctcaaggaaaacagcaagaatgttatgattgatgggtatgagaatttgcctgcgaacgatgaatccgctcttatgaaagcggttgctctccggcctgtgactgccgttgtcgattccagcagccgagagtttcagctttatgaatcgggagtgtttgatggaacttgcggaacaaacctaaaccatggtgttgttgtggtcgggtatggaaccgagaatggtcgtgactactggattgtgaaaaactcgaggggcgacacatggggggaggctggctacatgaagatggctcgcaacattgccaatccaagaggcctatgtggcatcgcaatgcgagcttcataccctctcaagaactcgttttctacggataaagtttcggttgcctaataatatgaactaaatgtatgccatggaacggatcggttaagccattatcgttattcgactttgaaggaaactaaaaagtaatgtggtcgattggtttggttttgttatatattatgcatttgtatgggggtcagtcaatgtttgaactttgtataatatttctttgggtctagtgataaatattttcccctttgaaaaaaaggtacttgtgtgagacgagattgatgagtgaaaaaaaaaaaaaaaaaaagnnnnnnnnnnnnnnnnnnnnnnnnnnnnnnnnnnnnnnnnnnnnnnnnnnnnnnnnnnnnnnnnnnnnnnnnnnnngaatcg

SEQ ID NO: 121169 - DNA, 497 bp, Arabidopsis thaliana
actcactatagggaaagctggcacgcctgcaggtaccggtccggaattcccgggtcgacccacgcgtccgaaaggcacaccaccattgaattgaacttccctcacacgcaagtaccacaccttctctctctctctctctatcatctcttttctttttctctcatcgccttgaagctctgagaagtagagagaagctccgatctgataggaactgtgagtttccttgagtctccggagaaagaagtcgccgatttgctcctgataatcttagtctcgaaatcaaaacgatgttttgcgattgcttctactggaataaaggtttctccgagttggaatcggaatcgtccgagtcaaagcccttctcgcttccatctcctcttcctcaatggccacaaggcagaggttttgctactggaaggataagtcttggagaaatccaagtggtgaaagtcaccgagttcgatagagtttggaaatgtggcacctcgcgtggtaaa

SEQ ID NO: 121170 - DNA, 503 bp, Arabidopsis thaliana
actccttaccgctaccaaacgcttctcctttaatcatcatcatcatcattttatctccgtcccttcatgttccgttaccgttaacggctgtttttttttaatctccggtgaccgttctttttctgattccaggtgttgccagctgtttttttttttgggagatattttttttaattccttttaaagttagttataagtcagttttgtctgcttggattttcatttataaaacaaggtggaattaggtttcttccgatagagaaaggggcttgattttggacaaaggcacgtgtcttagtcttttattcaagctccgatctataagttatgatttgggtttggttttgagttctccaattttagtctcatctctgtggttgttgtaactgggtttgtgatggaagctagaattgaaggtgaagtagaaggtcacagtttagaatacgggtttagtggtaaaaggagtgtagagtgggatttgaatgattgggaatggaatggtg

SEQ ID NO: 121171 - DNA, 405 bp, Arabidopsis thaliana
  unsure (1)..(405): unsure at all n locations
gaccacgcgtccacccacgcgtccgagacaataatggaaactatatacctaattctctctctcttcttcttcttcatcttcctatctctcaaactcttgttcggaccacggccgcgtaaactaaacctaccgccgagtccgagtcgaccatttccgatcatcggacacctccaccttctaaagctaccactccaccgtagatttctctctctctcagaatctttaaacaacgccaagattttctctctcagcctcggctctcgtctagtttttgttgtttcttctcacgccgtcgcggaagaatgtttcactaagaacgacgtcgtgttagctaaccggccggagtttctcgtcgggaaacatatagggtacaactctangaccatggttggtgcggctttatgg

SEQ ID NO: 121172 - DNA, 501 bp, Arabidopsis thaliana
  unsure (1)..(501): unsure at all n locations
cnnnnnnnnnnnnnnnnnnnnnnnnnnnnnnnnnnnnnnnnnnnnnnnnnnnnnnnnnnnnnnnnnnnnnnccacgcgtccgcccacgcgtccgcccacgcgtccgcccacgcgtccgcacttccccaatctctagatgacaatctaacgatacagttccttttagatcgattaccaaatacaaaggatcaatttttcttacatgaacactctgttgtaatggcagaggagaatctagaactgagtcttttatgtacagagagcaacgttgatgatgagggcatgattgttgacgaaactccgattgaaatttcgattcctcagatgggtttttctcaatcggagagtgaggagattatcatggagatggtggagaaggagaagcagcatttgccaagtgatgattacatcaagagacttagaagtggagatttggatttgaatgttggaagaagagatgcccctcatttggatttggaaggcttgtgaagtacaccagtt

SEQ ID NO: 121173 - DNA, 519 bp, Arabidopsis thaliana
  unsure (1)..(519): unsure at all n locations
nnnnnnnnnnnnnnnnnnnnnnnnnnnnnnnnnnnnnnnnnnnnnnnnnnnnnnnnnnnnnnnnnccacgcgtccgggaaatagagatttgaatctcgagtattatggagattaatgttgatgaagaagctgggatcatcaaagaagaaacagttccactcctggatgatcaaaatcgaaatcgggacttacctgacatagaaaggaacactatgatgcaaaaggcaataggtaagacttttcagacaacagctaatctagctaatcttttacctacggggacagttcttgcattccagattttatcgccaatttgcacaaacgttggacgctgcgatctaactagcagattcatgactgcgttgctagtttccatctgcggattctcttgtttcatacttagcttcacagattcttacaaggatttgaatggtagtgtctgctatggatttgcaacaatccatggtttctggatcattgatggctcagctactcttccctcagaactttccaaaagct

SEQ ID NO: 121174 - DNA, 522 bp, Arabidopsis thaliana
  unsure (1)..(522): unsure at all n locations
cccaaggtttaatccgctcccctaaaagaaaaatgggaggcctgcaaggcccggtccggcattacgcggtggaccccacgcgtcccggctgcgtcatccaagatggttcgggtggtgcgggtgctggtgggttctcgtacgagtatggggctcgtgattcagggtttggagtagttggggctcagatgagacatgttcaggcccatgggccgagaccatcggttaatgggttttcaagagaagtaggaactacttttgatgatggtttagggttggatttgcatctcagtcttgcacctgctggtcattgacgtgttttttaaagctcttgtatatttatcaacattttaattaatttatttatttttagtgattttttttttctctatcagtatttttaattaatgactttaaattccagtgaaaaaaaaaaaaaaaaaagggcgaccgctctagaggatccaagcttacgtacgcgtgcatgcgacgtcataatcttctatagtggacctnnnnnnnnnn

SEQ ID NO: 121175 - DNA, 370 bp, Arabidopsis thaliana
acggacgcgtgggtttctctatctttaactcccttcacacctctccctctctcttcttcatatctctctctgtcacaatagtgtgatgatgcaatgagaatggagttgatttcagtgattttcttcttcttttgctctgttttgagttcctctgctttaaactctgatgggttggttttgatgaagtttaaatcctctgttcttgttgatcctctgtctttattacagacatggaattacaaacacgaaagtccatgttcttgcagaggaatctcttgtaataacgattctaaagtcttaactttgtctcttcccaattctcagcttcttggttcgattccttctgatttgggttctctcttaacacttc

SEQ ID NO: 121176 - DNA, 548 bp, Arabidopsis thaliana
  unsure (1)..(548): unsure at all n locations
cnnnnnnnnnnnnnnnnnnnnnnnnnnnnnnnnnnnnnnnnnnnnnnnnnnnnnnnnnnnnnnnnnnnnnnnccacgcgtgcgcccacgcgtccgatcgtttcaatttctaaaattctcctctctcaacgcaatcaccaaatccaaatttagggtttcttttctctttctgcgatcgatctctgaaaactcataactgttgtttaatcgtgaagatggcatcaaacggatctttctctgctcagagaaacgcaaacgctagaacaacgatgaagagaagaagcgacaatcgcggttacggtggcggaatcggaggttatcaagaggagacgaaccgttacgcgccgccgcaaaaacgtttcagatcacaagcgcaacagcaattccgatctggtcataatcctctgtatcatcatcatggtagtaataataataacgtgtctagggtttcttctcaatcatataacaattgcggtgttgatgtgattgcttctaattcaagttttgcattacgtaacaatgattctaacaccaacaattatcagaaac

SEQ ID NO: 121177 - DNA, 870 bp, Arabidopsis thaliana
  unsure (1)..(870): unsure at all n locations
atgattcttccnnnnnnnnnnnnnnnnnnnnnnnnnnnnnnnnnnnnnnnnnnnatggccgtttgcagtaccgctccggaattcccgggtcgacccacgcgtccgaatggcaaccttacagatgggtgaatatgttcccaatgtgtcaaatggagttgatacatatagtattagagagccattaggtgtttgtgctggcatttgtccttttaactttccagccatgattcctttatggatgtttcctgttgcagtgacatgtggtaatacctttattctaaagccatcggagaaggatcctggtgcttctgtaatacttgcggagttggcaatggaagctgggttacctgatggggttctcaatatcgttcacggaaccaatgatacggtgaatgctatctgtgatgatgaagatataagggctgtttcttttgttggctccaacactgccggaatgcatatatatgcaagagcagcagcaaaaggaaaacgtattcagtcaaatatgggggcgaaaaatcatggacttgtcttacctgatgccaacgtcgatgcaactttaaatgcactacttgctgctggctttggtgccgctggacagagatgcatggcactgagtacagtggtttttgttggggatgcaaaatcatgggaggataaactacttgagcgagcgaaggcccttaaagtcacatgtgggtcagaaccagatgcagaacctgggtcctggcattagtaaacaggcgaaagaaaggatttgcccgttggattaaatctggggtaaaacgatgggtgccaaaattactggtttgatgggaaagaaaatattggtgggtttccagggattccgaaggaaaggggaaattttta

SEQ ID NO: 121178 - DNA, 1345 bp, Arabidopsis thaliana
  unsure (1)..(1345): unsure at all n locations
tacaaagaagcagacgacaacaccaaactccgatcatcatcatcaacaacaacaacaacaacaacgatgctgcttcgaatttctggtaacaatctgagacctttgagaccacaatttctcgctcttcgaagctcttggttatcaacttcgccggagcaatctactcaaccacaaatgcctccgagagtaccaaatcttattggaggttcttttgttgagtctcaatcatcttcgtttatcgatgttataaaccctgctacacaagaggttgtatctaaagttccattgactactaatgaagagtttaaagctgcggtatccgctgcgaagcaagcgtttccgttgtggagaaacacgccgattactacccggcagcgtgttatgctaaagtttcaagagcttatacgcaagaatatggataaacttgctatgaacatcacaaccgagcatgggaagactttaaaggattcacatggtgatatcttccgtgggttagaggttgtggagcatgcgtgtggaatggcaaccttacagatggtgacatgtggtaatacctttattctgaagccatcagagaaggatcccggtgcttctgtaatacttgccgagttggcaatggaagctggtttacctgatggggttctcaatatcgttcacggaaccaatgatactgcgaatgctatctgtgatgatgaagatataagggctgtttcttttgttggctccaacacggctggaatgcatatatacgcaagagcagcagcaaaaggaaaacgtattcagtcaaatatgggggcgaaaaatcatggacttgtcttncctgatgccaacatcgatgcaactttaaatgcgctacttgctgctgggtttggtgccgctggacagagatgcatggcactgagtacagtggtttttnttggcgatgcaaaatcatgggaggataaactcgttgagcgagctaaggcccttaaagtcacatgtgggtcagaaccagatgcagacctgggtcctntgattagtaaacaggcgaaagaacggatatgccggttgattcagtctggtgtagatgatggtgctaaatttctgcttnacgggaagagatattgtgggttccaggatatgtgaaagggaatttttatccggtcctacccattctatctgggagttaccccagacatggngtgttacaaaggnggaaatatttggccctgttcttgtgtgcatgcaggcaaacagtttttgttgagcccatatctataataaataaaaacaagnatgggaacggtgctgnnattttnaaggttgtcccggggcagcagcaatgaaaggttccacattgggccat

SEQ ID NO: 121179 - DNA, 733 bp, Arabidopsis thaliana
  unsure (1)..(733): unsure at all n locations
cgggagaaggtccaggcgctaagatgcctcactatggctatagcacacaagtaggcaacaaggatttaactcctttggctggcgagttcacagccagagccagcccatcgacaaacacctttacgtctttgacctcgagacccggacttggtccatttctccagccaccggagacgttccacacctctcttgtttaggtgtccggatggtgtcagtaggatcgaccctctatgtctttggaggccgagacgcttcacgccaatacaacggtttctactcgtttgacacgaccactaacgagtggaaactgctaactccggtcgaagaaggacccactcctcgtagtttccactcaatggcagccgatgaggaaaacgtttacgttttcggtggagtgagtgctacggcacgactcaatacactagactcttacaacatcgttgataagaagtggtttcattgttcgactccaggagattcccttaccgcaagaggaggagcagggctcgaagtggtgcaagggaaggtatgggttgtgtatgggtttaacggatgtaaagtagatgatgttcattactacggtccttttcaagccaagtgggcacaagtggggaccattcgggttttaggcctttccgaaaaaggtgttttccccagtgcggtttttggaagaattttgtttttggggnaattcgntgnccctagttngnggccggaattccctgnctttttc

SEQ ID NO: 121180 - DNA, 829 bp, Arabidopsis thaliana
ctcactatagggaaagctggtacgcctgcaggtaccggtccggaattcccgggtcgacccacgcgtccggtgaaattgcgatggacccgctagctacgtgggtccaggtcaattgaccgatggacttttgattggacacagagacgttgcaatgggagaggctggataagtttggtggagaggaagagactccgagtagcagaggatggaccgcgtccacgactgctaccattgatggtaagaaaggacttgtgatgcatggtggtaaagctccaaccaatgaccggtttgatgatctcttcttttacgggattgactctgcctaattaaggcagatttggtgatcatgaacgtttgtgaatgtgtgtgtgtgtgtgtgggtctgtgtttgtgtgtgtaataagggaggggtataccaccatatgatccttccccagcttgaccattgttttttttttaatatgtttttctttctacatgtttgtttcacgtttcatgttgtatccaataaattgtggctttcctacctgcagaccggtatgagcagatcaatatgctctcgatagatgttcagcccccgacatccgggtctctaaattttctcaaacctggggcgccccttaataccacccgacctgcgggttcgccttcctttttgcattgtaaccaagcttttccggcgcggtttaccccggtatggtacccccggcttcccataattggatggggcatgccgtgccgcggggtatgagagggcctgctcagcctgctccttccgctttagggttacccgcgctccgtatatagccattccggggaagcgtgacgc

SEQ ID NO: 121181 - DNA, 1024 bp, Arabidopsis thaliana
catgcacgcgtacgtaagctcggaattctgctcgagggagagactgatcactccggtcgaagaaggacccactcctcgtagtttccactcaatggcagccgatgaggaaaacgtttacgttttcggtggagtgagtgctacggcacgactcaatacactagactcttacaacatcgttgataagaagtggtttcattgttcgactccaggagattcccttaccgcaagaggaggagcagggctcgaagtggtgcaagggaaggtatgggttgtgtatgggtttaacggatgtgaagtagatgatgttcattactacgatcctgttcaagacaagtggacacaagtggaaacattcggtgtgaggccttccgaaagaagtgtattcgctagtgcggctattgggaaacacattgtgatttttggaggtgaaattgcgatggacccgctagctcacgtgggtccaggtcaattgaccgatggaacttttgcattggacacagagacgttgcaatgggagaggctggataagtttggtggagaggaagagactccgagtagcagaggatggaccgcgtccacgactgctaccattgatggtaagaaaggacttgtgatgcatggtggtaaagctccaaccaatgaccggtttgatgatctcttcttttacgggattgactctgcctaattaaggcagatttggtgatcatgaacgtttgtgaatgtgtgtgtgtgtgtgtgggtctgtgtttgtgtgtgtaataagggaggggtataccaccatatgatccttccccagcttgaccattgttttttttttaatatgtttttctttctacatgtttgtttcacgtttcatgttgtatccaataaattgtgtactttcctagtagtaatcgccagaaaaaaaaaaaaaaaaagggcggccgctctagaggatccaagcttacgtacgcgtgcatgcgacgtcaagatcttctataggtgtcctatatatttccctcgccgcgggggggggatttttatg

SEQ ID NO: 121182 - DNA, 580 bp, Arabidopsis thaliana
  unsure (1)..(580): unsure at all n locations
nnnnnnnnnnnnnnnnnnnnnnnnnnnnnnnnnnnnnnnnnnnnnnnnnaaaaaaanaccggtccggaattcccgggtcgacccacgcgtccgctcagagcaacaaaaccctagctacatttctcgatatcggagaaaagatccggcgaagatgtcaggtggcttagatatgtcacttgatgatatcatcaaatctaatcgaaaacctactggatctcgcggccgaggaggcattggaggtggcaataacaccggtggtcgcggtggttccggttctaattccggtccgtctcgtcggtttgctaaccgcgtaggagccagaacggcgccgtattcaaggccgattcaacaacaacaagctcatgatgcgatgtggcaaaacgacgtcttcgcgactgatgcgtctgtggcggcggcttttgggcatcatcagactgctgttgttggtggtggctcgtctatcgagactggaactaagctttacatttcaaacttagactatgggtgtctccaacgaagatatcaaggagcttttctctgaggttgggtgatcttaagcgatatgggattcactatgata

SEQ ID NO: 121183 - DNA, 426 bp, Arabidopsis thaliana
attcacaactttgcagggttttagattcttgcactcttggaggttgagcttagttcgacatgaaggtctttatctaatctccactcgctggcaatgaagatgagagtggaaaccgcacttgcgatccttttggttctcatatcaattcaacaatgttatggaggtgtaagcaactatacatgtacgtgtttctcttcgggcaatcgaagtgatatcctggaatctaactgttccacatcatgtaattgcagaccagcagacagagatcaatgggtatgtttgtgtcctgcaaatggatttccggttatagccattggtggttcaaattcgtcatgcttcacttcatgcaactgctctgctggtgctacaaaatcttcaaagaagcaatatttatcgaggaaactcgttatagttatactactcttc

SEQ ID NO: 121184 - DNA, 545 bp, Arabidopsis thaliana
agctctctacgactcactatttggaaagctgatccgcctgcaggtaccggtccggaattcccgggtcgtcccacgcgtggggcaaagggaagacccagagagagcagagttgcttcttcttctccggagaaacagattgtgttcttagacgaaaagggttttgaggtgtcatggattccgggacgcagccagaagggttgcaggcagcacagccagcagggttgcaggcagcagggttgcaggcagcacagccagcagggttgcaggcagcacagccagcagggttgcaggcagcagggaagcggaagccgcctacgacgaccgaggatccaaatgatccacagcatataatccacgatttcctcacaatagtgaacaaattggagaaggaagtggatcttccaggcgctataaccagggctagaacctatgatgctgaggttgatggactgataactgctgaccaaccacagacgaatctgggaagagcagaaagtgcccctattcctaatgcttagccagaaggcccagatgatcatcatatt

SEQ ID NO: 121185 - DNA, 1010 bp, Arabidopsis thaliana
  unsure (1)..(1010): unsure at all n locations
catgttactcctcctctcaattcgtctcctccgccatgcgaactcaaactcaaagctctctctaactttttgcttttcttcgaatctgtgatagatcgagacttggatttatcagcttctccgtgctcctttagcttctgctcggttttgttttttttagtctgacgatgagtaacaactggaaatccgttcgattaaggcttcaaaatcgtactctcgtgtttcttctggtgattttgagcttcggttcttgctattcgttgaaatctcaaggtgatggttttctggaatccgtgacgaaagatctatggtcagatatagatgctgaggatttgagagcagttggttttcacaggaaattacttggccgttttcgtaacccgtacacccatttgaatgcgttcagggaccgccctgtggcaagagctacacctccgtcatcttcggtttctacgagacctgatgccaaaagatcctctacattgcctccgccacaaaaaagtcctcctgcgcaacatgtttctgctccacctccttttgtgcaccatgtgactttacctagtctaacaagcagctccaaaacttcttcaaacagcacaattcctatagtggctggctgcatagcgggtgctgtgtttatcctccttttagctactggtgttttcttttttaaaagtaaggctgggaaatctgtgaatccctggcgtacaggtcttagtggacaacttcagaaagtgttcataactggtgtccccaaactcaaaagatctgagattgaagctgcttgtgaagattttagtaatgtcattgggtctttncccattggtaccattgttcaaaagggggcgntatcaagtggggtngagataagctgtggcttctttttctactgcgncttgccaaaagaattggccaaatnacataggaattnagtcagnaaagangntcgaaatgttancnanggaaacccacangnattttttctacccncnttggtnnntttnaagagg

SEQ ID NO: 121186 - DNA, 1073 bp, Arabidopsis thaliana
  unsure (1)..(1073): unsure at all n locations
cccacgcgtccgagatcttcttcaattttaagattttgatgattactgttaaagctgactatcactgcggggaattcaaagatgatgctagtatacaaaaagagaagcatggtttcaaattgcagaatcaggcccatatataagtgggcttgattatttgggcttttggaagagtgtggcccaacatagagatatagagctgttatcgtctgtctttcatggcggagcagaggtgatcgtttcactattcaatttcactcgtcgatcattaccaacctctgcgggcaaagatggaattcgagaagatcaacgtgatcaatcccgttgttgaaatggatggagacgagatgactcgagttatctggaaattcatcaaagacaagcttattttccctttcctggagctggatatcaaatactttgatcttggactgcctaaccgcgatttcactgatgataaggttactatagagactgctgaagctactttaaagtataatgtggctattaagtgtgcgacgattactccggatgaagctcgtgttagggagttcggcttaaagaaaatgtggaggagtcctaatggaactataaggaacattttaaacggcacagttttcagggaacctatcatttgcagaaacatccctcgtcttgttccaggatggacgaagccaatctgtattggaaggcatgcttttggtgatcagtatagagccactgatctcattgtcaatgaaccaggaaaactgaaactagtttttgagccaagtggatcttctcagaaaacagaattcgaagtcttcaatttcaccggtggaggtgttgctttagccatgtataacactgatgagtctattcgtgcatttgctgagtcctcgatgtacacagcttaccagaaaaagtggccactttacctctccacaaaaaacaccatcctcaaaatatatgatggaagattcaaggatatattcccagaagtttatgaagctaacttgagatccaagtatgaagcagcanggatatggtatgagcatcgtttgatagatgattatggtgcatatgccatgaaa

SEQ ID NO: 121187 - DNA, 586 bp, Arabidopsis thaliana
  unsure (1)..(586): unsure at all n locations
acggacgcgtgggttcttatcatgttctttgtggccggcacaagagcttgtatagtatttacagcaagatgttaaagaaaaagctaacagtggatgaaattcatgacattcatgggttacgtttgattgttgacaacgaaggagattgttacaaggccttaggagtagttcatagtttatggtctgaagttcctggaaagctgaaggattacataactcatcccaaattcaacgggtatcaatctttgcacacggtagtgattggacaatggaacagttccacttgaagtccaaatacgtacacaggagatgcatttgcaagcagaatttgggtttgcagctcattggagatacaaggaaggtggctgcaaatactcttcgtttgtncttcagatggttgaatggggctcggtgggtcgtaacctggcatttcgnacatnnaggcaaaagaccgntctttccataagtncttcaggttccatcaaaacccccttgcaagntttccgtctcanctctgnggcttnccagntttttncaagcnttacanganccgggtggcccnntttttgcattnnattngaattgt

SEQ ID NO: 121188 - DNA, 417 bp, Arabidopsis thaliana
attcatcatcaccttcatctctctcttcctctcatcagacttcaccgtgcttctttctctcttctgcagcttcagacgaaacctcctttacttcccccttcaaggttttatatttcccaaatcctacacctgctcacatctcaagctcaagttttgttttcccgggaaaagtgacacaaacaagaacttaacaagggagaagaaaaagcttatattcatatcaacggttgacgttggaaagctattaagatttggttttctacaaatttgttcttcctgaaacgtcacgagacagagcttacaagaagagaaaacagaggaaatttcgttgcattttttttacatattgattcgattaatggattcaaataatcatctctacgacccgaatcccaccgggtcgggtcttcttcgttt

SEQ ID NO: 121189 - DNA, 391 bp, Arabidopsis thaliana
attctcttctcttttgttctctgtatcgcgctctctctctctctcttcattgattgagtcatcatcttcttggacaagaagtggtccgaaccaaaaccaagccagagaatgaatctctcaggggatcgaacaactctaaagcgtcactcgtcgctttcaacacttgtggctcatttctttggcatcttagctgttgttctgatgctaatttggcttctccactaccgtgaaggcatcgagtatggctccgacaacccccttaaggttttaaatgtgcacccatttctcatgtactgtggatttctcttcctcgtgggccaagcaatgatgacttacaaaacggcgtacgcgtcgcaccaagttcagaaaatggttcacggtgggcttcact

SEQ ID NO: 121190 - DNA, 823 bp, Arabidopsis thaliana
  unsure (1)..(823): unsure at all n locations
atgatacttcnnnnnnnnnnnnnnnnnnnnnnnnnnnnnnnnnnnnnnnnnnnnnnnnnnnnnnnnnnnnnnnnnnnnnnnccacgcgtccgcccacgcgtccgggcggaggatgaaggaaactatctacaagatgcttgggagcatatactgacttgtgtttcacggtttgagcatcttcatctcttgggggaaggagcgcctcctgatgccactttctttgcatttcctcaaacggagtcaggaaactctccactggctaagccaaattccgtacctgcaattaaagaaagagcacctggaaaacttcagtatgctgcatctgctatgataaggggttcctacgatggttctggtgttgctggaaaggcttctaatacagtgacatctgaacagatgaacaacttgatatctaatctaaacttgctagaacaagttggtgacatgagtcggatatttactcgtagtcaaagattgaatagtgaagccataattgactttgttaaagccctctgcaaagtttccatggatgagttacgatctccatctgatccacgggtcttcagcctaacaaagattgtgggaatagcgcactataacatgagccgcataagacttgtctggtcgagcatctggcatgtgctctctgatttcgttgtgactattggctgttctgataacctctccagtgcaacttttgcaatggattcgttgcgccagctgtctatgtagttcttagagcgggaagagttggcgaattataacttccaaaatgaatttatgaagccttttgttgttgtcatgcgcaaaagtggtgctgttg

SEQ ID NO: 121191 - DNA, 446 bp, Arabidopsis thaliana
ccttcccgtcgtcggaattacttcgccggcgctcatcacccacaaaaatcacgccaatccaaagatacagagacataatcaatctacctccgagaccactgtttcatggacttctcgcatcaatctcctcacgcgcaatggtcgattagcggaggcagcgaaggaattctccgatatgacactcgccggcgtagagcctaaccacatcactttcatagctctactctccgggtgtggtgattttacctccggaagtgaagccttgggcgatttgcttcatgggtatgcttgtaaacttggtcttgatagaaaccatgtcatggttggcaccgcaattatcggcatgtactccaaacgcggccgttttaagaaggctagattggtttttgactacatggaagataaaaattcggttacttggaatacaatgatcgatgggtacatga

SEQ ID NO: 121192 - DNA, 822 bp, Arabidopsis thaliana
  unsure (1)..(822): unsure at all n locations
cttccaaggtttctacactgtgctatatccatggctatcaaagagctggttaccacagccccttgttcttcctgctgaagtctacaaggtaacagtttttttcccaactcatattccagctgagatcataaaccaacttgtatgaaacttttgatgtggtgcaggtcggtgttacccattatttctcatatcttaaagccaaggaggagcttggatatgttccattcaagagctccaaggaaggtatggctgcaactatctcatactggcaggaaaggaagcggagatctttagacggtccaaccatgttcacttggatagctgttacaataggaatgtctgctctttttgctgccggatggttacccgacataggacctgtgcctttcttaagagccatacacctcttctttttccggacaatcacgattgtaaaggctgtcttcattgtagcagtggtactacatgttgcagaaggaatctatgcgtggtttctggctaaacgagtcgacccaggaaatgcaatggggtggttcttgcaaaccagcgctctcgggtttttctcaatgcggtttttattgaagagagcgaaagagcaccagatttaaacccagccttgttttgatgttgtaatcaaaaaaagttttacatgacttgaatgttttcaagattgaaaaacacaaaataaaagatctacattaatcaggatattccaatttttgaacaaaaaaaaaaaaaaaaagnnnnnnnnnnnnnnnnnnnnnnnnnnnnnnnnnnnnnnnnnnnnnnnnnnnnnnnnnnnnnnnnnnnnnnnnnnnnnnn

SEQ ID NO: 121193 - DNA, 658 bp, Arabidopsis thaliana
acgaactaaatcgattgcagaacagttggttctcaagagtaatggtcgaccttttaagaatggaggcaaacggatgtatacatgtgcgattcgtccagcggctatatatggacctggcgaagataggcatcttcctaggattgttactctaacaaagttgggtttggctctcttcaagatcggtgaaccgagtgtcaaatcagactggatttatgtcgaaaaccttgtcctagcaatcatcttggcaagtatgggactcttggatgacattcctggcagagaaggacaacctgttgctgctggtcaaccatattttgtctctgacggttacccggtgaatacctttgagtttctgcgtcctttactaaaaagtttagactatgacctgcccaagtgtacaatctctgtaccttttgcgctgtccttgggtaagatcttccaaggtttctacactgtgctatatcccatggctattcaaagagctggttaccacccccttgttcttcctgctgaaggtctacaaggtcggtggtaacccattatttcctcaatatcttcaaagccaaggaggagcttggatatgttccattcaagagctccaaggaaggtatggctgcaactatctcatactggcaggaaaggaagcggagatctttag

SEQ ID NO: 121194 - DNA, 509 bp, Arabidopsis thaliana
  unsure (1)..(509): unsure at all n locations
atgatactgccnnnnnnnnnnnnnnnnnnnnnnnnnnnnnnnnnnnnnnnnnnnnnnnnnnnnnnnnnnnnnnnnnnnnnncccacgcgtccgctttttttccctttccgagcagatctgagccgaaggttaactacatgaccggcgctgagaacggcgtgagaatgacgtcaccagaggcgtcttcaacatcctccctcgccaccacaagtgtccacgtaagcgctctcgacggactcgtgaacgtgaactctctcttcaccatcgccgtcttcgttggtctttccttagcgactccaggacaacacagcctcgaacaacgatccagctgcgacgcaagtgctgacgtcgccaagaagctactggtcttcgaagtcgtctccttcagcttcttcctcttctcctctcgtgtagctcagggtcttaagcttgccttaaaccttcttaatagcaaagacgtcaacgagattttcagagctcacatcaatatcaaggttttgagatgggga

SEQ ID NO: 121195 - DNA, 578 bp, Arabidopsis thaliana
cggggttgttccacgcgtgcgctgaagatgcagcctgatttttttaaaaagtcatcaattgagggaggggggtttacggaattttgtgagggaaccacatacagaatagaggaagtgattggtaaaggaagttatggagttgtctgttctgcttacgatacacataccggagagaaagttgcgattaagaaaatcaatgatatctttgagcatgtttcggatgcaactcgcattcttcgtgagatcaaacttcttagactcttacgccatcctgacattgttgagatcaaacacatcttgttgccgccttcaagaagagagtttcgagacatttacgtggttttcgagcttatggaatctgatttgcatcaggttattaaggcaaatgatgatttgactcctgagcattatcagtttttcctctatcagcttcttcgtggcctcaagtatatacacacagctaatgtctttcatcgggatcttaaacccaaaaacatattggcaaatgctgattgcaaactcaagatctgtgattttggacttgcaagagtcgcattcaatgatacaccgactgcgat

SEQ ID NO: 121196 - DNA, 555 bp, Arabidopsis thaliana
  unsure (1)..(555): unsure at all n locations
acggacgcgtgggcggtatgtggctatgaatggaatcacatcattcaaaagataccaaataacaaaggtgtacagaagggataatccatctaaagggagatacagagagttttatcagtgtgattttgatatcgctggtttgttcgaaccaattggacccgattttgaaattgtcaagatattaactgaactcctcgatgagttagaaatacgagattatgaggtgaaactgaatcaccgcaagttgcttgatggaatgctggagatatgtggagtaccacctgagaaattcagaaccatctgttcgagtatcgacaagctagacaagcaatcgtttgagcaagtgaagaaagaaatggtggaggagaagggcttgtnttcagagattncagacagaattggcaacttcgttaaggagaagggagctcctttggagctgttgtctaaactnagacaagaagggagtnagttcttagataaccngtcatcaagagaagcncttgatnngttgagtatcatgtttgnngctcttaaaaaagatcaaaagttgcaagt

SEQ ID NO: 121197 - DNA, 522 bp, Arabidopsis thaliana
  unsure (1)..(522): unsure at all n locations
nnnnnnnnnnnnnnnnnnnnnnnnnnnnnnnnnnnnnnnnnnnnnnnnnnnnnnnnnnnnnnnnnnnnnnnnnnnnnnnnnnngccacgcgtccgaatagcttcacaatggcatcgtctggatcagccgacgaagatttccagtctcgcgttgcgaagatcttcggatctctacccttctctcgtccttcgtcttccaagttttccacgtcgtcttctgctccggcgtcgcggcagcaatcggggtcggtgtggactctctccgacacagaggtagagaagcgggagtggaagcgagattcgtacgatagagacgagattccttgtgcttcatcctttgacgagctcttaaaacagcagaagccttccgaggatgatctcaaagatattgattgcggcgaggattttgatggtgtgtggagtatcagagcctccatgggccttgatcgcactctcgatgacgaggcanaggaagatgagtatgattaagttgccctaggggaagagaatgacggtgaaggct

SEQ ID NO: 121198 - DNA, 375 bp, Arabidopsis thaliana
acggacgcgtgggtaattattcatcatttcatctgttcgaatcgggcaattttcgtctggagaaatctggagataggattttgatcgatttctaagctctaatctcagttttttgggtagctccggtgatccttgagatggcgggtcagaatcctaacatggatcaattcgaggcctacttcaaaagagcagatttagacggagatggtcggatcagtggtgccgaagctgttggattttttcaaggatctggtttgtctaagcaggttctcgcccagatatggtcgctttctgatcggtcacacagtggtttccttgatcggcaaaacttttataattctctgagacttgtaacagttgcacagagcaagagag

SEQ ID NO: 121199 - DNA, 926 bp, Arabidopsis thaliana
aacgcttcatttctatataaacatctcttatcttgttgaaaatctctcgcagcttttgaaaaacatgacctttctaaaaatgaaaagcctttctttcttcttcaccatcctcctctctctctcgaccctcttcaccatctccaacgcacggaagtttaatgtcggaggcagtggcgcgtgggttacaaacccacctgaaaactacgaatcttggtctggcaaaaaccgtttccttgttcacgacactctctattttagctacgctaagggagctgactcggtgctagaggtgaacaaggctgattacgacgcttgtaatacaaagaatccgatcaaaagagtggacgatggagattctgagatctctcttgatcgttatggtccgttttacttcatcagtggcaatgaagataactgtaagaagggtcaaaagcttaatgtcgttgtcatatctgctaggattccatcaacggctcagtctcctcacgccgctgcaccgggaagctctacgccgggatcaatgactccgccgggaggagcccactcgcctaaatcttcctcccctgtttctccgacgacttctcctccgggatcgactactccgcctggaggagctcactcgcctaaatcttcatcagctgtctctccggcgacttctcctccaggatcaatggcgcctaaatccggctcccctgtttctccgacgacttcaccaccggcaccacctaaatccacgtcccctgtttccccatcctctgctccgatgacttcaccgccggcaccaatggcacctaaatcatcttcaactattcctccgtcttctgctccgatgacttcaccacctggatcaatggcacctaaatcttcatcccctggttcaaactcacccaccgtttctccatcgttggctccggaggctctacttc

SEQ ID NO: 121200 - DNA, 430 bp, Arabidopsis thaliana
gtgagaaggagaagaaagaagcaatggagaagatagagcacacgacgatatctaccaatggtattaacatgcatgtggcttcgattggttcaggtccagtgatcctattcgtccatggctttcccgatctctggtactcatggcgtcaccagcttgtctctttcgctgccttaggttaccgcgcaatcgctccagatcttcgaggatacggcgattccgatgcgccgccgtctcgtgaatcttacaccatccttcatatcgtcggagacctcgtcggattactggattcgctcggtgttgatcgggttttcctcgtcggtcacgattggggagcaattgttgcgtggtggctttgtatgatcaggcctgatcgagtcaacgcgttggtcaacactagcgtttgtgtttaatccgaggaatccttctgtga

SEQ ID NO: 121201 - DNA, 354 bp, Arabidopsis thaliana
agaagaaagaagcaatggagaagatagagcacacgacgatatctaccaatggttaccgcgcaatcgctccagatcttcgaggatacggcgattccgatgcgccgccgtctcgtgaatcttacaccatccttcatatcgtcggagacctcgtcggattactggattcgctcggtgttgatcgggttttcctcgtcggtcacgattggggagcaattgttgcgtggtggctttgtatgatcaggcctgatcgagtcaacgcgttggtcaacactagcgttgtgtttaatccgaggaatccttctgtgaaacctgttgatgcgtttagggctttgttcggcgatgattactacattt

SEQ ID NO: 121202 - DNA, 1101 bp, Arabidopsis thaliana
  unsure (1)..(1101): unsure at all n locations
aaggatactcccagcctctattacaactcactttagggaaagctggtccgcctgcaggtaccggtccggaattcccgggtcgacccacgcgtccgcggacgcgtgggcgtgaacaaggagccgtcacacctgttaaaaaccagggtatgtgtggttcatgctggtcatttagtgcgataggagctcttgaaggagcacattttctagccactaaagagcttgttagcctcagtgagcagcagctcgtagattgtgaccatgagtgtgatccagcacaagccaattcatgtgattctggttgcagtggaggactaatgaacaacgcttttgagtacgctcttaaagctggtggtctaatgaaggaagaggactatccttatacaggacgtgaccataccgcttgtaagttcgacaagagcaagattgttgcgagtgtgtctaacttcagcgttgtctcttcggatgaagaccaaatcgctgctaatctagtccagcatggacctctagctattgctatcaatgcgatgtggatgcaaacatacataggaggagtctcgtgcccgtatgtatgttcaaagagccaagaccatggagtgctcttggttggatttggttcatcgggttatgcaccaatccgtcttaaggagaagccttattggattatcaagaactcgtggggagcgatgtggggagagcatggttactacaaaatctgcagagggcctcataatatgtgtggtatggatacaatggtatctactgttgctgctgttcatacctcacccaagtagaattattaggacactacctgtctatctttgtgtatatgtatgtatggttgcataaagatactacgaacttttatcgttagtattgtgtctctgtttcagcttttaatgtaaaatagcttgggggtattatctttgtagcattgaatgcttaagatgataatatgatatgattatcaaattattataagttggaacttggaataatagaaattttatatgttttaaaaaaaaaaaaaaaaggggcggccgctctagaggatccaagcttacgtacgcgtgcatgcggcgtcatagnncacgtcaatcnacc

SEQ ID NO: 121203 - DNA, 749 bp, Arabidopsis thaliana
  unsure (1)..(749): unsure at all n locations
acgcgtccgaccaagcgcaaagtctcctcttccttatctcttggaaaccaagaagcatggatcgtgtggtcttcttcttcctcatcgcagctacgttactagcaggttctctcggatctaccgtcatctccggcgaggttaccgacggtttcgttaacccgatcaggcaagtcgtcccggaggagaacgatgaacaactcctcaacgcagaacatcacttcactctattcaaatccaagtacgagaagacttacgcgactcaggtagagcacgatcatcggttccgtgtcttcaaagctaacctaagacgagctaggcgtaaccagcttctagatccgtctgccgtccacggcgtcacgcagttctcagatcttactccgaaagaattccgccgcaagtttttaggactgaaacgccgagggtttcgtcttcctactgatactcagaacggcgcctattcttccgactagcggatcttccgacggagttcgattggcgtgaacaaggagccgtcacacctgtttaaaaaccagggtatgtgtggttcatgctggtcatttagtgcgataggagctcttgaaggagcacattttcttgccactaaagagcttgttagcctcagtgagcaggcaaattcgnngggnttggtngaacaatnaattgtngaatcccagnaaaaagnccnattncaatgttnnttcttngttggagggggggggggctttattcgaacaacgnctttngggngt

SEQ ID NO: 121204 - DNA, 718 bp, Arabidopsis thaliana
  unsure (1)..(718): unsure at all n locations
agatgacttacgcgactcaggtagagcacgatcatcggttccgtgtcttcaaagctaacctaagacgagctaggcgtaaccagcttctagatccgtctgccgtccacggcgtcacgcagttctcagatcttactccgaaagaattccgccgcaagtttttaggactgaaacgccgagggtttcgtcttcctactgatactcagacggcgcctattcttccgactagcgatcttccgacggagttcgattggcgtgaacaaggagccgtcacacctgttaaaaaccagggtatgtgtggttcatgctggtcatttagtgcgataggagctcttgaaggagcacattttctagccactaaagagcttgttagcctcagtgagcagcagctcgtagattgtgaccatgagtgtgatccagcacaagccaattcatgtgattctggttgcagtggaggactaatgaacaacgcttttaagtacgctcttaaagctggtggtctaatgaaggaagaggactatccttatacaggacgtgaccataccgcttgtaagttcggcaagagcaagattgtttcgagtgtgtctaacttcagcgttgtctcttcggatgaggccaatcgctgctaatctagtcagcatgcctctgcttttctntaatcgtttggtnaacatcatgggggttgtcccatatttaaggcagcctgnncctgtggtgtanc

SEQ ID NO: 121205 - DNA, 502 bp, Arabidopsis thaliana
  unsure (1)..(502): unsure at all n locations
aagtctcctcttccttatctcttggaaaccaagaagcatggntcgtgtggtcttcttcttcctcatcgccgccacgttactagcaggttctctcggatccgccgtcatctccggcgaggttaccgacggtttcgttaacccgatcaggcaagtcgtcccggaggagaacgatgaacaactcctcaacgcagaacatcacttcactctattcaaatccaaagtacgagaagacttacgcggctcaggtagagcacggtcatcgggttccgtgtcttcaaagctaacctaaggacgggctaaggcgtaaaccagcttctagattccgtcttgccgtccacggggttcacggagttcttaagatcttaacttccggaaagaaatttccgccgcaaagtttcttagggccttcaaaacggccgaggggtttcggctttcccacctcttcacttaaaaaggggggccgcttttttccggctaaggggtttttccnnacggggtttcg

SEQ ID NO: 121206 - DNA, 659 bp, Arabidopsis thaliana
  unsure (1)..(659): unsure at all n locations
cgcgtccgacagacggcgcttatttttccgactagcgactttccgacggagttcgattggcgtgaacggggagctttcagacctgttacgaaccagggtatgtgtggttcatgctggtcatttagtgcgataggagctcttgaaggagcacattttctagccactaaagagcttgttagcctcagtgagcagcagctcgtagattgcgaccatgagtgtgatccagcacaagccagcgcccgggactctggttgcagtggaggactaattgaacaacgcttttgagtacgctcttaaagctggtggtctaatgaaggaagaggactatccttatacagcgacgtgaccattaccgcttgtaagttcgacaagagcaagattgttgcgagtgtgtctaacttcagcgttgtcttcttcggatgaagaccaaatcgctgctaatctagtccagcatgggccctctagctatttgctatcaaatgccgattgttggattgcaaaccattacatagggggagtntnggtgccccgtaatgtaatggtcaaaaggggccaagncccatnggggtgcnctttggttngntttttnggtcaaacgggggtnattgacccaattccggctttaaagggggaagnctntttttgggtttttaaaggac

SEQ ID NO: 121207 - DNA, 586 bp, Arabidopsis thaliana
  unsure (1)..(586): unsure at all n locations
agcacagttgaaagaaccaaaaatggagaaactaacttttctcagccttctcctgcatttcgtcgtcttcatcgcttcaacgataccgtcttcatcgttcctcttgaatgatcgcacctttgagagatcgaacttgccgtctacgcgcgcggagaagctgatccgtgagctaaaccttttcccgcagcaggatctgaatgtgatcgatgtcgctgatttgcctctcactgctgcggagggaccggggattgttgaacggaagttcgtattcccgaatatacttgccgatggtggccctactgtcgacgatttaggtcatcatgctggttattacaagctcccgaaatctcgtggcgcaagcatgttctacttcttcttcgagtcacggaacaagaaggatgctcctgttgtgatttggttgacgggagggcctgggatttaaggaagttaagttnggctgtgnttctaatnaanaatggccttttnaagatcanntagtnanaatggtntttncttggnattaagaatggttggaccaaggttccaaanttttgaatttgacaancttttgnanctgtttaactaa

SEQ ID NO: 121208 - DNA, 489 bp, Arabidopsis thaliana
atgatactccagcgtctctacgactcactattgggaaagctggcacgcctgcaggtaccggtccggaattcccgggtcgacccacgcgtgcgcaattctcttcgaagatcgttttgatccaagagagaattctctgagagattgagaggggaagagaaattcttcgatccatagagagataattctctttgaacatcgatccatagcgagatatgcaaaccatctcgaaagcttcgtctgccaccgccgtttttcgatgttctaggaagctatcaagccagccatgtgtgtgacagcttaacataagaaagagtcttgtgtgcagagtgatgaagctggtctcttcacctcttacgactgtgcgtggcgctggcccacctatccctctccaaagctcctcaccgcctcccacgctatctacttcctcaccccacgccccccccgtttctggtacctgttttatccttcttcacctttagtgacacatca

SEQ ID NO: 121209 - DNA, 691 bp, Arabidopsis thaliana
caattctcttcgaagatcgttttgatccaagagagaattctctgagagattgagaggggaagagaaattcttcgatccatagagagataattctctttgaacatcgatccatagagagatatgcaaaccatctcgaaagcttcttctgccacctccttttttcgatgttctaggaagctatcaagccagccatgtgtgagacagcttaacataagaaagagtcttgtgtgcagagtgatgaagctggtctcttcacctcttaggactttgcgtggtgctggtaaatctatccgagtttcaaagttctgcagtgtctccaatgtctcctcattgcaaattgaactggtgccttgccttaaggataactatgcttatatcttgcatgacgaggatactggtacagttggggtggttgacccttctgaagctgaacctattatcgattcgttgaagaggagtggtcgtaatctaacatatatattaaatacacatcatcattatgatcacactggtgggaatttggaattaaaagacaggtacggggcaaaggtgattggctcagctatggataaagaccggattcctggaattgatatggccttgaaggatggtgacaaatggatgtttgctggccatgaagtccatgttatggatactcctggccacacaaaaggccatatcagcttatact

SEQ ID NO: 121210 - DNA, 407 bp, Arabidopsis thaliana
actctctctctctctataacaaaattggacagaattgggcaatcgagagagaaagatgcaagccatctccaaagtttcttctgcagcatcattctttagatgttctaggaagctagttagtcagccatgtgtgaggccttgcgtgagacagcttcacgtcagaaagggtcttgtctctggtgtcatgaagctgttctcttcacctcttaggactttgcgtgatgctggtaaatccgttcgcatttcaagattctgcagtgtctccaatgtctcttcctcattgcaaattgaactggtgccatgtcttacggacaactatgcttatatcttacatgatgaggataccggtacagttggtgtggttgacccttctgaagctgtacctgttatggatgccctccagaaga

SEQ ID NO: 121211 - DNA, 666 bp, Arabidopsis thaliana
ccagctacatactgactcacattagggaaagctggcacgcctgcagtgtaccggtccggaatacacgggtcgacccacgcgtccgggagatggtggttttgttttattatttagagtaagcttcttcatttttttaaaaacttctattattttgaccttaagaagaaagtgacaaggagaggaagaagaagaaaaaaaaacataatttgaggaagaagaaaaaaaattcggatttgttttttcaataaattgactaattgagtactcgtttaaaggaagtgaagagcggttttttggtagtggtggtcgagaaaagagagagtttgtctctgtgactcagagtgaaatcaatagagcgggaaaagattgttgctttttttttgccatgggagttgatgagctgtctcacctcaaattctctcttctgctagaatcatcagccctgcatgatttgtccggttttaagtctctagttgaagaagagggtcttgagagcattgatggctctggtttgtggtatgggaggagattaggatcaaagaagatgggttttgaggagaggacgcctcttatgattgctgccttgtttggaagcaaagaggttgttgattacatcattagtactggtcttgttgacgtgaaccgctcttgtggctctgatggtgc

SEQ ID NO: 121212 - DNA, 1417 bp, Arabidopsis thaliana
  unsure (1)..(1417): unsure at all n locations
gcactnnnnnnnnnnnnnnnnnnnnnnnnnnnnnnnnnnnnnnnnnnnnnnnnnnnnnnnnnnnnnnnnccacgcgtccgcggacgcgtgggctgcaattcatttgccggcgaaaattctcaggatcatttgctcagctaaaaaatggatcaagagtgtccctttgctgccgaaagcataatccagaaatgccctttcctgagaaacatcaacaagcctaccaatttgtccttctcctccttgagttttccaattccggtgcaaggaggtaaaggtcctatttttgaagatggtcctggatttgattcagcattcaagctcttccatgggaaagatggtattgtgccgctttctggtttcgctgatgattctgaagatgaggcgggtcgtcgtgctctgcaattcaatccacttgctggtaaggtagctacaataagcctatcagcttttggtcctggaggcccttttggttttggtcctttctcagagaaatggaagaaacaacagaagaaacctaaaccttccaaaaaccaacagtctggggactcttcgaaacatgaggcagttggagacgaatggttaaaaaccgggaattgtcctatcgccaagtcttttagagctgcaagcaaagtcatgcctcttatttctaaagcattaacgctaccacctggtatgaaatatagatgtccagctcctatagtagctgctagagctgcactttcgaagactgctttggtcaaaagtcttcgccctcagcctttacctgaaaagatgcttgcaatcgctctcatgggaatggctgcaaatgtgcctctaggtgtatggagagaacacacaaagaagttttcgcctgcatggtttttggctgtccatgctgctgtgccttttatagcaatgcttaggaaatctgttctgatgcccaaaacagccatggctttgaccattggagcttcgatcttgggacaggtgattgggtcaagagctgagcgttaccgtctcaaagcagtagctgagaaaatggttcctgtaaccgctatggtttctggatacaaccagagccctggcgactcaggcatttctgggggacattgtggtataggggagggagtgaagcaggtttattacaatgtaaatattggagagtctgctaaatcaactggactctgttattgagagaatgttcttattgatttcagaaactacaaattactatgtaaggattggatatttgtgtgtgagggaaggtttttgtaattcagtgaattgtgtaaaccataacaatggtgtcgttttatcccttcaaaatgggtctaaataaaaggttaattaaaaaaaaaaaaaaaaacaaagggcgcacgctctagaggatccaagcttacgtacgcgtgcatgcgacgtcatagatcttctatagtgt

SEQ ID NO: 121213 - DNA, 589 bp, Arabidopsis thaliana
tacgactcacttagggaaagctggtacgcctgcaggtaccggtccggaattcccgggtcgacccacgcgtccggtttcgccggaaaagaagaagaagcagagagaccaaaagacgccgagaatggtctaaacaaacttgctccaaattccacggcggcgctacaatccaagacaggtctaggaggagccgaagcaagtcaacgaaaaaatatgcctccggcgagtgtgatgacaaggctgatactgataatggtttggaggaaactcatcagaaacccaaacacttactctagtctcattggacttatttgggctctcgtcgctttccggtggcacgtggcaatgcccaaaatcattcaacaatctatctccattctatctgatgctggtcttggaatggcaatgtttagtttggggttgttcatggcgttgcaacccaaattaatcgcttgtgggaattcagtggcaacgtttgccatggcggttaggttccttatgggtccggccgtgatggcggttgctgctatagccatcggattacgtggtgatttactgcgtgtcgctatagttcaggccgattacctcaagg

SEQ ID NO: 121214 - DNA, 506 bp, Arabidopsis thaliana
  unsure (1)..(506): unsure at all n locations
nnnnnnnnnnnnnnnnnnnnnnnnnnnnnnnnnnnnnnnnnnnnnnnnnnnnnnnnnnnnnnnnnnnnnnnccacgcgtccgcttatcggagagatttattccggtgagaaaatgttactccttcgtcgttattccggcggaagtctttactcgatcctccctatcagagcctctattgaatctactattcgtcatttcaacagcctcgagcctttgcaaagctctgattcgactccaactaaaggcgattacttcgccgcgatcaaccacgttgtcaatatcgtccgccgcgagattcacccggagagatcattgaacagtctccgtctacctgtaacctccgaattcgtgttcagagtcctccgcgcaacttctcgttcctccaacgattctctccgattcttcaattgggctcgatcgaaccctagctacacaccaacctccatggaatatgaagagcttgctaagtccttagcttcacataaaaaatacgaatcgatgtgga

SEQ ID NO: 121215 - DNA, 558 bp, Arabidopsis thaliana
  unsure (1)..(558): unsure at all n locations
nnnnnnnnnnnnnnnnnnnntacgactcactttagggaaagcccgtacgcctgcaggtaccggtccggaattcccgggtcgacccacgcgtccgcgttgtttcatttcttagagccgtcgtttcagatttcttcttccagagagagttaaaaagagtaacggtgaggtttggatctaatcgaatcaacgatggaggttgcttttccatcttcgccgccggtgaaatgcatcgccgatgaaagattaacagagatctccatggatttcaccaaattaggattcccagaagaagatgaagaaattaaaaaattggagagatcgtggagtaagctcgaagaatccgtcgaatttaacgaagacgatgaagaagaagaagaagagttttcgtttgcttgtgtaaacggagaaggatctccaattaccgctgatgaagcttttgaagatggtcagatccgtcctgtgtttcctctgtttaaccgtgatcttctcttcgagtacgaaaacgaagatgacaaaaacgacaacgtttcggtcaccgacgagaacagaccgcgtctt

SEQ ID NO: 121216 - DNA, 553 bp, Arabidopsis thaliana
  unsure (1)..(553): unsure at all n locations
nnnnnnnnnnnnnnnnnnnnnnnnnnnnnnnnnnnnnnnnnnnnnnnnnnnnnnnnnnnnnnnnnnnnnnnnccacgcgtccgccagattatcacaaatcacaagcatgactcaaaacaacaacacttgacttcacaactggtttttccctcgcacgagaattgaagaaaataagaagaagaaacactaaacaaaaaagtatggtggaattggagattgtgtggttggttagaggcgcttggatcactgtttggatcgtctctatacttcctttggtgattgcttcgatacccacttcaaagctcaactcttttcgtgaactcgttttgagtttcgctggtagaggcaagattcttcacccttcttctcagaagtttacaattcctcagaaatgctttgcacacttttatgttattggagtggtgtggacaactctcctgcttgctgcaacttggatgtatgcttgcaaaatggcgcctttatcttctgaggagttccagttatccgacattgcaagccgtttagccggaggttcagatgttttctccgttca

SEQ ID NO: 121217 - DNA, 1222 bp, Arabidopsis thaliana
  unsure (1)..(1222): unsure at all n locations
cagctctatacgactcatttagggaaagctcgtacgcctgcaggtaccggtccggaattcccgggtcgacccacgcgtgcgcccacgcgtgcgcccacgcgtncgtacggctgcgaaaagacgacagaaggggactgctctatttctcaatctctctcctaaatcaatcaatctttgtattttcatttagccagaacaaaaaaaatggtggagcaaaagagatacgctctgtttctagcgactttggactcagagttcgtgaagaaaacttacggaggataccacaacgtgttcgtgacgacgttcggagacgaaggagagcattgggactcctttagagtcgtcagcggagagtttcctgacgagaaagatctggagaaatacgatggcttcgttatcagcggaagctctcacgatgcctttgagaatgatgattggatccttaagctctgtgatattgtcaagaaaattgatgagatgaagaagaaaattcttggcatctgctttggtcatcagatcatagccagggtaaggggaggaacagtcggaagagcaaagaagggaccagaacttaaacttggagacataaccatcgtcaaggatgcgattacgcctggaagttacttcggaaacgagattcctgatagcatagcgatcatcaaatgtcaccagggcggagtgtttggtgctgcccgaaactcctaaagtgcttgcttatttcaagaaccaccgaggtggagatgtattcgattgagggaccatgttgtcctgtaccccaaggccatcctgagtatatccaaagagattccctcggaaattgttgaccgtgttcttgctctaggctacgtcaagcaagaatttgctgatgcggctaaggcaacgatggagaataggggagcagacaggaagctttgggagacgatttgcaagaacttcctcaaaggcagagttccaactaactagtttcactcccaaattatctatttggctcttgtcatattgaaacaatttgtggatttatgatcttgctttatttttattcaatgtataacgacatattaatctcggcgtgacttatttgtgttataccagttgataaatgaataagaagaacctaagctatttaaagccataaaaaaaaaaaaaaaaaaaaagggcggccgctctagaggatccaagcttacgtacgcgtgcatgcgacgtcatagctcgtctggtgtgt

SEQ ID NO: 121218 - DNA, 1045 bp, Arabidopsis thaliana
aaaaaaaaacgaaagcgttagatattttttatcaatcgtgctccgtaatcattacctttcttcttcatcttcatcttcacgcagcgacttctttgattctctctttttattctcagctccaatttcaacctgcatttctctcttctcaattttgggtttctttttttgatatctcatttgatcagatcgacgaagagaggaagaaggtttgagctgagagatctttggaggtagaaagaagatctcaaaaacgatgtcgtttacaggaactcagcagaaatgcagggcgtgcgagaagacagtgtaccctgtggagcttctctcagctgatggaatctcttatcacaaggcttgcttcaaatgctctcactgcaaaagcagacttcaactgagcaattattcatcaatggaaggagtggtgtattgtaggcctcattttgagcagcttttcaaggagtctggtagtttcagcaagaactttcagtcacctgcaaagccattgactgataagccaaccccggagctgaataggacacctagtcgacttgctggtatgttctctggaacgcaagacaaatgcgctacttgcactaaaaccgtgtatcctatcgaaaaggtaactgtggaaagccagtgttaccataaatcttgcttcaagtgttctcatggaggctgtccgatatctccatcgaactatgcagctctagagggaatattgtactgcaagcaccatttcgctcagcttttcaaggagaaaggaagttacaatcatctcatcaaatctgcttccatcaaacgcgctactgctgctgctaccgcagctgctgcagctgtagcagccgttcccgaatcctgaattcaaattctcgttatttttgtgtatgtgctgtgttgtttacatgtattcgatatgattcatgttctttgtcttccataattgaaccaggcataaaattctcccagttttctatgaaaaaaaaaaaaaaaaagggcggccgctctagaggatccaagcttacgtacgcgtgcatgcgacgtcatagct

SEQ ID NO: 121219 - DNA, 852 bp, Arabidopsis thaliana
  unsure (1)..(852): unsure at all n locations
taggtgccactatagaagagctatgacgtcgcatgcacgcgtacgtaagctcggaattcggctcgagtctcaaatgaacctcggaatcataatgagctactttaatgctagattcttcaaatcaagtgtaaatatatggttccagttcattccccaaatgatattcttgaacagcttgtttggctatctctcagtcctcatcatcataaagtggtgcactggttctcaagcagatttgtatcatgtaatgatatatatgttcctgagcccaatggacgagttaggagagaatcaactgttccctcaccagaaaacattacagcttgtgcttctctttctggctcttgtttctgttccgtgtatgttgcttccaaagccgttcatcttgaagaaacaacatgaagctaggcatcaaggccaggcgtacgcacctcttgacgagacagatgagagtcttcatgtagagacaaacggaggaggatcccatgggcatgaggagtttgaattcagcgagatatttgtgcatcagctgattcacaccatagagtttgtgcttggagctgtttccaacaccgcttcttacctgcgtctatgggctctcagtcttgcccactcggagctgtcatcagtcttctattgagaaggtcctccttctcgcttggggttacaacaatcccgttgatcctgatcgttggggtcttngtgttcatattcncaaccgtgggagtttttnctngtnnatgggggacaactaagcggggttccttcacggggttgggcnttcactggggtttnaggtttcagaccaaaatnctnncgnngnngattggtanaaagttcggtccctttnaa

SEQ ID NO: 121220 - DNA, 515 bp, Arabidopsis thaliana
  unsure (1)..(515): unsure at all n locations
cagctannnnnnnnnnnnnnnnnnnnnnnnnnnnnnnnnnnnnnnnnnnnnnnnnnnnnnnnnnnnnnnnnnnccacgcgtccgcgagttcttctctataccatatccattgtttgctagctcagcatacgattgccgtgatgtctcttgcagtgaggctactacaattggtctgatcaaaacccgagacacttatccatttggtgtggatcctgtgtggcatggtacccgcagtgagctaccattcctaaattcgcttaagatgaaaatgtcaattcttattggagttgcacaaatgaacctcggaatcataatgagcttctttaatgcaaaattcttcaaaagtgctgtaaacatatggttccagttcgttccccagatgatattcttgaactgcttgtttggctatctttcggtcctcatcatcataaagtggtgcactggttctcaagcagatttatatcacgtaatgatctacatgtttctgagccctatggatgatttaggagagaatc

SEQ ID NO: 121221 - DNA, 906 bp, Arabidopsis thaliana
  unsure (1)..(906): unsure at all n locations
atgannnnnnnnnnnnnnnnnnnnnnnnnnnnnnnnnnnnnnnnnnnnnnnnnnnnnnnnnnnnnnnnnnnnnnnnnnnnngacccacgcgtccgctttgtcttcagcagtcagtgcgcatccgtaggagaaaagtgtgagaatctgccaccatgggtcgtatgcacagtcgaggaaagggtatttcagcctctgcgttgccttacaagagatcgtctccgagctggctcaagaccacctctcaggatgttgatgaatcaatctgcaaatttgccaaaaagggattgaccccttcccagattggtgtgattctccgtgactctcacggtatccctcaggtcaagagtgttactggaagcaagatcttgaggatactcaaagctcatggccttgctcctgagatccctgaggatctgtaccatctaattaagaaggctgttgccatccgtaaacatctcgagaggaacaggaaggacaaggattccaagttcaggctcatcttggttgagagcaggattcaccgcctcgctcgctattacaagaagaccaagaagctccctcccgtctggaagtacgaatccactaccgcgagcacccttgtggcttaagctggagtctggaggaggattctactagtctgttgcttcccttttgttttgatgaattctcaactttagtcttaatgtgtcagcaggatttttgtgtttgcctctcttttttttccggaatcttatgctcccttgtttaagagaatcgtatgatcttgaatttactattgaatatgcttttgcatcctaaaaaaaaaaaaaaaaaaaaaaaaaaaaaacaaagggcggaagctctagaggatccaagcttacgtacgcgtgcatgcgacgtcatagatcttctatagtgcgtcctaaa

SEQ ID NO: 121222 - DNA, 396 bp, Arabidopsis thaliana
  unsure (1)..(396): unsure at all n locations
cacgcgtccgaccaaacatggtttcacatgaatcccaatttcattgcaaagcataactaaaaataaagaagaagactttttggagatcgaatctgttcatgttgatgggttttggctgagctttctagagatagagctagagagtactgggtctgtgtaaagttgataactttttttggtttagagagagaaaggacagagctttacagagatggagatgaagcagatgaagtttcttactcaccaagctttcttttcctctgttcgatcaggagatcttagtcaacttcaacagttagttgacaatttaaccggagatgagctaatcgatgagtcatcgccgtgttctgctgtggctgagcttatgttcttgacacaaaaacgccggacggtnna

SEQ ID NO: 121223 - DNA, 459 bp, Arabidopsis thaliana
tcgaaaaaaactttagagcggtgatcagattcaccgatttttctcaaaatgctaatcaaatcccaaagattgactcttttctctcctctcttgtccaaaacaagacggatcccggttaactcccaccaaacactggtcgcagaatcggtgataactcggagaacactcggtgcgatcaccgcaactccgagttttcataaaaatccggtggtgattcgacggaggatcaaattagagagagttacgaggaactgcgtcagaattgatcgggaaatcgacgaagaagaagaagaagaggagaaggagagacgggatctggtgaaacagagcatatgggaacagatgaaagagatagtgaagttcacaggtccggcgatggggatgtggatttgtggaccgttgatgagtctcatcgacacggtcgtcatcggccaaggaagctccatcgaactcgctgct

SEQ ID NO: 121224 - DNA, 1194 bp, Arabidopsis thaliana
  unsure (1)..(1194): unsure at all n locations
nnnnnnnnnnnnnnnnnnnnnnnnnnnnnnnnnnnnnnnnnnnnnnnnnnnnnnnnnnnnnnnnnnnnnnnccacgcgtccgaaaccgggccctgctgcgtgctagagctcagtctccagcagatgttgcaaaccatcctctcatgaaggaaccatatgatattacacgcgatagagagcgcaagcgggcattgtccatggtcctatcccagagtagacatcaggagaagaaagatgctgagatacttgctgaggctaaaagaatcacagagatgcgattggccgcacgtcgtgcagaagaacctgatgtgtctgcgaatgagaacgccggtcttgataaagctgatggggttgttccagggcgtagtgtatctccaacatccaattctcaacttcctgctactgctgtggctccatcaacactaactatggcagattatgcctctacccttgcttctctgcgcatgcttcatgtatacttgagaacctatggacttgaacaaatggtccaagctgcaagctctgctgttggtcttcgacacgatcaagcgggttgagcagactctgcaagatctcggggttaatttaaagccaaaggttcctaccaaaactgtatgcgatgagcatcttgagctaagcccagccccattgacactactgaatcttcagaagcagctgcaatataaggaatcagaaggttcatcacatcgtgaagggtcgtatgccgcaatgccagacactccaaaggatcgtgttttcgcaccggacccattcagttttgtagctgaaagcccaatcaagaaggaacaaaanagcaagggtcctggaagacaagcagatactccttcaccagctcataagcgtccgagaaagttgaaagcctctgatctctaaaatctctctactcggtgcacactgactcgcaatttcatgtgtatgtatttgcctttttccggccattcccgcaatgttttcagttcttaaattatttctgatctctaaaatctctctacttgtactcagacgccgcgctatcttgtcaagccaattagagaaattgagaaaatgttgcacattatatttatgactagtaagaattattacaaaaaaaaaaaaaacaaaaagggcagaccgctctagaggatccaagcttacgtacgcgtgcgtgcgacgtcaagctcttgtagatgtcac

SEQ ID NO: 121225 - DNA, 598 bp, Arabidopsis thaliana
  unsure (1)..(598): unsure at all n locations
gacgcgttggtcgacgcaacaccctatagggagtcgtattacgacagaagggggagagaatcgcattaacaaaaaaacaaacgaatcttttgagtttaaaaccctttttcacttaccggagaaatggagagatcgacgccggaacatgtctcctccgcacacaagcgcataagcgtgagcttcctcgtgtctctcatggtactttgtgctagacacgcaagcagagtttccaagaagcttaaacccaagaagactcggaagcaaactcatcttgaagactatctcgaaagccctaagtctaacggaaacggtagcgaagacggtagaggaggaggaaggtttggatggagtccggcaaggactttttctcctatgagggtgcgtcctaaggagctctacacgaccttgagcaacaaggcgatgactatggttggccggaaaaacaaagcttacggcgggtggtccgacggaagaagacggcggttgggatngttnttggaggagnttnaggaagagtccggcgttttgcanaggaggttttatttgggggaaaatttnacccgttgggttncttaggggnnnttttcttccnntttng

SEQ ID NO: 121226 - DNA, 798 bp, Arabidopsis thaliana
gactcactatagggaaagctggtacgcctgaaggtaccggtccggaattcccgggtcgacccacgcgtccggtttgatcgtattggcttataacccactaggatggaagcgagtggacattgtccggcttcctgttgtgggcggagacgtttcggtacatgactctgagggacacgaagttgagtctcaacttgttccatttactgatgaatatgtggccttaaggaaatatcatgtagaggcatacttaggtcaaagccctacacaggtgccaaagtattggcttgtgttttcagtaactgtgcctcctcttggcttcactacttacactatctccactgctaagaaaacagatggatattctagcaaatcatacgtctccaatatcctaaaaggcgaacagtcaataattaacattggtcatgggcatctgaagcttagtttttccactgatcaagggacagcaatcaattatgttaacggcagaacctcgatgacagaaccagtcaaacagacatttagctactactctgcatacaatggatcaaatgacaaagaacctcttatacctcaaaactcgggtgcgtatgttttccgtccaaatggtacattccccatcaatccggaaggacaggttcctttgactgttatacatgggccgctagtggacgaagtacaccaacagattaatccatggatatctcagatcactagagtttataagggcaaggagcatgtggaagttgaatttattgttggtaatataccaattgatgatggaattggcaaagaagtagt

SEQ ID NO: 121227 - DNA, 870 bp, Arabidopsis thaliana
aaaaaagtggttagtattggatgaaaagagaatttaatgttcgtattcaaaaatgttttatatatactatatagtatatatacaaaatcccaagattaactcattcatattccatcttcatctccatttctcacactcaaaggttaagaagaaaagatggcgaaaaagttggaagctcaaggtggtcgtggaggagaagaatgggacgatggtggtgcttacgaaaacgtcaagaaagtgtatgttggtcaaggtgattctggtgttgtttacgtcaagtttgattacgagaaagatggaaaaatcgtatcacacgaacatgggaagcagacactacttggaacagaggagtttgtggttgatccagaagattacataacatcagtgaaaatttactacgagaagctctttggatcaccgatagagatcgtaacggctctaatctttaagacattcaaggggaaaacttctcagccttttggactaacctctggagaagaagctgagctaggaggtggcaaaatcgttggatttcatggaagttcaagtgatttgatccattctgttggagtttatataattccgtcgactacaccgctgactccgccggtatcaggtggtctgaccaaattggaagctcaaggtggtcgtggtggagatgtttgggacgacggtggtgcttatgacaatgtaaagaaagtttatgttggacaaggtgactctggtgttgtttatgtcaagtttgattaccagaaagatggtaagattgtatccctttgaaccatggggaaagccaaaacacttaccttggaaaccaaaaggagttttgaagaatatgatacccttgaaagaacctttcctttcaccctt

SEQ ID NO: 121228 - DNA, 780 bp, Arabidopsis thaliana
  unsure (1)..(780): unsure at all n locations
cggcaaaatcgttggatttcatggaagttcaagtgatttgatcctttcttttggagtttatataattccgtcgactacaccgctgactccgccggtatcaggtggtctgaccaaattggaagctcaaggtggtcgtggtggagatgtttgggacgacggtggtgcttatgacaatgtaaagaaagtttatgttggacaaggtgactctggtgttgtttatgtcaagtttgattacgagaaagatggtaagattgtatcacttgaacatgggaagcaaacactacttggaacagaggagtttgagattgatcctgaagactacatcacctatgtgaaagtttactacgagaaacttttcgggtcaccgatagagatcgtcacagctcttatattcaagacattcaaaggaaaaacttctcagccgtttggactaacctctggagaagaagctgagctaggaggcggcaaaatcgttggtttcatggaacttcaagggttttggatccattctgttggagtttatataattccgtcgactacaccgctgactccgccggtatcaggtggtctgaccaaattggaagctcaaggtggtcgtggtggagatgtttgggacgacggtggtgcttatgacaatgtaaagaaagttatgttggacaaggtgaccnggtgttgttangtcaagtttgattacgagaagatggnaagattggancnctgacatgggagcaacccacttggacaaggngtttanatgacccgancactccccatggaaat

SEQ ID NO: 121229 - DNA, 1039 bp, Arabidopsis thaliana
cttcttcaaaagcacactcaatatttcgagatcctctcggcttgttcgttcttcgtgaacgatcccatctattgtttctcgctagtctcagattcgactaacttggatatctccgatactgaagaagcctccttcttctttttccgctcttcccgatgccgatcgataagatcttcaaagatgatgctagtgaagagaagggagaacgtgcgaggatggcatcatttgttggtgcaatggctatcagtgatctggttaagtctactttagggccaaagggcatggataaaatcttgcaatctactggtagaggtcatgcggtcactgttactaacgatggtgctactattctcaagtcacttcacatagacaaccctgcagctaaagttcttgttgacatctcgaaagttcaagatgatgaggttggtgatggaactacctctgttgttgtcttggccggcgagcttctgagggaagcagaaaagcttgtggcttctaagattcaccctatgaccatcatagcaggttacagaatggcttcggaatgtgctcgtaatgctttactgaaaagagtcattgataacaaggacaatgcagagaagtttaggtcagacttgttgaagattgcgatgactactttatgttccaaaattctctcacaggacaaggaacattttgcagaaatggccgtggatgctgttttcaggctaaagggaagcacaaacttggaagctattcagatcatcagaaaacctggagggtctctgaaggattcgtttttggatgaagggtttattcttgacaagaaaataggaattgggcagcctaagcgcatagagaatgcaaatatcttagtagctaatactgctatggataccgataaagtgaagatttacggtgcacgtggtccgtgtggattccatgaccaaggttgctgagattgaaggcgctgagaaggaaaaaatgaaagacaaggtgaagaagatcataggccacggaatcaactgctttgttaacaggcagttgatctacaattttc

SEQ ID NO: 121230 - DNA, 531 bp, Arabidopsis thaliana
actcactattgggaaagctggcccgcctgcaggtaccggtccggaattcccgggatcctcatcatcgtcatcaaggggtcttataatggtgacggcctcttagtggtgcgttgatccccctcgagatatctttgtgggcgagtgttccggttacacccagcagccgcatttttgattgcttttctcggtgcgagaaagacagatattgggtgccatttagcttatgctctgaagataggtgtgatgtaagctcaggagtcctaaaacttctcagacgcggaatctaactaaagctcagatagattctgcggtagattctctctctgattggggttttgaatcttggaggctctggttctttatctggtctcgagcatccaaaggtgagagcttttttgccgcaggtgggttacccatcatttaaggggaaatttttgccaccggaagaatggttttgagtttgaaaatcgcggagcgaggctgattcagaatcccccacgcatgggctttcaaattgctttggagggaaga

SEQ ID NO: 121231 - DNA, 566 bp, Arabidopsis thaliana
taggtaccactatagaagagtctatgacgtcgcatgcacgcgtacgtaagctcggaattcggctcgagtcggtcttcgtctcgtcgtttgattagttctctacatttgtttttgattagttcgcgattcatttctatcttgtctccggtcaatatttttcttcgatccgtcgatcggatattttgactggagatttaagaagtctgaaattgttagatcgcagctatgtcgtactctgactccgattcgtcgtctcatggtggcgagtacaagaatttccgacagattacgcgtgaacgactcttgtatgagatgcttagatctgcaaagacagggagctcaaaatccacctggaaggtactaatcatggacaaacttactgtcaagataatgtcgtacgcctgcaaaatggctgatatcacacaagaaggagtttcattggttgaagacatatttagacgaagacaaccacttccttcaatggatgcaatatacttcatccagccaactaaagagaatgtcatcatgttcttgtcagacatgtctgggaaatcacccttgtacaa

SEQ ID NO: 121232 - DNA, 517 bp, Arabidopsis thaliana
  unsure (1)..(517): unsure at all n locations
nnnnnnnnnnnnnnnnnnnnnnnnnnnnnnnnnnnnnnnnnnnnnnnnnnnnnnnnnnnnnnnnnnnnnnnnnnnnnnnnnnccacgccgtccggaaaaaaacataaaaaaatattcacaaaatggccgatggttttggtgaaccgggaagctcaatgcatggagtcaccggcagagaacaaagctatgcattctctgtcgagtctccggcagttccttccgactcatcagcaaaattttctctccccgtggacaccgaacacaaagccaaagtcttcaaactcttatcctttgaagctccacatatgagaactttccatcttgcttggatctcattcttcacttgcttcatttccactttcgctgctgctcctcttggccccatcattagagataacctcaaatctcacaagaccagatgtcggaaatgttggtgttgcttctgtctctggcagaatcttctctagggttgtatgggagcagtttggatctccttgggcccttatgggtgggcttt

SEQ ID NO: 121233 - DNA, 567 bp, Arabidopsis thaliana
cttatctgaatgctttcattctaattaaagattttaatatatgaatattcgcacgtggatatttgtataagatatgcattaatctccgaggctatgtatagttcagaatttgaagtgaagtttaggagaggaagagagatggaggtatttagacttggagagctgagacacctactggtgacggttttcttgtcggggctcgccgaatacttgataaggccagtgatgactgacgtcaccgtagccgcggtttgctccggcctagacgattcatgttctttggccgtctatctcaccggagtacaacaagtgacggtaggaatggggacaatggtaatgatgccagtgatcggcaatctatcggacagatatggaatcaaagcaatgctcactcttcccatgtgcctctctgttcttcctccagcaatattagggtacagaagggataccaatttcttttacgcattttatgtaatcaagaccctattcgatatggtctgccaaggcaccattgactgtctcgctaacgcttatgtggcaaaaaatggtcatggcacaaaaagaata

SEQ ID NO: 121234 - DNA, 1579 bp, Arabidopsis thaliana
gtaatgcgtatcattccacgcctgaatgaggatataaacgaagtttggatatctgacaaaacccgattctgttatgacggcctgaaaagacaaaggctgagcgaccctatgatccgagattccgatggacgattcaaggcagtgagctggcgtgatgccttggctgttgtgggtgatatcattcatcaggtgaagccagatgagattgttggagtagcaggtcagctatctgatgcggaatccatgatggtactgaaggacttcgttaacagaatgggctcagacaatgtatggtgtgaaggaacagctgctggtgttgatgctgatcttagatacagttatctgatgaacactagcatcagtggacttgaaaacgccgatctcttccttctcatcggtacccagcctagggtggaagctgcaatggtgaatgctaggatctgcaagacagtccgtgcatcaaatgccaaggttggatatgttggtccacctgcagagttcaattacgactgcaaacacctcgggactgggcctgatactctcaaggaaattgctgagggacggcatccattctgtacggctctcaagaacgccaaaaaccctgcaatcattgttggtgctgggctcttcaacagaactgataaaaatgctatcctctcttctgtggagtccattgcacaagccaacaatgttgtccgaccagactggaacggtctcaactttctccttcagtatgctgcccaagcggctgctcttgatcttggtctcattcaacagtccgccaaagccctcgagtctgcaaaattcgtctacttgatgggagcagacgatgtaaatgttgacaagattcctaaagacgcctttgtggtttaccaaggacaccatggagacaaagcggtttaccgtgcaaacgtaattctccctgcatcggccttcactgagaaagaaggaacctatgaaaatactgaaggatttacccaacagactgttccagctgttccaacagttggtgatgcaagagatgactggaagattgtgagagccttatccgaggtctcgggtgtgaagcttccatacaactcaatcgaaggtgttagatcaagaataaagagcgttgcaccaaatctagtccacacagatgagcgagagccagctgcttttgggccttcattgaagcctgagtgcaaggaggcaatgagcacaacaccgttccaaaccgtggttgagaacttttacatgacaaactcgatcacaagagcatcaaagatcatggcgcagtgcagtgccgtgctcttgaaaaagtgagagctttaacttgggttttcacattttctctcttttcgcaaaaataaagatactgattcttcgtttgctgtcctctttatagaccttttgtttaagcctgagtatcactgtatctcgggtttagcttgcggtgaaatctataagcaatttgcaataagcacattgttagattcaaaactttgcagtgttaattggatgctttgtggcatcttgtattgttcttattaggactcccttttacatttgacatatatgaatttggaggcatggcgat

SEQ ID NO: 121235 - DNA, 656 bp, Arabidopsis thaliana
gccgccccccccttgaaatgacattccatgtgccgtaccggtccggaattcccgggtcgacccacgcgtccgcgggactgggcctgatactctcaaggaaattgctgagggacggcttccattctgtacggctctcaagaacgccaaaaaccctgcaatcattgttggtgctgggctcttcaacagaactgataaaaatgctatcctctcttctgtggagtccattgcacaagccaacaatgttgtccgaccagactggaacggtctcaactttctccttcagtatgctgcccaagcggctgctcttgatcttggtctcattcaacagtccgccaaagccctcgagtctgcaaaattcgtctacttgatgggagcagacgatgtaaatgttgacaagattcctaaagacgcctttgtggtttaccaaggacaccatggagacaaagcggtttaccgtgcgaacgtaattctccctgcatcggccttcactgagaaagaaggaacctatgaaaatactgaaggatttacccaacagactgttccagctgttccaacagttggtgatgcaagagatgactggaagattgtgagagccttatccgaggtctcgggtgtgaagcttccatacaactcaatcgaaggtgttagatcaagaa

SEQ ID NO: 121236 - DNA, 612 bp, Arabidopsis thaliana
  unsure (1)..(612): unsure at all n locations
ccncccncccctgggagaggccttgaatctggggttccnacagctntccnctntccacattggtgatccagnntgctggaagttgtgngnccttatccgnggtctcggtntgagcttccatacaactcaatcgaaggtgttngntcaaggattaaagagcttgcaccaaatcttagtccacacagatgagcgagagccagctgcttttgggccttcattgaagcctgagtgcaaggaggcaatgagcacaacaccgttccaaaccgtggttgagaacttttacatgacaaactcgatcacaagagcatcaaggatcatggcgcagtgcagtgccgtgctcttgaaaaagtgagagctttaacttgggttttcacatttcctcctcttttcgcaaaaattaaagatactgtttcttcgtttgctgtcctctttatagaccttttgtttaagcctgagtatcactgtatctcgggtttagcttgcggtgaaatctataagcaatttgcaataagcacattgttagattcaaaaaaaaaaaaaaaaaaaaagggaggccgctctagaggatccaagcttacgtacgcgtggatgcgacgtcaaactcttctatag

SEQ ID NO: 121237 - DNA, 786 bp, Arabidopsis thaliana
  unsure (1)..(786): unsure at all n locations
cttctcttctctctatcacactactactactcacatcatggctttctccactagaggctccctcttattcttcttcactacacttgttcttctctccacccaaatccatgcaagagacagttacttctttggaaaattccacagagaatcccccaaagatcaaaaccctaacagtttcatccctcttgagactagcgagaaaaccacagtagaagaatccgtcctcaacaagaaagagcaagaacaagatcctacctttgtccccgagtccggaaacgggtatggcttgtatggtcacgagaccacatacaacaacaacaacgacaacaaagaagagttcaacaacaacaacaagaacgatgaaaaagtcaacagcaagactttttccactccaagcctgagcgagaccgaagagtctttcaacaactacgaggaaaattacccgaagaagacagagaactacggcactaaaggttataacaatgaggagttcaacaacaacaacaacaagtacgatgcaaacttcaaggaagagttcaacaacaacaagtacgatgaaaattacgccaaggaagagttcaacaacaacaacaacaacaacaactacaactacaagtacgatgaaaacgttaaggaagagtctttccccgagaacaatgtnggcancatgaaaaacgtctacaactctnaccgcttacgggtcagagttngaacgtgnaacaccgttncaaaggttncaggcnncaacttggtgagnccanggcatgngtnccacaaggttcatgg

SEQ ID NO: 121238 - DNA, 375 bp, Arabidopsis thaliana
ctctctctctcgtttcggcgggtaagctgccataatctctcacccacctcaagcaacataacccacaaaaactcaatctttgtttcttatcttcaaaacccatctgatcattcctccggaatctttctcaagaacagagcaaatgccgcttgttaggctccaagttaggaatgtctacggtttagggcaaaaagagcttcacacaaaagtcgaccgtgaagaccctaaagcgattctcgacgacgtcgccgtttctggactcgtcgggatcttgcgtcaactcggtgatctcacagaattcgcagcagagatattccatggaatacaagaggaggtaatgataacagcatcaagaagcaacaaattgaagatgag

SEQ ID NO: 121239 - DNA, 385 bp, Arabidopsis thaliana
cccacgcgtccgcaagaacatagcactattacattgcaacactttctacaaaaacaagatgaagattgcaacgttttctgttctactcttgcttttatttattttccccgtggcattagcgcagctgaaatttaagttttacagtgaatcgtgccctaatgcagagactatcgtagaaaacctggttcgccagcagtttgctcgtgacccttcaatcacggccgccttgactcgtatgcattttcacgactgttttgtccagggctgcgacgcttctctcctcatagacccaacgacgtctcaactatcggaaaaaaacgccggcccaaactttagcgtgagagggttcgagctgatcgacgagatcaagacggcactcgaagct

SEQ ID NO: 121240 - DNA, 757 bp, Arabidopsis thaliana
gacccacgcgatccacttccgactaaaaaaccatttccatcatcggtttcctccgatacatctcctcgtcgccgttcttcggattttcactcttctgctcgaaagggcagtgcttgagaatcattgaagaaggtgatcgctggtgctgttttgataactcaaagccgttttgctgaaagagggttaccaaagttagaagctcaagaacttggagctgtgtcttctttttgtatcatgccatattttattcagaggcttttcaatacttgcaagtcatctctctcacctaatggtcctgtgtctgaggaggccttagacaaggttcgcaatgtcttggagaaaatcaagccgtctgatgttggtctcgaacaggaagctcaattggtgcgtaattggcctggtcctgggaacgagcgtaatggaaaccatcattctctgccagcaataaaataccttcagttacatgagtgtgacagcttctcgattggaattttctgcatgccacctgggtctatcataccactttataatcatccaggcatgacagtgctaagcaagcttgtttatggttcaatgcacgttaagtcatatgattgggctgagcctgaccaatcagaggctagacgatccattacaagcaagacccgcgaagctggtcaaggatattgatatgacttcccctagcccagcaaccactctatatccaacaaccggtggcaacattcattgtttcaaagccattactcattgtgcaatc

SEQ ID NO: 121241 - DNA, 359 bp, Arabidopsis thaliana
ataagaaattctattatcaattcctatcatttgttaagaaaaagagttagaagtattaataatcttacaatatttatagataagataacaacaatatgaagcattctcacgttttgcttcttctatttgttcaagtcattgtccttttgcctctcctttgtctatccgacgattttgttaactctagagctacttattatggcagccccgattgcaaagcaaatcctcggggacattgtgggtatggagaatttggaagagatatcaataacggtgaagtgagtggtgtttcatggcgactatggaacaatggaactggctgtggtgcttgttaccaggtgaggtgcaagataccacca

SEQ ID NO: 121242 - DNA, 531 bp, Arabidopsis thaliana
agctcaaagttatgacgatgatattatatgaggtcccttacggctactatcctccaatacctcagcctgagcagagccattcacaaagagatggagcttggagatctgacactaccaggcggcgttctgatcaatctacctatccttctagtccaacgcgacacggagctgtggggaaacgatgcaggagagttcaagccagagagattcaaagacggtctctcaaaggcaacaaagaaccaagcctccttctttccttttgcgtggggaccgaggatctgcattggccagaattttgcattgcttgaggcaaagatggcaatggcattgatactccagagattctcctttgagctttctccttcctatgttcacgcaccttacacagtcttcaccattcacccacagttcggtgctcctcttatcatgcacaagctctaatcgttcgtagcaacccattttgttggtatcaaatatactttccattcacagatgaaaccattccatatcagtctaccctataagctaggc

SEQ ID NO: 121243 - DNA, 434 bp, Arabidopsis thaliana
  unsure (1)..(434): unsure at all n locations
nnnnnnnnnnnnnnnnnnnnnnnnnnnnnnnnnnnnnnnnnnnnnnnnnnnnnnnnnnnnnnnnnnnnnnnnnnnnnnnnnnnccacgcgtccgcggacgcgtgggaaagcttactcacatttacgatcgaagaactgggttttgagatcacggttgcactacggtgtggattttgtggcataccgtcaccatccatctcttgtccactcggaatactcggttttagttcagtctggtgacagtgatcgggtaagagtgtggtcagatatccattgtgctcgttaggttaagcggaacggttgcgaaaaacgttgttgactctctacgttaatggtaacttcataggagaggatgtgaatctacttgtatgtttggagaacttcacagtggaagaacaacgattagtagatgggagcccagaactcaggcggga

SEQ ID NO: 121244 - DNA, 432 bp, Arabidopsis thaliana
attattcttctccaagaaggtaccatatcgaaggagtaatcaacgaaggccggaattatcagaacgggacagtgacaacggtttccctgagctgacggaccctttcaattagtcatcctcgagagttccacactttcggcaacgtgaagtagcagcacgatttacattaagtccagagaggatgggagcagtagagcttatgagtgatccatcgagcttatgcacagtcgagaactatgtggacaacgttgatttatctgatacgcaattggtgcagaccgtgagaaaggctcttacatctgtcaaaactggggactcagacctttatagtgagatggttggagttatggcacgggacatcaaagaatttaaggatcctgatgtagtggcgcagcttgagacagtcttgaaagctctatcaggcgctgtggc

SEQ ID NO: 121245 - DNA, 546 bp, Arabidopsis thaliana
atcgcttctacttcactctcactttcctcctattctctctctctttctatgtcaagttagcttagccggctcaccagaaagctaaccttacctcacaaacattgattgtgttacactaatctcttaaatagagagccgtaatttctacacactctgatcgctagatggaaacggagatatcaggaatggataatccagctatgaccttggacgaggtttccatggaacgcaacaagagcttcgttaaggcattgcaggagctcaagaacttgaggcctcaactttattcagctgctgattactgtgaaaagtcttatcttcatagcgagcaaaagcaaatggtattggacaatttgaaagactacactgtgaaggctctagttaatgctgttgatcaccttggaactgtagcttccaagcttactgatctttttgatcaccaaaattcagacatatcaactatggaaatgagagcttcttgtgttagccagcaactgcttacatgccggacatatatcgacaaagaaggtcttagacagcaacagc

SEQ ID NO: 121246 - DNA, 1056 bp, Arabidopsis thaliana
  unsure (1)..(1056): unsure at all n locations
nnnnnnnnnnnnnnnnnnnnnnnnnnnnnnnnnnnnnacccacgcgtccgcccacgcgtccggtccacaatcatcagcttttccaagtcctgcaccttcgtaccacggaagtccagtctcatcatccttcccgagtccatctcgctatgacggaaacccttcttcataccttcttcttccgttcctacacaacatcgcttcttcgattcctgctaaccttccacctcttagaatatccaacagtgcgcctgtgactcctccgttgtcatctcctacttctcgtggttcgaagcggaaacttacttcagagcaattaccaaatggcgggtctttacacgttttgagacatccgcttttcgctatctctgctccatctagtcctactcgtcgtgctggtcaccaaacgccacctacaataccggaatgtgatgagtccgaggaggattcgatcgaggattcaggaaggtggatcaatttccaatctactgctcctacttcaccaacatttaaccttgttcagcaaacttctatggccattgatatgaaaaggtcagactggggaatgtccggaatgaatgggagaggggcagagtttgagtttgagaatggaacagttaagccgtgggaaggcgaaatgattcatgaagttggcgtagaagatctcgaactcactctcggtggcactaaagccagatgctgaaaaacgggtaaatcgaaacatgaaatcagtttgaaaatggtggtaaaagatcagatcagtctccttgtggaccataacagaggaaatcttcagcattgtacagtacattggagccgggctcgcatggccgaggaagggcgaaaagggccgacctttaaccattccgtacatcccccgtttatccttcatttatccctgggatggggtaaatggcctttggggttttaattcctaattgccccagggaaaaccggttttaaggggtaattcttccggtgggganttggaccccttgcttcaaaaaaaaagggggcccntnggccacttgaccggnggggganccccanggccaanat

SEQ ID NO: 121247 - DNA, 778 bp, Arabidopsis thaliana
  unsure (1)..(778): unsure at all n locations
acagacacccaaaacaaaaggtaaatcatgtcaagtaaaaataaagcttcgtctctctctctctatccctcgtgcgccagtctgacagagacttagagatagattcagagattcagagctcttcaatggccgccggaggaggaggaggaggaggaggatcatcgtcgggacgtactccgacgtggaaagagagagagaacaataagaagagagaaagaagaagaagagccatcactgctaagatttactctggtcttagagctcaaggtaactataagcttcctaagcactgcgataacaacgaggttcttaaagctctctgtctcgaagctggttggttcgtcgaaggattggcaccacttatcgcaaggggtttaagccaccagcatcagatatttcaggaactcctacaaacttcagcacaaattcatcaatccaaccaagtccacaatcatcagcttttccaagtcctgcaccttcgtaccacggaagtccagtctcatcatccttcccgagtccatctcgctatgacggaaacccttcttcataccttcttcttccggttcctacacaacatcggttcttcgattcctgctaaccttccaccctctttagaatttcccaacagtgcgcctgtnactccccccgttgtnaatcttcctacttctccgtgggttcgaaagcgggaaaccttcacttttaagcagnaaatttaccaaaatggggggtctttaaacggtttgaggcattcgnttttgggtatcttttgtncaactag

SEQ ID NO: 121248 - DNA, 497 bp, Arabidopsis thaliana
atctcccaaaaaaccctcttttcatccctttttctgaagctctaaaatttttcagttccccgatcgccggaattttcgccggtgatgtaattttcccgcgccttttttgggaggtgaatttttttttcttctaaaagctcgagaagagtgaaaaccccagaaatgaccttgcgattcgtatggctccggctgttttcgctaccttaaacgaaccgtcgtaccaggaacaatgcggcgccgtttttatgaggaaatttacaaaccaatccgtcaccgaaaacaccaataaccttccgctcttcaaccctaaccctaaccctaatttcgaaaggagcaattcgagcaagcagtgcgatgactcgtcggaatttggaagctatgctacttttaatctcgctgggtacacctcaagtcagctcagggagcttaagaagcgctttacctcagagctcaagcagattcggatcctgagagaacggatcgagtcagggacgttc

SEQ ID NO: 121249 - DNA, 590 bp, Arabidopsis thaliana
ctctatcgatctagcagattctttcggggaccaaaatcaaaatcatggtggatcatcaatggaaggatttaatcggataaaagagaagagacggaatcacgacgggagaagagatcgggaaatcggaaaatcggagatgatggggatttctttcgccgccaaactccgtttccgatctcgatttcgaacttcttcaatcgattcttattgcttcgctcgtgaggctttctccgattgtatctcctccgtccatttcttcttcttataacctttttctttgtcagatatcgtccatggaagaggctgattttgccgagaaagatccttctggccgttacatcaggtatgatgatgttctggggagaggagctttcaagactgtatataaggcgtttgacgaagtagacgggattgaagttgcttggaacctagttagcattgaagatgtaatgcagatgcctggtcaacttgaaaggctatattctgaagttcatctactaaaggctctaaaacatgaaaacatcatcaaactcttttactcctgggttgacgaaaagaacaagactattaacatgatcactgagcttttc

SEQ ID NO: 121250 - DNA, 521 bp, Arabidopsis thaliana
atacgactcactttagggaaagctgcgtacgcctgcaggtaccggtccggaattcccgggtcgacccacgcggccggccacgcgtccgcccacgcgtccggcttcttcttcttcttcctcttcttcctcttcctcttctctaatctgaatccaaagcctctctctttatgacacaagatcgctcagaaatgtctgaagatgacgatgaccaacaatctccaccgttggatctaccctctaccgccatagctgatccttgctcatcttcctcttcaccaaacaaatctcgtaactgtatctcaaattctcaaactttccctgaccatgttctcgaaaacgtacttgagaacgttcttcagttcctagattcaagatgtgaccgtaacgctgcttctctagtttgcaaatcttggtggcgtgttgaagctttgactcgatctgaggttgttattggtaactgtcacgctctttctccggcgaggttgactcagagattcaagcgtgttaggtctcttgtgctg

SEQ ID NO: 121251 - DNA, 403 bp, Arabidopsis thaliana
cggacgcgtgggcggacgcgtgggagacgaagtggagagagaaagctcccactctctcgcaccccaaagcttcttcttcttcttcctcttcttcctcttcctcttctctaatctgaatccaaagcctctctctttatgacacaagatcgctcagaaatgtctgaagatgacgatgaccaacaatctccaccgttggatctaccctctaccgccatagctgatccttgctcatcttcctcttcaccaaacaaatctcgtaactgtatctcaaattctcaaactttccctgaccatgttctcgaaaacgtacttgagaacgttcttcagttcctagattcaagatgtgaccgtaacgctgcttctctagtttgcaaatcttggtggcgtgttgaagctttgactc

SEQ ID NO: 121252 - DNA, 404 bp, Arabidopsis thaliana
atctctcactggtaaaaagcaaacaatgttgctccgtcgtgcaaaaacactacccaaaaccctacaaaacctccggttattctctccggcggcgaacgcagctctatccctagatcatatccaagaaacccaattaacttacctccctggattccctcgacccgatccaaaacacgcagagacgatcttagccgttccaaggtctgtctccggcaagagcatatcagcgaaagagcgtaaagcgggtcgggttccttcgatcatattcgaacaagaggatggacaacacggaggaaacaagaggcttatttcagttcagacgaatcagatcaggaagcttgcgaatcatttgggttactcttttttcctctctaggctctttgatgttgaggttcgagctgaga

SEQ ID NO: 121253 - DNA, 570 bp, Arabidopsis thaliana
  unsure (1)..(570): unsure at all n locations
acaaaanccattncctccgtcccttattttgttaacaccacacaaagtcgtctttggagagagagaagggccaacgaccacacatacacacacagaccaataaaccatgagcccttccaagcagcgacatcgtagctctaccggagaaaacaagtcaaagccggtcagatccggttcatcctccgccataccggaatggattaccgaatcaaccaacggcggatctctccgtcgcgtagatcccgatacaggtaccgacggctgggcttctcctcccggcgatgttttctctctccgctccgattcttacttgtccaaaaaacaaaaaactcccgccggtgattacctcctttctcccgccggcatggactggctcaaatcaagtaccaaactcgagaacgtgctcgctcgtcccgataaccgtgtagcttcacgggctttggaaaagttcaatcttggggggctaaattttttcaaggggttttatattttggcggtgaattttnccagttttcaggggnagggttnntaaaaaggggncgggttttnttttggggggggggngnaacc

SEQ ID NO: 121254 - DNA, 451 bp, Arabidopsis thaliana
ctcacaagtcttctctatttataaacacaaaaaaacgaagatagccatcgttttggtgagagaagagagaagagagaagaagaaggccatggaaagataatactctgctttttttttagaaatatacagaggaaataaagagagagagaaggagatggcggattcaagcgattctgtctccattgatatggaggcattgtctcttggaggacaggaacaccttgtggagactacttatggcccggtttgtgttgccgtttgtggagatccagataaaccagctcttatcacttatcctgatatagctcttaattatatgttctgttttcaaggattattgttttgtccagaagctagttctttgttactccacaacttttgcatatatcacatcagtcctcttggccatgagttgggagctccaatgatcagtgttgatgctcctttgctc

SEQ ID NO: 121255 - DNA, 1019 bp, Arabidopsis thaliana
gaccacgcgtccacggacgcgtgggcggacgcgtgggtggatagtgttgcaaatcaagtagtatcttctttagacattcttggctgagagatttacactaaaagcatagaataagaaacccctgtttggttagtatctacccgagtctcgtagtcctacacagatccggatcctagtttcgaagctagttcttgtttagctgaagctcagacccaaaatgctccaagaaccgtcggctgcattctccctccggcgtaactcattcagacgccgatctcccagatcaaatgtcgatgacagaggctggaatccgctccatatcaaagccagaaaaggcgatctgaaatctgtcaagcagcttctcgaccaaggaatggatgtgaatgctctagcatggggaccctaatcaaaaggagtgagtgctcttcaccttgcagcagagggaggtcacattgaagtcatggatttactcctagaacgtggggccaacattgatgctaaaacatggggctcatgcgggtggactcctctccacgctgcagccaaagagcggaagagagaagcagtgaagtttctggtggagaacggcgcattcttggcagatgatataactgataccaggtttaatccgccggtgcattactgtcacggccttgaatgggcgtacgaggaaatgaagaagcttaacagcgagtcttcttcttcatctggtggagacacatcttccagttctgacaactgaacttcttcttggttgtttctcggtgtgttttgttttgttttctagttgagactacttatcagaactattatggttggtgtttgatcttatgggctatgtgaaacattgaaactgcggatacattcatgtaatcttcagtgtgttattttgcaacaccagttccatatcctagccgaatttgatttgtttaaaaaaaaaaaaaaagggaggccgctctagaggatccaagcttacgtacgcgtgcatgcgacgtcaaagctcttctataagtcaccta

SEQ ID NO: 121256 - DNA, 580 bp, Arabidopsis thaliana
cggacgcgtgggccaaaattcacttttttccaatttaggaactacaatcacagaacaagacggcacaagtaaaaaatggctgaagaacctactactaccactctcgttacaccggaaaagctaccttctccgagcctcacgccttctgaagtatctgaatctactcaagatgccctaccgacagagacagaaactctggagaaagtgactgagactaatccaccggaaactgcagataccaccaccaagccagaagaagaaaccgcggcagagcatcatccaccgacagtgacggaaacagaaactgcatcgacggagaaacaagaggttaaagacgaagcatcgcagaaagaagtagctgaagagaaaaagagtatgattccacagaatcttggttcattcaaagaagaaagcagcaaactttctgatctatctaattccgagaagaaatcactcgatgaactaaaacatctagttcgagaagctctagacaatcaccaattcaccaacacaccagaagaagtcaagatttgggggattccattacttgaagacgatagaatcgacgtcgctttgtttt

SEQ ID NO: 121257 - DNA, 752 bp, Arabidopsis thaliana
aggacgcgtgggcgtatttgccagttaccacaataaccggattaaaacccctaatttcgacctaaactttgccattaataaatatctcaaacacaactctcaaaacttgccctgtttggtccgaaaccgaaactaaccctaatctcacatcacatcacatagcaatcacttcacatcacaaaacacctcatagccgcaaaatttaatggcagacgtcaagattcaatccgaatccgaatcctcggattctcatccagtggtcgacaatcaaccacctcctccgcctccgccgccgcaacagccggcgaaagaagaggagaatcaaccaaaaacatctccgactccgccgccacactggatgcggtatccaccaacggtgataatccctcatcagatgatgtacgcgccgccgccgttcccaccttatcatcagtatccgaatcaccaccaccttcaccatcaatctcgtggtaataagcatcaaaacgcttttaatggtgagaataaaaccatatgggttggtgatttgcatcactggatggatgaggcttatcttaattcttcttttgcttccggcgacgagagagagattgtttcggtgaaggtgattcgtaataagaacaatggtttatcagaaggatatggatttgtggagtttgagtcccatgatgtagctgataaggttttgcgggagtttaacggggcgcctatgccaaatactgaccaaccttttcgtttgaactgggctagtt

SEQ ID NO: 121258 - DNA, 438 bp, Arabidopsis thaliana
acccacgcgtccgccgaaaccgaaactactaaccctaatctctcacatcacataaacaatcacttcacatagccgcaaaatttaatggcagacgtcaaggttcaatccgaatccgaatcctcggattctcatcccttggtcgactatcaatcacttccaccttatcctccgccgcatccaccggttgaagtagaggagaatcaaccaaaaacatctccgactccgccgccgccacactggatgcgttatccaccggtgttaatgcctcagatgatgtacgcgccgccgccaccgatgccgttctcaccttatcatcaatatccgaatcaccaccactttcaccatcaatctcgtggtaataagcatcaaaacgcttttaatggtgagaataaaactatttgggttggctgatttgcaaaactggatggatgaggctta

SEQ ID NO: 121259 - DNA, 533 bp, Arabidopsis thaliana
ctcacactgaacttcaattctctctttccttttttccgttcgatgagagcttaagctctgccgcgttttcgttctccgatctttttccatttttatcagtttcttctcttccaaattagggtttttcttttcagtctttgggaatgattttgatgcggtgaaaaagtttttttttttttgagggggaaggatttctgggtttgctcttagggttttgtcttttcaatcgccggagcctgaaataatccggcagatatggcgtctgaattgccgatgagccctcatttggagcagattcacggagaaatccgtgaccatttccgagccctcgcgaatggcttccagaggttggataagatcaaggattctagtagacaaagcatgcaactcgaagaacttgcttgagaagatgagagacttgtaaaaggttggttaaggagtttgatcgtgaactcaaaaactgggaagtctcgaaagtatcccttaagcaaataagcagtttaatgcagagaaacaatctatcgtttatggac

SEQ ID NO: 121260 - DNA, 378 bp, Arabidopsis thaliana
agttctttgtcgtcctttgtttcgtctttcattcattctcctttgtgttttctctttttggagattttaacttcagtttttgtctaattagggttttaatttaaattggagggaaattttagatgcagtgacgtagtttttgggtaaattttcgtcggattctgaattgtctccggcgacatggcttctaatctccccatgagccctcaattggagcagatccatggcgaaatccgtgaccatttccgagccctcgcgaatggtttccagaggttggataagattaaggattcaactagacaaagcaaacaacttgaagaacttactgacaagatgagagagtgtaaaagattggtcaaagagttcgaccgtgaactc

SEQ ID NO: 121261 - DNA, 1188 bp, Arabidopsis thaliana
atctagtggagctattgggtcaccacagatgctgatgttaagtgggattggacctaagaaggagcttcagaggctgaagattcctgtggttttagagaatgagcatgtaggaaaaggaatggctgataatcccatgaacacgatcttggtgccttcaaaggcgcctatagagcagtcacttattcagactgttgggaattacaaagatgggtgtgtatgttgaagccagtactggcttttgggcaatctcctgagagtattcatactcactatgggattatgtcgaacaagaatgaattgttttccaccattcctgcatagcagagaagaccagatgcaacgcaagcttacatcacaagaaacagataccaacttcacgaagcattcaatggaagtttcatcttggagaaacttgcttacccgatctctagagggcatttgagcttggtcaacacaaatgttgatgacaacccttcagtcaccttcaattcctttaaacacccggtggatctccaacgctgtgttgaagccattcgtctggtttccaaagtggtgacgtctacccgtttcttaatctacacgcagtgtgacaagcaaaacgtacacatgatgcttagcttaagcgtcaaggcaaacatcaatctaaggccaaagcaactgaacgataccaaatcaatggctcagtctgcaaagacactgttgtcacaatctgccactaccatggtggatgtccttgtgggtaaagtggggacccctacccgcaaaagttcttggctgtcgacaggctccagagttattggatggttccaccgtttgacgagtctccaggaaccaaccccgcaagctactatgatgatgatgggaagatacatgggagtcaagattcttcgggagagacttggaaacaaagctggtgtttagtttgcagattgagcttttatggtagacaaattcgtagcagataattctgttgtggaattgtgttggagaatatctctctctgtctccttctctgttatttgatattcgattcattaaagtataggatcatattgtctaatgaactgtgtaaccctctattgggcaatcggctctgttgcttattagcttgtgtgaaaagcggccgcgaattcgatatcaagcttatcgataccgtcgacctcgagggggggcccggtaggcaattgc

SEQ ID NO: 121262 - DNA, 550 bp, Arabidopsis thaliana
  unsure (1)..(550): unsure at all n locations
accaaccannccntctcaagcncntgccaatctgcntcccatggngatgcctgnggtaaattgngnccctaccgcaaagtcttggtgncgacggctcagggttattgatggttcaccgtttgacgagtctccaggacccaaccccgcaagcttcctatgatgatgatgggaaggtaaatcaaaatcattaccaacataatgaattggcggttttctttttagttcaatatataaacagaggatttgtcaatctttgcagatacatgggagtcaagattcttcgggagagacttggaaacaaagctggtgtttagtttgcagattgagcttttatggtagacaaattcgtagcagataattctgttgtggaattgtgttggagaatatctctctctgtctccttctctgttatttgatattcgattcattaaagtataggatcatattgtctaatgaactgtgtaaccctctattgggcaatcggctctgttgcttattagcaagtgtgaaaagttgatcatataaaccaaaaaaaaaaaggaagggccgt

SEQ ID NO: 121263 - DNA, 502 bp, Arabidopsis thaliana
cggacgcgtgggctcagatcaaaaaaaaccttcgtgtgcgtctctcgtcctctaaattgtcgaaaatgctggctaggctcgctgcgaagcgtcttctcgagatccgtcaagttttccgtcaaccaacctctcaggtgactcgtagcttatcgacggccttaaactaccatctggattctcctgataacaaacccgatcttccatgggagttttcagaggctaaccaatctaaggttaaggagattctctcttactatccatccaattacaagcagtccgcagttattcctctcctagatcttgcacaacagcagaatggaggctggctccctgtttcagcaatgaatgcggttgctaaagttatagaagttgcccctatccgtgtttatgaggttgcaacattttactcaatgttcaacagagcaaaggttggaaagtatcaccttctagtttgtggcacaacaccttgcatgatccgtggttcacgagacatcgaatcagc

SEQ ID NO: 121264 - DNA, 755 bp, Arabidopsis thaliana
  unsure (1)..(755): unsure at all n locations
atgattcttccnnnnnnnnnnnnnnnnnnnnnnnnnnnnnnnnnnnnnnnnnnnnnnnnnnnnnnnnnnnnnnnnnnnnnnnccacgcgtccggacactctcactactttctattgcatctgtgcacccagagttgggcaatgatgcgcgagggagaagcggagaagcagaagcagtatgttgcacttgtatggatttctcgtccacttgaagagaaagacttcaactcaatttcttgcctgaaagaattgaaaatcttgcagaagacaccagtaagagtgcttcaccgacgaagtccactggaccgtgaaaagattatacattggatgaaagttgaaaagataaaaggacactctcactactttctattgcatctgtgcacccagagtttgttcatggagatcttggtcgtaccactcccagcatgggatcaattttagggtgcagagcggagataatacaactagatgtgactgatgtgaaaatgggcggccctttaattgccaagtaaaaccccgatgttcttccttgtttaattttgtagccctcatttccgtttcatttttgtcaaaactttattagttttgtttttaaaaaatatatggattggtaataaatcctttttttttttnnnnnnnnnnnnnnnnnnnnnnnnnnnnnnnnnnnnnnnnnnnnnnnnnnnnnnnnnnnnnnnnnnnnnnnnnnnnnnnnnnnnnnnnnnnnnnnnnnnnnnnnnnnnnnnnnnnnnnnnnnnn

SEQ ID NO: 121265 - DNA, 517 bp, Arabidopsis thaliana
  unsure (1)..(517): unsure at all n locations
gannnnnnnnnnnnnnnnnnnnnnnnnnnnnnnnnnnnnnnnnnnnnnnnnnnnnnnnnnnnnnnnnnnnnnnnnnnnnccacgcgtccgcggacgcgtggggagaaaccatacggaggaggctacggagctccaccaccgtctggatcttcagattacggaagttacggtgctggacctcgtccgtcgcagccgtctgggcacggtggaggatacggagctactccaccgcatggggtttctgactatggaagttacggtggtgctccacctcgtccagcgtcttctggtcacggtggcggatacggaggttatcctccgcaagcctcttatggaagtccttttgcttctctgattccgtcaggttttgctccggggacagatccgaatatagtggcttgctttcaggctgcagatcaagatggtagtggctttattgatgataaggagcttcaaggagctctctctttctatcaacagagattcagtatgagaactgttcattctttttatgatc

SEQ ID NO: 121266 - DNA, 977 bp, Arabidopsis thaliana
  unsure (1)..(977): unsure at all n locations
agctgtggccccccacccaggggtttttcccccgtcctggagaaaaagcggggtccagttgaggccgccaacgcccaatttaaatggtggagtttggcccccctccctttaggccaccaccagggcttttccccctnnnnnnnnnnnnnnnnnnnnnnnnnnnnnnnnnnnnnnnnnnnnnnnnnnnnnnnnnnnnnnnnnnnnnnnnnnnnnnnnnnnnnnnnnnnnnnnnnnnnnnnnnnnnnnnnnnnnnnnnnnnnnnnnnnnnnnnnnnnnnnnnnnnnnnnnnnnnnnnaaccccacgcgtccgtgaagtcaacaaccagattgggaacagggttcataaggaaaaggattcatgttcgtgtggagcatgtgcaccagtcaatatgtgccaaggagttcaacctgaggaagaagaaatccgatgagctcaagcctccagccaaagccaatggtgagaccctcagcaccaagagacagcctaaaggaccctaaccaggattcatggtcgaaggaatgcccttggagactgtcactccaatcccctacgatgtcgtcatcgatctcaaaggaggctattagttctctcttcttgtgctttagaactctttttcatatgttttgtagcagccttaaaactaagacctatgatttactatataacaggagtttgcaatccaaaaaaaaaaaaaaaaaaaattaagggcggccgctctagaggatccaagcttacgtacgcgtgcatgcgacgtcatagcgctctataccacnggaatccaccccacgggnggaggggagggtcggtgtgtgctcaactggtcctctgaggacggttgtgttcaatttgtccgatccacgccatatactgtacagagttgcgcgcattgagtgatcagaattaatgcaacagagcttcagcctgcctatcgctatctactgtagttgtttactgtcacagctccccgctccctctc

SEQ ID NO: 121267 - DNA, 912 bp, Arabidopsis thaliana
  unsure (1)..(912): unsure at all n locations
nnnnnnncagctcatctacgactcacttttatagggaaagctggtccgcctgcaggtaccggtccggaattcccgggtcgacccacgcgtccgagggttttagttgtcgcacgaggaggaaaaatgccagcgggtcatggagttcgggcgagaacgagggatctgttcgcgaggccattcaggaagaagggttacattccactctcgacttacctgagaaccttcaaggtcggcgattacgtcgatgtgaaggtgaatggtgcgatccacaagggtatgcctcacaagttctaccacggtcgtactggtcgtatctggaacgtcactaaacgcgccgtcggtgttgaagtcaacaaacagattggcaacaggatcataaggaagaggattcatgtgcgtgtggagcatgtgcagcaatcaagatgtgctgaggagttcaagctgaggaagaagaagaatgatgagctcaaggctgcagccaaagccaatggtgagaccatcagcaccaagagacagcctaaaggacccaaaccaggattcatggtcgaaggaatgaccttggagactgtcactccaatcccgtacgatgtcgtcaacgatctcaagggaggctattagttctatcttcccagtgttttgcagttgttgcttccgtatttgagtttctcttcatgtgtcttagctacaatttctgtagaatctccagatattttatgaaacagatctttttatctcgtttataactatcattttcattatctcttctgttacttacatttaacatctttatttagtgattagtcaaattctttggtgaacaaaaaaaaaaaaaaaaaagnnnaacggannnnnnnnnnnnnnnnnnnnnnnnnnnnnnnnnnnnnnnnnnnnnnnnnnnnnnnnnnnnnnnnn

SEQ ID NO: 121268 - DNA, 855 bp, Arabidopsis thaliana
  unsure (1)..(855): unsure at all n locations
atgatctnnnnnnnnnnnnnnnnnnnnnnnnnnnnnnnnnnnnnnnnnnnnnnnnnnnnnnnnnnnnnnnnnnnnnnnnnnnccacgcgtccgtgcggctgcgagaagacgacagaaggggagagacgggggtgagagaggagggaaaatgccggcgggacacggagtgagggcgagaacaagagatctgttcgcgagaccattcaggaagaagggttatattccactctccacttacctcagaaccttcaaggtcggcgattacgtcgatgtcaaggttaatggagctatccacaagggtatgcctcataagttctaccatggtcgtactggtcgcatctggaatgtcactaaacgtgccgttggtgttgaagtcaacaaacagattgggaacagaatcataaggaagaggatacatgtgcgtgtggagcatgtgcaacagtcaaggtgtgctgaggagtttaaactcagaaagaaacagaacgatgtgcttaaggctgatgctaaagcccagaggtgagactatcagcaccaagagacagcctaaaggtcctaaaccgggtttcatggttgaaggtatgacattggagactgtcactcccattccttacgatgttgtcaacgatctcaagggtggttattgagttgtttccattttattatcattctctactcagaatttttgcacttgcttttttaattatgtttttgtatcaaacaagactgatttatatacgatatgagttcagattttgttaggaaaaaaaaaaaaaaaaaaaaaagaaaaaaagcggccgctctagaggatccaagcttacgtacgcgtgcatgcgacgtcatagtcttctataacga

SEQ ID NO: 121269 - DNA, 879 bp, Arabidopsis thaliana
aaaaagtagaacaagcaacacaacgcagctaagaaacctccttaaagaacaaagaaaaaacttggtgaaatcgattctcttcaaagatcgtcttcctaatcactttcaacaactcgatcaatccttactgagacgatgccgaagaacaaaggaaagggaggaaagaacaggaagagaggaaagaacgaagctgatgacgaaaagcgagagcttatattcaaagaagatggacaagaatacgcacaagttcttcgtatgctcggtaacggtcgatgcgacgttatgtgcattgacggtgttaagcgtctttgccatatccgtggtaagatgcataagaaggtttggattgctgctggtgacatcatacttgttggtctaagagattaccaggatgataaagctgatgttatactcaagtatatgtctgatgaggctaggcttcttaaggcgtatggtgagcttccggagaatactcgtcttaacgaaggtattgttggtgatcttgatgatgatgatgatgttgttggtgaagattacattgagtttgaggatgaggatattgataggatctaagtttgtttttgttgttggctctctgttccagcttgtattatcaaatttgagatacatatcttcttagatacagaagattgtgatactatcattgttatgtatttctggggtttccagtttcttatcccttactattactggtttgatttgaatccctaaataattcacagaaagttgttatctgattcgaaagaacaaactttcgtgttttgaagaaaaaaaaaaaaaaaaagaacccatagagcggccgctctagaggatccaagcttacgtacgcgtgcaggcgacgtcataactcttctatag

SEQ ID NO: 121270 - DNA, 512 bp, Arabidopsis thaliana
tccaaaacttttgatcccaaattcaacagatatctctgaatctatcgcttccaagggttttctctagcttaatctcagattcgaatcgttccatagtgatactatgccgaagaacaagggaaagggaggaaagaacaggaagagaggaaagaacgaagcagatgacgagaagagagagcttatattcaaagaagatggacaagaatacgcacaagtccttcgtatgcttggaaatggaagatgtgaagctatgtgtatcgatggaaccaagcgtctttgccatatccgtggtaagatgcataagaaggtttggattgcagcaggtgatattgtgcttgttggtttgagggattaccaagatgacaaagcggatgtgatccttaagtacatgtctgatgaggctaggcttcttaaggcttatggtgagcttccagagaatactcgtcttaatgaaggaattgttggtgatcttgaggatgatgatgataataatgatgatgactatgttgagt

SEQ ID NO: 121271 - DNA, 556 bp, Arabidopsis thaliana
  unsure (1)..(556): unsure at all n locations
tgcggccgctctaaacttagggatccccngggctgcaggaaatcggcacgagacttaacgcgccgtcggtgttgaagtcaacaaacagattggcaacagggatcataaggaagaggattcatgtccgtgtggagcatgtgcagcaatccagatgtgctgaggagttcaagctgaggaagaagaagaatgatgagctcaaggctgcagccaaagccaatggtgagaccatcagcaccaagagacagcctaaaggacccaaaccaggatctcatggtcgaaggaatgaccttggagactgtcactccaatcccgtacgatgtcgtcaacgatctcaagggaggctattagttctatcctcccagtgttttgcaggtggtgcttccggatttgaggttctcttcatgtgtcttagccaccatttctgtagaatctcccagatattttatgaaaccgatccttttatctcggttataactatcataaaaggcggccgctttaaaagaatccaggctaaggaagggggccatgcgacgttcatagttcttctattagtgtc

SEQ ID NO: 121272 - DNA, 658 bp, Arabidopsis thaliana
  unsure (1)..(658): unsure at all n locations
cttttgatcccaaattcaacagatatctctgaatctatcgcttccaagggttttctctagcttaatctcagattcgaatcggtccatagtgatactatgccgaagaacaagggaaagcggaggaaaaatgccggctggacatggagttcgagcgagaacgagggatctgttcgcgaggcctttcaggaagaagggttacattcctctatcgacttacctgaggaccttcaaggtcggcgattacgtcgatgtgaaggtgaatggtgcgatccacaagggtatgcctcacaagttctaccacggtcgtactggtcgtatctggaacgtcaccaagacgcgccgtcggtgttgaagtcaacaaacagattgggcaacaggatcataaggaagaggattcatgtgcgtgtggagcatgttcagcaatcaagatgtgctgaggagttcaagctnaggaagaagaaggattgttgagctcaaggcttcagccaaagccaattggtgagaccattagcaccaggggccagcttaaaggccccaaccaggntnattggtcgaaggattnccttgggggctttaatncaatcccgncggttngtaacggtntaagggggtntttgtnttttcccctnttcaatttntccntttagttntncattta

SEQ ID NO: 121273 - DNA, 804 bp, Arabidopsis thaliana
  unsure (1)..(804): unsure at all n locations
accacgcgtccgcggacgcgtgggctaagagtagagactctctcaatcccggcggcgaagatgaagtacaacccaagagtgacctcttctcgcagaaagaacaggaaggctcatttcacagcttcctccagcgagaggcgtgtgataatgagctctcctctctccaccgatcttcgtcagaagtacaatgtcagatccatgccgatccgtaaagacgacgaggttcagatcgttcgtggtacttacaagggacgtgaaggcaaagttgttcaggtttaccgtcgcaaatgggtgattcacatcgagagaatcacgagggagaaggtgaatggaacaaccgtgaacgttgggattcagccgtcgaaagttgtgataacgaagcttcgtcttgataaagataggaaatcgcttttggagaggaaggctaagggacgtgctgctgctgataaggagaagggtactaagtttacgtctgaggatgttatgcagaacgttgattaagtaagaaggaagaagaaatcttcttgaaaggttttatcttttagagttatcttcaatcgctttttaattttcaagttttggatattttggaatgttgtcagtggatctttatggtgctagacatgagaacttatgttttgattttgagtatttgaagtttggttatggaagtttatctctttgtctcaaagaaaaaaaaaaaaaaaggnnnnnnnnnnnnnnnnnnnnnnnnnnnnnnnnnnnnnnnnnnnnnnnnnnnnnnnnnnncnnnnnnnnnnnnnnnnnnnnnnnnnnnnngagacc

SEQ ID NO: 121274 - DNA, 494 bp, Arabidopsis thaliana
cccacgcgtccgcggacgcgtgggtgcgggtgttagggcaaatgctcagcagcctaagctatttgttgggatgattcttatccttatctttgcggaagcgctcgctctatacggcctaattgtaggcatcattttatcttctcgagctggtcagtccagagcagaatgagagcacaaacaaatgttaaaatttccaggtacttccttatcgatcaacttataagtgcggtatgtagtatcgggagccgatattttgtggattcttggtttgggaagcagatgttgccacctcgctttccttggttggtggttacttgagtgtaggatgttatttggttggtacggtaataaaaaaaagagcttggcatttgttttgtattcttgtagtgtctgcatctgtcttgatgaacttgataatattttgtttgtaaagaagtttgcttctgataccatctttgaatgttatgagattaatgctagcttttctactgaac

SEQ ID NO: 121275 - DNA, 586 bp, Arabidopsis thaliana
  unsure (1)..(586): unsure at all n locations
atagaagagctttgacgtcgcatgcacgcgtacgtaagctcggaattcggctcgagatgagctctcctctctccaccgatcttcgtcagaagtacaatgtcagatccatgccgatccgtaaagacgacgaggttcagatcgttcgtggtacttacaagggacgtgaaggcaaagttgttcaggtttaccgtcgcaaatgggtgattcacatcgagagaatcacgagggagaaggtgaatggaacaaccgtgaacgttgggattcagccgtcgaaagttgtgataacgaagcttcgtcttgataaagataggaaatcgcttttggagaggaaggctaagggacgtgctgctgctgataaggagaagggtactaagtttacgtcttgagggtgttatgcagaaccgttgattaagtaagaaggagagaggaaatcttccttgaaaggttttcccttttggggttatcttcaatccctttttaatttcccagttttggatattttggaattgttctcggggcctcttgggcgaccataggaccnttttttttntttnaagantttaaggtttgttttggaaaaaaaaat

SEQ ID NO: 121276 - DNA, 744 bp, Arabidopsis thaliana
  unsure (1)..(744): unsure at all n locations
cagcttttattccaactcactatagggaaagctggtccgcctgcaggtaccggtccggatttcccgggtcgacccacgcgtccgcccacgcgtccggatccatgccgatccgtaaagacgacgaggttcagatcgttcgtggtacttacaagggacgtgaaggcaaagttgttcaggtttaccgtcgcaaatgggtgattcacatcgagagaatcacgagggagaaggtgaatggaacaaccgtgaacgttgggattcagccgtcgaaagttgtgataacgaagcttcgtcttgataaagataggaaatcgcttttggagaggaaggctaagggacgtgctgctgctgataaggagaagggtactaagtttacgtctgaggatgttatgcagaacgttgattaagtaagaaggaagaagaaatcttcttgaaaggttttatcttttagagttatcttcaatcgctttttaattttcaagttttggatattttggaatgttgccagtggatctttaatggtgctagacatgagaacttatgtttgattttgagtatttgaagnttggttatggaagtttatctctttgtctcattcctttataatgatgtgtttcntgtattgtctgcatctgtcttgatgaacttgataatattntgtttgtaaagaagtttgcttctgataccatctttgaatgttatgagattaatgctagcttttctactgaacaaaacattncattaaaa

SEQ ID NO: 121277 - DNA, 527 bp, Arabidopsis thaliana
acaactttatctcccaagcccgaaaactcctcttcaccaacttaaaccctattaactaatcccaacaatcagatgtttcgaattcaacaaccagctcaggccataagattcatcccggagaaacaagaacgatgacaacacataaacatagaagaacagagaaaaatctctgttttaagcaatactacaaatggatcctctgttttatcctcactctctatttttttgcttccttctttgtcgaccatgatcaagatcatagatcttctacttccatatcaaagcatcttcttactaaccataaacctaagcttttcgcttctcgtgccatgtttgaatctaaaatccatgatcacaaacttgggtttacctctcaacaacctaacatcaaaacagacgtattcaacaatttgaaaatctacgtctatgacttaccttcaaagttcaacaaagactggttagccaatgatagatgcaccaaccacctctttgccgcggaagtggctctccataaggcgtttctcagc

SEQ ID NO: 121278 - DNA, 642 bp, Arabidopsis thaliana
  unsure (1)..(642): unsure at all n locations
nnnnnnnnnnnnnnnnnnnnnnnnnnnnnnnnnnnnnnnnnnnnnnnnnnnnnnnnnnnnnnnnnnnnnnnnnnnccacgcgtgcgaaacaaacaaaaaatctagtgttcggctctaacacgctcgacgaccatggcggtctcgtttaatacaacgcttcaccagccttctctgagtccgagctgtagcatcaagctttattctgggttaaagcctcaatctgcaagctttttggcaagtgggtatcagaatttgaacaaggagttctatggaagagtttataagagtctgcaatctgggactgggaaagcgagcaggtcacgggtaaagatgatgccaataggaacaccgagagtaccctacagaaaccgagaagaagggacttggcaatgggttgatatatggaatgccctttatcgagagcgtgtaatcttcattggacaaaacattgatgaagagtttagcaaccagatattagcaaccatgttgtaccttgatactcttgatgactcgaggaggatttatatgtacctaaatggtccgggtggtgatcttactccaagtctagccatctatgatacaatgaagagcttgaaaagtcccggttgggacacattgcgttgggcttgcatacaaccttgc

SEQ ID NO: 121279 - DNA, 387 bp, Arabidopsis thaliana
aagctcaatattctcttctttcattggactcgatcaagtttgagcttagcttttaaaaaaagagagaaacaaatcatgaggacaatggttgatttaggaaagcaaagagatcataactatcaccacatgcaaatcataaccactcctacctccgtggattgttctcgcgaattccgtcaccgacgaacacttcgttcactcatcgaatgcatgattccatactgttgcacttaccaacaacagccataccaagacgacaccctttcagtctcatccacttcatcttcgtcttcatcctcagaccactcttcctcctcccagagtagcagtaccgtatgtggaactttcttcggacaccgtcgtggccgagtcagcttctgccttcaa

SEQ ID NO: 121280 - DNA, 467 bp, Arabidopsis thaliana
  unsure (1)..(467): unsure at all n locations
caaacgnatgcttcaggnttnnccccgatcnggagtttccccttgatccatcccctcgcacatcaggcgagattgcaggtcctggatggggaagatagtagtaacaacgggaagcgtggaccgagtattggacagactgtaagaaacttggttagagaaggtggatggacggcttgttatagaggattgggaccaagatgtgcttcaatgtcaatgtctgcaacaactatgatcactacctacgagttcttgaaacggctttctgctaagaaccatgacgggttttattctaaatcatagtgataacaactgggaatccacatagaagaatcttttatggaaatgtctctagttttcttacttatcttgttctttatctagctcttctgctatttcatttgtttccagtcatatgtaaggaatgtgttaaattcagttgtttttaaataaataaatgttctttccac

SEQ ID NO: 121281 - DNA, 403 bp, Arabidopsis thaliana
acggacgcgtgggtcggtcgttacggtgtttagagtggagcggtatatggattcaggagctgtggatatggttcacaaatggcaatcggttggtccgaaaactgatccgaatctgtttatgagaatgttgattcaaccagtgacgaggaagaaggtaaagactgtgagagcttctgtggttgctctgtttttaggcagagcagatgaagttgttgctttgcttagtaaggagtttcctgaattgggtttaaagaaggagaattgttcggagatgacttggtttcagtctgctttatggtgggacaatcgtcttaatgctactcaggttgatcctaaagtgtttcttgatcggaatctcgatacctcgagtttcggtaagaggaaatcggattacgtcgcgact

SEQ ID NO: 121282 - DNA, 725 bp, Arabidopsis thaliana
tagcaatggcgtctggagcagtagcagatcatcaaattgaagcggtttcaggaaaaagagtcgcagtcgtaggtgcaggtgtaagtggacttgcggcggcttacaagttgaaatcgaggggtttgaatgtgactgtgtttgaagctgatggaagagtaggtgggaagttgagaagtgttatgcaaaatggtttgatttgggatgaaggagcaaacaccatgactgaggctgagccagaagttgggagtttacttgatgatcttgggcttcgtgagaaaccacgcgtccgaacaatttccaatttcacagaaaaagcggtatattgtgcggaatggtgtacctgtgatgctacctaccaatcccatagagctggtcacaagtagtgtgctctctacccaatctaagtttcaaatcttgttggaaccatttttatggaagaaaaagtcctcaaaagtctcagatgcatctgctgaagaaagtgtaagcgagttctttcaacgccattttggacaagaggttgttgactatctcatcgacccttttgttggtggaacaagtgctgcggaccctgattccctttcaatgaagcattctttcccagatctctgggatgtagagaaaaagtttgggctctattatagtcgggtgcaatcagaacaaaggttgctgctaaaggtggaaaagtagagacacaaagagttctcctgggacaaaaaaggggtcgc

SEQ ID NO: 121283 - DNA, 452 bp, Arabidopsis thaliana
catttctctaccccaccttctgctctgcttccgagagctcagtgtacctcgccatggaaccaaggcaccatggccagcttcgacgatgagcatcgtcattcctcattctcggctaagatttgcaaagtctgtggcgatgaggtcaaagacgatgacaatggtcagacttttgtggcgtgtcacgtgtgcgtttacccggtttgcaaaccttgctatgaatatgagcgtagcaacggtaacaaatgttgccctcaatgcaacactctttacaaacgccacaaaggctctccaaaaatcgccggagatgaagaaaacaatggtcctgatgattcagatgatgagttgaatatcaaatatcgccaggatggttcctccattcaccagaattttgcctatggatcggaaaatggagactacaacagttagcagcaatggcgtccaaatggtcgagc

SEQ ID NO: 121284 - DNA, 703 bp, Arabidopsis thaliana
aagaaattgtcagtgcatatgaactgcttgatcactctgattttggattctgtttcagcgatgtggtggtcaagttacttccagaaggaaaatttgatccaaatgcagacacaatcgtcgctacagaggcgaaacacctacttacagagagtgactacagtggcgcatattttttgtcaagtattggtgttgttacaggttttaaaaatggttccgtgaaggtgaaatgggccaatggttctactagcaaggttgcaccatgtgaaatttggaaaatggaaaggtctgaatattccaactctagcactgtaagttcggaaggcagtgttcaagatctaagtcagaagattagtcaatcggatgaagcatcttcaaaccatcaggaaacgggtctggtgaagctctacagtgttggtgaaagttgcaacgagaacattccggaatgtagttcatttttccttccaaaagctgccattggatttatcacaaaccttgcatcaagcctttttggttatcagggttccacttcggttataagttcacattcacgttgcaatgattctgaagatcaaagtgactctgaggtccttgttcaagaaacagcagaatcatatgacaactctgaaacaaattcaggtgaagtggatatgaccaccacgatggtcaacatacctatagaaggaaaaggaattaacaagacact

SEQ ID NO: 121285 - DNA, 773 bp, Arabidopsis thaliana
  unsure (1)..(773): unsure at all n locations
aatttatccaaaattaaaatgcgtacaagcaaagcttcagtgacccaaacatggctgctttacacacagctttgtctttggaaagatctcataatccgctatgtccgtcagatcataagaagagcaaaatcgatgcttttcagtcaaaacatggtcgctgattccgccgagatcagtgttatcgatgtcaagtctcatctctccgttgcgaaagatcctagtaactttcagattgccgaaattcgaattcatgattcaatttgtattgatattccgagctctgaagaaacgcctcttttagaatcgatcaagagttgttctgcaactactattgaagagcatgttactgagtttgtaccaaatataagctcagggagttatgcagataagggtgactaccgggagtacatggaagatgaacacatatgcatagacgacctttcagatcatcttgggtcttccttttacagatttccggtgcctatggctttctacggtgtgtttnatggccatggtggatctnacgcatcacagtatataaaagagaatgctatgagcttgtnctttgaagatgctgtttttcgacaatcgccctctgttgtggactctcttttcttgaaagaactggagacatctcaccgggaagcttataggctttctgatcttgcaatgngaggncggaaagaatagttagtaagttcgtgcggnaacaaaccnganttnnntgcnccttggaaatcggaaggccatttaatgggcnncnaatgtttggg

SEQ ID NO: 121286 - DNA, 612 bp, Arabidopsis thaliana
  unsure (1)..(612): unsure at all n locations
nnnnnnnnnnnnnnnnnnnnnnnnnnnnnnnnnnnnnnnnnnnnnnnnnnnnnnnnnnnnnnnnnnnnnnnccacgcgtccgcagaaacattttgatgttaagtttttgaaaaaatcgcgagtttctggatctgtatactttcttagaggagattttgatagcatcgtttacaggagtaagatccgggaatggcaatggaggttggggagatgtctcagccggaggcgacggcgagtcttctctctctcgcttccgccactcagcaaccgtacgtctccgagctcctctctttcactcttgatcgtctccacaaggaaccggagctgcttcgagtggatgcggagcggattcagaggcaaatgcaagaggtggctgttggaaattaccgcgcgtttatcaccgctgctgatgctttgcttgcgatccgtcaggaagtttcttccattgataagcatctcgagtctctgattggcgaagtcccaaaactaacgtctggttgcactgaatttatcgattctgctgagaatattttggagaagaggaagatgaaccaagcattgctggcaaatcacagcactcttcttgacttgcttgagattcctcagcttatg

SEQ ID NO: 121287 - DNA, 874 bp, Arabidopsis thaliana
  unsure (1)..(874): unsure at all n locations
gattttccnnnnnnnnnnnnnnnnnnncnnnnnnctatacggttagctggtacgcctgcaggtaccggtccggaaatcacagatcgaaatcttagagaagaagaaaagaaaaagaagagaaatgacagagaagaaagagatggaagtggtgaaagggctcaacgtggagagatacatgggccgttggtacgagattgcttctttcccatcaaggtttcagccaaagaacggcgtcgacactcgcgccacctacacccttaaccccgacggtaccatacacgtcttgaacgaaacgtggagcaacgggaagaggggttttatcgaaggcagcgcctataaggccgatcctaaaagcgacgaagccaagctcaaagtcaagttctatgtccctcctttcctcccaatcattcccgtcaccggagactactgggtgctctacatcgatcctgactaccagcacgctctcattggccagccttccaggagttatctctggatattgagcaggacggcgcaaatggaggaagagacgtataagcagctggtggagaaggcagtggaggaaggttatgacatcagcaagcttcacaagactcctcagagtgacacaccacctgagtccaacactgcccctgaagactccaagggcgtttggtggttcaaatctctcttcggcaaatagattacacggcacacaaagactttgtttcacctctttgatccttttgtctgtgtaatatactaccccctttgtctactctagttatcttccatcatctgcttttgtctatttacgacatcttcatatagttatgcaaagtcgtctcttttaccataaggaagcgcacacaaattcaatcagatccaatctggg

SEQ ID NO: 121288 - DNA, 813 bp, Arabidopsis thaliana
actatacggtaagctggtacgcctgcaggtaccggtccggaattcccgggtcgacccacgcgtccgatcgaaatcttagagaagaagaaaagaaaaagaagagaaatgacagagaagaaagagatggaagtggtgaaagggctcaacgtggagagatacatgggccgttggtacgagattgcttctttcccatcaaggtttcagccaaagaacggcgtcgacactcgcgccacctacacccttaaccccgacggtaccatacacgtcttgaacgaaacgtggagcaacgggaagaggggttttatcgaaggcagcgcctataaggccgatcctaaaagcgacgaagccaagctcaaagtcaagttctatgtccctcctttcctcccaatcattcccgtcaccggagactactgggtgctctacatcgatcctgactaccagcacgctctcattggccagccttccaggagttatctctggatattgagcaggacggcgcaaatggaggaagagacgtataagcagctggtggagaaggcagtggaggaaggttatgacatcagcaagcttcacaagactcctcagagtgacacaccacctgagtccaacactgcccctgaagactccaagggcgtttggtggttcaaatctctcttcggcaaatagattacacggcacacaaagactttgtttcacctctttgatccttttgtctgtgtaatatactacccccctttgtctactctaaaaaaaaaaaaaaaaaaaaaagggcggccgctctagaggatccaagcttacgtacgcgtgcatgcg

SEQ ID NO: 121289 - DNA, 768 bp, Arabidopsis thaliana
  unsure (1)..(768): unsure at all n locations
ctggtacgcctgcaggtaccggtccggaattcccgggtcgacccacgcgtccgaagataagaaaaagaagagaaatgacagagaagaaagagatggaagtggtgaaagggctcaacgtggagagatacatgggccgttggtacgagattgcttctttcccatcaaggtttcagccaaagaacggcgtcgacactcgcgccacctacacccttaaccccgacggtaccatacacgtcttgaacgaaacgtggagcaacgggaagaggggttttatcgaaggcagcgcctataaggccgatcctaaaagcgacgaagccaagctcaaagtcaagttctatgtccctcctttcctcccaatcattcccgtcaccggagactactgggtgctctacatcgatcctgactaccagcacgctctcattggccagccttccaggagttatctctggatattgagcaggacggcgcaaatggaggaagagacgtataagcagctggtggagaaggcagtggaggaaggttatgacatcagccagcctcacaagactcctcagagtgacacaccacctgagtccaacactggcccctgaaggctccaagggcgtttggtggttcaaaatcttctttttcggcaaataggttncaangggaacacaaaggnntttgtttcaccntctttgatcccttttggcctggggaaantnactnccccccttttngctnactnaangttattttcccaaaaacngggtttttggnttttttngg

SEQ ID NO: 121290 - DNA, 693 bp, Arabidopsis thaliana
  unsure (1)..(693): unsure at all n locations
gacgcgtaggacgtcgcaacaccctatagtgagtcgtattaaccacagaaggggacctcaaagaaaacatcgaaatcttagagaagaagaaaagaaaaagaagagaaatgacagagaagaaagagatggaagtggtgaaagggctcaacgtggagagatacatgggccgttggtacgagattgcttctttcccatcaaggtttcagccaaagaacggcgtcgacactcgcgccacctacacccttaaccccgacggtaccatacacgtcttgaacgaaacgtggagcaacgggaagaggggttttatcgaaggcagcgcctataaggccgatcctaaaagcgacgaagccaagctcaaagtcaagttctatgtccctcctttcctcccaatcattcccgtcaccggagactacttgggtgctctacatcgatccctgactacccagcacgggtctcattggccagccttccaggggttatctcttggatatttgagcagggccggcgcaatttggaggatgggccggtttaggcaacttttttggagnaggcaatttgtgggaaggtttttttcatttagnaaagntttnnaaaggcttctttaaaggtgcaaaaccacctnngtccaaaaattccccttaaggctttaagggggtttttgggggtnaaaattttttttggaaatgnttnttt

SEQ ID NO: 121291 - DNA, 540 bp, Arabidopsis thaliana
aaaaaaacactactctttccgtcttcttctctctactctattctaattctaaagagagagagaaaagctatggatggatatgaagctactaggattgtgctctctagaatccaaagcttagaccctgaaaacgcatcaaagatcatgggtcttctccttcttcaagatcacggtgagaaagagatgataaggctagcttttggtccagagactcttgttcactctgttatagtgaaagccaagaaagagttaggtctcatgaactgttcaaggtctccgtggagtcatcaagatgagttgattagccctaagaacaaccgtggctcttcactcaatccagcttctttgcccttttacgctaatggaggaagatcttctagggatttaaccaacgatttcgagctcatggatgttattgaacccccagaaggacttgattttttgggctccgtgcatgcgagaagcggtagctgcgttttggacggtttagggatgggtggtgattctgatttagggttggaaggtgtgccctgttcttac

SEQ ID NO: 121292 - DNA, 793 bp, Arabidopsis thaliana
  unsure (1)..(793): unsure at all n locations
accacgcgtccgccgagagaaaccattttctgagagcacactttcgttgacttctctttaaccaatgtctttaaccacagtccctacgctcgccatcagatccggaccatccggtcatcactcgatgccggttcttggttttggaaccgccgcttctccgctaccggaaccaacgatgctgaaagagacggtgattgaggctattaagcttggttatcgccatttcgacacctctccaaggtaccaaacggaggagccgatcggcgaagctttagcggaggcggtttcactcggcttagttcgatctcgatctgaattctttgtcactaccaaactttggtgtgctgatgctcatggtggtctcgtcgtaccggcgatcaaacggagttttgaaaaaccttaaactggactatcttgatctttatataattccattgggccggttagctcgaaacctggtaaatacaagtttcctattgatgaagaatgattttatgccaatggatttcgaagttagtgttggtctggaaaatggaggagtgtcagagacttgggctcgcaaaatgcataggagtaagcaatttttcatgtaagaagcttcaacacatactctctatcgcgacaatcccgcctagcgtcaatcaagttgagatgagtccaatatggcaacaaagaaagctaagggagctttgtagatcgaacgacattgttgtcacagcgtactcggtgttgggatctagangagctttttggggaactcncanaattatggaatctgatgttctcaaagaaa

SEQ ID NO: 121293 - DNA, 581 bp, Arabidopsis thaliana
  unsure (1)..(581): unsure at all n locations
aactgacttagctaatttccttcttcattatatcataattccaaatttcgcaaactaattttttcactttcttcttcgttgatctctctgaaagcttctcttcttcttctcaccatgtctggttatcctccatcaagccaaggttacggttacggcggtaatccaccacctcctcagccaccgtacggatcaaccggcaataaccctcctccgtacggatcatccggcagcaatcctcctcctccgtacggatcatcagcctcctcaccgtacgcagttccctacggagctcagcccgctccttacggtgcaccaccgtcagcaccgtacgcgtctcttccaggagaccataataagccgcacaaagagaaacctcacggcgcctcctacggatcttcatctcccggtggntacgggtgctcatccatcgtntggaccttccgactacggtgggtacggaggagcgcgaagaagtntgncatggaggaggtacggagagngcgagnagttttggcatgngggggtnaggagtctcttcgaagnttttntnaagccctttntgttttggtcctggggttttc

SEQ ID NO: 121294 - DNA, 930 bp, Arabidopsis thaliana
  unsure (1)..(930): unsure at all n locations
agctannnnnnnnnnnnnnnnnnnnnnnnnnnnnnnnnnnnnnnnnnnnnnnnacggacgcgtgggcggtcgcgtgggttacctttaacaaaaaaaaaatggcaagcgcgaatccagaaaccgccaaacccacgcctgcaacggtggacatggctaatccagaggagcttaagaaagttttcgaccagtttgactccaacggcgacggcaagatctcagtcctcgaactcggcggtgtgtttaaggctatggggacttcctacacagagacggaactcaaccgcgtgctcgaagaagtcgatacagatcgcgacggttacatcaacctcgacgaattctcaactctctgtcgctcgtcttcctccgccgcagagatccgtgacgctttcgatctctacgatcaggacaaaaacggactgatctccgcctctgagcttcaccaggtgcttaaccgtctcgggatgtcttgctctgttgaagactgtactcgtatgatcggacctgtggatgctgacggcgatgggaatgttaatttcgaagagtttcagaagatgatgacgtcgtcttctctcctcaacagcaatggatccgccgctcctccttcgacctagggagttttccagatttcagatctggatttcgggaataagaataactatggaaattaggtactcttttcttcttaaatgtgatcaatcatcatcagtctaacttcaatcggatctcttttcattcatacatggttgagatttagatctgaatatggatatatatcgtttgctctccttgttcaaaacaaatttggtttctaatttcttactccgctcncggggtnattgnncaagtttcganctttntttnnnnnnnnnnnnnnnnnnnnnnnnnnnnnnnnnnnnnnnnnnnnnnnnnnnnnnnnnnnnnnnnnnnnnn

SEQ ID NO: 121295 - DNA, 527 bp, Arabidopsis thaliana
  unsure (1)..(527): unsure at all n locations
nnnnnnnnnnnnnnnnnnnnnnnnnnnnnnnnnnnnnnnnnnnnnnnnnnnnnnnnnnnnnnnnnnnnnnnnnnnnnnnnnnnccacgcgtccgctgaatcttcttctccgatcttcaaacattccggccgccaccgagttcttagccgttacaatgtcttcctctatgaacgtagcgacgatgcaagcactgactttctctcgccggcttctcccttctgttgcttctcgttatctctcttcttcttctgtgaccgttactggatactccggtagaagctcggcttacgcgccttctttccgttcgattaaatgcgtctctgtttctccggaagcttcaatagtaagtgatacaaagaagttggcagatgcttctaagagtacaaaccttataccaatttaccgctggatattctctgatcagcttactcctggtcctggcttaccggtgttgggccaaagaagatgaccgggaagctcctagctttcttttcgagtccgttgagcctggttctcaaatgtctagc

SEQ ID NO: 121296 - DNA, 700 bp, Arabidopsis thaliana
  unsure (1)..(700): unsure at all n locations
nnnnnnnnnnnnnnnnnnnnnnnnnnnnnnnnnnnnnnnnnnnnnnnnnnnnnnnnnnnnnnnnnnnnnnnnnnnnnnnnngaccacgcgtgcgcccacgcgtccgacacttttcaagaaaaaaatagaatactgagtactaaactggaaaccctttataagcaaaaagaccaatagttaaaagttaattaagatttggcttaaggcgctttgctttattagagaggaaggaacgaaccatcatagaaatctctccttcgttcaagtttttctctactgtgttggttgagcaatcgagtgatggttattgcggtggcgacgacgagctccattgtttccggaatcaagctttcagggatcttaacttcgttcaacgccgtagatgatgcgtccagtagttgcggaagaagcaacttgaccggagttagaatttttccgacattgagtcggcgacgattctcatcgatcggagctgtttccccaattcgtggggatgctcaatcttcctttagtcgcagctctttcgcttgctctcagaatctcggtttgagcggtggatttagtgcatctgaagctctgccacctgcttgtgcagaggctagcccttcttccattaaatcttacaaccagatgattgaaaccttgattgatcgggttgatctatctgatactgatgctgtattattttcttgagtttttg

SEQ ID NO: 121297 - DNA, 1550 bp, Arabidopsis thaliana
  unsure (1)..(1550): unsure at all n locations
nnnnnnnnnnnnnnnnnnnnnnnnnnnnnnnnnnnnnnnnnnnnnnnnnnnnnnnnnnnnnnngggtcgacccacgcgtccgtagtgatgcagcaaccaccgtcaaacgccgccggagctggacagataccatcaggacaacagcatttgtggatgatgatgcaacagcagcagcagcagcagcagatgcagttgtctgcggcgccactaggtcaacatcagtacggtattggatctcagaatccaggatccgctagcgatgttaagtcgttgtggatcggagacttgcagcaatggatggacgagaactacatcatgagcgtctttgctcagtctggcgaggctacatcagctaaagtcattcgtaataagctgacgggacaatctgaaggttatggattcattgagttcgtcagccactctgtagcagagcgggttttgcagacttacaatggtgctcccatgccgagcactgaacagacgtttaggctcaactgggctcaggctggggctggagagaaacgattccagactgaagggcctgaccataccattttcgtaggtgacttggcacctgaggtgactgactatatgctctcggacacattcaagaatgtgtatgggtctgtcaaaggggctaaagttgtgcttgacaggaccactggaaggtccaaggggtatgggtttgttaggtttgcggatgaaaatgagcagatgcgtgccatgactgaaatgaatggtcaatactgctcgacaaggcctatgcgtattggtccggctgccaataagaatgctcttccgatgcaaccagctatgtatcaaaacactcaaggagcaaatgctggagataatgatcctaataacacaacaatttttgttggaggtctggatgctaatgttacagacgatgaattaaagtcaatttttggtcaatttggtgaacttcttcatgtgaaaatacctccaggaaaacgttgtggattcgttcaatatgccaacaaggcgtctgcagagcatgcactttcggtgctgaatggaacacaattaggtggacaaagcatccgtctttcgtggggacgtagtccaaacaagcagtctgatcaagcgcaatggaacggtggtggatactatggataccctccacagccacagggcggctatggttatgcagctcaaccaccaactcaagaccctaatgcgtactatggtggttacactggctatggcaactatcagcagcaacgtcagtgaaacatcaacatcagctatttctaccaatgtcttggaacaaaagatgagcgattgtgtcttattaggacttctagattaaaagtgctctctttttgtttgagttttattttgcaaatgagtcgatcttgaatttgctatgaacaaagtgtttactgaatgttgaaactttattctgttgttttttaaaataaatatttatccaaaatcaaaaaaaaaaaaaaaaaaaaagggcggccgctctagaggatccaagcttacnnnnnnnnnnnnnnnnnnnnnnnnnnnnnnnnnnnnncgcc

SEQ ID NO: 121298 - DNA, 582 bp, Arabidopsis thaliana
  unsure (1)..(582): unsure at all n locations
nnnnnnnnnnnnnnnnnnnnnnnnnnnnnnnnnnnnnnnnnnnnnnnnnnnnnnnnnccgacctctcttcactcttttcctctctctccctccctccctcttccattaaatctttgtggttctcttttattgttttgatactgtgctctgcttcggagagtgtagaaagagacagagctaaagtctctgtgtttcttctcagcaggactaaaaggaaaaaaggaaatcgattgctaatgtcgggtgagaaacaagcggaggagtcaatagtagtctccggggaggatgaggtggccggtagaaaagtggaagattcagcggcggaggaggatattgacggcaacgggggcaatggatttagtatgaagagcttcctctggcatggcgggtccgcttgggacgcctggtttagctgtgcatcaaatcaagtggcacaagtgctgttgacgctgccgtattcgttctcgcagttgggaatgttatcaggaatattgcttcaaatattctatgggttaatgggatcttggactgcttatctcatcagtgttctttacgtcgagtatcgtgcccgtatggagaaac

SEQ ID NO: 121299 - DNA, 419 bp, Arabidopsis thaliana
atctgtcaaccaaaaaagagcttttgcgaactcttcttatcctttcaatttaacagagtcatcagcttgaagacgaaagcctttctaattccaatcttcttcacttgtatgacacgttcgtctactcttgcgcttggtcggttttcttaggatttttgcacaagaatgatcaacgcatgattcggattccaggatagagaatccatggctactttcaatgttctttgtagcaatcgatttagattcaatggaggttattctccggagaaatttaatagaaaggtgtcttcgaggagtagtgagcttaatgtttgtgtctctagaatcaggactcaatcgtttagttgcaggagacttggtgggtttatggaaattggtgaaaccagattaggggttattagagttcatggcgattctcg

SEQ ID NO: 121300 - DNA, 726 bp, Arabidopsis thaliana
cgaaaaaccgttatgagagcatagtgctactagtggatcggtaaacaataaatgccgtaataaaaatctaaacgtcacgcgcgtgatgaaaaaacaggaagtaaatcgtcgacgtcgttattcaactaccatttctggatcacaactcccacacactcttttaaatcaaaacaaaatatctctttcctgttagagacaatggacggattgatcagaggtttggtcgacgtggctatcggaggaaaccaacgccgcggcggagacgatggtggtgatgatgaaggcaactcgagggacgagagatccagatctacttgggctaatgtggtttccggtgaggaagaggatcagaatcgcgcgggaggatcgtcgcacggccgtcgccagaattcagaggagaatcaatgggagaagaagggcgaaaggcttcccacaaggcattcacaatcacatgaggaggaccaggaagagaatacatatgcggctaaagtgagcgagaaacaagacttctcggagagccagcaagaggaaaatgatggttgggaaactgtgggcaaaaagaaacctgcaaggcaatcacataaggtccagaaggagcaatggcaagattacaaacgcccagcaagtgaacaacactactcagacgaagttgaaacttatggaaacctagaaccctcacaactagagctctcaggtctctcagaagcttgcaacaaactgtgggag

SEQ ID NO: 121301 - DNA, 517 bp, Arabidopsis thaliana
  unsure (1)..(517): unsure at all n locations
nnnnnnnnnnnnnnnnnnnnnnnnnnnnnnnnnnnnnnnnnnnnnnnnnnnnnnnnnnnnnnnnnnnnnnnnnnnnnnnnnnccacgcgtccgattctagtttctgctatcaaacacattttgacatctatccaattgctatcgtgcacatttgaacacaaactttgtttcaatttagcgtttacagtcgcagacgcaatcgcggttaagtgaagcgcatcgtcactttccacattcatagtaatatgcaacaactgagtaacagaaatttgtaatcgaactcagatttcgaagaagcagatctcacaatgtctggaaaacagcaaaatcatcgttctacttcctccagacccagatccaaaaccctaatcctcatcggctctctcttcaccgtctctctactcgtcatcctctacacctcttcttcctcctcccgagcctccatctccaatcccaaccccgtcggaccgaccagagacgtccttccgtacctcgcttgacattttctaatatataa

SEQ ID NO: 121302 - DNA, 766 bp, Arabidopsis thaliana
  unsure (1)..(766): unsure at all n locations
nnnnnnnnnnnnnnnnnnnnnnnnnnnnnnnnnnnnnnnnnnnnnnnnnnnnnnnnnnnnnnnnnnnnnnnnnnnnnnnnnnccacgcgtccggcgcgtggccgtttcatcagcctatctacggacctcagtctccgccgttagtcgcacctaacggcgacgtcggagttgacggaatgattataaacatcgcgactcttcttgttaacaccgtaacgaatccgtctccagaagctgtctcggcttgtaccgggatattcggttcgggtgcttacccgggttacgcgggtcgggttctcgtagacaagacgagtggagcgagttacaacgctttgggtctcgccggtagaaaatatctattgccggcgttgtgggatcctcagacttcgacgtgtaaaactatggtttgaattttagatggtctgtgaacgagacacgtggctagaattgatggtgattaaaagcttgttgtagtcaaagaaagtttgtagatatctatcgcgtctggttcggagtttggggaaagggatgtgtttgttttgttattttgttatgccctgtgtaaattcgatctttggaaatatgtgaaagatagattcatatatctattttaataataacgatttgtagtttccccctcaaaaaaaaaaaaaaaagggcggacgctctagaggatccaagcttacgtncgcgtgnnnnnnnnnnnnnnnnnnnnnnnnnnnnnnnnnnnnnnnnnnnnnnnnnnnnnnnnnnnnnnnnnnnnnnn

SEQ ID NO: 121303 - DNA, 444 bp, Arabidopsis thaliana
aaaaaaacaatttcttctagcgaagaagcagaattaatcaaagttcagagctttcactatgaatatcccaagtggaaccttctcaagatctgatcatttccatgcttcaagtgatgcttctctcttttcaagctctcttcctcttattcaacaccaaaacatcaaccctcgtgacagctaccatcagtctgttgatgaaatggcttctggcttagaccattttagtggaggcattggcaatatgcttgatgatggtgactcacatccaatcggaaacatgcttcctgatgatgaggaagagcttttctctggtctaatggatgatttaaacttaagttccttgccagctacgttggatgacttggaagattatgatttattcggtagcggaggaggtcttgaattggagactgatccatatgacagtctaaacaagggcttctc

SEQ ID NO: 121304 - DNA, 1070 bp, Arabidopsis thaliana
  unsure (1)..(1070): unsure at all n locations
acagaaagaagggtttcaatctcattaaagagaaaagaaacgattagagaaagagaagagggtagagacttcttttctttgtttctgtggaggctcttcttcttcttcttctctgtctctgtctctgtctctctgtaatcttctgtgctctccacaaatttgtctctcctctctctcgccgactccacaaattttgagcttctttttttgaagttcttgagaacaagtgaaagagcttaatatccacaagactcttgtttctttcttaaatggctaaagtttattggccttatttcgatcctgaatatgagaacttgagctccagaatcaatcctccaagtgtttctatagataacactagctgcaaagaatgcactcttgtcaaggtggacagtatgaacaaacctggaatactacttgaagttgtgcaagtcctaaccgatctcgatctcactatcactaaagcttatatctcttctgatggtggatggttcatggacgtattccatgtcaccgatcaacaaggaaacaaggttactgatagcaaaaccatcgattacatcgagaaggtgttaggaccaaagggtcatgcttcggcttcacaaaacacttggcctggtaaaagagtcggtgtccattcattaggcgaccacacatcgatagagattattgctcgtgatcgtcctggtctcttgtcggaggtttcagccgtactagcagacctcaacattaatgtggtggcagctgaagcatggactcacaaccgtaggattgcgtgtgtcctctatgtgaatgacaatgcaacttctagagccgttgatgatccagaaagattgtcttccatggaagaacagcttaacaatgtgctgcgtgggtgcgaagaacaagatgagaaatttgctcggacgngtctctccattgggtcgactcacgttgatcgaaggcttcatcagattgttttccgctgctaggggcttcggggcagttcctaaggtttntncattctccctttttttcgggtttngggcccaaaataccgggttagcatttttaaggaaaagttacnccgg

SEQ ID NO: 121305 - DNA, 751 bp, Arabidopsis thaliana
  unsure (1)..(751): unsure at all n locations
tccaccggattcattaacctggttttcaaattcgcggccgccttctcggcctcggcctctgcctctctgaaatcttctgggctctccacaaattggtctctcctctctctcgccgactccacaaattttgagcttctttttttgaagttcttgagaacaagtgaaagagcttaatatccacaagactcttgtttctttcttaaatggctaaagtttattggccttatttcgatcctgaatatgagaacttgagctccagaatcaatcctccaagtgtttctatagataacactagctgcaaagaatgcactcttgtcaaggtggacagtatgaacaaacctggaatactacttgaagttgtgcaagtcctaaccgatctcgatctcactatcactaaagcttatatctcttctgatggtggatggttcatggacgtattccatgtcaccgatcaacaaggaaacaaggttactgatagcaaaaccatcgattacatcgagaaggtgttaggaccaaagggtcatgcttcggctttcacaaaacacttggcctggtaaaagagtcggtgtccattcatttaggcgaccacacatcggttaggggatttttgcttcgtgaatcgtccctgggctctttgtcggggggtttcacgcccgtacctagccaggccctcaaaccatttattgtgggttggaaagtttntggtttgggnttttaacccgttgggttttgggngtgncccccttttgng

SEQ ID NO: 121306 - DNA, 726 bp, Arabidopsis thaliana
  unsure (1)..(726): unsure at all n locations
actccgtgtnatcaacgctggtatgaaccaagagctcttnttctnagtcgccaaccaccagttcacagttgtagaaactnattccgcctacacgaaaccattcaccacaaatgtcatcatgatcggtcctggccaaaccactaacgtcctcctcacggcaaaccagagaccaggccgctactacatggcagctcgagcctacaacagcgcaaacgccccgttcgacaacacaaccactactgctatcttacaatacgtcaacgctccaacaagacgtggccgtggtcgtggtcaaatcgctcctgttttcccagtcctccccgggttcaacgacaccgcaaccgcaactgctttcaccaaccgtctccgatactggaaacgagctccagtaccacaacaagtcggacggggaacctctttttcaccgtcggattagggctaatcaactgtgccaacccaaacagtccccgttgccaaggtcctaacgggacccgattcgcagcaagcatgaacaacatgtccttcgtgctaccacgaagtaactccgtcatgcaagcatattaccaaggcaccccaggaatcttcacaacggattttccgcccgttccaccggtgcaattcgattacacaggtaacgttagccgcgggttatggcagcccataaaaggaaccaaagcttacaagcttaagtacaaatctaatgttcagattgtgttacaagacact

SEQ ID NO: 121307 - DNA, 710 bp, Arabidopsis thaliana
tgcggcactggtccggaatctccgggtcgacccacgcgtccgatcatttctttctctcaccaaccaacaagttctcctttctacccatttcgtctccttcattttgacgttttctttagatctgttaataatcccatccatggcttggtctagtcactagtggtgttatctctctgtgtggaataaaaagcaaggttttttaatcacttggattgttttaagatatggcaactttgaacccttttgatttgttggatgatgatgctgaggatccaagccagctcgctgttgccatcgagaagattgataagtccaagaaatctggacaggtttcgagcttgcctgctaagtcagctcctaagcttccatcgaagccacttcctcctgctcaagccgtgagagaggcaaggagtgatgctccacgtggtggtggaggccgtggaggatttaaccgtggtcgtggtggttacaaccgtgatgatggtaacaatggatattcagggggatacactaaaccctcaggtgaaggagatgtttcaaagtcttcttacgagaggcgtggcggtggtggtgctcctcgtggttccttccgtggtgaaggtggtggacctggtggtggtcgccctggggggttcaccaatgagggtggtgatggggaacgtcctcgaagggcctttgagcgtcgtagtggaactggcagagggagtgac

SEQ ID NO: 121308 - DNA, 450 bp, Arabidopsis thaliana
  unsure (1)..(450): unsure at all n locations
ctcatccaaaaggccaagatctttcacnacggatctatcagtttgattgaggaaccttgccgttctactcagcttgtagctatgaaaatcgctaaggctgcagggagtcttttatcttatgacccgaatttgagattgccgttgtggccatcagaagaagctgctaggaaagagataatgagtatctggaatttagctgatgttataaagattagcgaagacgagataacattcctgaccggtggtgatgatccttatgatgatgatgtggtgttgcaaaagctctttcatcccaatcttaagctttcttgttgtttcagaagggccctaatggctgtagatactacactcagggagtttacaaggtagagtttgggtggagtaaaaggtgaaagccctgtttgttacaacccggttncaggggattcaattccntgaggcgggtttttt

SEQ ID NO: 121309 - DNA, 685 bp, Arabidopsis thaliana
cactcacttttagggaaagctcgtacgcctgcaggtaccggtccggaattcccgggtcgacccacgcgtacctgttcttttctctctgttcattctcttttctttagcttaattcagcaaaaaatttatctttgtttctctcttttgtttctttcctctgcaaagtaaagttatgagagcttaataatgtttgtctcatcttcaagcttcagatctgattccttgtttctacaagtaattgtctctttctttttcgattaaccaccatttctgtgaagaaaacctttttgcttgcttcaagattcgagtgaggaaaattttagctgaaaatgctggaaattggaagtcccaatgctctgtttttccgtacgaatactacttgtaataatcttctccgtgagcttcagaaaatatgggttgaaattggtgagactgagactgagaaagatagaatgcttatggaattagagagagaatgtcttcaaatctatcaaagacaagttgatgaggctgcaaattctaaggcaaagcttcatcagtctgttgcatcaatagaagctgaagttgcttctttaatggctgcccttggtgtgttaaacatcaactcaccgattaaactggataaaggttcaaaatcattgaaagaaaagcttgcagctgtgacacctctagttgaggaattgag

SEQ ID NO: 121310 - DNA, 1136 bp, Arabidopsis thaliana
  unsure (1)..(1136): unsure at all n locations
cctgctgaagataagcagaagcccagagtggaaagtnctcctntagcagagaaacccaaagcaccatcctcaccacctccacccaaacagtctgctaaagaaccgcagcttcctcctaaggaaagagaaagacgggttccgatgacaagacttcggaaacgagttgcaacaagattgaaagactctcaaaatactttcgcgttgctgacaactttcaatgaagttgatatgacaaatttgatgaagctccgatcccaatacaaggatgcatgttatgaaaagcatggagtgaagttggggcttatgtctggatttattaaagctgctgttagcgcccttcagcatcaaccagttgtaaatgcagttattgacggggatgatatcatatacagagactatgtggatatcagtatcgctgttggtacctctaagggacttgtagtaccagtcataagaggtgctgataaaatgaactttgccgagatagagaagacgataaactcacttgccaagaaggcaaatgaaggaaccatatccatagatgagatggctggcggatcattcaccgtttcaaatggcggtgtctatggaagtctcataagcactccgatcattaatcctcctcagtctgccagactcggcatgcgctcgtttgtgtcacgtccaatggtagtaggaggaagcgtagtgcctagacccaatgatgtatgtcgctcttacgtatgatcacaggctgattgatggtacagaggctgtgtacttcctgcgccgtgtcaacgatgttgtggaggatccacaaaggcttcttcttgacatataaaagatttggtttccaggagtcacaaagtgtatggcttttgccagttatagacctgcagtgtctttaaaacgtttgggggtatcaacaattcttatctttcaagtttctttacagtttcccgagtattgcgggattggaagaataggccacagtgtttacgttcttactttttacacagtttgacacagatatgttcaattttgactgaataagatacccttttgaggttaaaaaaaaaaaaaaaaaaaaagggcggccgctctagaggatccaagcttacgtacgcgtgcatgcgacgtcatagctcgtctatggt

SEQ ID NO: 121311 - DNA, 613 bp, Arabidopsis thaliana
  unsure (1)..(613): unsure at all n locations
ttagagttcatagcctcgtcatatctcctagttccaatggcagcatgatgtgtacgtcaatgagtagagaaggtaggctagacaatgtgtagtngactacgatgatacaggctatgatgtagaggctgtgtacttcctgcgccgtgtcaaggatgttgtggaggatccacaaaggctccttcttgcatataaagattggtttcgaggagtcacaaagtgtctggcttttgccagttatagacctgcagtgtctttaaaacgtttgggggtaacaacaattcttatctttcaagtttctttacagtttcccgagtattgcgggattggaagaataggcctcagtgtctacgttcttactttttacacagtttgatacagatatgttcaattttgactgaataagatacccttttgaggtttttcggattgaatgatttcctaataagatctagacgagagagaagttacatgctttctttgtattaaatagaaaagctgagaaagtgaacatacgttgctttcttactttcaagggaaaaaaaaaaaaaaaaaaaaaagggcggccgctctagaggatccaagcttacgtacgcgtgcatgcgacgtcatagct

SEQ ID NO: 121312 - DNA, 740 bp, Arabidopsis thaliana
  unsure (1)..(740): unsure at all n locations
gacccacgcgtacacttgaggatcgtatggaagcagcaaatgctcttaaaaagcaaatgtgggctgaagcacagttagataacagctgtatgagagatgtacttaagcttgatcttcaagggttagcaagcagcaaaactgaatcaacgataggcctaccaatcattcaaagctctactcgtgagagggatagttttgatagagacccttctcaacttctagatgaaacaaagcccctggaagatctttcgaacgatcttcataaatcatctgctgagagagcacttattaatcaggatgccaatataagtcaagaaaattatgcttcaaagagatcacgctcccaattaaagtcatatataggccacaaagcagaagaggtgtatccataccgatctttgccgcttggacaagatcggcgccacaatcgttactggcattttgctgtatcagtgtctaagagtgatccttgttcgaggctcttatttgttgagctacatgatggcaagtggctcctcaattgattcaagaagaggcttttgatattctnggttgcatcattggataatgcgtgggatcagagagtctcatttacggnttaatgctnncagaagatcngagggtncattcaaaagnggattgcttttaaagntattaaggcttagctngaaaccccnttncntttacgggaaaanagtgttngggaatnaattctccntcangattctttggncccatng

SEQ ID NO: 121313 - DNA, 849 bp, Arabidopsis thaliana
  unsure (1)..(849): unsure at all n locations
cttataaaaccccacaccttccttgtttccttctttctacaccgcactctcttcttctggttcttcttcctctctgttttttctctctctttgtttggaaccaccatggataatgtcaaacttgttaagaatggtgttttgagattgccacctggattcagattccatcctactgatgaagaacttgtggttcaataccttaagaggaaagtttgttcttctcctttgccagcttcaatcatccctgagtttgatgtttgcagagctgatccttgggatttacctggcaatttggagaaagagaggtacttctttagcacaagggaagctaaatacccaaatgggaaccggtctaaccgggcaactgggtctggttattggaaagctaccggtattgataaacgggttgtgacctctagaggaaatcaaatcgttggtttgaagaaaactcttgtcttctacaaaggcaaaccacctcatggctcaagaaccgattggttcatgcacgaatttcgcctctcttcttctcctccgagttttatggggcccactcagaaccgggtactctgtcgtatcttcttgaagaaaagagccggtaacaagaacgacgacgacgacggagatagccgtaatcttagncataataataataacaattcgngtgaccaaattgagntaattacaacaggccaacagntgnttaaaacaaaacccaatcttctttgntttcattggnaaaggaaggnccaccagttttgancctttttcggggtntccttttttcgntcatgtttaagtgggggnnncgcgggggtnttnttttttttccgttgagggncnntggttnaa

SEQ ID NO: 121314 - DNA, 1014 bp, Arabidopsis thaliana
  unsure (1)..(1014): unsure at all n locations
ttttgggaaagctgccacgcctgcaggtaccggtccggaattcccgggtcgacccacgcgtccgcacacacacatttgtcgaaatcttaacaccaatcccaaatcagaaaaatcaaaactttttattttattttatcaaaatggcgcttatgaatggaagcatgaatctatcatcggtcaaatcatcgatgatcaaccaccgtcaaccaaacttctcctccgccgtctccagacccacttctttccggatctccgccgtgcaaaccgacccaaaaacaccagctgcttcatcggcgtcggcggcgacgacgactccggcaacgttgacgaagcccgttggagttaatgtgggtaaaggaaaatgggcaccagagagttggaggacgaagaaagctttacagcaaccggactatccagatttagctgcgcttgaagctgtgctagagacgatcgaagcttttcctccgatcgtgttcgccggagaagctagattgcttgaggaacgattaggacaagcagcgatgggtgaagcgtttctgttacaaggaggagattgtgcagagagtttcaaagagtttaatgcgaataacattcgtgatactttcaggattcttcttcacatgggtgctgtgttgatgttcggaggtcaagtccctgttgttaaggttgggagaatggcgggtcaatttgcgaaaccaagatcggattcgtttgaggagaaagatggagtgaaattgcctagttacagaggagataacattaatggagatgcgtttgattcgaaatctaggattcctgatccacagaggatgattagagcttatttgtcaatctgcagctactttcaatcttttgagagctctttgctacgtcggtggttatgcttgctatgcagaggagttacccaactggaatcttgatttcacctgaccggagagggccaacggggccaggtaccctgagccgagctaacccgtgttgattcaagcncttgggttccagngcacgcngcgg

SEQ ID NO: 121315 - DNA, 392 bp, Arabidopsis thaliana
ccaccaccatctccgatttcgtttataaaaccctcaaattctcagctcaacacttctcaggtttcgtgtaacatttcacacacacatttgtcgagatcttaacaccaagcccaaatcagaagagtcacaactttttacttgattttatcaaagtggcgcttatgaatggaagcatgaaatctatcatcggtcaaatcatcgatgagcaaccaccgtcaaccaaacttctcctctcgccgtctccagacccacttctttccggatctccgccgtgcaaaccgacccaaaaacaccagctgcttcatcggcgtcggcggcgacgacgactccggcaacgttgacgaagcccgttggagttaatgtgggtaaaggaaaatgggcaccagagagtt

SEQ ID NO: 121316 - DNA, 553 bp, Arabidopsis thaliana
tatggtgggtcatacggtgacccaggaggtggttatggtggacctagtggcagttatggaggcgggtatggtagtagcggaataggtgggtatggtggtggaatgggtggtgctggtggcggaggctatagaggaggtggtggctatgatatgggtggagctggagggggaggcgcaggaggatatggtgctggtggtggcggaaacggtggaggatcattttatggaggaggaggaggtagaggtggatatggaggcgggggcagcggacggtaccatccttatggaaggtagagagttcgaccccccgcttgaatcttcttcttacttgttgtgtcatgcttagcatcatgtatggttatcaagattgatagctagtcattgtattttgagagatgaggcttttagggctttgattcccctcagtagtttaaatcaatacattttttagattaaaaaaaaaaaaaaaaaaaagggcggccgctctagaggatccaagcttacgtacgcgtgcatgcgacgtcaaagtcttgtatagttcacataattcaat

SEQ ID NO: 121317 - DNA, 526 bp, Arabidopsis thaliana
  unsure (1)..(526): unsure at all n locations
nnnnnnnnnnnnnnnnnnnnnnnnnnaaaccatacgaagatattgaagacgatgacgacaaatgtgagccttactctggtggccaggcggccatagcgctggaaagatatttgttggaggtttagccagggagacaacttcagctgaattcctcaagcattttgggaaatatggagagatcactgattctgtgattatgaaggataggaaaactggacagcctcggggatttgggtttgtcacatatgctgaggcctctgtggtcgacaaagttatccaagacaatcacattataattggcaagcaggttgaaattaagcggacgggaccatccttatggaaggtagagagttccatgaaagcttgaatcttcttcttacttgttgtggcatgcttagcatcatgtatgggtatcaagattgatagctaggcatttgtattttgagagatgaggcttttagggctttgattcccctgagtagtttaaatcaatacattttttagattataattatctcggggtaac

SEQ ID NO: 121318 - DNA, 536 bp, Arabidopsis thaliana
  unsure (1)..(536): unsure at all n locations
nnnnnnnnnnnnnnnnnnnnnnnnnnnnnnnnnnnnnnnnnnnnnnnnnnnnnnnnnnnnnnnnnnnnnnnnnnnnnnnnnnnccacgcgtccgctcttcgccaacactgttcttgtctatgttcaagataatgttggctggaccttgggttatggacttccaacattaggtttggctatttccattaccattttcttgttgggcactccgttttaccgccataaacttcccactggaagcccattcaccaagatggctcgagtcatcgtggcttcatttcgcaaagccaatgcaccaatgacgcatgacatcacgagcttccatgagctgccttctcttgaatatgagcggaaaggcgcctttccgatccaccctactccaagtttacgattcttagacagagcttcactcaaaacagggacaaatcataaatggaatctttgtactaccacagaagttgaagaaaacaaaacaaatgctgagaatgttaccaatcttgttcataactttcgtcccaagtatgatgcttggacaa

SEQ ID NO: 121319 - DNA, 528 bp, Arabidopsis thaliana
  unsure (1)..(528): unsure at all n locations
nnnnnnnnnnnnnnnnnnnnnnnnnnnnnnnnnnnnnnnnnnnnnnnnnnnnnnnnnnnnnnnnnnnnnnnnnnnnnnnnnnccacgcgtccgtctctctctgtgctcttccagtctctatcgatcgccttctgaattttccggcggaaaagcaaatgtccgttaacgacagtatcgatcctcggttcgtattccacgttgaagatgaatctttgcgtttccgtgtgggagattcaggtactaagatccgggagctcgaaaccgtcggcgatcgccatttcagaacccagcaaggtttctgcggaaatagaattgagaaagatgaaaccatgtattccgatggagatgatgaagagtacgacgtttctatccgaagacgaactgctctgattcagcctggtattgattccggtaacaattatgattctgctgcagctgaagaaaccaacagagaaagtaaaaatccagttggttgggaactggttgtgagagaagatggggaaggtaattcaacgattgatcgacatg

SEQ ID NO: 121320 - DNA, 514 bp, Arabidopsis thaliana
cttgttgaatgtattattattcctattgatcatcacgtgaaatatagaaaaataaaataaaaaagcaaaatccacttttgtgttttccttttcgtttacgaccaaagagatccactttatgctctcttcattttctccatgtaatgatttttctcgagagatttctgaaaataaagtcgtttctttttttttttgccttggtcactcaagactctcttcttcactctctgttttttgtcctcttctaaaatttagagaaaaaaacgaaagttttcaccaaaaacagaggaggagctatgtcatcgtcgacgatgtacagaggagttaatatgttttcaccggcaaacacaaactggatttttcaagaagtcagagaagccacgtggacggcggaggagaacaaacggttcgagaaagctctcgcttatctggaccacaaagacaatcttgagaggctggtccaagatcgcagatttgattcccggcaaaacagtagcttgacgtcattaaacga

SEQ ID NO: 121321 - DNA, 596 bp, Arabidopsis thaliana
  unsure (1)..(596): unsure at all n locations
atgannnnnnnnnnnnnnnnnnnnnnnnnnnnnnnnnnnnnnnnnnnnnnnnnnnnnnnnnnnnnnnnnnnnnnnnnnnnnccacgcgtccggtggagcgcgatcctttggggaatcgggacggaccgtgattggtcggtctctctcgttacggtgaggctgaggctgaggcggagattgagagagaccaaccatgatacgacgaatcaccgagagagcttctggtttcgctaagaatattccgattctcaaatcgtctcgatttcacggcgagtccctcgattcctccgtctcccctgttctcattcccggcgtccatgtcttccattgtcaggatgctgttgggattgtagctaaactatcagattgcatagcagcaaaaggtggcaacattcttggctacgatgtttttgttcctgaaaacaacaacgtcttctactctcgcagcgagtttatctttgatccggttaaatggccgagaagccaagtggatgaagattttcaaactattgcacaaagatacggtgccttgaattcagttgtgcgtgtgccttctattgatcctaagtataagatagctcttcttctttcaaaac

SEQ ID NO: 121322 - DNA, 460 bp, Arabidopsis thaliana
agattcaagtaaattaatttttgatcttttcattttatctctctctctttttcttctatccaaaacaccatttttgagatcagagcttctagcagcgtaaaaaatgcagacgaggtatatggagaggactaatagtatgagagagaagagaaaattggaggaagatgataatcagcagcagcagcaacagcctgagcgtaaaaggccagctcttgcaagtgtaattgtggaagccttgaagatggatagtttacagaggctttgttcttctttggaaccgattcttcgccgagtggtaagtgaagaggtggagcgggcattggcaaagcttggccctgcaagacttagtgaaaggtcgtctccaaaacgaattgaaggtatcggtggaaggaatttgcagctacaattcaggtctagattgtctgttcctttgtttactggagggaagatagaaggggag

SEQ ID NO: 121323 - DNA, 451 bp, Arabidopsis thaliana
agaaaaaaaaaaactctccgactcggaagaagagggagagagatgaagaagccggtcggagccgagaagaagagggttaaacgatcatcgggatctgcatctacttccgttagagattctggttctgattctcaacctaggaagcaagctgtgaagaaggatagttttcagttgtttgctgagaaagttagagaccacaagggattagaatccagatgggctgttatggagcaagcacgagttgaatactttagagggaaagattttgtgagctttatgaagaataaccctgactttaaagatattctggaagaagataaagaccttgacacagacgatattgccaatgttttgttgggaaagaaccttttggtccgctgtgatcgtgttactaaaactcttcgtcccgggaagaaaaagctctctacttggcctgctcatatggagattt

SEQ ID NO: 121324 - DNA, 478 bp, Arabidopsis thaliana
aaaccgaaggaaaacaaacagaggtgcataacgattctgacggaaacttttgagatattttttttagagccaaaaggattcactttttttggttttatcttcgcatcgatctatgacgtacagcaatcccgtcgatgggacggtgcctgagctgaaattgagagtcgaagaagattccgataatggtgattatctgaaattgagaggaggatcagatgaagaagatgaaggatcatcggcggaatcatcgagatgtccgataggatccggttacttctgtcttggttctgggtgaaattgatctccttggtcgtttgtttgggttcattggcctttgttatcatcaaatgggttggtccctttttgattgaaaaggagctgattccatttataaattgggtgagaaacacattcagcataccggttctcggtcttctactatttgcctcagtggcattgtttccaagcattcttcttc

SEQ ID NO: 121325 - DNA, 959 bp, Arabidopsis thaliana
  unsure (1)..(959): unsure at all n locations
nnnnnnnnnnnnnnnnnnnnnnnnnnnnnnnnnnnnnnnnnnnnnnnnnnnnnnnnnnnnnnnnnnnnnccacgcgtccgcggacgcgtggggaaccttctagatgagaccgttctggtaaacagcccgagagatgcagttttgaagctgataagaaaaataaacccgaatgtcttcattccagcgatcttaagcgggaattacaacgcgccattctttgtcacgaggttcagagaagcgttgtttcattactcggctgtgtttgatatgtgtgactcgaagctagctagggaagacgagatgaggctgatgtatgagaaagagttttatgggagagagattgtgaatgttgtggcttgtgaaggaacagagagagtggagagaccagagacatataagcagtggcaggcgagactgatccgagccggatttagacagcttccgcttgagaaggaactgatgcagaatctgaagttgaaaatcgaaaacgggtacgataaaaacttcgatgttgatcaaaacggtaactggttacttcaagggtggaaaggtagaatcgtgtatgcttcatctctatgggttccttcgtcttcatagatgttgtttcttacgttctaagcgactgggatttatgtagggcttttctgttgatagtctctcgccaacacgagtggattaagttcagagttagggttcttgaacactagaatgttgttatattatgcttgtgacatagcgtgtgtaagagtgtagcctaagagatatagtactcattgcatgatcttttgctatatgttcatgtaatcttttgttgcataaataatgaaaagttacatttttttcaaaaaaaaaaaaaaaagnnnnnnnnnnnnnnnnnnnnnnnnnnnnnnnnnnnnnnnnnnnnnnnnnnnnnnnnnnnnnnnnnnnnnnnnnnnnnnnnnnnnnnnnnnnnnnnnnnn

SEQ ID NO: 121326 - DNA, 778 bp, Arabidopsis thaliana
acgcttagctgggaccggtacacagatctacaccgctttatcttcgaagaaaacgtctgcagcagacatgttgaaggcttaccagacatacatgtcggtctgccctttcaagaaagctgctatcatatttgctaaccacagcatgatgcgtttcactgcaaacgccaacacgatccacataatagatttcggaatatcttacggttttcagtggcctgctctgattcatcgcctctcgctcagcagacctggtggttcgcctaagcttcgaattaccggtatagagcttcctcagcgcggttttagaccagcggaaggagttcaggagacaggtcatcgcttggctcgatactgtcagcgacacaatgttccgtttgagtacaacgcaattgctcagaaatgggaaacgatccaagtcgaagacttaaagcttcgacaaggagagtatgtggttgtgaactctttgttccgtttcaggaaccttctagatgagaccgttctggtaaacagcccgagagatgcagttttgaagctgataagaaaaataaacccgaatgtcttcattccagcgatcttaagcgggaattacaacgcgccattctttgtcacgaggttcagagaagcgttgtttcattactcggctgtgtttgatatgtgtgactcgaagctagctagggaagacgagatgaggctgatgtatgagaaagagttttatgggagagagattgtgaatgttgtggcttgtgaaggaacagagagagtggagagaccagagaca

SEQ ID NO: 121327 - DNA, 825 bp, Arabidopsis thaliana
  unsure (1)..(825): unsure at all n locations
agaaaaaaatcatcttcttcctcaatttcttctgattcctcctctctttcttctacttctcaccggatttctgttagttctctgataagtacatttcgtgcttatcaaatacttatattttaaggggttgaagttgtaattttgaagaagctgaagatcaatcaaaaataatagaagaacagagacgacgaaacgaaaccagccggagaactgagcagagaaaaacccccggcgagaatgggaaattcgaattcgtcttctgttgatcatcgcttcatttctgcttccagagcttttactcagaagaagctcgctgatctcaaatctctcttcgtctccctcgcttccaagtctcagagcaatgaccaatacgtctcgtaccctgttttccaggagaaaggatctttgatatggttactcaacacaggaaagatgataaaatgacttttgaagatcttgttattgctaaggcaacatacgagaaaggaactgatgatgagattgctgagtttatttaccagactttggatgttaatggcaatggggtcttgagaaggtctgatttagagtcgttcctggtggtgattttaaagagtgtgttctccactnagagttctgatgcgggnatcaagtgattacaaggagatggtagatgcgctactcgatgccggtaatttctcaaaatctggctgatggtcctgaaaaaaggaatttcttttgaagccttnagaagcttgntcccacttcgttnccaactnttaagaaagtcccnggaaagcttncttattccccgggccantnagccnnggnnannagnccnganct

SEQ ID NO: 121328 - DNA, 539 bp, Arabidopsis thaliana
  unsure (1)..(539): unsure at all n locations
cgcgnccgaaaaacccggcgaaaaagggaaattcgaattcgtcttctgttgatcattgcttcacttctgcttccagagcttttactcagaagaagctcgctgatctcaaatctctctttttttccctcgcttccaagtctcagagcaatgaccaatacgtctcgtaccctgttttccaggagtattttggtctgagtggttctttaggagaaaggatctttgatatggctactccacacaggaaagatgataaaatgacttttgaagatcttgttattgctaaaatgacttttgaagatcttgttattgctaaggtacacacttaagtcttttcatccncttaatcattgggttcttccttctgagctttttgaaggtccttaaaaatgcaggggtcaaattttgntaatcnccntatggaaaagggnttgtanggtataaatgtggnccngnctcacggtggnatagnatccccccccagggtaaggcacctgnttttcntggaaaggctnttcccttttgtnaaacccngggtcgta

SEQ ID NO: 121329 - DNA, 484 bp, Arabidopsis thaliana
cggacgcgtggggaaaaaacccggcgaaaaagggaaattcgaattcgtcttctgttgatcattgcttcacttctgcttccagagcttttactcagaagaagctcgctgatctcaaatctctctttttttccctcgcttccaagtctcagagcaatgaccaatacgtctcgtaccctgttttccaggagtattttggtctgagtggttctttaggagaaaggatctttgatatggttactcaacacaggaaagatgataaaatgacttttgaagatcttgttattgctaaggcaacatacgagaaaggaactgatgatgagattgctgagtttatttaccagactttggatgttaatggcattggggtcttgagaaggtctgatttagagtcgttcctggtggggattttgaagaggtgttctccactgagagttctgatgcggaatcaagtgattacaaggagatggtagatgcgctactcgat

SEQ ID NO: 121330 - DNA, 615 bp, Arabidopsis thaliana
ccaggaagtgataaggaatgtagctggttctgctctgaatgaggagggcttacgagcttggaaagcaagtttccaacagagtaatagcatgtctgaccggaattatattacggatcattccactgtcagttatcttggtcctggtcttgatgagagtcagagccttactccatgctctgtggagaaccattatttttcagagaaaacatatgcaaaggacacattagatgagccgaagcggatagcaaagaagcttacttctcatgtatctggtacgggttgccataagaaagtttctgaaggaagcaatagaaaaagggataatgatttacatcggttgctgtttatgcctaatggacttccagacgggactgaattggcttactatgtgaaaacgcagaaactactacagggttacaagcaaggaagtggtatagtatgtagctgctgcagtagagagattagtccttcgcaatttgaagcgcatgctggaatggcggctagacgacaaccttatcgacatatcttcatctcttctggattgtcattgcatgatatagccatgtcactggccaatggacatgtcattacaactggtgatagtgatgacatgtg

SEQ ID NO: 121331 - DNA, 511 bp, Arabidopsis thaliana
  unsure (1)..(511): unsure at all n locations
nnnnnnnnnnnnnnaaaaaaaattaaaagaacgaataaaaaatcaactgagatatatataaaaaaaaaactggaagaagaagaccgcccgcccgctttggatcgaatttgttaaatttttcttctctcgataataaaaacaacaaatgatcgttgatcgtttttctctagattcgattccgattccaaagaactagtctccggcgtgtaatctctgatcgttgaagatccaagctacgccgcatcttactcgccggcggcttgaatcatggctgataggagaaacaggtgtaaccagatcctccttttagcataccagagttttggcttagtgtttggagatttgagtatttctcctctctatgtgtataaatgtacattctacggaggattgagacatcaccaaacagaagatacgatatttggcgcgttttctttgatattttggaccatcactctcctttcactcatcaagtacatggtttttgtgttaagtgcagatgacaatggtg

SEQ ID NO: 121332 - DNA, 537 bp, Arabidopsis thaliana
  unsure (1)..(537): unsure at all n locations
nnnnnnnnnnnnnnnnnnnnnnnnnnnnnnnnnnnnnnnnnnnnnnnnnnnnnnnnnnnnnnnnnnnnnnnnnnnnnnnnnccacgcgtccgcgaaaccctaatttctctgcagatttttcccaaatctcagctctaagattcgttgtgagcaatgtcttctgtttcaagccagccacagtttcgttacacgcaacctccttcaaaggttcttcatttgagaaacttgccatgggaatgcactgaagaggagttaattgaactcggaaagccttttggtactggcgttaatacaaaatgcaatgttggagctaaccgaaatccagctttctttgcggttcgagatttgaatcaccctatacaaatgatgtcttaccctgcttcttcttctggagcccgctcaagttcgtggtaaaaactgtctacctccagtactccaacagggcaagagaatatgaacaaacacaccgacagcgggatgtttggggggaaatgtttcttttgggtagctttcgcaagcggacgatggcttttatgg

SEQ ID NO: 121333 - DNA, 531 bp, Arabidopsis thaliana
  unsure (1)..(531): unsure at all n locations
atgatacttccnnnnnnnnnnnnnnnnnnnnnnnnnnnnnnnnnnnnnnnnnnnnnnnnnnnnnnnnnnnnnnnnnnnnnnnccacgcgtccggacacactctcagtcgcacgctctttcacgcgccttttcgatttcacattcggatccgatttgttcacccgccgaagatccaccggcatcttctctaaacggctctgtcgagaaggatcggcgctattattgctggaggacgattgggtgtttactttttactagtaaacggagtaatttcccaagcgaaaggtttcatttttgagctccacgttgaacgaactaagcggtttctcggagttctcttgcttcctctccacccagcgcaatggagaaaacagacgaagagaggaagaaggctcagatgctggacgctcgggccagaaacattagccacaatgttcgctgcactgagtgtggaagtcagtccattgaagactcggaggcagatatcgctattcttcctagacagctgatccggaatgagataggagctgg

SEQ ID NO: 121334 - DNA, 646 bp, Arabidopsis thaliana
  unsure (1)..(646): unsure at all n locations
aacacaaaactcttccatttggcttctctcttgcatattcgctgcaaggatgggaaattcaaaaccactccctacaatttcttgtattatagtttcagtcttgtatttttcattctattgcataacaccaacttcttcatcagcctccatccaagatcaattcataaactgtgtcaaaagaaacacacatgtttcttttccactcgagaaaacgttattcacccctgcgaaaaacgtctctttattcaaccaagtccttgaatcgacggctcaaaatctccagttcttggcaaaatccatgcctaaaccgggattcatattcagaccgattcaccagtctcaagtccaagcttccatcatttgttcaaagaaactcgggattcattttcgtgttagaagtggcggtcacgattttcgaggccttgtctttatgtttcacgggttgaaaaaccgtttatattactcggcctgtcaaanttgnanncaaaatcanatgttggatattgnattccaaataggtncttggggtnaacctggtggctancgtttggtgagcttttactttcaagaatttgcangnggangtgcaaagattccatgggatttcccggggggtttnttgcacaatgtnntgggcattggtggg

SEQ ID NO: 121335 - DNA, 1210 bp, Arabidopsis thaliana
  unsure (1)..(1210): unsure at all n locations
tttgtgactcttggagcactctcttctctttgtctctgtgactcacattcatccaatccaggaggcatgtcgacatctgaggataaaccggaaatcatcagtagagtagttcatcaggagggtgacgtggaaatcgtcgatagaagtcagaaggataaggacgaggaaaaagaagaagggaaaggtggattcctcgataaggtgaaagatttcattcatgacattggtgagaaactcgagggaaccattggctttgggaagccaactgctgatgtctctgcgattcatatccctaagatcaatcttgagagggcagatattgttgtggatgtgcttgtcaagaacccgaatccagttcctatccctctcatcgatgtcaactacctggtcgagagcgatgggaggaaactggtttctggtttgatcccggatgctggaacactcaaggctcatggagaagaaactgtgaagataccattgacgttgatctatgatgacatcaagagcacttacaacgatatcaaccccgggatgatcataccttacagaatcaaggttgatctgattgtggatgtgccagtattgggaagactgacattgccgctggagaaatgtggagagatcccaattccaaagaaacctgatgttgatatcgagaagattaagttccagaagttctctttggaggaaaccgtggcgattctccatgtgaggcttcagaacatgaatgatttcgacttggggctcaatgacttggactgtgaagtttggctgtgtgatgtaagcattgggaaagcagagatcgcggactcgatcaagcttgacaaaaacggaagcggattgattaatgtgccgatgacattccgaccaaaggactttggttctgcgctttgggatatgattcgtggtaaaggaacagggtacacaatcaaaggtaatattgatgttgatacaccatttggagctatgaagcttcctattatcaaggaaggtggagagacccgtctgaagaaggaagatgatgatgacgacgatgaggaataaggaaacaaagtgctgcagagacagaatggtcatagttactaaatctccgatcttgaaatgtctatttaaaattaaaaaaaaagaaagacttgttttgtgtgctttttgataactgatggatcagacttttgaatagagccgtctttttattggacttctttnttcc

SEQ ID NO: 121336 - DNA, 600 bp, Arabidopsis thaliana
  unsure (1)..(600): unsure at all n locations
cccacgcgtccgcccacgcgtccgcaaatctctttctcttcctccatgggcatctgaaaccaaaaccttgctctccttctacttcatcaagaatccctttatgaacaccctacatcagaccaaacacgatccagcctctccggtgatcgaccaaatgtcggttcttgacctccctgagctggctcttgactgcattcttgaccttcttccaccctctggactctgcagcatggctagggtttgtagctccttgagggagagatgtgttagtgatcatctatgggagaaacatttgaagaccaaatggggcaaaatccttggccctgctgctcacagagagtggcaatgctatatctcctctnccacatatcatcttgattctcctcatcatcaaactgggaatcttggttttgccaaaatnatctctctgatccgatctntntcaatccgttttccgagnggntaaacaanggagggggtatgcancttctctgccacttgattnnagcaatgagcngctacctgnttcccggtgaaanaaggtngtttttgggtcccngcttnatggttnanaaccggtagggantggacatcttaggg

SEQ ID NO: 121337 - DNA, 617 bp, Arabidopsis thaliana
  unsure (1)..(617): unsure at all n locations
nnnnnnnnnnnnnnnnnnnnnnnnnnnnnnnnnnnnnnnnnnnnnnnnnnnnnnnnnnnnnnnnnnnnnnnnnnnnnnnnnnnccacgcgtccgcagtttggttcatcaaatcccttttctcccatggaagaaagcaacaactcggccgttgtggattttcctgacaactttatggaccagctcttgtgggaggagtgctgggaagaagaggcaacgcagcatgaccaggcattatcatcaccatcagggctgaaggagagggtggcttgcgccatggggcacctgcaagaggtgatgggagagagggagttgctgatccagctgtgggtgcctgttgagacaaggagcggccgagtgctgagcacggaggagcagccttactctatcaacaccttctcccagagccagagcctggccctctaccgagacgcctcagctggctacagcttcgcagcagaagttgggtcggagcagctggtggggctgcctgggcgtgtgttcctgaggagaatgcctgagtggaccccagacgttcggtttttcacgaaggaggagtaccctcgcattggatacgcccgcaggtaccaggttcgagccaccctcgccctcccactct

SEQ ID NO: 121338 - DNA, 399 bp, Arabidopsis thaliana
gaatcgttttttaagttttgctagttgagatattattgggggttactgtaatatcgaagaatcatatttcacggtatttactatagacaactactgtagagttacttgattaaggcgttaagaagagatactggtgttttttggcctcaatcagctaagatttttgtgcattgtatgatgagtatagcaaatgaacaacaatttgccatggatcaacttgtcgaaaccaatgatgattccgaaaagaaaccaagaattacatacacgaggaagtttcctatatccttgagcgagaaagacgtttgcaagaagctgccaaatctgcctggtgaatttgatgaagcactgttgcttgacttcgaagatccttcacccgagcgagcaagaatttcaggcgat

SEQ ID NO: 121339 - DNA, 530 bp, Arabidopsis thaliana
  unsure (1)..(530): unsure at all n locations
nnnnnnnnnnnnnnnnnnnnnnnnnnnnnnnnnnnnnnnnnnnnnnnnnnnnnnnnnnnnncacgtaacatattacacaagagccacgcgtccgatacaaatgagagatcataaacgttaagtcggttatgtttcggtttgagctaattagaagttcatataatccgccgtccgctaatattcctcgattagaatctccggcgatcagaaatctcgcggtgaattttgatggaagaaaagctgccaaaatcgctcaagaatctcgatttgaatacgaatcgtggtcgtggaccagagaataagattcttgtttcagcttatgtatcttcgtcacgaatgtctccactgaaatcaaaacctccatctcttgtgagctcatgtcttggtgttattgggaagcatttggaggatatgattcgttgtttagctgaaatctctgttatatttcctgcagacatcaagatgtcgattgcagcaattcctagaagaaaaaagctgctggatgatgatgtgattatctggttggctga

SEQ ID NO: 121340 - DNA, 515 bp, Arabidopsis thaliana
  unsure (1)..(515): unsure at all n locations
nnnnnnnnnnnnnnnnnnnnnnnnnnnnnnnnnnnnnnnnnnnnnnnnnnnnnnnnnnnnnnnnnnnnnnnnnnnnnnnnnnnccacgcgtccggttttgagaatttgacaaaaatttgtttatgtaatcttagttttcgctgattttgagtaagttatcgacatggatattgatgtcggaccagttgatccatctgtcctatacgagcaagacctccatgtttcttctgctgtttgggaaggacaggaacgaggtctacttcgttgtcaagaacacacttcattgctacatcaatggaaactcactgatgaacaaattaacctcgtggacaaagctggtttcggttactttcgcaaaatcggtccaatgagtttaaacaattcactgatctctgcacttgttgagcgatggagaagagaaaccaatacttttcatcttcctttaggagaaatgactataaccttagacgaagttgctttagtacttggacttgagattgatggagatcccattg

SEQ ID NO: 121341 - DNA, 496 bp, Arabidopsis thaliana
  unsure (1)..(496): unsure at all n locations
nnnnnnnnnnnnnnnnnnnnnnnnnnnnnnnnnnnnnnnnnnnnnnnnnnnnnnnnnnnnnnnnnnnnnnnnnnnnnnnnnnnccacgcgtccgcccacgcgtccgattttgattaggctctctgtttctctttcttggttctaaaagatatccgtcactctttagtattatgggaatcggtgaagaaagcacaaagcctatttgggggagcgtgagccacacgtcttcaggctacgctctcaacggcaaaatcatgctctcctccgtgatcgttctattcgtcgccgttattatgatcctctgcttccacagctacgcccgttggttattccgtccgcacaaccgtcgcattcgccgccgtattcgttctcacctccgcactctctccgcctcaccccgagaccaagctctcgaccaggctgttctcgacaagattccgatcttcgtgtactcctccaagaatccaccccccccagaagagaaaggaggagtgct

SEQ ID NO: 121342 - DNA, 422 bp, Arabidopsis thaliana
agactacattaggggatctctctttgttcgctttgtggggaacgaactatggccgagagatggaggaacacggctctactcgtcatcgacatgcagaacgatttcatagaggaaggtgctgtgacgcaagtgaaaggaggaaaatctatagttcctaatgttatcagagtcgtcgaactcgcgaggcagcgtggtattctcgtaatttgggttgttcgagaacatgatcgtcaaggaagagatgttgaattattcaggcgccataactacagttctgagaaagtcgggccagttattaaaggcaccgtaggagcagaattggttgatggattgatgatcaacgaagaagatgactataagattgtgaaaactcgtttcagtgctttctttagtaccaatcttcattccttcttgcaaacttc

SEQ ID NO: 121343 - DNA, 370 bp, Arabidopsis thaliana
accacagcgtccgtcaggaacccagaaagagggacttgtcttttacctccaaagggttcctgccgtttcttttctacaatttttctcctgctaattatcaaatttttcttctgattttcattgtttgttagagattcttcttctcctctgcttttctattctctgggagctcgatgatggatgataaagctcgcaaagaagaagaacatcatgtgtctcaccaacataatcattctcctctgcaaagggatggaaattctgctgagattgcacaaggacaagagctatcatcaccgggccgagacctatggaggcgaagtcttgtgttagatttaccatcaacaacacctgaagatactacaagagatga

SEQ ID NO: 121344 - DNA, 971 bp, Arabidopsis thaliana
agacgatcttgctccttcttcttcttctttttcttcttcttcttcaactcgggaagatcaactctcaaatcctgtatacactctcttctcagctgtaatttctataatctcgtcaattatcatctattcaggggtaagctatgggatgtgcttcttctcttccagataggaactctggaactttaagtggtcttagcaattcagagaatgctgttccagctgatgccaaaaatctacgtgtgaagttagttctattaggagactctggtgttggtaaaagttgtattgtccttcgatttgtacgtggtcagtttgacgctacatctaaggtaactgttggagcctcgttcttgtcccaaactatagcattgcaagactctaccacagtgaagtttgaaatatgggatacagcaggacaggagaggtattctgctcttgcaccactatactaccgtggagctggagttgctgttattgtgtatgatataacaagccctgaatcgttcaagaaagcacagtattgggttaaggaactgcaaaagcatggaagcccagatattgttatggctctggttggtaacaaagctgatctacatgaaaaaagagaagtacctactgaggatggaatggagcttgcagagaagaacggcatgttcttcattgagacgtcagccaagacagccgataacataaatcaactgtttgaggaaattggcaagaggctacctcgtcctgctccttcgtcatgattggagtgttgaatcatctcatcttcagccatgtcttcagactactaatctttccatactttttaatgtaatgtttcaaaacaatatttctctatctgttaagtcaagtgtgttgtataatgtgaagatttgagtttgaaactggggatattacgaacctcaaaagtggaaacccaagttatatcaagcaatggatcatcagtacatattttagtgggattc

SEQ ID NO: 121345 - DNA, 811 bp, Arabidopsis thaliana
aagtaccgcttccggaatttccgggcttcttcgattttcctctcagaccaatcgggctttcgaatcccatcagtagaaatggctacatcaaggttccaagcattcttgaacagtcccattggcccaaaaacaactcatttctgggggcctatcgctaattggggttttgttgctgctggtttggtggatatgcaaaagccccctgaaatgatttctggaaacatgtcgtcagctatgtgcgtttactctgcattgttcatgaggtttgcctggatggtgcaaccacgtaactatttgctacttgcgtgccatgcatcaaacgagactgtacaactctatcagctctcacgttgggctagagcccaggggtatttatcctccaagaaagaagaggagaaaccatctcagtaaaccaaaatgaggaaaggtttcttcaacgctgcttcagaatttgttcgtgggaattactgaatccatccatttgattttctttcgaaacgtgttttgtattgtgtccccaagctatggttgctttacttgttggatcattcactaacattatatcctttgttttcataagtaaccgcttgtaataaaatttgggaccagtcgtcattcaaaaaaaaaaaaaaagggcggccgctctagaggatccaagcttacgtacgcgtgccttgcgacatccttagctctttttataggggccacctaaaattcaattcaacttggcccggcggttttaacaaaccttcgggaactggggaaaaaacccttggcggttaaccccaaacctttaaatccgcccttggcc

SEQ ID NO: 121346 - DNA, 1019 bp, Arabidopsis thaliana
cccacgcgtccggagattcgctttttctcctgcttacttctttttatcatcttctctttgtcggtttgatttggaaaaactttctgcaaaaaaaagagagattcttaaactttttatctcaagatcctttcaaaaaatctgaaaagagaagatttttaataaaaaagaatggttgaaactggtcaccatcatcaacatccaccggcaccggctgcagccggtcatccgccggttccatccatggcgatggcgcgtaacatgggaaccacttggcctccggcggagcaacttcatcatcttcaatattgcatccactctaacccttcttggcatgagacggttgtactggctttccagcattacatcgttatgctcgggactactgttttgattgccaacacactagtgtcaccaatgggtggagatcctggtgataaagcgcgggttatccagactatattgtttatgtcgggcataaacacgttgctacaaacgcttatcgggacaaggcttcccacggttatgggagtatcgttcgcgtatgttcttcccgtattgtctataatcagagattacaacaatggtcaattcgattccgagaaacagagattccgacatactatgagaacggtacaaggatcattaatcatttcttcattcgtcaacatcataatcggatatggtcaggcatgggggaacttaataagaatctttagtcccatcattgttgtgcccgttgtttctgttgtgagccttggcctattccttaaaggcttcccactgcttgcaaactgtgtggaaatcggtctaccaatgctgattctgttgatcatcacacagcaatatcttaaacatgcattctcaaggatttctatgattcttgaaagatatgctttacttgtttgcctggctatcatatgggcttttgctgctatccttactgtttctggtgcttataataatgtttctaccgcaacacaacaaagttgtcgaactgatcgtgcctttcttatgtcatc

SEQ ID NO: 121347 - DNA, 797 bp, Arabidopsis thaliana
agggaaagctggtacgcctgcaggtaccggtccggaattcccggttggacccacgcgtccgctcagtttttggtcgaagttggtgaagtcgccgccgggacaactcaggttgttacagatgataaacatgcgagataatccaacaatgcatgtcttacaagcttcaaagtttctatttttagctcttattttgatccagttgctgtctactcaactctttgctcaaagatctaaaagtccatggcaaacactcactggagatgctccccttgtcattgctcgtggtgggttttctgggttgttgccagattcaagtctcgatgcttacagttttgtatcgcagactagtgttcctggtgctgttctttggtgtgatgtgcaactaacgaaagatgcaattggactttgcttccctgatgtgaagatgatgaatgcttccaatattcaagatgtttaccctaaacggaaaacttcttacttgcttaatggagtccctactcaggattggttcaccattgatttcaacttcaaggatctgacaaaagttatcttgaaacaaggaatattatcacggtcagcggcattcgatggaaacagctacgggatattcgacagttaaagatatatctacgcagttaaaacctgagggtttttggttaaatgttcagcacgacgcattctatgctcaacataatctgagcatgagcagctttctgctatcaatttccaagactgtgattattgactatctctcttcccctgaggtgaatttctttcggaacattggtaggcgtttt

SEQ ID NO: 121348 - DNA, 491 bp, Arabidopsis thaliana
attcacttcttctccaccgaatatatctttgtctttgccctttcccccttccttcgatgtgatacctaatcaaccactctcaacaccatccaaccaccacctccagagcaaagaaacagagcagacaacgaaacagagcagagaacgaaacagagagagagaaggagagaacgaaacagagagggaattctgttggttttgcaatggtttggaggttcgttaatggcgtcatagactcgggagattaagggagaacaagtactctgcatcttctggatttctcactatttctccttctctagaggaataggcgagaaattgagattaataaaaaggggtgttttttggttctccttcgtttgtataaagcctgccgcttcttaaggttctttggaaattctcaagtgatggaggaaaatctggtttacttcgcatgagctattaacgaaatttcatcatgattgtctcactgtcacacttgtgggagtatg

SEQ ID NO: 121349 - DNA, 475 bp, Arabidopsis thaliana
tccccaaccatccttcagttccgccctcatctttttcccttcccttttacccattctcttctccatagccaaacgctataatagttctatctcctactcccctccgtgtgatcgctttcttttagaaagaaacagactgactcctggccgtaggatggaaacagtaagaaaagtacatccgaatcaacggctattgcgttctctcctcttccttcttgtgatgtggatttgtgtgtgtgtgatgtgtcggtgagtgtgttatagaagtcactatagccatcttcaaaggggagatagagctaggagtagtatttggtggtgtcacgtcgtttgttttttctatataatttttgtcactatgtctttctattatgggacatggcataatatatcatatgaataatttatccctaaaaaaaaaaaaaagaataacccaccccggacgctctagaggatccaagcttatgtacgcgtg

SEQ ID NO: 121350 - DNA, 609 bp, Arabidopsis thaliana
  unsure (1)..(609): unsure at all n locations
nnnnnnnnnnnnnnnnnnnnnnnnnnnnnnnnnnnnnnnnnnnnnnnnnnnnnnnnnnnnnnnnnnnnnnnnnnnnnnnnnnnccacgcgtccgcgacacgacacgaccgatctatagattcggcgagatcagaagaaagcttcccggagcaactcggtcgttgtgactcattccgagttaaaaaaaacgggttttcgacaccatggatatgagttcaatggctggttcaatcggagtttcggtagccgtactccgattcctcctctgtttcgttgccacgatccctgtttcattcgcttgtcgaatcgtcccgagtagactcggtaaacacttgtatgccgctgcttcaggtgctttcctctcttacctctcctttggcttctcctccaaccttcacttccttgttccgatgacgatcggatatgcttcaatggcgatttatagacccaagtgtggaatcatcactttcttcctcggtttcgcttatcttattggctgtcatgtgttttatatgaagtggtgatgcgtggaaagaaagaggaatcgattctactggagcgttaatggtgttgacgctgaaagttatctcatgttcaatgaattacaat

SEQ ID NO: 121351 - DNA, 540 bp, Arabidopsis thaliana
  unsure (1)..(540): unsure at all n locations
cgtgtcgcgtgggcggacgcgtgaatggagagttgctgtcggagcgtcatagcttcaaggacgtttcatctgcggtcaagtggccgtctatttccctctcttagcttaactcatctcaagggcaagctatctctctccatcaactcgttttcctccaagattcagtctcatgctctccgaggagttggtataggcgagtcagataagaaaaatcccctgccgcgaggggccggagaaggagtcaaggaagatgcgaggagtaagctgcttcatgtagttttggtctctcctcagattcctgggaatacaggttgcattgcaagaacatgtgctgcctcagctgttggtctgcatttagtcgggccattaggttttcaagtggatgacgccagagttaagcgagctggtttggattattggccctttgtggttgtcaaagcgcatagctcatgggctgaatttcaagaatatttcaggcttcaggaaggganaaaaaaccaatgatancttttaccannaagaagaaacaaggatactttc

SEQ ID NO: 121352 - DNA, 1105 bp, Arabidopsis thaliana
  unsure (1)..(1105): unsure at all n locations
nnnnnnnnnnnnnnnnnnnnnnnnnnnnnnnnnnnnnnnnnnnnnnnnnnnnnnnnnnnnnnnnnnnnnnnnnnnnnnnnnnnccacgcgtccgcggacgcgtgggctgcttcttgcggattcgagcccaaaatcacggttgagcattgtgaagagaaaggttactccgtgataaacgtgagctgcgaggatcgaccaaagctcatgtttgacattgtatgcacgcttacggatatgcaatacattgtgtttcacgccacgatttcatcaagcggctctcatgcttctcaggagtatttcatcagacacaaagacggttgcactcttgacacagaaggagagaaagagagagttgtcaaatgtctggaagctgcaatccatagacgagtcagcgagggttggagtttggagctctgcgcaaaggacagagttggattactgtcggaagtgacaaggattctgagagagcacgggctatcagtgtcgagagctggtgtgacaacagtaggagaacaagccgtcaacgttttctatgtgaaagatgcttcagggaatccagtggatgtgaagacgattgaggcgttacgcggagagattggacacagtatgatgattgacttcaagaataaagttccgagcagaaaatggaaagaagaaggtcaagccggaacaggaggaggatgggccaaaaccagtttcttctttgggaatttgctggagaagttactgccttgagagaaaaggtaactatgtgtggataaaacgtactgtaaaatgtgtattatgtatgatctagagggccttagtgtgatgtatgacttggtcagggattttggtggtttgcccgaagtcaaaccgaaccaaaactggttttcggttactttagactttagtcatagtaaaatgaacatgtctataaatgaataatatgcaactcttccaattggtaggcttgcttttgtctatgtaatatcaatccttcttgttatgtatttatctttggccaaatgtgatattttctggagttttaatctcttcttttccttctattttggaacttcttcgaatctttaatgtcaatattattgcagtgagnnnnnnnnnn

SEQ ID NO: 121353 - DNA, 637 bp, Arabidopsis thaliana
  unsure (1)..(637): unsure at all n locations
tgttttcccccccttgggggnncacccccnnaccgttttncnttnnaaaaatccctccggggnanccccgtggntttttaancccctttngggccttccccnggnganattggccccccgtatggtggattgccttccaaggattaaagttcccgagcagaaaatggaaaggaaggaaggtcaagccggaacaggaggaggatgggccaaaacccagtttcttctttgggaatttgctggagaagttactgccttgagagaaaaggtaactatgtgtggataaaacgtactgtaaaatgtgtattatgtatgatctagagggccttagtgtgatgtatgacttggtcagggattttggtggtttgcccgaagtcaaaccgaaccaaaactggttctcggttactttagactttagtcatagtaaaatgaacatgtctataaatgaataatatgcaactcttccaattggtaggcttgcttttgtctatgtaaaatcaatccttcttgttatgtatttatctttggcccaaaaaaaaaaaaaaaaaaaaaaaaaaaaaaaaagggcggccgctctagaggatccaagcttacgtacgcgtgcatgcgacgtcataatcttctagtagtgtgtacctaa

SEQ ID NO: 121354 - DNA, 531 bp, Arabidopsis thaliana
  unsure (1)..(531): unsure at all n locations
nnnnnnnnnnnnnnnnnnnnnnnnnnnnnnnnnnnnnnnnnnnnnnnnnnnnnnnnnnnnnnnnnnnnnnnnnnnnnnnnnccacgcgtccgggctggtgtaaagcgaaaattaagtaccgagtcagatgttcatgctcttcacaaagaactggatgaggtttcatgtcctgtttgcatggatcacccacataatgctgttctactgctgtgcagctctcatgacaaaggttgcaggtcctacatctgtgataccagttaccgacattccaattgccttgaccggtttaagaaattgcattctgaatccgcaaatgaccctactcccgaggcgaacttggcttcaagggaacataataacgaatctctatacgagcatggtacagccagtcgaagcagttttcaccgtgagtctggaaaccgaggctcttcttgggattccgaatcactgaggaggaggaggagagttgaggaagaagttgagtcagaagatatcacaaatttgaaatgtcctctatgccggggtactgtt

SEQ ID NO: 121355 - DNA, 481 bp, Arabidopsis thaliana
  unsure (1)..(481): unsure at all n locations
nnnnnnnnnnnnnnnnnnnnnnnnnnnnnnnnnnnnnnnnnnnnnnnnnnnnnnnnnnnnnnnnnnnnnnnnnnnnnnnnnnnccacgcgtccgtaaaaataaaaataagtggagaaatcaaaatcatcgattctcctttgtttcgcctaacccaattcctaaatctcagcatctttcatcaatccaatctctcaaataagcgagagagaaacaaagattatcgaatccttggagacgaaaacatactccaatttgtaattttctcgtctttttttttacctgattttgttatacgtttgatcgaaatcatttgctctgatggatctctgttttgttaacccttttgagatttggtagatatggttttgaggattgatatatttgccgctgattgtcggtgaaaaattgtgaaatttgatttggtgggttacgggttaaatgaaatttatgatgaggatatagaatctgattttttttata

SEQ ID NO: 121356 - DNA, 942 bp, Arabidopsis thaliana
  unsure (1)..(942): unsure at all n locations
cggaagnnnnnnnnnnnnnnnnnnnnnnnnnnnnnnnnnnnnnnnnnnnnnnnnnnnnnnnnnnnnnnnnnnccacgcgtccggaaatcaaaatcatcgattctcctttgtttcgcctaacccaattcctaaatctcagcatctttcatcaatccaatctctcaaataagcgagagagaaacaaagattatcgaatccttggagacgaaaacatactctcaatttgttttaggacatttgggttaccctgaggcttaaggagaatagtggtttagttatttatactgaattttgtgtcattcagactttccgagggatttctgtttggtaccgtttgcctcgtctgtgttttcatttgagctgcatcttaaagtgaaagttcagtgcttaaacagtaataaagtagtatttcaacaggctgctaataagattgctccctttcgcttacacagtgcttaacaagatggctggtgtaaagcgaaaattaagtaccgagtcagatgttcatgctcttcacaaagaactggatgaggtttcatgtcctgtttgcatggttcacccacataatgctgttctactgctgtgcagctctcatgacaaaggttgcaggtcctacatctgtgataccagttaccgacattccaattgccttgaccggtttaaggaatttgcattctgnaatccgcaaatgaccctacttccgaggcggacttggcttcaaggggaccataataacggatctttntacgggcatgggtcaagccagttgnagnagttttaccgtgaggnttggaaccgagggtcttcttggggttccgaatactnngggggggggggggtttnggagaagttngtcanaggtttncaaatttaaanccctntccggggccttttnggtgaggtttgagggannccgnntttcaaaccnagttnccggancnc

SEQ ID NO: 121357 - DNA, 551 bp, Arabidopsis thaliana
  unsure (1)..(551): unsure at all n locations
cttaaaaaaggaacgcagttttcttctccgccggcgcgtgggcggcgtcaacgggcattgaccttgtcgcagattttcctctctagtctccgtcttctattaccagatcgagctttgttcttcgagcttctcatctctttgttcaatctcaaaggtttttgagtatcagcaaagatgggtgacaatcttatggacaaagttaccgcatttggtgagcgcctgaagatcggaggttcggaagtgagcaacaagatcagtgctggtgtgagctcaatgagctttaaagtgaaggaactttttcaaggtccaaacccaactgataaaatagtcgaagatgctactactgagaatctagaggaacctgactgggatatgaatttggaaatttgtgatatgataaatcaagagacaattaatagcgttgaggttgatccctgggtattaaagaaagagggtttattatgatgaagccagcccgaggagttccagtccctttgccctgggcttttgctccgaagacggtgtgnttagaacctttnngnaaggcgttt

SEQ ID NO: 121358 - DNA, 584 bp, Arabidopsis thaliana
  unsure (1)..(584): unsure at all n locations
gatttgtccggcgtcaacggtccattgaccttgtcgcagattttcctcgctagtctccgtcttctattaccagatcgagctttgttcttcgagcttctcatctctttgttcaatctcaaaggtagaaattcgcgttaatttacttgtgatttcgctgttttttggttactgtttccgtgttgatcgatctagttctgggtttttcgatcatatgaaatgttattttccttattagggtttttgttgaccaaaacgaatttttctattttctttcgaattttgatcttcgaatatcgaattcggtttttctcagcaaaccctaattacattcatccgtaaaaaactgtttaatttctggttaaaccagtttccttgagcaaattttgttggatcgagaagaatatttgtatgancggagagatccgtatctgaaaacctggtttaaccgggtttgaacccttttngtgnatttgnctttgnaatgaatctctgcaggaatccgtagggggatattaattgnttggnngaattncccttcggtnncggtaattgttnaggaccaangaagggaccttnaaccaggt

SEQ ID NO: 121359 - DNA, 406 bp, Arabidopsis thaliana
gagaaattccaggagtgagttttgacaatcggagagaaatggggtcgacagaaaaagagcagacgacgcaacatcacccgccgcacatcagcagtctcgtcgtacgtccctccggaagcaacgacagagaagacggccgcaacgccgccggggaactatgaccccggagaagtctctcctgaaccggccttcgtttaatcgctcggatcggtataagggtgacaatggtggacatagaactcgggcaagttctagctcaccaggccgtcgtggatatgaagatcacaagcatggctctgatcttaatcattcaggcgttccacctcgtggccgtgagttaagcagcagaagggaagcacctgggagacacagagactattccccacccttagctagaggtggagct

SEQ ID NO: 121360 - DNA, 801 bp, Arabidopsis thaliana
  unsure (1)..(801): unsure at all n locations
nnnnnnnnnnnnnnnnnnnnnnnnnnnnnnnnnnnnnnnnnnnnnnnnnnnnnnnnnnnnnnnnnnnnnnnnnccacgcgtccgtctcgccccagcggatccatctgatgaagcacagcattggtacaaagacgagaagtatagtactaaagtgaaggacgcagacggtcatccttgttttgctcttgtaaacaaagctactggtgaagcaatgaagcattctgtgggagctactcatcccgtgcatctgattcgatatgtgcctgataagcttgacgagtcagtactatggacagagagcaaggattttggcgatggatatcgcacaataagaatggtaaacaatacgaggctaaacgtggatgcatatcatggtgacagcaaatctggtggtgtacgtgatggcacgactatcgtcctctgggactggaacaaaggcgacaaccagctctggaagatctttcctttctgaaaaatgggcgtctggagtggtaaaaagttcctttgtgtgtgctgtatgaataagaaagaaacaaaactcagatttattcattgtttgtgtcttgtaaagacttgagtttgtgctgttggcatctgtaatctatcttacttgtattccaagtatgtttttacagatacattacatacactgtctatatgtgtatacttttttcctaatctattttgagatctttcttaaaaaaaaaaaaaaaaaaaaggggcgaccgctctagaggatccaagcttacgtacgcgtgcatgcgacgtcataaatcttctagtatgctacctaatacaatt

SEQ ID NO: 121361 - DNA, 534 bp, Arabidopsis thaliana
atctatttctgctctatctctctctctctctctctctctctctctctctctctctctggtattatttctatctcccccgccgtcgaaagagaaacgtcgatcggagaacctttgaaatgtcgactggattagatatgtctctcgacgacatgatcgccaagaaccgtaagtctcgtggtggagccggccccgctcgtggaaccggatccggatccggaccgggtccgactcgccgcaacaaccctaatcggaaatcaacccgatctgctccataccaatcagccaaggcgccggagtccacctggggtcacgacatgttctccgatagatctgaagatcaccgatcgggacgttcctccgccggaatcgaaactggaaccaagctctacatttccaatttggattacggtgtcatgaacgaagacatcaaggaactgtttgctgaagttggagaacttaaacgctacacaggtcattttgatagaagtggaagatcaaagaggaactgctgaagtagtgttttcttcgcgtggc

SEQ ID NO: 121362 - DNA, 777 bp, Arabidopsis thaliana
  unsure (1)..(777): unsure at all n locations
tttccttggggggngncttacccggggncnatgnaactttttgncccctttnnntttcattggnaaaccccngaccnctccaaangggatnttcggaaatcccatcccccataaggcantntctggaatcgnccttttttagccttttattcccngaattnactgcttacaatgttggccagtggtggctatcttatgaccncagattancngttcaaggctttgtgtggggtatcaaattcgtttgaccaattggggcgttgagctaggaaaagttctggctactcaggtcaggaaacagcttcattcatcacgcactcaaggaaccgctcccgagggattcaattacagtaccaccacacttttgaaacgatatctcgagacaagttccgagccccagatgtgatgaccaagcccaagtttctctccttcgaccaaacgtgaaccatttgagcatttttcacccttgttcttctttttttcactgtccctgatcagagtatactttatcggcactcataaattatctaaaaatgggtactaataatccaaaccccataaaatcagaattgggagcataatatcagaaggaccgagagacaacattcttgagttctttgagagctttggggtcaagtgtcctgnagagaaaagggncagnctggattcctgcaaganggttacttccangaaaggtcaagaanagtcnnggggggancccgnnaggccttttcacaaaattcngggtccanngtttccngnaggnacaaagttccc

SEQ ID NO: 121363 - DNA, 371 bp, Arabidopsis thaliana
atcctattaatatagagattgatctagacagcttgatgtttgcaaagctaccacagcttagtgatgcaatcaacgagaatcagggcgcagattatatctatcgctatagatacgatggtggaggagcatcccaagtttggcttgcatcaggcagatatgttgtcatagatttgtctgcggggccttgtacatatgggaagattgaaactgacgagggcagtgttagtcccagaacagtgccaaggatacgatacattgtgcttccaggaaatgttagccctgttggtcatcagtctacccatgatatcttttctggtcagttagcagcgttggtagctactacaattgagcatgtcatagctcctgatgtc

SEQ ID NO: 121364 - DNA, 892 bp, Arabidopsis thaliana
cccaagcgtccgcggacgcgtgggcagctttgaatccatctgtcttctcctctctctctcttctccatttgcaattatgataatgtgaaagcaattcgaagaagaaaagttatcttcgcacctcagcaaagatccaatcgattcgattcttaagctttttcgtcttctccgataaggtcactacttagaagccgcgttgtggtttagttgactcctccaggttttatcttcaagctttttcgtctatcagatctggtgtcactgtcttctcataggattacatagagatggggaaaaaagctaaatggttttcaagtgttaagaaagcattcagcccagattcaaagaagtcgaagcaaaaattggctgagggacaaaatggtgttatctctaatcctcctgttgtggataatgttagacaatcttcttcttctcctcctcctgctcttgctcctcgtgaagtgagagtagctgaagtgattgttgaacggaacagggatctttcacctccttctacagcagatgctgtgaatgttacagctactgatgttcctgtagttccatcttcatctgctcctggtgtcgttcgtcgcgctacacctactcgatttgctggaaagtcaaacgaagaagccgctgctatcttgatccagactatatctagaggttctttggccaggagagcgttgcgggcaatgaggggcttggtcacacttaagttattgatggaaggatctgttgctaagcggcaggctgcatatactctcacatgtatgcagactctctctcgtgtacagtcgcagatccgagctaggagaatcaggatgtcagaagagcatcaggctcgccagaaacaactccttcagaaacatgctaaaaaacttgctggctt

SEQ ID NO: 121365 - DNA, 361 bp, Arabidopsis thaliana
  unsure (1)..(361): unsure at all n locations
gaggngtctttgttcttccttctcgacgacggtgtcacttgcgatgaatctctccacgaggctcgctgaaaaacttcccggaatcttaccggcgccgtcttctcctctcctgcgtaaaggagtctccgagttaagatgcttttcaattgctaaccaaagtagaagattgagatggggattacaaaagaagatggtttggagtttggagagagctgagacctgtgtagtgagcaaatcatgtttagttcatcctgcaactgaagcctatgcacaagaagctattgaagctatcaaatccgaaaaagttattgcttgtgcctaccgatacggtttatggcttcggttgtgatgcttgttcttt

SEQ ID NO: 121366 - DNA, 1127 bp, Arabidopsis thaliana
cacattttgtagtttagttttatcctcaacaaccatcttcttcgttatattccttgagataacaacaaagcatcgttcttcacctttaccaaaaagataaaaaaaaagaaaaatggcaaaagaaaatggatttataggatcaatcgatcaaggaaccaccagcaccagattcatcatttacgaccacgatgctcgtcctgttgcttctcatcaagtcgagttcactcagttctatcccgaagctggatgggtggaacacgatccaatggagatactggaaagtgtgaaagtgtgcattgcaaaggctctcgacaaagccactgccgatggacacaacgtcgacggtggcttgaaggccattgggcttacagatcagagagagactactgttgtttggagcaaatccactggccttcctctccacaaggctattgtctggatggatgctcgtaccagctccatctgcaggagactagagaaagaactctcgggaggaagatcccattttgtggagtcttgcggcttgccaataagcacatacttctctgccatgaagctgctttggctcatggagaatgtggatgatgtcaaagacgctatcaagaaaggggatgccatctttggcactatcgacacatggttgatctggaacatgactggcggtatcaatggcggccttcatgtcactgatgtcaccaatgcttcacggacaatgctcatgaacctcaaaaccttgagctgggaccaggacactttgaagacacttggcataccggctgaaatcttgcccaagattgtcagcaattcagaagtgattggagagatctgcaaaggctggcctattcccggtatcaagattgctggatgtcttggtgatcagcatgctgcgatgttggggcaagcttgcagaaaaggcgaggcgaagagtacttatggcacaggtgctttcattcttctcaacaccggagaagtgccaatcaaatcaggtcatggtcttctgaccacgttggcctacaagctcggtcctcaagcaccagcaaactatgcattgggggttcgattgccatagcaaggggctgctgttcagtggcttaaagaaaacctttgggtattaaaaagcccttttt

SEQ ID NO: 121367 - DNA, 631 bp, Arabidopsis thaliana
  unsure (1)..(631): unsure at all n locations
nnnnnnnnnnnnnnnnnnnnnnnnnnnnnnnnnnnnnnnnnnnnnnnnnnnnnnnnnnnnnnnnnnnnnnnnnnnnnnnnnnnccacgcgtccgcttatcttccatagtataaaacagtcagaagatgtcactgatgcaacaaagtcaaagaactcacatgcgatctgtgagcttgggctgtcaataatcaatcacttaactcagaaagagcctgatctacaaggggaaatcacacctgtatcgctgcctccgacgctgtacaaaccttctgaaaaagttgaaggagacaagtctcaggtaggtgaagaaaaattgtggctagctgatgagactgtcctgttacacttcagggctctcaagttggagagtcatgctgatgcatctgtgatcccccaaacttcagaaaatgaggttatgattgatggggaaagtgatggaaatgaaattcctctgggtaaaatagtacagcgtttgagagctcagggaaccaagactagaaagggcaaatagaataaatctgtaccagctgaagatgagaatggtaaaaatgatgtcgatgtttggagatggtgagggagataaatctagatcacttacaaatgctggataaattcgaatccagaatggaca

SEQ ID NO: 121368 - DNA, 707 bp, Arabidopsis thaliana
accacacaaaattaaacacagcctctgcctaactctccgttgttccggccactgcgccatctccggggtcgagttcgtcgtacttcatcgaactatgaactctcatgatatcgatgatcagttagaagcagatgtttacagtaactggccttctcgaaatgattcttcaacagggaggagaaatcgaaactcgtgtagatcgaaacactcagagactgagcaacgaagaagaagcagaatcaatgaaagatttcagagtttaatggatattatacctcagaatcagaatgatcagaaacgagataaagcttctttcttgttggaggttatagagtatattcactttcttcaagaaaaagttcacatgtatgaagattctcaccaaatgtggtatcaatccccaaccaaattgattccttggagaaatagtcatgggtctgttgcggaggaaaatgaccatcctcaaatcgttaaaagcttttcaagtaatgataaagttgctgcttcttcgggttttctcttggatacgtacaattcagtaaatcctgatattgactcagcagttagcaccaagattcctgaacacagtcctgtttcagcagtttcatcgtatctacgtaccgagccttcgctgcagtttgttcagcatgacttttggcaaccaaaaacaagttgtggaacaattaactgttttacaaatgaattgt

SEQ ID NO: 121369 - DNA, 900 bp, Arabidopsis thaliana
ctcacttagggaaagcacgtacgcctgcaggtaccggtccggaattcccgggtcgacccacgcgtccgagcaaagatagagatggagaatcacacgaccatgaaagtttcatctcttaattgtatcgatctagccaacgacgatcttaatcattctgttgtttccctcaaacaggcatgtttggattgtggatttttctatgtgatcaatcatgggataagcgaagagttcatggacgatgttttcgagcagagcaagaagctttttgctcttcctttagaagaaaagatgaaagtgttgagaaacgaaaagcatcgaggctatacacctgttcttgatgaacttttagatcccaagaatcaaatcaatggggatcacaaagagggttattacattggaattgaagttcctaaagatgatcctcattgggataagccattctatggtcctaacccttggcctgatgctgatgttttacctggttggcgagaaacaatggagaaatatcatcaagaagcattgagggtttctatggctattgcaagacttttggcgttagcacttgacttggatgtgggatactttgataggacggagatgcttggaaaacctattgcaactatgcgactgttgcggtatcaagggatttctgatccttcgaaaggaatatatgcatgtggagcacattctgacttcggaatgatgactctgttagccactgatggtgtaatgggactccagatatgcaaagataagaacgcgatgccgcagaagtgggaatatgtaccgccgattaaaggagcatttatagtgaatcttggcgatatgctggaacgttggagcaatggcttttttaaatccacgttgcatcgggttcttggaaacggtcaggaacgatat

SEQ ID NO: 121370 - DNA, 612 bp, Arabidopsis thaliana
tctctacgactcactattgggaaagctggtcacgcctgcaggtaccggtccggaattcccgggtcgacccacgcgtggcgataaaacaaattgatcccttaaccttcttcaccaacatctctcttacactcaacaagagatcatatcatgtcctctccaagagaaagaggaaagagtttgatggaatcatcaggatcagagccaccggtgacaccaagccgttacgagtcgcagaagagacgtgactggaacactttcggacagtacttgaagaatcagagaccgcctgtgccgatgtctcactgcagctgtaaccacgtgcttgatttcctcaggtacttagaccagttcggtaagacaaaggtgcacgtgcctggctgtatgttctacggccagcctgagccaccagctccttgcacgtgccctctcagacaagcttggggaagtcttgacgctttgatcggacggctgagagcggcttacgaggagaacggtggacctccggagactaaccctttcgctagcggagcgataagggtttatctgagggaggttagggagtgtcaggctaaggctagagggattccttacaagaagaagaagaagaagaag

SEQ ID NO: 121371 - DNA, 996 bp, Arabidopsis thaliana
atacgactcacttagggaaagccggtacgcctgcaggtaccggtccggaattcccgggtcgacccacgcgtccgcgaagcttgacactctcaagagtaaagctcgagcttgcgagaagaagcatgtctgcaacatccgtaccttcaatggcggattttctcaccaaaaaaccttactctcctccttcttgggcttctcatcttcgtccgcttccttctcacactttctccctcgctcaccttcctactccgatccatcgatggaatcttcctggtcttcctaatggcacagaactctggatcaagcgagatgatttcaccggaatggaattgagtggaaacaaagtacgaaaactcgaattcttaatggcggaagctgttgatcaacacgctgatactgtaatcactatcggcggtattcagagcaatcattgtcgtgctacagccactgcatctaactatcttaatctcaattctcatcttattctccgtacttccaagcttcttgctgatgaagatcctggattgggtgggaatctccttgtcgagcgtctcgttggagctaatgttcatctaatctctaaagaagagtattcttccattgggagtgaggctcttactaatgctctgaaagagaaactggaaagagaaggaaagaaaccctatgttattccagtcggtggatcgaactctttgggaacttggggttatatagaagcagcaagggaaattgaggagcagctgaattatagacccgatgacctgaaatttgatgatattgtggtagcatgtggcagtggtggtacaattgctggtatttcattggggtcttggttgggagctctaaaagccaaggttcatgctttctcggtttgcgatgatcctgattacttctatgactttgtccaagggcttctggatggacttcacgctggtgttaactctcgtgatatcgtcaacatccacaatgccaaaggaaaaggatatgccatgaaca

SEQ ID NO: 121372 - DNA, 529 bp, Arabidopsis thaliana
agaactcgctctactcactcatatgggaaagctggccgcctgcaggtaccggtccggattcccgggtcggcccacgttcttcctctacacagatctttggattcagaagaaagagatctaaaatgggtgctgctgaaaacaaccttgaaatggagggtaccctggagatcggcatggagtatagaactgtttctggtgttgcgggacctctcgtcatccttgaaaaagtcaaggggcctaaataccaagaaattgtcaatatccgtcttggggatggaactacccgacgtggtcaagttctcgaagttgatggagagaaagctgttgttcaggtatttgagggaacatctggaatcgacaacaagtacacaactgtgcaatttacaggagaggttttgaaaactcctgtttctttggatatgcttggtcgcatcttcaatggttcagggaagcccattgacaacggtccacctatattgcctgaggcgtacttggatatttctggaagttctatcaatcccagggagag

SEQ ID NO: 121373 - DNA, 795 bp, Arabidopsis thaliana
  unsure (1)..(795): unsure at all n locations
cagctttttactcgataaanncgncttttggtagattctgtataaaatctagcttatcgagggttatcctcaaagtttattaaatcaataataaaaatctctgaagaaaagtttgggtttttgccatttgggttttcttcgggctcatctggttttcgagagagatagagaaagtgagacaaggttaaggaggaagaagatgactgagaatcgggtggttttggctctgcttatactctgcattgttgggtttgagccaagtttcatccatggagctacggattcatcagatacttcggcgttaaacatcatgttcagctccatgaattctccaggacagctctcacaatggacagcatcaggaggtgatccttgtggccaaaactggaaaggcataacttgctctggctctcgagttacacaaataaagttaccaagtcttggactttctggatcacttggattcatgcttgataaattgacttctgttactgagtttgatatgagcaacaataaccttggaggcgatttgccttatcagcttcctccaaacttggagcgattgaatcttgctaataaccagttcactggatctgctcaatattccatttctatgatggctcctcttaagtacctcaaccttgctcacaaccagttgaagcagctagctattgacttcacaaaactcacctctctctctatattggacctctcttccaatgcttttatagggtctctcccaaacacttgtagctctcttacgagtgcaaaatcaatttatcttcagaacaatca

SEQ ID NO: 121374 - DNA, 690 bp, Arabidopsis thaliana
  unsure (1)..(690): unsure at all n locations
atgatcctgccagctannnnnnnnnnnnnnnnnnnactcactatagggaaagctggtacgcctgcaggtaccggtccggaattccccgcgcccctttcgcaacttgtcaaagcaccacgaccttctctctacggagttgagatcaatccccccaaatctcggtgtggttcctctagggtttttgatcggaatcggaatcgataatctaaccggcatgaggccaatcctattgccggatccacccagtctatctaccggcgtccctgatattttcgaacaaggcggttcccataacgtcgtcagacgcgccgtcgtcatcggaaacggtttccctggctccgagaatcagtgtatcggtctcgttcgtgcgctcggcttatctgataatcaccttctctaccgagtgacaaggcctaaaggaggactaaatgagtggctgcactggctcccagttggttttcacaagaagttggactttatcctcaggcatatttacctctactccagattgatgcttggatccaaacaaagtaaatacatctcatctgtaccctcagagaatggtggtaatgtaggtttggcctctattctagaggctgatgtgaagggcattgtaaatttggcccgtcagacctatgaaaaggatggcccgttgatcgtgattgcatgtggaagagatactatttctat

SEQ ID NO: 121375 - DNA, 743 bp, Arabidopsis thaliana
  unsure (1)..(743): unsure at all n locations
taggtgcactatagaagagctatgacgtcgcacgcacgcgtacgtaagctcggaattcggctcgagctttctagtctcttctctttactttggtcgtccacaatgaaaggaggcagcctctcgtttctcttcgttctcctaatcgccaccatcacttccgtcatttgcttcagtgacgggatgttaccaaacggcgactttgaactaggaccaaaaccatcggacatgaaaggaacgcaagtaataaacaagaaggcgattcctagctgggagctttcaggcttcgtcgaatacataaagtccggtcaaaaacaaggagacatgcttctcgtagtcccggccggaaagttcgcaatccggctaggcaacgaggcatcgatcaaacaaagacttaacgttacaaaaggaatgtattactcactgacgttcagtgccgcaaggacatgtgcccaagacgaacggctcaacatatcggtggcacctgactcaggcgttattcctatacagacggtgtacagtagcagtggatgggacctttacgcatgggcgttccaagccgagagtaacgtggcagagatcgtgattcataatcctggtgaggaggaagatcctgcttgtggccactcattnatggtgtggcaatcaaagntctntaccctccttggnccaccantaagattttntttaggacgggggntttangagggccntcgtctccaanggaaaaccgggttttttgttcc

SEQ ID NO: 121376 - DNA, 626 bp, Arabidopsis thaliana
ttaggtacacactatagaagagttatgacgtcgcatgcacgcgtacgtaagctcggaattcggctcgagcgagcatttctcggtcccacaaggccgtcgagccgtggagctagtggcaggcaaagaaagcgcaatcgctcaggtagctaggaccgttgtgggaaaaacttacgtgctttcgtttgcggttggagatgctaacaatgcttgccaaggatcgatggtggtcgaggcatttgcgggaaaagacactctaaaggtaccttatgagtctcgaggcaaaggagggttcaaacgcgcttctctacggtttgtggcggtttcgacccgcacaagagttatgttttacagcacattttactcgatgagaagcgatgatttctcatcactgtgtgggcccgtgatcgatgatgttaagctcctcagtgctcgtaagccgtaagatggccattgttttatttctaaggttcttcgtataagccagtgtggttttttatataaatatgattttcttaatctctaatgcttttgaaaaaaaaaaaaaaagggcggccgctttagaggatcccagcttacggacgggtgcatgcgacgtcataagtcttctataattcccctaaatccat

SEQ ID NO: 121377 - DNA, 505 bp, Arabidopsis thaliana
  unsure (1)..(505): unsure at all n locations
cagctannnnnnnnnnnnnnnnnnnnnnnnnnnnnnnnnnnnnnnnnnnnnnnnnnnnnnnnnnnnnnnnnnnccacgcgtccgaaagacttaacgttacaaaaggaatgtattactcactgacgttcagtgccgcaaggacatgtgcccaagacgaacggctcaacatatcggtggcacctgactcaggcgttattcctatacagacggtgtacagtagcagtggatgggacctttacgcatgggcgttccaagccgagagtaacgtggcagagatcgtgattcataatcctggtgaggaggaagatcctgcttgtggaccactcattgatggtgtggcaatcaaagctctataccctcctcggcccaccaatagtaagtattcatttattatatgaattgagtttgtataatcaaatcttttttcagatatcacgcaatgtgatccatcatgttacaactatatgtagttatgtattaactcgttatcgttaggccttagggg

SEQ ID NO: 121378 - DNA, 1268 bp, Arabidopsis thaliana
  unsure (1)..(1268): unsure at all n locations
ctcactattgggaaagctggctcgcctgcaggtaccggtccggaattcccgggtcgacccacgccgtccggaacggctcaacaattatcggtggcacctgactcagggcgttattcctatacaccgacggtgtacagtagcagtggatggggacctttacgcagtgggctgttccaagccgagagtaacccgtggcagagaaatcgtgattcataatcctggtgaggaggtagtatcctgcttgtggaccactcattgatggtgtggcaatcaaagctctataccctcctcggcccaccaataagaatatattgaagaacggaggatttgaagaaggtccctacgtactcccaaacgcaacaaccggcgttctggttcctccctttatagaagatgaccactctcctttacccgcgtggatggtcgaatcactcaaagccatcaaatacgttgatgtcgagcatttctcggtcccacaaggncgtcgagccgtggagctagtggcaggcaaagaaagcgcaatcgctcaggtagctaggcccgtttgtggggaaaccttacggtgctttcgtttgcggttggagatgctaacaatgcttgccaaggatcgatggtggtcgaggcatttgcgggaaaagccactctaaaggtaccttatgagtctcgaggcaaaggagggttcaaacgcgcttctctacggtttgtggcggtttcgacccgcacaagagttatgttttacagcacattttactcgatgagaagcgatgatttctcatcactgtgtgggcccgtgatcgatgatgttaagctcctcagtgctcgtaagccgtaagatggccattgttttatttctaaggttcttcgtataagccagtgtggttttttatataaatatgattttcttaatctctaatgcttttgaaatgagatgagtaatactgaaagggtgtttgtggtgtagggttttatataaggcaaaaaggtcttgcttatatatattttcttgtatgagaaggctaaagaaatgttgtctgtttttactaaattgggttctttcaaggagatcgggtgattgtgagaataaaaatgtaatacagatatatatggtagagaggaatgaggataataatttaactttaaaaaaaaaaaaaaaaaaggnnnnnnnnnnnnnnnnnnnnnnnnnnnnnnnnnnnnnnnnnnnnnnnnnnnnnnnnnnnnnnnnnnnnnnnnnnnnnnnnnnnnnnnnnnnnnnnnnnnnnnaatatcat

SEQ ID NO: 121379 - DNA, 985 bp, Arabidopsis thaliana
  unsure (1)..(985): unsure at all n locations
tacgactcactatttggaaagctggtacgcctgcaggtaccggtccggaattcccgnggtcgacccacgcgtccggcaatacctacagcattgggaaattgcacagcattggaggaaattcacttgcagagtaactacttcactggaccaatcccagctgaaatgggagacctgcctggccttcaaaagctggacatgtcaagcaacactctcagtggacctatccctgcttcgcttgggcagttaaaaaagcttagtaacttcaatgtctcgaacaacttcctggtggggcaaataccttcagacggagtgctctctggattttctaagaactccttcattggaaatcttaacttgtgtggaaagcatgttgatgtcgtgtgccaagatgatagtggaaaccttcatcacattctcaatcaggtcaaaatcaaaagaaaaactctggtaagctgctgattagcgcatcagcaactgtaggtgcgctactcctagttgcactcatgtgtttctggggatgctttctatataaaaagctcggtaaagtcgagattaaaagccttgcaaaggatgttggtggaggtgcgtctattgtgatgttccacggagatttaccttactcttccaaagatatcattaagaagctggaaatgttgaatgaagagcacataatcggatgtggaggctttggaacggtgtataagctggccatggatgatggcaaagtctttgcattgaagagaattctaaagttaaacgaagggtttgatcggttttttgagcgggagcttgagattcttgggagcatcaaacaccgatacctcgtgaatctacgtggatattgcaattcaccaacatcaaagctactgttatatgattacttgcccggtggtagccttgatgaagcacttcatgagagaggcgagcaattggactgggattcacgcgtaaatatcatcataggagctgcaaaagggttatcata

SEQ ID NO: 121380 - DNA, 424 bp, Arabidopsis thaliana
gattttaactttgagctctctgagaaaccaaagcttcactctgattcgctctcgaatcaaaagagacgacagagaaagaagaagaagaaacgcgaagaacagaaacagctctcttaagcttttcttaattattattataattttctcttcttaatccccaaatctcctgatggattcatgaaccagatcggctgatttgagtttccgggtttgatttttttccctttttgtgaaattgggttggaatctggagatctggatcttataaagctggaaactttacgtgtgcttgatgaaccgattttgattaggtgattggttagattcggaaatttgaagacttgttaatttgggtttgggattgggattgatctgaaaatttgtagtttttggaagatatgttggaagatcgatcaccagattc

SEQ ID NO: 121381 - DNA, 650 bp, Arabidopsis thaliana
  unsure (1)..(650): unsure at all n locations
ggaaagacggtacgcctgcaggtaccggtccggaattcccggttcgacccacgcgtacgccgacgcgtgggcaattttacagaagaaagtgaaaagaaagagagaaaggggaagaagaaaaatgtataaatcaccattaacgttgctcacacttcttactatttgttttggattcttcgatctcagcagtgctctttatggatcttcgtcacctgtggttcagctcactgcttctaactttaagtccaaggttcttaattcaaatggagttgttttggtagagttctttgcaccatggtgtggtcattgcaaagctctaacacctacatgggagaaagtggctaatattctgaaaggagttgctactgtggctgcaattgatgcagatgctcatcagtctgccgcgcaggattatggtattaaaggtttcccaacaattaaggtttttgttcctggaaaggctccaatcgattaccaaggagcaagagatgccaaatccattgctaattttccttataagcagatcaagggtcttttgagtgaccgtttggaaggcaaaagtaaaccaactggaggaggatctaaagaaaagaaatctgaacctagtgcatctgtggaactgaacgctagcaattttnatgatttggtca

SEQ ID NO: 121382 - DNA, 330 bp, Arabidopsis thaliana
cgtatcgttaatcttcttcgggtcagacgatctgaagccgatcgctgtagaatcagtttcgtgctccgcagtttctcgagtttcctctcacttcagatcttcataagagaattcacttacggagagggactttttcgtagacgattctcactggatatctatcacccggtaagatcgtcttgctcgaaaagaattgaaaagtttttaagtaattgaataaggaactgtgaatcggagaggcttacttttttgaaaagatctaaaccatcgtagaaggatcgtcctcaaatatctcacagaagttaccaattttgaaagatcactagagat

SEQ ID NO: 121383 - DNA, 434 bp, Arabidopsis thaliana
acggacgcgtggggaagaagaaaaaaaatcatggagatgaccgaagcttccaaacagacaacagcagaaggatcagcaaatccagaaccagaccaaatcttgagtccgagaagatcgttggagctaaaacaaaagaaatggtggatctctgtttctttatgtattttcttagtcttgctcggagattctctagtcatgcttctcttgaacttcttctatgttcaagacaatcgagaagatagtgaccaagatctacaataccgaggaacatggttgcaagctctggtccaaaacgctgcgtttccactactcattcctctgtttttcattttcccttcaccaaaacaaaaccaagaaaccaccaatactcgtttcctctcttttcgtctcatcttactttacatctctcttggtgttcttgttgctgctcacag

SEQ ID NO: 121384 - DNA, 841 bp, Arabidopsis thaliana
  unsure (1)..(841): unsure at all n locations
tttattagcaggaacatatcactctctccaatatgggagttggagtcaacatcaaggccaaacattggtgggggaggatacattaaaaacatcaaaatatcagacgtttatgtaggacaccgcaaagtatgggatcaagatcgccggcgacacgggagatcattcggacgagaattataacccgaacgctcttccagttgttaagggaatacatatcaagaacgtttggggagttaacgttcgaaacgctggctctattcaaggtcttaagggctcaccatttacgggtatatgtttgagtgagattaatctacatggaagcttgaattcgtataagacgtggaagtgttcggatgtcagtggaacttcactaaaggttagtccttggccgtgttcggagctgagaactaccggcgggtctaatttgtgttcttccacattctaaaaacttctgagcaagttcttacctctttggttcaatttttttttgaaataatttatctccagtttgcagttcctccatttatatatatggttgtactttgtatgttttaaaaaaattatgtaatgaattgtaatagtggaaaaaaaaaaaaaagggcggccgctgtagaggatccaagcttacgtacgcgtgcatgcggaagtcataggtgcggcaatagtgtaaaagagtgttacagcnctttccaacgcgtntgggcgagtggatgaatggaatgatgagagggaatgaattatatgtaaaagaagtgataggtgagttaataatatgaagagagttgaatgagagagagtatggagtggaatgataaggagtagtacagtgaggtagagatgt

SEQ ID NO: 121385 - DNA, 1141 bp, Arabidopsis thaliana
  unsure (1)..(1141): unsure at all n locations
gatacttccnnnnnnnnnnnnnnnnnnnnnnnnnnnnnnnnnnnnnaccggtccggaattcccgggtcgacccacgcgtcccgtgagttcgatttacacttttttttgtccttttttattaataaatcactgacccgaaaataaaaatagaagcaaaacttcatgtcgtggtttctaatagcggtggcgacaatcgccgccgtcgtatcctacaagctaatccaacggctaagatacaagttcccaccaggcccaagccccaagccgatcgtcggtaacctctacgacataaaaccggtccggttcagatgttactacgagtgggctcaatcttatggaccaatcatatcggtctggatcggttcaattctaaacgtggtcgtatctagcgccgagctagcaaaagaagttctgaaagaacacgaccagaaactcgccgaccggcaccggaacagatcgacggaagcatttagccgcaacggtcaggatcttatatgggccgattatgggcctcattacgtgaaggtgagaaaagtttgcacgcttgagctcttcacaccgaaacgactcgagtctctcagacctatccgtgaagatgaagtcaccgccatggttgaatccgtcttcagagactgtaaccttcctgaaaacagagcaaaaggtttacaactgaggaagtacttaggagcggttgcgttcaacaacataacgcggctagcctttgggaagcgttttatgaacgctgaaggtgttgtggacgagcaagggcttgagttcaaggccatagtatccaacggtctgaagctaggtgcttcactgtcaatagctgaacacatcccgtggctcaggtggatgtttccggctgatgagaaggcgtttnctgagcacggggctcgtcgtgaccgcctcattcgagctatcatggaggagcatactttggcccgtcaaaagtctagtngagcgaaacagcatttcgttgatgcgtttgctaacgnttgaagggtccagtatgatcttagtgaggntactatcatttgggccttctatggggntattgatcacggcaagggntgggcacggcagccnttaacaagcgggantgtggcgattgcggaaatatccaanatccaagagtcanaaa

SEQ ID NO: 121386 - DNA, 936 bp, Arabidopsis thaliana
agaacagctctgacgtcgcatgcacgcgtacgtaagcttggatcctctaaagcggccgccctttttttttttttttttatataaatagatgtcgctcagcttaaccattaatctagttataataattgggaatttgggatccatacaacaacaactttaatatacatttcacattaattgtcaaacagataagaaaagatcatacgaaaatagagcagctgattttagcaatcaaatttagaacaatcaatctgcagaacattagacaacaaacaaacaaacaaactttaaacttgttctttcactctaaaacctgttcttctccttgcagttgcttctcaccatttttcttgtttttctcattcaccaaagttagtcaaaacgaaactacaactacgcgaagcttcactcctccacaacaccaacgccattctcaccagtctctccatcatggccactattaaacatttcatgtacttcttcagactttggtgttccctttttggactttctcatctgatctttgctgctgctatttggtgtccttgggacactgttcgttttgacttcatccttgcaaccacctacactgtgacgatgtcgagcacaatgcttccccttcacttcctgatatgatgcgttaactgtgtcgctgcagctctttctacggttaaggtttggtgacttaggccgagtcaatggaaactttttcaatggttgtttcggtggaggaccctcttggtagaaacttggtaccggattagctttgtaagccatgttcttcctaagttgcttagtgactgcttcttgctcttccttaagccttttctcgttttctaatttctctgcttcaagtgctttctgtttttcctctaacttctggtaaaactctcttcgtctctccagtcgcgatgtgctactaaatgttggagcaac

SEQ ID NO: 121387 - DNA, 657 bp, Arabidopsis thaliana
  unsure (1)..(657): unsure at all n locations
gaaggcgggcccccctgcaggaaccggcccggaattcccgggtcgacccacgcgtccgtacggttgcgaaaggacaacagaggggggactcagagaggcagagagagagagagagagagatatagaagagaagtgagtggcgtttggttaatcattttcagaagatggatccgacggcgccgttgcttacacacggtggcgaagtagaggaggattatgctccggcgaggagctggaccgatgtgaaacgagtcttatctacagagtcggccaagttgtggatgatagctgctcctgtggggttcaacatcatctgccaatacggagttagctcagtcactaatatctttgtcggtcacatcggcgaagtcgagctctccgccgtctctatctctctttccgtcatcggtaccttctccttcggtttcttgcttggtatgggaagtgctcttgaaacattatgtggtcaagcatatggagctggtcaagtcaatatgttaggaggttatatgcagagatcttggattatcttgttccgttcttggtttcttcctccttcctatttacatcttttnccacgcgggttcttagctactcggcaagaangggntccctntcccctgncagtaantntttaccanncaaggtttttanggt

SEQ ID NO: 121388 - DNA, 540 bp, Arabidopsis thaliana
  unsure (1)..(540): unsure at all n locations
attgcctgttttcttcttgggagatcagttaactagccagggtcaagcgattcgaagcatcgagttctatatatgttactatggttggggagacttcagacacagaaaaagcacttgcaaagaatctgatgtctacaacactttcttcttcattgttgctgtcatcccttatgtctctcgcctccttcagtgcctgcgacggctgtttgaggaaaaaaacccggaacaagggtacaacggactcaagtatttcttgactatagtggcggtttgcttgagaacggcttacagtatccaaaaaggtcaagtcgcttggagggttntagctgctgtcttctcatttatagctgcaatattctgtacttactgggactttgtccatgattggngtcttctaaaccggacatccaaaaaccgtgcttcgagataaactccttgttcctcaaaagaaagtatacttcatagcgatggttttgaatgtcctgttgagatttgcgtggatccagacagttttagatttcaacttttctttcatgcata

SEQ ID NO: 121389 - DNA, 1381 bp, Arabidopsis thaliana
  unsure (1)..(1381): unsure at all n locations
tatagggacagctggtacgcctgcaggtaccggtccggaattcccgggtggacccacgcgtccgcccacgcgtccggatggaaccgttgttgctccatccgccccatttactaagatttggaaaatgaggaacagtggttcgctggtgtggccacagggcacacagattgtctggatcggtggggacaggttctgcaactccttgtcagttgatttacagattccaaaggagggtgtgcctatctatagtgaacttgacgtcaaagttgattttgttgcaccagagttacctggtcgatacatttcttattggaggatggctacctctgacggtgctaagtttgggcaacgtgtttgggtgttgatacatgttgatgcatctctgaagaattctgttgtgaatgagtttcatggactgaaccttaatgcctccccctcccttgatgagaattttccaagcgaatttctagggattatgaattatgagtcagctcaacctggcagctccagtgtcaatcctgggaccgtgaaaggtactgatctagagggcgaagttggtgaaacacaggccgtggaaaaagaaaaccttttggttggtgaagctcatcctgctatccctcacggtcattctccttcatcttcatcttcttcatttaacatggtcgacttcccaagcatgcctgctgttgaggtcttgtctggtggttcttcatctactacaaaagacgtgccagttcctcttcaggaggatatagaaaagaatgacgtggagataaccatgctcaaggagctcgaggaaatgggtttcaaggagatagatttgaacaaggagatcttgagggataacgagtacaacctggagcagtctgttgatgctctttgtggagttagcgagtgggatccaatcctagaggagcttcaggagatgggcttctgtgatgatgtgacgaacaagagactgctgaagaagaacaatggaagcatcaaaggcgtggtaatggatctcctcacaggggagaaggaggcttgatgagctctttggtttctggcaactcttctctatctctcttatctatcaggaataattatgttttataaataaaacctgatctcttagtttggtttcgtgctgcgtcacatggtctgttcctttgctttgtgttgggatgatgttactatgttaactctatctaagacatggatggtttctttcttatttaagtttagtttatgtcgttctgctcctcgggtcaaatgaatggttgagtcttttttattgatttcaaaaaaaaaaaaaaaagacnnnnnnnnnnnnnnnnnnnnnnnnnnnnnnnnnnnnnnnnnnnnnnnnnnnnnnnnnnnnnnnnnnnnnnnnnnnntt

SEQ ID NO: 121390 - DNA, 645 bp, Arabidopsis thaliana
  unsure (1)..(645): unsure at all n locations
tcgatcccggtgcccccggcnttntcaangcgtccntcccttcngggatttgaaagatgcctggaattnccnatctcaaggacccgaggaaatggtttccaaggggatagatttgaccaggagaccttgagggataacgagtccaacctggagcagtctgttgatgctctttgtggagttagcgagtgggatccaatcctagaggagcttcagcagatgggcttctgtgatgatgtgacgaacaagagtctgctgaagaagaacaatggcagcatcaaaggcgtggtaatggatctcctcacaggggagaaggaggcttgatgagctctttggtttctggcaactcttctctatctctcttatctatcaggaataattatgttttataaataaaacctgatctcttagtttggtttcgtgctgcgtcacatggtctgttcctttgctttgtgttgggatgatgttactatgttaactctatctaagacatggatggtttctttcttatttcagtttagtttatgtcgttctgctcctcgggtcaaatgaatggctgagtcttttttattgatttcatcactcttcggccgtgttggtctccacttctcaagctgtatttggcttaatgtgagtttgtgagaaaaa

SEQ ID NO: 121391 - DNA, 523 bp, Arabidopsis thaliana
  unsure (1)..(523): unsure at all n locations
nnnnnnnnnnnnnnnnnnnnnnnnnnnnnnnnnnnnnnnnnnnnnnnnnnnnnnnnnnnnnnnnnnnnnnnnnnnnnnnnnnnccacgcgtccggagatttatacaacaaatcgacatagcaacaagcgagcatctcaaatctgtctccttccaaggcgttgtagacgtcaaagatactagtggaagagtataattaataagacctaagtccatctagttgacgcgatcaaatgtctaccttaatcacttttcttttttgataagggttatatcttgtttttattaatgcagttgatattggaacaaatgatcctgatgatcataagtaacatcaaacctgagactaagagcaaactgattgagagttttagagatttcagctttgatttgggtaggtccccttttgatccttctttttggaacgctctttacaatgggcttatggcacgcagcaatgtgatgaagatgctaaaaagaatgttcaaggagaggagagaaagaagccacttcgggtgacttcaa

SEQ ID NO: 121392 - DNA, 464 bp, Arabidopsis thaliana
aaactttgaagcttcttactttctttacttcacgatccttcttttgcctaatttctcggtttcatttccaaaattctcttttgattctttcttactctgttcgctagagaagatttagactgggttttgagtatttctcggaaattttcgtgtgttttttttctgggagagtttccgagatctcggtggagtacgttttttggcgacgaaccagtatggtttggtactcaagctgtagaatttcgtttctgggtctgcttattttgctagcttcgagctgggttttggatagatgcgaaggatttggtgaatttgggtttgaatttcatcatcgtttctccgatcaggttgttggggttttgcctggagatggtttacctaatcgagattcttctaagtattatagagtgatggctcatcgtgatcggttaattagaggtcgtcgacttgcaaatgaagatcaa

SEQ ID NO: 121393 - DNA, 407 bp, Arabidopsis thaliana
gctaacgtggaacaagaaccctaagaaacgatctcgtttggttttatcgaatttcccggatcttcctttcgagaaggatgattctctagagtctcaatctcatcttcattttcgtgaagatgatattgatcgtagacaaactaccgatcaattggactcgtcggaggttggagggaatcatcctcgtgagaatttcgatgtcgaagctaagaaactcgcagagtccattagagcccaaggagacaagttcgctgaggaaggaaaataccaggaggctctagggaaatgggaagctgctcttaatcttgttcccgaagatgcaatccccgcatgaacagaaagcacaagtgttacttgagcttggtgatgcatggaaagcactcaaagctgcaacacgagctactgag

SEQ ID NO: 121394 - DNA, 543 bp, Arabidopsis thaliana
ttcgggaaaagtatttggtgtgataaattccctctccagcttctcggtgacacagatattttgcttccaaataaaacgagtccggtcactggcgctcactgacttcgtcttcctccatctccgatccattggtttaacaagcgcgtgagggccagatagaccgagaatcatgggaaacggaaactcaacggagacgaaagagtcgcgccgatcaaagatgcgtaagaagattcaaaactttcgcagccgccgccgtcttagtcgtccaggatccggaagcgtctctggattggctagtcagagatctgtgagcgcagatgatttcgccggcattgctcttctcactcttatcggcgcggagatgaagttcaaggacaagtggctcgcctgtgtttccttcggggaacaaactttccgttcggaaatttcagattccacagagaagccgatttggaactcggaaaagaagcttctcctggagaaaaatggaccaagtctggctagaatctctgtatttgagaacaatagactcttgaagaacaa

SEQ ID NO: 121395 - DNA, 373 bp, Arabidopsis thaliana
cccacgcgtccgcccacgcgtccgaattgtctcacccgagcttcctctccagctagggtttgtttgtttgattgaagaaagaaaacaagaatggtgtatttcaatttcaataggattaagacgaagaagactctaattggatttggattgggacagatcctctcgcttctctcgacttctcttagctttacatcgtctgagatcgctagaaaagattttagctttttttttttttcaaaccatcccatttttaaacattctcatgaacttacaaaatttgaaatctttatagggattaatgctccaacatcacagtcgtttctgggttatgtgttactggcaatcgtctatggagtatgagaatgagcattga

SEQ ID NO: 121396 - DNA, 394 bp, Arabidopsis thaliana
  unsure (1)..(394): unsure at all n locations
ggcagaacanagttaatagccttacaccaccaccgttgcagcttaatggtagcagattgaagtcgactttaagtgctaganatatggatatggagatggaacttaggtttcgcggtttggataaccggagacttggtgatctcaagccatccaacctcgaagagactttcggatcatatgactcagcttctgtgatgcaacttcaatcaccaagcaggcattctcagatgaaccactatccgtcttcacctgtgaggcagcctcctcctcatggattcgaatcttcagcagccatggcagctgcagtgatgaatgcaagatcctcagcgtttgcggaacgcagctttcgagtttcaaaccagctccagtagcttcctaatgtctccgattgggg

SEQ ID NO: 121397 - DNA, 926 bp, Arabidopsis thaliana
  unsure (1)..(926): unsure at all n locations
cacagagatccttaaattcttcatttttcccaatttgcgccgccattaaaaaagcttagctaatcgctatcgtcatccgcaactaacaagacccatcctctctcttcgctacacttttccccgcatcttcttcttccaatctctcctattaatcggtactgtgttttcttctgtgatcgtgagattagaaaatctacccaaatttttgattttgcgataagggtttttcttaatttcgtctacggatatagaaaatgtcttccatcaatttatcctcatcatctccttccaccatctctctttcccgctcaagactaagccaaagctctactacattactccatggactacatcgtgttactttaccatctaaccatccattgtcaaccttttccattaacaccaatactggaaaagttaaggctgcagtgatctctagagaagatgatctgctctcattcaccaacggaaacactcctctctcaaatgggtctctcattgatgatcggaccgaagagccattagaggctgattcggtttcacttggaacacttgctgctgattctcctcctgcaccagccaatgggtttgttgctgaagatgatgactttgagttggatttaccaactcctggtttctcttctatccccgaggccattgaagatatacgccaaggaaagcttgtggtggttgtggatgatgaagatagggaaaatgaaggggatttggtgatggctgctcagttagcaacacctnaagctatggcttttattgtgagacatggaactgggatagtttgtgtnagcatgaaagaagatgatctcgagaggtttcaccttcctctaatggtgantcaganggaaaacgnagaaaagctctctactgcatttacaagtgactttnggtgcaaaacaatggnncaacaa

SEQ ID NO: 121398 - DNA, 924 bp, Arabidopsis thaliana
  unsure (1)..(924): unsure at all n locations
actcactatatgggaaagctggtacgcctgcaggtaccggtccggaattcccgggtcgacccacgcgtccgacaaatactccgaaggtattcctggtaatcgttattacggaggtaacgaattcatcgatgagatcgagaatctttgccgttcaagagctctcgaagctttccattgtgatccagcagcgtggggcgttaatgttcagccgtattctggatctccggcaaatttcgctgcttacacggctttgcttcagcctcacgatcgtatcatggggcttgatttgccttcaggtggtcatttgactcatggttactatacatctggtggtaagaagatctctgcgacttcgatctactttgagagtcttccgtataaggtgaatttcaccactggttacattgattacgataagcttgaagagaaggcgttggatttcaggcctaagttgcttatctgtggtggtagtgcgtatcctagggattgggattacgctagatttagagctattgctgataaggttggagctcttttgctttgtgacatggctcacatcagtggtctcgttgctgctcaggaagctgcaaacccatttgagtactgtgacgttgtgacaaccacaacccacaagagtttgaggggtccaagggctggtatgattttctacaggaagggtccaaaaccaccaaagaagggtcaacccgagggtgcagtctatgattttgaggacaaaatcaactttgctgtattccctgcgcttcaaggtggtcctcacaatcaccagattggtgctctagctgttgcgttgaagcagggctaatactcctgggttcaaggtctacgcaaaacaagtgaaagccaatgcttttgcccttggaacctccctttggggcaagtttccaattttacccattganntng

SEQ ID NO: 121399 - DNA, 664 bp, Arabidopsis thaliana
  unsure (1)..(664): unsure at all n locations
nnnnnnnnnnnnnnnnnnnnnnnnnnnnnnnnnnnnnnnnnnnnnntctctctctctctctctctctctctctctctctctctccccctgtccagatctctccctccctctttctccgatctcagatccattcaacaatctacaaagaagatggaaccagtctcttcatggggtaacacctctctcgtctccgtagatccagagatccacgacctaatcgagaaggagaaacgtcggcaatgtcgaggaatcgaacttatcgcttccgagaatttcacttccttcgccgtcatcgaagctctcggaagtgccttaaccaacaaatactccgaaggtattcctggtaatcgttattacggaggtaacgaattcatcgatgagatcgagaatctttgccgttcaagagctctcgaagctttccattgtgatccagcagcgtggggcgttaatgttcagccgtattctggatctccggcaaatttcgctgcttacacggctttgcttcagcctcacgatcgtatcatggggcttatttgccttcaggtggncattttgactcaatggtanctatacatctggtggnagaagntctttncggcttcgntcncctttaggnggctccccataaggnnatttacccctggtaaattgtnangnaggttgc

SEQ ID NO: 121400 - DNA, 751 bp, Arabidopsis thaliana
  unsure (1)..(751): unsure at all n locations
caacaaggtaacacatctctctctctctctctctctttctctctttttatatttttgtgtcccaatctcttcttcatttctgtttggttgccgagaaaacgcaggaaacttttctgcaaaaaaactcggtgaccatattcaaaactttcccacgttaattctctcttctttgttttgtttcagattcattacttttctccaaaaaactttcttcaagatctgttcttttaaataattatggcggaagaacatcgatgcgagacgcctgaaggtcaccgtctctgcgttaacaactgcggtttcttcggaagctcagcgacaatgaatctatgttcaaactgttacggcgatctctgtctcaaacaacaacaacaagcttccatgaaatcaaccgtcgaatcatctctctctccggtgatcgcacctgttctcgaaaactacgcggcggagttagagatcccgacgacgaagaagacagagggggaaaaaaaccgattcaaattccgacggagcaacccgtctccggcgggaacgggcggaatcgttgcaccggatgtagggaacggggtcgggttaaccgggtttatgtgtcggtgtgggacgactttttgtgggngccaagggatcgggggtcatggttaacgttggttcaaacggggggcgnaaaaanncgaaanaaaccgtggttttgggacgtcngaaattaacgnccgttncnntnatcttccnggaaatcntncgggggcacgga

SEQ ID NO: 121401 - DNA, 962 bp, Arabidopsis thaliana
tcatcatcatcatttcgccgttaagtttctctctctctctgtttccacccattatagaattcagtgaatcaacaacaacaagattcattacttttctccaaaaaactttcttcaagatctgttcttttaaataattatggcggaagaacatcgatgcgagacgcctgaaggtcaccgtctctgcgttaacaactgcggtttcttcggaagctcagcgacaatgaatctatgttcaaactgttacggcgatctctgtctcaaacaacaacaacaagcttccatgaaatcaaccgtcgaatcatctctctctccggtgatcgcacctgttctcgaaaactacgcggcggagttagagatcccgacgacgaagaagacagaggagaaaaaaccgattcaaattccgacggagcaaccgtctccgccgcaacggccgaatcgatgcaccgtatgtaggaaacgggtcgggttaaccgggtttatgtgtcggtgtgggacgactttttgtgggagtcataggtatccggaggttcatggttgtacgtttgatttcaaatcggcgggacgtgaagagatcgcgaaagctaatccgttggttattgcggcgaagcttcagaaaatatgaatcggagccgttgaccgatttctatctttaccctgagaaaatttcgattgtctcggtggatctcacccgttcattatgttattgtattacggacacgtgtcgcaagattaaggttgagatggtttcgtaactttttaattattttctttgtttatttccgaagaaattaaagtttttatgattgtgtggcttttgcttgtaaaaaaaaaaaagggtttctctttgggaaaaagaaaacggtatatttctagaaaagcttgttgttacgaacaaaaagggcgaccgctctagaggatccaagcttacgcacgcgtgcatgccacgtcatactcttctaagt

SEQ ID NO: 121402 - DNA, 485 bp, Arabidopsis thaliana
  unsure (1)..(485): unsure at all n locations
nnnnnnnnnnnnnnnnnnnnnnnnnnnnnnnnnnnnnnnnnnnnnnnnnnnnnnnnnnnnnnnnnnnnnnnnnnnnnnnnnnnccacgcgtccgattttttttccctctttattttccgagaaaaaataaataaaattatcctctagttttcgatctcgatcatctggatccaagaaattactacgattgctataatgtcgatgtctcggctcggattgttgttgttcgtcgctatattgctcgtcttgcttcagtcttccacttgtctgattagttctccaagttctatcatcaatccttctaaagtcaaacaggtttcgtcgaagcccagggcatttgtgtatgaaggttttttgacggacttggaatgtgatcatctaatctctcttgcgaaagagaatctgcagagatctgcggttgctgataacgataatggcgagagtcaagtcagtgatgttcgtaccagctccggcacttttatctc

SEQ ID NO: 121403 - DNA, 672 bp, Arabidopsis thaliana
  unsure (1)..(672): unsure at all n locations
nnnnnnnnnnnnnnnnnnnnatgatcctnnnnnnnnnnnnnnnnnnnnnnnnnnnnnnnnnnnnnnnnnnnnnnnnnnnnnnnnnnnncggccgctctttatgccccgcggccggtttggttagttgttgtgcatctgagttagaaaaaagtcttttaaggaagtgagagaaaacatgtcttctcttagtagagagctcgttttcttgatcttacagtttctcgatgaagagaagtttaaagagactgttcacaagcttgaacaagaatctgggtttttcttcaatatgaagtattttgaggatgaggttcacaatggaaattgggatgaggttgagaagtatctctctggtttcactaaagtagatgataatagatactctatgaagatattcttcgagataagaaagcagaagtatctcgaggctttggataagcatgatcgtcccaaggctgtggatatactagtgaaggatttgaaagtgttttcaacttttaatgaggagcttttcaaggaaataacacagctcttgacattggagaacttccgggagaatgaacagttatccaagtatggggacaccaagtctgcaagagcgatcatgttggtggaactcaaaaagctgattgaggcgaatcctttattccgtgataaattgcagttccctactct

SEQ ID NO: 121404 - DNA, 507 bp, Arabidopsis thaliana
  unsure (1)..(507): unsure at all n locations
gccacgccccccctcnggtgtcgcggtatcgataagcttgatatcgaattcgcggccgcctctgttaatggaatctagctgtttcgagttttattgtatatatttttttatccttttgcccaaacttttttctgggttttgctttattttttcatccccctttctgataattaatttgcttttttcatgtagtaaaaaaagattctttttttaagctattaaattcacatcttccaattccaggaagacctaaatttcctcttttttttgccgttatctgcagagatgcgaagtttctggataattattcagatataggttccaagtttttagctttcatttctaacttctcttttccgtgttttttaatttccataatctggaaactcagatttgagctcatttcggccattgtttatattgcagatctggtgatagtttggttagttgttgtgcatctgagttagaaaaaagtcttttaaggaagtgagagaaaacatgtcttct

SEQ ID NO: 121405 - DNA, 772 bp, Arabidopsis thaliana
  unsure (1)..(772): unsure at all n locations
atgatactgccagcactaatacngactcactttagggaaagncggtacgcctgcaggtaccggtccggaattcccgggtcgtccctcgcgcccgaaaaactctattattggattggatcatcatcgttaaagctccacgccttgtcccaatttcctctttggttctttccttctggtaagaatccgctctctttctctctttcttttttcttcatatggtacgtcatcggcgacatcaattggctcgatttgattcacctgtagctatcaatcaatccctgatctgtttaggtttgatctcctctgttttttcctagggcttgttattgttgtttctcgaaaaagaagaagaagcgatggtattgggattttagggattattgcggtttgttgtatatatatatatagaagctgagggattttgtgttgtgaagaacatcgaatcctgtttttttccgtaagaaagttcttagatttctccaagtgaaagaagatgtcatcagctggtgttgcgttaagtccggttcgtagcgagccattgattatgcctctggttcgggccaattcttgtcttgattcttatcctgacgacaccatcatgatttaccttacgacttctggatcggtgataccaatgccagtgcttgagtctgattccattgagtctgttaagcttcggattcaggcttacccgcggctgtggtgtgaggaatcagaagcgtgtttgtcgcggtcgagagctacgtagaagcaattctaatatgcgtgatca

SEQ ID NO: 121406 - DNA, 406 bp, Arabidopsis thaliana
gacctgttttgtacgccattagattgaaccctaaaaactctattattggattggatcatcatcgttaaagctccacgccttgtcccaatttcctctttggttctttccttctgggcttgttattgttgtttctcgaaaaagaagaagaagcgatggtattgggattttagggattattgcggtttgttgtatatatatatatagaagctgagggattttgtgttgtgaagaacatcgaatcctgtttttttccgtaagaaagttcttagatttctccaagtgaaagaagatgtcatcagctggtgttgcgttaagtccggttcgtagcgagccattgattatgcctctggttcgtgccaattcttgtcttgattcttatcctgacgacaccatcatgatttacctt

SEQ ID NO: 121407 - DNA, 457 bp, Arabidopsis thaliana
gcggcggctcttactcaactctggccgctccggtccttcgattccagctccaatcagtaattctctctccaaagctcaaaagacaaagaaactcaataatgtctatgagaagctctcttgcgaaggtttcgttgatgatcagattgaactcgctctctcctctcttagagatggagctacgtttgaggctgcacttgattggctttgtttgaatttgccgagtcatgagttgcctgtgaagttttctactggagcttctcgttttccttccacaggaggttctgtgggtgtgatatcgacctcacgggacgattggaatgattctactgactcttcagtcagggtagaggaagaggaacctgcagtttttgttcgtgtgaagggaaagcaagatgaagaagatactcttagttctgacaagtcatctcaagctgattggatcggcagtatatgatga

SEQ ID NO: 121408 - DNA, 632 bp, Arabidopsis thaliana
  unsure (1)..(632): unsure at all n locations
cctaattcaagaaaccatataatcttttcctctgtatttttttacaaatccctcaaagaaacaaaatttacaagatcaagaatgtataacgaatgcagctctccctccaccgcaagatcaacaacgagagtcacaaatcacagaatgagatctccgatctgttgtataggagccaacgcggtggttgagccagaagccatgatgatcggaggagaacaaagaacaccaagatctccttacgaatggctcaaatctacggcgcaggagctagagttaagagatcggtgccggcgtgtgaagtcacgtatcaaggttacgtgtcgtaacaacaattgtgcttataataattgtgttcatcatcatcatcatagccagagttatcctggagatttcagttacgatccgttgagttacgcgctcaatttcgaggataatgtgagagctgatgacgatggtccttttcccaatttcacggcgaggttgcctcagtcgccggtggccaagccgagatcggcgacggttgatttgacctctttctgacggaataattaattcaaaaggtccttaaaaaaacctttcgttctggggganggggatgaactttcccggnatgccgaaaaatgccnnggatt

SEQ ID NO: 121409 - DNA, 425 bp, Arabidopsis thaliana
  unsure (1)..(425): unsure at all n locations
cacacgcgtccgtttctcactcactgttacttcgctaaaaccctaatttcgccattcccttctctaagccctgcgcgtagacatttagaaatggctttctgcaacaaacttagcggtatcttgagacaaggggtttctcagagctcaaatggtccagttacatctatgcttggctctcttcgttacatgtcctctaagctttttgttggtggtctctcttggggaactgatgacagctccttaaagcaagctttcactagctttggtgaagtcacagaagcaacggtgattgcagacagagagacagggaggtcgaggggattcggatttgttagcttcagctgtgaggattctgctaacaatgccataaaagaaatggatggaaaggagctgaatggtangcaaatccgtgtgaatcttgcaac

SEQ ID NO: 121410 - DNA, 886 bp, Arabidopsis thaliana
  unsure (1)..(886): unsure at all n locations
ttaggtacacactatagaagatctatgacgtcgcctgcacgcgtacgtaagctcggaattcggctcgagcacgcgtcgtcgccttcgccgtttcttcacggcggcggagctagcagggtttgctccgggaagatagaaatgttcagggggtgtttttgggatgtcctggtgttggaaaaggaacttacgctagtagactatcaacccttctcggcgttcctcacatcgccaccggcgatcttcgtccgtgaagagcttgcatcttctggacctctctctcaaaagctatcggagattgtaaatcagggaaaattggtttctgatgagatcattgtagacttattgtccaaaagacttgaggctggtgaagctagaggtgaatcagggtttatccttgatggctttcctcgtaccatgagacaagctgaaatactgggagatgtaactgacatcgatttggtggtgaatttgaagcttcctgaggaagttttggttgacaaatgccttggaaggagaacatgtagtcaatgtggcaagggttttaatgtagctcacatcaacttaaagggtgagaatggaagacctggaattagtatgggtccacttctccctccacatcaatgtatgtcaaagcttgtcactcgagctgatgatactgaagaggtggtgaaagcaaggcttcgtttatacaatgaaacgagccagcctcttggaagaatacttccgtaccaagggaaagcttatggaggttgacttacctggaggcatcccagagtcatggccaaggctnttggaagctttaaggctttacggtttccggggggaaaaagcttccgcaggaagtcnctccaaaccccggtttaaaattttttcatngggnnnattc

SEQ ID NO: 121411 - DNA, 479 bp, Arabidopsis thaliana
gcgtccgcccgtttatatctctatacatttctctttctgcaatggcgagattagtgcgtgtggctagatcctcctccctctttggctttggtaaccgtttctactctacttcagccgaagctagccacgcgtcgtcgccttcgccgtttcttcacggcggcggagctagcagggttgctccgaaagatagaaatgttcagtgggtgtttttgggatgtcctggtgttggaaaaggaacttacgctagtagactatcaacccttctcggcgttcctcacatcgccaccggcgatctcgtccgtgaagagcttgcatcttctggacctctctctcaaaagctatcggagattgtaaatcagggaaaattggtttctgatgagatcattgtagacttattgtccaaaagacttgaggctggtgaagctagaggtgaatcagggtttatccttgatggcttttctcgtaccatgagacaagct

SEQ ID NO: 121412 - DNA, 842 bp, Arabidopsis thaliana
  unsure (1)..(842): unsure at all n locations
ccggacgagagaccctctcaaatctcaagctcctttccttccttccttcgatctacactctcagattctctctctctctctttcctctctctttgtcttctctcaggttttgtaatggcggaatcttccaaagtcgttcatgttcgtaatgttggtcatgagatttctgaaaatgatttgcttcagctttttcaaccatttggtgttataactaagcttgtgatgctcagggcaaagaatcaggctcttctccaaatgcaagatgtttcttctgcagttagtgctcttcagttttttactaatgttcagccaactataagaggtaggaatgtgtatgtccaattctcttctcaccaagaattgacaacgatagagcagaatattcatggaagggaagatgagccgaaccgtattctcttagtcacaatccatcacatgctgtatccaattactgttgacgtcctgcatcaagttttttctccctatggatttgtcgagaagctcgtcactttccagaagtctgctggttttaaagctcttatacagtatcaggtacaacagtgtgctgcctctgctagaactgctctacagggtcgtaacatatatgacgggtgttgtcagttggatatccagttctcaaaccttgaggagctgcaagtaaattacaacaatgatcggtctaggggttttacaaatccaaacctggcctgcagggccaaaaggccgttcatcgcttcctggctatggtgatacaggagtggcatatcctcagatggcaaacacatcagcggttncagctgcctttggagggaggcttncntccgggtttanccggcacaaat

SEQ ID NO: 121413 - DNA, 758 bp, Arabidopsis thaliana
cggacgcatggggtcgtcgtagtctctctctctctccgcaaaatatcatcggagaaaagaaacagagacacgaaacagagaaaaccatgcagagattcgcggcgaaaagatcggtgcaaaacatttccgtctctctatggcgtcgatgtatctcatcgacgtctcaggcagcgacagcttccgttaaggattccgacgagtttcaggcgaggcttcctccttttgcttacactcctccgccgtatactggtccttccgccgatgttatccttagcaaaaggaaggagtttctcagtccttccatgttctgtctctatcggaaaccgttaaacattgtggatgggaaaatgcagtatctatttgatgagagtggtcggagatatttagatgcatttgcctgggattgctgttgtgaattgtggacattgtcatccagatgtggttgagccagtgattaatcaaatcaagaggcttcagcatcccaactgttctttaccctaaccatgccattgctgatttctctgaggctcttgcttctaaacttccccggggccctaaagggggggtttttcactaactcagggacaggggctaatgaattggcgcttatgatggctaagtggtatactgggtgtcaagatattgtggcggttcgaaacgggtatcatggtaatgcagctgcaactatgggggctactggtcagagtatgtggaagtttaatgtttcagaatagtgttcatcatgctttgaaccctga

SEQ ID NO: 121414 - DNA, 457 bp, Arabidopsis thaliana
  unsure (1)..(457): unsure at all n locations
nnnnnnnnnnnnnnnnnnnnnnnnnnnnnnnnnnnnnnnnnnnnnnnnnnnnnnnnnnnnnnnnnnnnnccacgcgtccggctgacttactgagttgcattggcaccgatgcgacaatgcacgaccacataaagaaactccttgatcggggttatgcaacaaaggatgctaatacacggttttctccaaccaacctgggtgaggcgcttgtgatgggatatgatgacatgggggatggactttggaaaccaaatctcagagcccttatggaacatgatttgaatgaagttagcgttggcaggaagaccaaagctgaagttcttggaacatgtttgcagcagatgaaagcttggtttttatatgccagagtaaaaaatcaaagttctaaaagaatgacaatttttcttgaaagaactaataacacttgtgaaaggaaacgcacacagcttggtgaagt

SEQ ID NO: 121415 - DNA, 507 bp, Arabidopsis thaliana
  unsure (1)..(507): unsure at all n locations
cnnnnnnnnnnnnnnnnnnnnnnnnnnnnnnnnnnnnnnnnnnnnnnnnnnnnnnnnnnnnnnnnnnnnnnnccacgcgtccgacctccccgacaattggtttctcggctgtatcgttttggccggcgctgttttttctgtctccctgttcaatgttgttcagacagggacggtaaaacaagtatccacatgtgatgaaagtggcttcgttttacagcatagtcgggacgatccaatggctactattctcgttacttatggaaagagaccttagtgcatggaagatccaacctaacttcgatctttatctcattatcgccacgggaacattcggaagtgtaatacgaacaagtgtacacgtaaagggcacccaaatgaaaggaccttattacgtgccattgttcaaaccctttggtatcttttggccacactctttggtaccagcttcttcgtcaacagtcttcactacggcagtgtgttaggagcacccatagctggtgtggggaa

SEQ ID NO: 121416 - DNA, 521 bp, Arabidopsis thaliana
  unsure (1)..(521): unsure at all n locations
tacgactcanatagggagagctggtacgcctgcaggtaccggtccggaattcccgggtcgacccacgcgtccgttcttatttcgccaccgtcctccgccgccgtggtggacttatatctctgcgtttcacgacctgccgccaccgccggcgataggtttcaatgatgaattaaggcgttggccagagagagaagagagattgagatctgtcgatatgctagcgaagaatcggctgccgggaagcggccacactactccgtctcctccggcatctcctcgccgttctcctcgttatcgtcacggtcggtctaaagccgccgccggtagcagatttcctacgagttcaaccaagtcggaccctcgctcatcgcctctcgtggatcctcttatcggctcttctgccgtcgtcaggggattctcttattcgctcctctaatctatatctcttgaatgctgctatacatgggaaccgtctgcttcgacggtgctccaatcattcatcgtctacctgctgcaggatc

SEQ ID NO: 121417 - DNA, 576 bp, Arabidopsis thaliana
atccttttcgtttttagggtttttttttcttagcacagctctctcttctcaatttccccaaatgaaataaattcctccgaaagtttatagatttcactctcccccgaactatacaaaattccctcaaaaggaaaaactaaaaagccgatcttggcttttttgtttctgagtgcatctcgatacttggaagcattctttggtgaggctgattcattctcatctgtgaaagtctttggcttttgaagcaatactatggaaggaattcagcatcctatacctcgcactgtcgaagaggtttttagcgactttcgtggtcgtagagctggtctcatcaaggctctctctactgatgtacagaagttttaccatcagtgtgaccctgagaaggaaaacttgtgtctttatggacttccaaatgagacatgggaggttaatcttcccgttgaggaggtccctcctgagcttcctgaaccagcgttaggcatcaatttcgcaagggacggaatgcaagaaaaagactggatttctttggttgcagttcacagtgattcatggcttatctctgttgcattttac

SEQ ID NO: 121418 - DNA, 853 bp, Arabidopsis thaliana
caacaaatcaagagtttcctgaggaaagcggaggtgaattatgaaattcaacagctaaaatcgaaaatgcgtgattcccagctccaaaagtttcgagatgagcttaagaaccgatctcgggtattaaagaaacttggacacattgatgctgatggtgtcgtccaggtaaagggacgagctgcgtgcttgatagacacaggggatgaattgcttgtcactgaactgatgtttaatggtacttttaatgatctggatcatcaccaagtagcagcccttgcaagctgtttcattcctgttgataaatcaaacgaacaggtaaatttaaggaatgaacttaccaaaccattgcagcagctccaagatagtgcacggaaaatagcagagatacaacatgaatgcaaactggaaattgacgtggaagagtatgtggaatccaccatcaggcctttcctgatggatgttatctactcttggtcaaagggcgcaagctttgcagagattatacaaatgactgacatattcgaaggtagtatcatcagaagtgctagaagactcgacgagtttttgaaccagcttcgagctgcagcagaggcagttggtgaaagcagtttagagagcaagtttgcagctgctagcgagagcttgcgacgaggtattatgtttgcaaattcgctttacttgtaagtactctcttgcagaatacagcttgctgtattgggtaaccatgggacacagcatgttgaaacataacttcatagagaaatgcttgtttgtactttcctatgtatctcgaatcgcgacgatagctctttgtttgccaacaagttagataatgaagaaatttgcagagctc

SEQ ID NO: 121419 - DNA, 502 bp, Arabidopsis thaliana
aggagatcatgtcaggagctcaacgtatccatgacccagaactcttggagaagcgcgcaagagaatgcggcattgatgtcaagacaatatccacgtacattgatgcattcaggtacggtgcaccacctcacggtggattcggagtggggctggagcgtgtggtaatgctcttatgtgccctcaataacatccgcaaaacttcgctattccctcgtgactctcaaaggctcactccctaatatcattgctcttccctggcgactctcaaaggctcgctcccttaatatctatctttgataattgtccccgctcccgatttttaagttatttttttggtgcagttcgttaggtggttagttatcttttaactatgtatgtgttggaaccctttaattatttaggagccgttctttttgggctttttcgggaataataaagggcggccgccggcttgttagcttgttggacaggggatttattcgggccgggtccttgcgggggg

SEQ ID NO: 121420 - DNA, 787 bp, Arabidopsis thaliana
  unsure (1)..(787): unsure at all n locations
atgatctnccagcatctatactgactcactatagggaaagctggtacgcctgcaggtaccggtccggaattcccgggtcgacccacgcgtccgcggacgcgtgggcggacgcgtgggtgaataacccgttaatctctctctgtccctttcttcttcttttttcaagaacaataaaaaaatgtctcaagattctgcaactactactccgccgccacctttaacctccgacgtttcaatgccttccggtgaagaagatgagccaaagcatgtaacatcggaagaagaggcaccggtgacttcggagacaaatctgaagctacctttgatgccggagctagaggagtcaaatcatacggcggaggttgtttcagagaaggtgacgccggagacgatgactttggagtcagaaggtctcaaccacgcggcggaggattcagagcagacacatgaagtgacgccggagacagagactgcgaagctagaggttctcaaccacacggcggaggattcagagcagacacatgaagtgacgccggagaaagagactgtgaaatcagagtttctcaaccacgtggcggaggattcagagcagacacatgaagtgacgccggagacagagactgtgaagtcagaggttctcaaaccatgcggcggaggattcagagcagccacgtggaggtgacaccgacgccggagacagaatacatcggaagcagacacgtcattgcttgtaacttccgagacagaagagcctaaccatgcggcggaggattatncagagacagag

SEQ ID NO: 121421 - DNA, 569 bp, Arabidopsis thaliana
  unsure (1)..(569): unsure at all n locations
gagatatcttttcaccgcccttctcataggtctcgtctctctttctctctattttacgcttttttcctgaacgattcttagggttttgattctctctctctctcgcttccgcccttctcatagcagctctcgccgatcctgtgtaatcgggaatcggtaatcgtcagggtctgtttggggtacggcgacgcgattttctgattattagggtttaagatctcgaggttgaggagagcttgaaaagttgtttgtcaacatggagcgcaagactattgacttggagcaaggatgggactatatgcagactggaattactaagctgaaacggattctggaaggattgaatgagccagcatttgactctgagcaatatatgatgctttatacgactatctacaacatgtgcacccagaaacctcctcatgattactcacagcagctttatgacaagtatcgggaagcatttgaggaatatattaactcaacagttttgcctgcgttgagggagaagcatgatgggtttttcccgggggggatttaaaagggggcancccaaaagaanggcgngg

SEQ ID NO: 121422 - DNA, 617 bp, Arabidopsis thaliana
  unsure (1)..(617): unsure at all n locations
actctgaagcaatatatgangctttatacgactatctacaacatgtgcacccagaaacctcctcatgattactcacagcagctttatgacaagtatcgggaagcatttgaggaatatattaactcaacagttttncctgcnttgagggagaagcatgatgagtttatgctgcgggagctatttaaaagatggtcaaaccataaagtaatggtcagatggctatcccgcttcttctactaccttgaccgttacttcattgctcggagatcacttccaccactgaatgaagttggcctgacatgcttccgtgacctggtttataatgagctacattctaaggtcaaacaagctgtaatagctcttgttgataaagaacgggagggcgagcagattgatagggccctgctgaaaaacgtattagatatctatgtagagattggaatggggcagatggagaggtatgaagaagattttgaaagcttcatgcttcaagatacttcttcgtattattctcgcaaggcatcaagctggattcaggaagaattcttgccctgatacatgttgaagtctgaagaatgtctaaagaaggagaggggnagagtggctcactacctaca

SEQ ID NO: 121423 - DNA, 977 bp, Arabidopsis thaliana
gaaacaagtatctaattcataacactgttttattttgtttaaactaacttaaacaacaccgcactttttatttattatccaggggcttaatattaccctaatagtctcgacatgcaatctctttaccaagaatccatttaccttaacgaacaacaacaacaacaacaacaagcttcttcttcctctgctgcatctttctccgatattgtttccagtgatgttcgaaacaacgagatggtatttattccaccaacaagcgacgtagccgtcaacggaaacgtaacggtgtcaagtaacgatctaagctttcacggtggaggactttctttaagtcttggtaatcagatccagtcagctgtctctgtttctccctttcagtatcattaccagaatctttcgaaccaattgagttacaataatcttaatccttctactatgtctgatgagaatgggaagagcttgagtgttcatcagcatcactctgatcaaattttaccttcctctgtttacaacaacaatggtaataatggtgttggattctacaacaattaccgttacggggcatcagggtttgtgagtaggtgtactgagatctcgttaccttaaaccaacacaacaattgcttgatgaagttgttagtgtaaggaaagatttgaaattggggaataagaagatgaagaatgataaaggtcaagactttcacaatgggtctagtgataacattacagaagatgataaatctcaatcgcaggagttgtctccttcagaacgtcatgagctacagagcacgaagagcaagcttttaacaatggtggatgaggtagataaaaggtataaccaataccatcatcaaatggaagctttagcatcgtctttcgagatggtaacaggtcttggagcagctaagccttacacatccgtagctctgaatagaatctctcgccatttccgctgtgtacgcgacgcgataaaagaac

SEQ ID NO: 121424 - DNA, 607 bp, Arabidopsis thaliana
  unsure (1)..(607): unsure at all n locations
acacggagttccncgctntccagtatggcccatgaacgcgtccccacctttggatggctcctctttgattccgagatgacattcaagaacatcgccgggatggccatagccattgttggaatggtgatctatagttgggctgttgatatagagaaacagaggaccgcaaagtcaacgccacacggcaaacacagtatgaccgaagatgagattaagctactcaaagaaggagttgagcatatcgacttgaaagacgttgaactcggtgacactaaaccataagtgggtgcttataacccatttgaaattactcgtcgctactgattcgaattctttatacaaatatttcctttgtgtgccatttactttgttctttccacttcctatatatgtcttagaacattttgggcttttcagaaagcccataaatccttctttgcttgagaagaaggcccgtccttgaatagtaagtgtcctatatagtaaagtaaacagaaatgtcaactgaagcatgtgattttattcaaaaaaaaaaaaaaaagnnnnnnnnnnnnnnnnnnnnnnnnnnnnnnnnnnnnnnnnnnnnnnnnnnnnnnnnnnnnnnnng

SEQ ID NO: 121425 - DNA, 478 bp, Arabidopsis thaliana
  unsure (1)..(478): unsure at all n locations
aacataagccaatatctctgcatcggaagattctcagcgacatctttccaagttctaggccacatgaaaacagtatgcgtcctcacattaggatggcttctctttgagtccgagatgacattcaagaacatcgccgggatggccatagccattgttggaatggtgatctatagttgggctgttgatatagagaaacagaggaacgcaaagtcaacgccacacggcaaacacagtatgaccgaagatgagattaagctactcaaagaaggagttgagcatatcgacgtgaaagacgttgaactcggtgacactaaaccataagtgggtgcttataacccntttgnaattactcggtcgntactgnttcgnattcntttatacaaatatttcctttgnggtgccatttntttgtnctttccncttncnntatatgtnttngacnattttnggttnaaaaaaanaaataaaagggggggcc

SEQ ID NO: 121426 - DNA, 691 bp, Arabidopsis thaliana
  unsure (1)..(691): unsure at all n locations
gccnnnnnnnnnnnnnnnnnnnnnnnnnnnnnnnnnnnnnnnnnnnnnnnnnnnnnnnnnnnnnnnnnnnnnnnccacgcgtccgcggacgcgtgggttcagctacgtcgagtgaagaaccagtgaagcataagtagcagagacagagagagatacgtgagtgtgtgtctgtgtttttcgctttttggctttcttcgctgattccacgaacggcgtgaatcgacttttctccagatctcatctctttcagtgtttgattctgtcaaaatctgcaagcgaatcgagatttctcagatctcgttttcgcttgcacgagattcagatctgatagtgtcggtgttcaattttctcaaatccaaatggagaaaccggagagcgagaagaaatcggcggtgtctgatgtcggtgcatgggctatgaatgtaatcagctccgttggaatcatcatggctaataaacagctcatgtcttcctctggtttcggttttggctttgctacaacgttaacgggatttcactttgcattcactgctcttgttggtatggtgtcaaacgcaaagtcaacgccacacggcanacacagtatgaccgaagatgagattaagctactcaaagaaggagttgagcatatcgacttgaaagacgttgacctcggtgacactaaaccataagtgggtgcttataacccatt

SEQ ID NO: 121427 - DNA, 409 bp, Arabidopsis thaliana
  unsure (1)..(409): unsure at all n locations
gcgtccgaactccaaggaaagcatcaatggtgggagaagatgcttgcttgtgataatatattcagctacgtcgagtgaagaaccagtgaagcataagtagcagagacagagagagatacgtgagtgtgtgtctgtgtttttcgctttttggctttcttccgctgattccacgaacggcgtgaatcgacttttctccagatctcatctctttcagtgtttgattctgtcaaaatctgcaagccgaactcgagatcttctcagatctccgttttcgcttgcacgacgattcagcatctgatacgtgtcggtgttcacattttctcaaatccaaatggagaaaccggagagcgagaagaaatcggcggtgtctgatgtcggtgcatgggctatgaatgtaatnnnnnnnnnn

SEQ ID NO: 121428 - DNA, 463 bp, Arabidopsis thaliana
ctgagagcaaagacttgacctttttcacttccttctcactgatcgtcgaacaataaggccgtcgcatctcccagttatggctatggccggagaatcttccggcaaaaaaattggagactgtgacggtaaagtcgcggggaacagacagcgaaaggtgggtcttatttacgacgagacgatgtgcaaacacgacacacctgacggcgaggatcaccctgagtgtcccgaccgcatcagagttatctgggagaagcttcagctcgccggagtttctcaaagatgtgtggttcttggtagtagcaaagcacaagataagcatctccaattggttcacacaaaggaccatgttaatttagttaagagtattagcacaaaacagaaagattatcggagaaacaggattgcttcacagttgaattcgatttatctgagtggaggttcatctgaagccgcatatcttgca

SEQ ID NO: 121429 - DNA, 448 bp, Arabidopsis thaliana
gcgaaaagacgacagaaggggaaattaaattcgatttttgagacaaagctcgacaagtcgtcggcggcggtgtaaaaatagtcggagctatggcgatgcaggccggagttggcttatccaggatctttctcttagccggagcaggttacactggtacgatcatgatgaagaatggaaaattgtcggatttgttgggtgaattgcagagtttggtgaagggaatggagaaatctggagaagggtctgagggagattctgatgtttctgatgctatagctgcacaggttcgccggttggctatggagattcgacagctagcttcgcagcaacacataacggtcatgaatggagtttctggtgcaaacctacaagcccttgctgttcctgctgcggcattgggagctctcggatatgggtatatgtggtggaagggactctcattcactga

SEQ ID NO: 121430 - DNA, 517 bp, Arabidopsis thaliana
  unsure (1)..(517): unsure at all n locations
nnnnnnnnnnnnnnnnnnnnnnnnnnnnnnnnnnnnnnnnnnnnnnnnnnnnnnnnnnnnnnnnnnnnnnccacgcgtccgcccacgcgtccgggaagagctcaggacgccaccggtaagtctggtggctctcttcggatacgcggagctacacgcgtccattactaagtatctccactcccagcagcctcccatcaacgctctggccttccccgacttctctcaaatctctctcctccttgctcatgatgatcagatcagccgaacctcctccttcagagatcctctcagcgtctccgattctgcttctcccattccttccagatgcggcggtattttgaaacgggactggttgcttaagcatcgcaccaaggtccctgcacttgtcgccgccttctttccctcacatcacatcttgggcgatccaactcaatggctacaggtctgctcctccgaatctcaacaggcccaaaatccggaattccggcccaaaaacaacaaatgggggggtggcggg

SEQ ID NO: 121431 - DNA, 766 bp, Arabidopsis thaliana
ggccgtctgcagtaccggtccggaattcccgggtcgacccacgcgtccggcgccggagtcaaggagagggagagagcgatccaacggttgagatgtttctacgggcaatcggacggccattattggctaaagtgaagcagacgacggggatcgtcgggcttgacgttgttcccaacgcgagagcggtgctgatcgatctctacagcaaaaccctaaaggagatccaagctgtgccggaggatgaagggtaccgtaaagcggtggaatcattcacgcgccaacgtctcaatgtgtgcaaggaagaagaagattgggagatgattgagaagcggcttggttgtggtcaagtcgaagagcttatcgaagaggctcgcgatgagctcacactcattgggaaaatgattgagtgggatccttggggtgtaccagatgattacgagtgtgaagtgattgagaatgatgcgccgattccaaagcatgttcctcagcaccgacctggtcctcttcctgagcagttctataaaacgcttgaaggtctaattgcagagtctaaaacagagatcccagctgctacacccagcgatccgcagttgaaggagtaacttccagtttttacatattgtgtgcttgttgcttttttggctagagttgtttccgaatcagtggtcaagcctctggattaaattgcttaataattttcataacgataacaatgtctgttcacaaatgttttatccctcttattaaacaaatgatgtttctaccc

SEQ ID NO: 121432 - DNA, 743 bp, Arabidopsis thaliana
  unsure (1)..(743): unsure at all n locations
tattcgactcttatagggaaagctggtacgcctgcaggtaccggtccggaattcccgggtcgacccaggcgtgcgccacgcgtccgcccacgcgtncagagacgcgtgggctgctagaagactacagaagggggagtcaaggagagggatagagcgatccaacggttgagatgtttctacgggcaaatcggacggccgtttattggctaaatgtgtagcagacgacggggatcgtccggcttgacgttgttcccaacgcgagagcggtgctgatcgatctctacagcaaaaccctaagggacatccatgctgtgccggagagatgaagggtaccgtaaagcggtggaatcattcacgcgccaacgtctcaatgtgtgcaaggaagaagaagattgggagatgattgagaagcggcttggttgtggtcaagtcgaagagcttatcgaagaggctcgcgatgagctcacactcattgggaaaatgattgagcagttctataaaacgcttgaaggtctaattgcagagtctaaaacagagatcccagctgctacacccagcgatccgcagttgaaggagtaacttccagtttttacatattgtgtgcttgttgcttttttggctagagttgtttccaaatcagtggtcaagcctctgaataaattgcttaataattttcataacgataacaatgtctgttcacaaatgttttatcactcttattaaacaaatgatgtttcttcccc

SEQ ID NO: 121433 - DNA, 896 bp, Arabidopsis thaliana
  unsure (1)..(896): unsure at all n locations
nnnnnnnnctnnnnnnnnnnnnnnnnnnnnnnnnnnnnnnnnnnnnnnnnnnnnnnnnnnnnnnaacaaaactaaccacgcgtccggggttttcttcttccttcttcttcatcctctttgctgctatgattgagctccatggatctgcaatcatagttcttcgatttaggattcgtttagatcgcggtttttgagctcggttggtgaagacatatgcttgaaaacagaagtcttgtactgaagcatggctcttcggctaccagcttctaaagcagctgaagttgcgattggatctattggctgtggttatgatctagctattgatttacggttgaagtattgcaaaggaggttccaaagattctagattacttgacattaaaaaaggtgatgataattgtgagattggtttaccctggtggaatctccattcctaatgtttgcacagtctatcaaatgcgattaagggggagcgtatggcggttagggcccgattttcttcctttcccacagattggaagacccagtcaacccaggaactttctgtgggtggggaaaatcccggcagggttcttcaaaggccttgtttgaattttcagacctgtggcagaagacgcagcctccccaaaaaccttgctttgaggggggtttatcccatattcttggaggcttggacaatttaaagggtactcccggagcttgtaaccgggggttcatcacaagggccctcgtgtttggagggtttaaatttattgggcgctttattttttgtaaaagggggaaaaagtttttccaaaacaccttctaattcaccgggattgaaagggaaaaagggcataaatgcggagctccttcgattcggtccaaaacacctgttggggaaaggagccccgattg

SEQ ID NO: 121434 - DNA, 372 bp, Arabidopsis thaliana
  unsure (1)..(372): unsure at all n locations
caaaaactcatcctccaaatttaatacctcttccctcacaatctccaacaatggctgacgataagaagaagcggcacaagaagaagaagcgtactactggtaacaagaggaagatgaccactgagcagtcagaagcctttaagtcaatcaccgattggctcatcttaggttcttctccatctctctcctcttcctctgatgactttgccgtcagcatcaattctggttctctaagatgtggagagaaagttggtgtttgagcttcattctcattcaagatcgcagcgatgggggttctagtcaccttcaaaaggtcgtggggggggcgggttgtaaccaatggggggtaaaagtcctttttttnnacggggt

SEQ ID NO: 121435 - DNA, 918 bp, Arabidopsis thaliana
  unsure (1)..(918): unsure at all n locations
tcaggttctactctaatggacggcacattttgtctgctggccaggatcgtgccttccgcctgttctctgtcatccaggagcaacaaagtatagagctttctcaaagacacatttgtaggcgagccagaaaactccgactgaaggaggaagagttgaaagtgaagcctgttgtttcatgtgattgcgctgaaattagggagcgtgattggtgcaatgttgttacttgccatatggctacagcagaagcatatgtatggagacttcagaactttgtacttggagagcatatcctcaaaccatgccctgagaatccaacaccaattaaggcatgtgcaatcagtgcctgtggaaactttgcagtagtcggaacagctggtggatggattgagagattcaacctccaatctggaatcagccggggtagttacttcgatatgtcagagaaaagaaggtacgcccctcgcggccgagttattggagttgcttgcgactccacaaacacactcatgattagtgcaggatatcatggggacttaaaggtttgggatttcaaaaagcgggaattaaagtcccagtgggatgtcggatgttcgttggttaaaattgtctaccaccgtgtaaatggtcttttggctacagtggcggatgattttgttatccgtttatatgatgttgtgacactaaagatggttcgtgaatttagaggtcatacagaccgtataacggatttgtgctttagtgaggatggcaaatgggtcatctcatctagcatggatggaagtcttagaatatgggatgtcatattggctaagcagattgatggtgtgcatgtcgatgtgccaataacagcattgtctttatcaccaaatatggacgttttggcaactgcccactctgatcagaacggngtctacttgt

SEQ ID NO: 121436 - DNA, 363 bp, Arabidopsis thaliana
gttgatatggttaccttcaacattaactctagtttatgagtcaaatagactctaatatttcatttgtgtaatacaggtttgggatttcaaaaagcgggaattaaagtcccagtgggatgtcggatgttcgttggttaaaattgtctaccaccgtgtaaatggtaaattttcctaatctaaccctacattttcacttgtacgatctcacaaatgtatcagtttccgtcattttctcctagggtaccaccgtattgactctgactttgctaatttcttatcaattggtaggtctcttggctacagtgccggccccccctgttatccgtttatatgatgttgtgacactaaagatggttcgtgaat

SEQ ID NO: 121437 - DNA, 701 bp, Arabidopsis thaliana
acaaactcgatttcccgatttcgtcgcctcttctcgtctctccgctctcctcgccgcgagtctgtttcgccgccgtctatctcccaattccgtgaccgttgttgtttagtgaatcgatgatttacactgctatcgacaatttttacctatccgacgagcagctgaaggcttcaccttcgaggaaagatgggatagatgaaacaactgaaatctctcttagaatctatggatgtgatctcatccaagagggtggaatattgctcaaactgcagttatggctactgggcaggttctgtttcagcgattctattgcaagaagtctttggctaaatttgatgtcaagatagttgctgccagctgtgtatggcttgcatcaaaactggaagaaaaccctaaaaaagctagacaggtcatcatcgtattccacaggatggagtgtcgcagggagaacttgccattagaacatctggatatgtatgccaagaagttctctgagttgaaagttgaattaagcagaactgaggagacatatactgaaagagatcgggttttcgttttgtcaatgttgaacatcctcacaaagttccatatcaaactacccttgccacatttaggaacaccctccagaatttgaggcaagaagctttggaatttggccaatgatagtctgcgtacaaccctctgtgtaaggttcagaagtg

SEQ ID NO: 121438 - DNA, 832 bp, Arabidopsis thaliana
cttggccctcctcgaggtcgacggtatcgataagcttgatatcgaattcgcggccgcggtctggataccgatggaaatgagctgcctagactcatctatgtttctcgtgaaaagcggcctggatttcaacaccacaaaaaggctggagctatgaatgcattgatccgtgtatctgctgttcttaccaatggagcatatcttttgaacgtggattgtgatcattactttaataacagtaaggctattaaagaagctatgtgtttcatgatggacccggctattggaaagaagtgctgctatgtccagttccctcaacgttttgacggtattgatttgcacgatcgatatgccaacaggaatatagtctttttcgatattaacatgaaggggttggatggtatccagggtccagtatatgtgggtactggttgttgttttaataggcaggctctatatgggtatgatcctgttttgacggaagaagatttagaaccaaatattattgtcaagagctgttgcgggtcaaggaagaaaggtaaaagtagcaagaagtataactacgaaaagaggagaggcatcaacagaagtgactccaatgctccacttttcaatatggaggacatcgatgagggttttgaaggttatgatgatgagaggtctattctaatgtcccagaggagtgtagagaagcgttttggtcagtcgccggtatttattgccgcaaccttcatggaacaaggcggcattccaccaacaaccaatcccgctactcttcttgaagaggctattcatgttataagctgtggttacgaagacaagactgaatggggca

SEQ ID NO: 121439 - DNA, 408 bp, Arabidopsis thaliana
  unsure (1)..(408): unsure at all n locations
aaagcatataaaaaagagagtataaagagaataaagagaggattttttctatagttgccaaagcacaaaaaatccctgacgaaggctggacaatgcaggatggtactccctggcctggtaacaacactagagatcatcctggagtgatacaggtgctcttaggccatagtgggggtctggataccgatggaaatgagctgcctagactcatctatgtttctcgtgaaaagcggcctggatttcaacaccacacaaaggctggagctatgaatgcattgatccgtgtatctgctgttcttacccaattggagcatatcttttgaaacgcggattgtgatcattaacttttaaattaaccagttanggctnattaaanggnaggcttatggttgttttcaattgaatggg

SEQ ID NO: 121440 - DNA, 504 bp, Arabidopsis thaliana
  unsure (1)..(504): unsure at all n locations
cnnnnnnnnnnnnnnnnnnnnnnnnnnnnnncagaaancagaaagcaaaaacagaanggggnattantncctcctcgcctccgaattgatccaacaaatgaaagattactcgaagatcggcgataaacttgtgatgcagagacctagacgacgtttggaaggcaccgccatgggcgccaccgtgttcgatctccgtcccggcgtcggcatcggacctttctctatcggaatgccgatttgtgaagcatttgctcaaatagagcagcagcctaacatatatgatgttgttcatgttaaatactacgacgaggatcctttgaaactggatgttgttattagctttccagatcatgggtttcatcttcgatttgatccctggtctcagaggttacggcttgttgaaatatttgatgtcaagcggcttcagatgcgctacgccacttctatgattgggggtccatcaactctggcaacgtttgtggctgtttatgcactgtttggacc

SEQ ID NO: 121441 - DNA, 1080 bp, Arabidopsis thaliana
  unsure (1)..(1080): unsure at all n locations
acgaaaacctagcagccgctgagctctatctactcaacttcaccatggaccggaggctcaagaaatgctcgacatccaccgatgttgaatcagttcatgatgttagtaaggtcacggatcctttgcagaaagctaagagagagttggataatgtggaaatcaaagaaaaacagaagaagcagaagaaccaaaatgaaacatctgagaaggaaactaaaaaattcagcaccgtttacgaaaagtttaatgatactattaaagaactagacagggtttctggaacatgtcccatacgacctgccattccattcacgcccccaaaggaaaaggtggaaccgatatatcacaatgagtgcaatttcgatgataaagctcatctgggagtatctgacagcgccctttttgtacaaggatttgatacttcccatccaaggcatgaaatcaagacagcattgtggaatcatttctcttcatgtggggttgacactcaatggaagtcatttgggaggacggaagatcgatgttatgttcgccatagatagagaagagttttacttctcctctaacttaaaacactgtcaacgctgccgtaattataggccatggcttgttttaaaagccatgtcagatgcctgctttgaatatcaccagaggattaaaccgcggatcgttggcactccccatagcaagattggtcgttttacagccattattggtcgtcgctcttacagctagtatttggtcctttttaccgttgctgctaccttgttactccaccagctacatgattttaggtctaagtagagttgtgtctttatgattttaggagttttaaagtctttttcttacatgactggcgtgattagcaagcatgttctctattggtgattgatctcaaacgtaaagaaaatagtaaccgaatactcaatttatatctgtttgactttaatgacatccgtattttcaaaaaaaaaaaaaaagnnnnnnnnnnnnnnnnnnnnnnnnnnnnnnnnnnnnnnnnnnnnnnnnnnnnnnnnnnnnnnnnntcaacggaaatgcacctcaatttttttctttttc

SEQ ID NO: 121442 - DNA, 496 bp, Arabidopsis thaliana
cgaccacgcgtccgaaggaacaaaggtgaggtttcagacacagacagaacaaacaacgaagaaaattcaaaatcttatttcaattcaacgtatactttccttaaattaggaatttggttttcgagaaaattgagatccgaataactatggtgagactcaagacgagtctctgggttcttctccttgccctcgtttcaattcagttaaatggttcgtttggatctgaatcaagtaaagtagcttatgtcacacttttgtatggagatgagttcttattaggagttagggtattgggtaaatcgattcgtgacactggatccactaaggatatggtcgctttggtttctgatggtgtctcagactactctaagaagttactcaaggctgatggatggaaagtagagaagattagtttactggcaaatccaaatcaagttcatccgactaggttctggggtgtttatacaaagcttaagatctttaacatgactgatta

SEQ ID NO: 121443 - DNA, 507 bp, Arabidopsis thaliana
attcaatctacgttagccttccttcagatcaagacgacgacgttttaagcaacaagatgcagttaggtcagtttatctacgttgatcggcttgatccagggacacctgttccgatcatcaaaggtgctagaccgattcccggacgacatcctttacttggaactcctgagccattgatgagtacaagaggaaagattgagagttcgagacctagaagaggttcttggggtcaaaacggtgacgtttcgtctccgtttgtgttaaagcctgcacctttggattttgatcagtgtacgccggcgaaacataggcttggtacggggagatttatggcggcgtctccgaatgttatgactagagggaggtcacctggtggtgttagatgttcttatggtggagggcttttgtcgaaaatggcggagagtcctgctgcaatgatgaggaagagctgtgttgttccgccgagttcgaagtttccgagaagtaaaagtgtttgcgatagagaga

SEQ ID NO: 121444 - DNA, 416 bp, Arabidopsis thaliana
attttcaattgcttctctcttctctcttctatagccccattgtcgtgggttcccactagcagctttcttgtcttcctccgttttcttttccttcattctactaaaacagaggtttttgcctcttcctctcttgtttcactctttagggtacacacaaattcactcttttttcttctttgtttgggaggggaaaagttacagttttttcctctgttttggatcaaaatttcgtttttttggttgtgttaagaaagcaacagagagagagagaaagattgaaactttggatgtgaatttagggttttgtgaattggggaaaaagcaatccagagatggctcaacagagacaatttcagatggaaggtggtaataataatacaacagataccaagttgacgaaaatctttgttggagga

SEQ ID NO: 121445 - DNA, 693 bp, Arabidopsis thaliana
  unsure (1)..(693): unsure at all n locations
nnnnnnnnnnnnnnnnnnnnnnnnnnnnnnnnnnnnnnnnnnnngcacgcctgcagggacccggccggaattcccgggtctacccacgcgtccgattttctccctcaaaagtctctgttttttttcctttttccggcgaagctctatttagcttgattccggcgtttaacacgcgttttaatcgaaacagacatttgagatcgaattaattttgtagcgggctgtgtctttattatagatggagagagattttctcgggttgggttcgaaaaattctccgatcactgtcaaggaggaaaccagcgaaagctctagagattcagctcccaacagaggaatgaactggtctttctcaaacaaagtatcagcttcttcttctcagtttctatccttcaggccaactcaagaagatagacatagaaagtctggaaattatcatcttcctcactctggttccttcatgccatcatcagtagctgatgtttatgattcaacccgcaaagctccttacagttctgtacagggagtgagggatgttccctaattccatcaacacggggaacactacgcagtttcccatggcgatgccgggttccagtctcatcattatgcaccatgagggagaagcttcatgaacattaccattaactcacaacctttggtaggagttcctatcatggcaccctccaattt

SEQ ID NO: 121446 - DNA, 527 bp, Arabidopsis thaliana
acgactcactatagggaaagctggcacgcctgcaggtaccggtccggaattcccgggtcgacccacgcgtgcggtaaagtgctctctccccaatggctaatcaccaccgacttttacgcggcggcggatctccggccataatcggtggcagaatcacactcacagctttcgcttccactatcgcactcttcctcttcactctctccttcttcttcgcttcagattctaacgattctcctgatctccttcttcccggtgttgagtactctaatggagtcggatctagaagatccatgttggatatcaaatcggatccgcttaagccacggttgattcagatccggaaacaagctgatgatcatcggtcattagcattagcttatgcttcttacgcgagaaagcttaagctcgagaattcgaaactcgtcaggatcttcgctgatctttcgaggaattacacggatctgattaacaaaccgacgtatcgagctttgtatgattctgatggagcctcgattgaagaatct

SEQ ID NO: 121447 - DNA, 575 bp, Arabidopsis thaliana
atcatcatcaatcctcatccctccgattctcacccgtcgtaatctcctcctctccaccacaatcgccaccgtaactccaccaccaccagctaaaccaccttcccccgacatcacaataaccgatcgagtcttcctcgacttctccctctgccccacctacttccgctcagatccctccgcgacactctcctccaccacaccttgctccgattcaactcctctcggccgcgtcgttctcggattatacggccgtcacgttcccataaccgtctcaactttcaaacgtatgtgtacttcatcttccacatcttacaaaaacacacctgtccacaaaatcttccctggtcagtattttctcgccggaagacaaggaggaggacggcgagatacggcggaggtttggttattcactcaggggcttaccttgtaacaccggcgttgttaattccaagggttttttacttccccaaaggtgcgcggctggtgttgcttctctctggttatctgagaatgatgatgatgatgatattagactcgatcctgattatagaaatgttgaattcttaatcactact

SEQ ID NO: 121448 - DNA, 506 bp, Arabidopsis thaliana
tatacgactcatatagggaaagctggtacgcctgcaggtaccggtccggaattcccgtgtcgacccacgcgtccgtacggctgcgagaagacgacagaaggggacacacgagaagttagttaagcagcaacaaaaaaaaaacatggagaaacagaacattatctcaaacacttcttcttcgtcttcttggattcgtggttcttgtgttggaagaggttgttttggtacagtaagcaaagctttgagtaaaatcgacggtggacttttcgccgtgaagtcgatagatctcgccacgtgtcttccttctcaagcagagtcgttagagaacgaaatcgttattctacggtcgatgaagtctcatccaaacatagtgaggtttctcggtgatgatgtgtctaaagaaggaacggcgtcgtttcgaaatcttcatttagagtattcaccggaaggcgacgctgctaacggtggaatcgttaaggacacgccttctcagggttacgtgtggt

SEQ ID NO: 121449 - DNA, 489 bp, Arabidopsis thaliana
  unsure (1)..(489): unsure at all n locations
tcgtttttcctctctcttctctctcttctctctcttctctctacttagctgcctcgcttttgctccttttacctctttccatctttcaatctcctttgagagagagagcaaatgaaaaaaacccaaaaaactcttttctccaaccattaccatctcatgaacactctcacaggaggctctctcttctcagagagcctacccatctaatatttcttcatctgagtctcttttacttctctcaaagtatcgatctttattcttctttttgtaaaccctctctctctctctgatttctactgacctgtttggaagatatgatggctcatcactccatggacgatagagactctcctgataaaggatttgattccggcaagtacgttagatacacgccggaacaagttgaagctcttgagagagtttatgctgagtgtcctaaacctagctctctgagaagacaacagcttattcgtgaatgtcncattctct

SEQ ID NO: 121450 - DNA, 408 bp, Arabidopsis thaliana
ttcttctccgtcgcggaaaagatggggaccaccaccaatctgagatcttggctgtatctcattcttctcttcatcgtcgtcgtcggcgtcaacgctcagaatcggagacctaagaatgttcaggtggctgttaaggctaagtggcagggtactcctcttctccttgaggctggtgagttgatttccaaagaatcgaagcagttgttctgggagtttactgatgcttggcttggttccgatggagatgattccgattgtaaatcagctagagattgtcttcttaagatatctaaacaggcttcgactctgttagctcaaccagtggcttctctcttccatttctcacttactctgagatctgcttcgcctaggcttgtgctttaccgtcaattggctgatgagtctcta

SEQ ID NO: 121451 - DNA, 397 bp, Arabidopsis thaliana
cactctgattccaattcctcctctctctctttcgtctctctacttcgaattgattgttttaaccgccggtgatcggagcaaactctctgacggtgaccgccggtgatcattttttgtgaacttcacttttggtgtataaagcatagttcgttgggaacttttttttacagctttggagtaactacctttcatggtttttggttccaacaatggggtcaaaatcatttggaaatctattagacttggcctctggggatcttttggacattcctcagactccgagatatcttccaagagtgatgactgttcctggcattatctctgacgttgatggatatggaattagtgatggcgattcagatgtcatttcattaccttgccgtgagcggaaaatcat

SEQ ID NO: 121452 - DNA, 635 bp, Arabidopsis thaliana
atttttaaaaaacaaattctgaaaattaacaattagagaaaaagaaaagaaaaggaaaaaacaaaaagatttctagtagaaagagagaagggcgtgaattcctgagcgagagattcttcgccggagtaatctctttgcgtgatcttaccggctgcttaattcgtcttcgcctgattcgttggtttcaaaattcgtctctctctttcaatcggaggttaattgtttttctgtttgggggtcaaagcgaagatggtgaacgctatggtggagagagcgacgagcgagatgctgatcgggcctgattgggctatgaacctcgagatctgtgatatgctcaatagcgatccagcgcaagcaaaagatgttgtgaaaggcattaaaaaacggattggtagcaggaatccaaaagctcagcttcttgccttaactctgcttgagacaatagtgaagaactgtggtgacatggttcatatgcatgtggctgagaaaggtgttattcatgagatggtccggatagttaagaagaagccggacttccatgtcaaagagaagattctggtccttatcgatacatggcaagaggcctttggtggccctaaggcaagatatccaccaacaataacagtccatatgct

SEQ ID NO: 121453 - DNA, 340 bp, Arabidopsis thaliana
gctttgaattaaaaaatagaagcaatagtttttgggggacaagcccggccgacgaatcggcggcgagacgttctttgtcaccgattgacatattcaaaaacgacgaagctaggtaaaggaacggagagaagagtcgataatacaagcgtagagatgggaaatcagaagctcaaatggacggcggaggaagaggaggcgttactcgccggagttaggaagcatggccctggaaagtggaagaatattctccgcgatcctgaattagctgagcagctctctagtcgctctaacatcgacctcaaggataaatggcgtaatttaagtgttgctcctggtattc

SEQ ID NO: 121454 - DNA, 398 bp, Arabidopsis thaliana
gcatatattacaaaacacatactaattgtttctccttctccttcttccttgcaaatggatactttagcttcaaactcttcggatctcacgaccaagtcaagtctcggaatgtcgtcgtttaccaacatgtatctcctcacaacgcttcaagcccttgcggccctttgcttcttgatgattctcaacaaaataaagtcatcttcacgaaacaagaagttgcatcctctcccgccaggacccaccggttttccaattgttggaatgattccggcgatgcttaaaaaccgtccagttttccggtggctccacagcctcatgaaggagcttaacacggagatagcttgtgtgcgtctaggaaacactcacgtgattcctgtgacatgtcctaagattgcacg

SEQ ID NO: 121455 - DNA, 510 bp, Arabidopsis thaliana
  unsure (1)..(510): unsure at all n locations
nnnnnnnnnnnnnnnnnnnnnnnnnnnnnnnnnnnnnnnnnnnnnnnnnnnnnnnnnnnnnnnnnnnnnnnnnnccacgcgtccgaatattctctactctaaaactccttgtgaagactatgttgaagctgctgttaaacaggcaatgacgattcacataacaagcccacctggggacattctcatttttatgaccgggcaagatgagattgaggcagcgtgcttttcactaaaggagagaatggaacagctcgtatcatcttccagtagagaaataacgaacctactcattctcccaatatactctcagttacctgctgacttgcaagcaaagatattccagaaaccagaagatggagcccgtaaatgcattgttgccaccaatattgctgaaacatcattgacagtcgatggaatatattatgtgattgacactgggtatggaaagatgaaaggttttcaatcctagaatgggtatggatgctcttcaagttttccccataagtcgtg

SEQ ID NO: 121456 - DNA, 682 bp, Arabidopsis thaliana
cagctctctacgactcactatagggaaagctggcccccctgcaggtcccggtccggaattcccgggtcgacccaccgcgggcggagaaagatatggttggaatcctgccgccagagttttgtcaagatgatttctgaaaaacagcttaaagagatggaggaactgaaggcaaagacccaaacaactcatgctcaaccggatgatctaattgacttcttccatctaaagagtcggaagggaatgagtcaacttgagttggaagaccaggtacaagatgacctaaagcgtgcaactggagaattcaccaaggacgagaacgatgctaacaaacttaaccgcattcttcaactcacaggattcagtgacccagtctatgctgaagcatatgtaacggtacaccattatgatattgctcttgaagttacagtaatcaaccgaaccaaggaaacccttcagaacttgtgcttggagttagcaaccatgggtgatctcaaacttgttgagcgtcctcagaactacagtctggcacctgaaagaagcatgcagattaaagcaaacatcaaggtgtcgtccacagagacgggagtcatattcgggaacatcgtctatgagacatcaaatgtaatggagcgaaacgtcgttgttcttaatgacatacacattgatatcatggactatatct

SEQ ID NO: 121457 - DNA, 629 bp, Arabidopsis thaliana
  unsure (1)..(629): unsure at all n locations
gcgaaaacaaaactcatttacgaaacttcatttggttaccaaaccaaacagtacatgtgataacattcaggctaccgcttctgccatantgtcctctagaaagccatcgattcttgctgatggaacttatgctacccaaagcgcagcccctcgcgccccattctcctcacctacagttgttcaaggatcactgacttctggaaatttgagagcactgctactaactggtgattttttcctcggagcagtggttgcttgcacgttgaccaaacttgttcttaggttagaagaggttcagtcttctaaaactgaagtaaataagacagtcacacaggctttgttgatcatggtttctatgttgcaacttgggcaatctcctgtttctccacaccctattgataatgattcgtatgagaggattgtgttgtgcataaaattgctttgccataggaatgatgagatgaaaaagatatggttagaatcctgccgccagagttttgtcaagatgatttctgaaaaacagcttagagagatggaggaactgaaggcgaagacccaaacaacgcatgctcaacctgatgatctaattgacttcttccatctaaagagtcggaagggaatgagtcaac

SEQ ID NO: 121458 - DNA, 1036 bp, Arabidopsis thaliana
  unsure (1)..(1036): unsure at all n locations
nnnnnnnnnnnnnnnnnnnnnnnnnnnnnnnnnnnnnnnnnnnnnnnnnnnnnnnnnnnnnnnnnnnnnnnnnccacgcgtccgcccacgcgtccgtacggctgcgagaagaccacagaaggggaggacaagaagaattcaattttcattgtcagtggaagagggagggaaagtttaagcaggtggttcactccgtgcaaaaaaattggaattgcggcagagcatggatacttcttaaagtggtcaggcagtgaagaatgggagacatgtgggcagagctctgattttgggtggatgcagatcgtggaacctgtaatgaagcagtacactgaatcgactgatggctcttccattgaaatcaaagagagcgctttggtttggcaatatcgggatgcggatccaggctttggttctttacaagcgaaggaaatgctagagcatttagagagtgttctagctaatgagccagtggcagtcaaaagcggtcactacatagtagaagtcaagcctcagggagtgagcaaaggatccgtgtcagaaaagatattttcatcaatggccggaaagggaaaaccggttgatttcgtgttatgtattggagatgacagatctgatgaagacatgtttgaagcgattggtaatgcgatgtcgaaaaggttactctgtgataatgctctagtctttgcatgcacagttgggcaaaagccaagcaaggctaaatactacttggacgatactactgaagtgacatgcatgcttgaatctctagctgaagcatcagaggcttcaaacttttctatgcgtgaacttgatgaagccctttgatttggaaccagatcttttgccagatggctaaagaagaggttagacagacaaagacaaggaatagaagagactgggagtttgttggtctgtatgtgtttttgtcagattggaanggaaangnaaaaaatannnnnnnnnnnnnnnnnnnnnnnnnnnnnnnnnnnnnnnnnnnnnnnnnnnnnnnnnnnnnnnnnnnnnnnnnnnnnnnnnn

SEQ ID NO: 121459 - DNA, 608 bp, Arabidopsis thaliana
  unsure (1)..(608): unsure at all n locations
atgatacgttnnnnnnnnnnnnnnnnnnnnnnnnnnnnnnnnnnnnnnnnnnnnnnnnnnnnnnnnnnnnnnnnnnnnnnnccacgcgtccgcccacgcgtccggggaatttgagtatcgtgagaagcctgacacatgttgccctaaatgcagtgagccacagacctctgatatgtccacaagtccaaatgagcttatattacttgtaaggtttgtgcaaacacttctatcagaccgatcgtcggaaagaaaaagtaacttagagtctggcaatgataagctgttgacgaaactgaaagctgatgatgatcaatggagacatgtcataggaacgatcatagatggcagtgcatcatcaacaagtacagttgattggcttctacaggaactgcttaaagacaagctggatacatggctgtcttcaagatcatgtgatgaagattacataacgtgttctttgtcaaagcaggaacaaggtattatccatatgggtgcaggccttggcttcgagtgggcattttatccaatccttgctcatggagtcaatgtagattttcgtgatattaagggatggagcgctcttcattgggctgcacaatttggaagtg

SEQ ID NO: 121460 - DNA, 547 bp, Arabidopsis thaliana
ccaaacattaagtagcactctttttcctctctatatctctcactcacactttttctctatatcttctcctcaacttggatatgggtgaagccgtagaggtcatgttcggaaatgggttcccggagattcacaaagccacatcacccactcaaaccctccactctaaccagcaagactgccattggtatgaagaaaccatcgatgatgatctcaagtggtcttttgccctcaacagtgttctccatcaaggaactagtgagtaccaagatattgctctgttggacaccaaacgttttggaaaggtgcttgtgattgatgggaaaatgcaaagtgctgagagagatgagtttatctaccatgaatgtttgatccatcccgctctccttttccatcccaaccccaagactgtgtttataatgggaggaggtgaaggctctgctgcaagagaaatactaaaacacacgacgatcgagaaagttgttatgtgtgatattgatcaggaagttgttgatttttgcagaagatttctgaccgttaacagcgatgc

SEQ ID NO: 121461 - DNA, 367 bp, Arabidopsis thaliana
  unsure (1)..(367): unsure at all n locations
gggatttcttctgggatgatgagtttcgacctaaatgggatttcatgcttgccaacttcaaaacgttggaggaggacactcagacaggaacaatgattgttcagtggagaaaaaagtttcctttttttctgtagtgaccgagagtatatcattggccggagaatatgggagtctgggaagaagtattattgtgtcacaaagggagttccttatccagctctaccaaagcgtgataagccaaggcgtgttgagctttatttctcaagttgggttatcagagcggttgaatcccgaaaaggagatggacagcaaacggcttgtgaagtttcccttgtccactacgaagacatgggcatcncaaaagacg

SEQ ID NO: 121462 - DNA, 657 bp, Arabidopsis thaliana
  unsure (1)..(657): unsure at all n locations
ctcactatagggaaagctggtacgcctgcaggtaccggtccggaattcccgggtcgccccacgcgtccgcccacgcgtccgcggacgcgtgggaaatacctaaatctcaacttcacggaacaccgatacataaagacaatagagtggtaataatttgttgagaccaaaagtaattaaacacattacacatggggaaaaagaacggctcttcttcttggctcaccgctgtaaagcgagctttccgatctccgacgaagaaagatcatagtaatgacgtcgaagaagatgaagaaaagaagagagagaagagacggtggtttagaaaaccggcgactcaagaatctccggtgaagtcttccggtatctctccaccagcacctcaggaagattcacttaacgtaaactcaaaaccctctccggagacagcaccgagttacgcaactacgacgccgccatccaacgccggtaaacccccgtccgccgtagtccccatcgccacgtcagcatctaagacactcgcaccgaggcggatntattacgcaagaganaattacgctgctgttgtcatccagacttctttcagaggatatttggcaagaagagcattaagaagcattaaagggttagtgaagctacagcattggtgaggggacatat

SEQ ID NO: 121463 - DNA, 1041 bp, Arabidopsis thaliana
  unsure (1)..(1041): unsure at all n locations
nnnnnnnnnnnnnnnnnnnnnnnnnnnnnnnnnnnnnnnnnnnnnnnnnnnnnnnnnnnnnnnnnnnnnnnnnnnnccacgcgtccgcccacgcgtccgctttttgtttgcatcggccatctctaaccttacgattgtgtgttcttgctttgagcgaaaccctagaatcggtcttaacccatttgagcagagatgctgcgagtagcaggaaggaggcttttttctgtttcgcagagatcatcgacggcgacctccttcgtcctttcccgtgaccataccctttccgatggaggcaactcctcttccgcttctagatctgtcccctctgcagatctctcatctttcaattcttaccaccggagcgttataagaggttttgcttctcaagtcattactcagggaaatgagataggttttggttcggaagtcccagccacagtcgaagctgtcaaaacacctaactcaaagattgtctatgacgaccataaccatgagcgttacccacctggtgaccctagcaagcgggcattcgcctattttgtcttgtcgggtggaagggtttgtttatgcctctgttctccgcctgcttgttctgaagcttattgtgagcatgtctgcaagtaaagatgtccttgcccttgcatcccttgaggttgacctaggggagcatagaaccaggaactaccgtgacagtcaagtggcgtggaaagcccgtcttcatcaggcgaagaacagaagatgacatcaagctggccaatagtgtggatgttggatccctgagggacccacaagaagactcggttagggtcaagaatccagaatggttggtcgtggttggagtgtgcactcatttggggtgcatccccttgcctaatgctggtgattatggtggttggttttgtccgtggcacggatcacattacgatatatctggaaagaatttggaagggtcctgcaccaaacacctggagncccaccaaagctncctggaaanaaagtccccccggtggtaanaaacccacgcaaggcggncngntgnnc

SEQ ID NO: 121464 - DNA, 786 bp, Arabidopsis thaliana
  unsure (1)..(786): unsure at all n locations
aggggttcgagtgtgagcatgtctgcaagtaaagatgtccttgcncttgcatccctcgaggttgacctatggagcatagaaccaggaacttccgtgacagtcaagtggcgtggaaagcccgtcttcatccggcgaagaacagaagatgacatcaagctggccaatagtgtggatgttggatccctgagggacccacaagaagactcggttagagtcaagaatccagaatggttgatcgtggttggagtatgcactcatttggggtgcatccccttgcctaatgctggtgattatggtggttggttttgtccgtgtcacggatcacattacgatatatctggaagaattaggaaaggtcctgcaccatacaacctggaagtaccgacctacagcttcttggaagagaataaattactcattggttaatgaataaagcacaacagtccgagtgtcatggtctggatgatcttaaatctgtttttgtttttatattttccggcattttagcgtgcaagttcgctttcctcacactttgggctcagcaaaaattggcttgttttgctgaataatacaaacttgtcattgtatgacttagtatctgtctcatctggtgaaaatacattgttcatacttcatagtctctgtttattatttgaaaagagttttgaatagtatcaaaaaaaaaaaaaaaaaaaaggnnnnnnnnnnnnnnnnnnnnnnnnnnnnnnnnnnnnnnnnnnnnnnnnnnnnnnnnnnnnnnnnnnnnnnnnnnnnnnnnnnnnnnnn

SEQ ID NO: 121465 - DNA, 498 bp, Arabidopsis thaliana
  unsure (1)..(498): unsure at all n locations
gttttgttttgcatcggccgtcccaaacctgaggatttctctgttcagctagagcgaaaccctagattcacatttgagctgagagatgctgcgtgtagcagggaggaggcttttctctgtctcgcagagatcttcgactgcgacctccttcgtcgtctcccgtgaccataccctttccgatggtggcggcgactcctcttcagctcccagatccctcccctctgcagatctctcatcttaccaccgtagccttatcagaggcttctcttctcaagtccttgctcaaggaaatgagataggttttggttcagaagtcccagccacagtcgaagctgtcaaaacgcctaactcaaagattgtctatgatgaccataaccatgagcggttacccaacctggtgaccctagcaagcgtgcattcgcctattttcgccttctccggggtggggagggtttgttnatgcctttgtcctcggctgnttttttttnaaggtttttg

SEQ ID NO: 121466 - DNA, 403 bp, Arabidopsis thaliana
aaaggaatatccgcaaagaagaaaaaaaaacatttttttggtaaaggactaatctttttgtttgcatcggccatctctaaccttacgattgtgtgttcttgctttgagcgaaaccctagaatcggtcttaacccatttgagcagagatgctgcgagtagcaggaaggaggcttttttctgtttcgcagagatcatcgacggcgacctccttcgtcctttcccgtgaccataccctttccgatggaggcaactcctcttccgcttctagatctgtcccctctgcagatctctcatctttcaattcttaccaccggagcgttataagaggtttttgcttctcaaagtcattactcagggcaaaatgagataggtttttggttcggaagtccagccacagtcgaag

SEQ ID NO: 121467 - DNA, 321 bp, Arabidopsis thaliana
taatacgaccctctatagggatagctggtacgcctgcaggtaccggtccggaactcccgggtcgacccacagcctccgaattaggaaaggtgctgcaccatacaaccctgggggtaccaacctacagcttcctggaagagaataagttactcatcggttgattaataaaagcacaacagtcaagagtctggatctgaatgatgatcttcacttggtcgttgtttcttttaatgaatattttccggcttgttagagcaagattgacttgcttttgctggataatacaaacttgggatttttagtttgaagtatactcaatct

SEQ ID NO: 121468 - DNA, 582 bp, Arabidopsis thaliana
catggagtctttgtggcacatgtattaagcctataatgctgattgagaatattgctcaaggagataatgaagcggttaaggtggatttcgatgacaagcttagttgggagtatctattcaaggtatattggctttgcctgaaggaagagctgtctctaactgttgatgagcttactagagcaaataatccttggaaggaggttcctaacactgctcccaaagtggagtcacaaaatgatcataccaataacagagctttagatgtagcagtaaatggaacaaaaagaagaaggaccagtgattcccctaccttacccaacaagttggatggcaaaaatccaagtaatatcctaaagaaggctcctggagatacgagctgggcaacaaaagaactcctcgagtttgtgtcgttcatgaaaaatggcgatacatctgttctatctcagtttgacgtgcagggtcttctgcttgactatatcaagaaaaaaaatcttagggatcctcttcagaagtctcaagttctttgtgaccagatgcttgtgaagttgtttggaaaacagcgagtgggtcactttgaaatgc

SEQ ID NO: 121469 - DNA, 841 bp, Arabidopsis thaliana
  unsure (1)..(841): unsure at all n locations
nnnnnnnnnnnnnnnnnnnnnnnnnnnnnnnnnnnnnnnnnnnnnnnnnnnnnnnnnnnnnnnnnnnnnnnnnnnccacgcgtccgcttcgtaacgcattttcgttgattcactttccagctttatctcaaactctctctctgtcgtctcgatcgatctcccaaatctcaaattctgaattgattttttttgtttataaacaaagcaaacaaaacacataattttggttcggtcttcttcaattttcaccgacacaaacccgtcttttcctcttctctctcatttctatcaatttttctctacaattccccagtcgtcgaagaagctacagcttgcaatttgctcgtgttctcttccatcattccttggttaagagcctcttcatggcttctacggttgattccaatttcttctcatccgtcccagcttttacagtaccctcggacttttgtctcctgatcagatcgaactggcaaaaatctaattagaaaatggccagagtcatctcttccaacatggcctgaactcggtgttgatgataaagagaagctagcttttttcgatcagattgctcgcttaaattcaagctatcctgaaggtttagcagcatacattangactgcgaaagaccttctcgctgattcgaaagtagggaaaacccatttgatggtttctctccttctgtccctcaggagaaaattcacttttggtactgacaactcatcgaaatggaaaaaagaggtgtcgcgaagctaggaatgctgttttgtctggtgctggtgtcttggcaacctcttgttacaatgatcaaggggccctccaaggagaccactcagggact

SEQ ID NO: 121470 - DNA, 716 bp, Arabidopsis thaliana
  unsure (1)..(716): unsure at all n locations
caacgtagaagcttctacagattcgatttgggtgtttttggttttggatttggtaaagcttctcggtcacttgctcggtgattgaaactgaatcgattgtgattgtgattgtgattgtgattgtgattgtgagggaattatggctcaagccgtagaagagtggtacaagcagatgccgattataacccggtcgtatctcacggcggctgtagtcaccaccgtcgggtgttcgctcgagattatatctccttataatctctacctaaatcctacccttgtggtgaagcaataccagttctggcgtcttgtcacaaatttcctttatttccgaaagatggatttggactttttgttccatatgttttttctagctcgatactgcaaactgctcgaagaaaactccttcaggggaaagaccgcggatttcctttacatgctcttattcggggcaactgttctaactggtattgttctcattggcggaatgataccttatttgtctgtttcattctccaaaatcatcttcctcagcaattcattgactttcatgatggtctatgtatggggtaaacaaaatccttacatccacatgagtttccttggcctcttcactttcacagcagcttatttaccatgggtacttctgggattcnctatccttgtgggtgcaagtgcatgggggggntttctggggatnatagcgggcncggatacta

SEQ ID NO: 121471 - DNA, 495 bp, Arabidopsis thaliana
cggacgcgtgggctttcacttcttcttcgtctccgtagtttcagtttcgatctgtaaagtttcaaacttgtggtcgaatttttaaatgggaagtggaagagatagagacgaccctttatccttcaccagcaatccatctacggcgtcgtctccagtcactgtatctgactatctcgacaactttctcggcgaacccacttctcgctccggtagttttcaaagcgagagcttactcggtggaggcggtggagaaagcatcaacgacgctgattttggattcgctcgtcctgatttccgatcggaacaactagctggaaccgtacagttttacgagaggcatgtcttcttgtgctacaaaaagccatctgtttggcccgcaaggatcgaggctgctgagttcgatcgattgcctaggctactctctgctgctgtatcggccagaaagggtagcatgaagaaggagactcgactcacaatatgtgaggggcatgatgg

SEQ ID NO: 121472 - DNA, 206 bp, Arabidopsis thaliana
acttgggtagtattaggctgtagtaagaaagtgaagtactgatatgtatgtgtaagctctctcagtgatgggaagttttgtacgtttgtgtggttttaacttaatgataaggtgtttgtttgtagtagtagtctccatgtaactagatgggggaaaagtaggtgtgactttaagtttcttaaaagctcaaagaaactttagccctt

SEQ ID NO: 121473 - DNA, 519 bp, Arabidopsis thaliana
acccacgcgtccggaagaaagtccactcaagaaaagagaaatggcgtttgaagctcttacgggagtcaacggtgatctagtcaccatatcatggatggcgtcgaagggagctaaccaaacggagcactatctcaaagaaagaagtaggaggaaccgttgttttcgccttccgagcatctctctcgtcggaagatttgttcgctacggagaatacatctccctttggagaaataaagatgaagcgtaatcaatttccttgtatgagaagcatcggcaacgacgttgacactactgttaacgaagctttcctcaagtcacttgaagttctcattggtccaagaacctgatttcatgcttctgtgcaaagcgcggttgatagaaaacaacaggttgtgttcacaggacattctttcggaggcgcaactgcaattctagcaacagtttggtatttggagacatacttcatacgtgacgcctatgctgcccctgagcctcgttgtgtgacatttggagctcctt

SEQ ID NO: 121474 - DNA, 1673 bp, Arabidopsis thaliana
  unsure (1)..(1673): unsure at all n locations
attccgggcgaccacgcgtccgacttgtcaagccgggggccaacatctgatggagatcttggtgtctgcataagtgcacctggtggggctgttgctcctgttcctacatggacgcttcaaagacgcatgctcatgaatggaacatcaatggcatctccttctgcctgtggggcaattgcgttacttctaagtgctatgaaggctgagggcatcccagttagcccgtacagtgtgagaagggcccttgaaaatacatctacaccagtaggtgatctacctgaagataaactaactactggacaagggcttatgcaagttgataaggcatatgaatacttaaaacagtttcaggactatccatgcgtattttatcagataaaggtcaatctctccggtaaaacaattccaacatcacgaggcatctacctgcgggagggtactgcttgcagacagtctactgagtggacaatacaagttgatccgaaattccatgaaggtgcaagtaatttaaaggaacttgtccctttcgaggaatgtcttgagttgcactccacagatgaaggagttgtacgggttcctgactatctccttctcactaataatggacgtggcttcaacgttgttgtggatcccacaaatcttggggatggtgtgcattactttgaagtttatgggattgattgcaaagcaccagagcgtggtccccttttcagaatcccagtaacaataataattcccaagactgtggcaaatcaacctccagttatttcatttcagcaaatgtctttcatctcaggccacattgaacgaagatatatcgaggtaccacatggagcaacatgggctgaggctacaatgcgaaccgcggggtttgatactacacgacgattttacattgatacacttcaggtttgcccattgcgaaggcctatcaagtgggagagcgcaccaactttcgcatctccgtctgctaaaagctttgtgttccctgtggttagtggtcaaacgatggaactagctatagctcaattttggtcaagtggcctcggaagtcgtgaaccaactatcgttgactttgagattgaattccatggagttggtgtcgataaagaagaattgttacttgatggaagtgaagcaccaataaaagttgaagctgaagcactattggcatctgaaaaacttgttcccatagctgtcctgaacaagatacgagttccatatcagcctattgatgcacaactgaagactctatcaactggccgtgatagactactgtcgggcaaacagatactagcattgaccttaacctacaagttcaaattagaagattcagctgaagtgaaaccgtatataccattattgaacaatcgcatatatgacacaaaatttgagtcccagttttttatgatctctgatactaacaagcgtgtatatgcaatgggtgacgtttatcctgagtcttcaaaacttcccaagggagagtataaacttcagctgtatctgaggcatgaaaatgtggagctgctggaaaagttgaagcagctcactgtgtttattgaaagaaatatgggggagattcggctgaattttcattctgaacccagatggtcccgttcacctgggtaaatgggtgcctttaagtcctctgttctaatgcaggggntgaaggg

SEQ ID NO: 121475 - DNA, 497 bp, Arabidopsis thaliana
cgaacaagaaccctagaattcgcctcctctttccaaaattcccaatttttgtaatgacgggatagaaaaattcccaatgtccgctttatctttcattctcgattagaattcttcaaccaaaggtcactctctctccgttccattgcttctggatttcgtttttaagggttttacatttttcctgccttcttttacccatcagaggaagtttcaagccattttgttaatcagctctctcataagctaagatgtcgtcatcgccttttccagtcttggacaaccgaccaattgataagtggaaggttacggaattgaaagaagagcttaaaagacggagactaacaacaagaggcttgaaggaggaattggttaggcgtcttgatgaagcacttcgtgctgagcaagaagagtctgaaaggatcaatagtgctactgttgctgctgctgaaaaagccaatcaagagcctcagatgtttcctgttactgtaggtgatcgt

SEQ ID NO: 121476 - DNA, 1320 bp, Arabidopsis thaliana
gaaagcacttcggatgatgtattatgcagaccatcacggttttccaatcgtgacatttatcgacactcctggagcctatgcagatcttaaatccgaggaacttggacagggtgaagcgattgccaacaatctgaggacgatgttcggcctgaaagtgccaattctttctattgtcattggggaaggtggttctggtggtgccctagccattggctgtgcgaataaaatgctgatgctcgaaaacgcagttttctatgttgccagtccagaggcatgtgcagcgatcttgtggaagacttctaaggctgctcctgaggctgctgaaaagcttagaattacctccaaggagctggtcaagcttaatgtagctgatggaatcattcctgaaccgcttggaggggcccatgccgatccttcatggacgtcgcagcaaataaagatcgctatcaatgaaaacacgaacgaattcggaaaaatgagtggggaggagctcctgaaacacaggatggctaagtaccgaaagattggagtgttcatagagggcgaaccaatagagccaagtaggaaaatcaacatgaagaaaagggaagccgtgttctcagatagccggaagctgcagggtgaggttgacaagctgaaggagcagattctgaaagccaaggagacgtctacggaagccgagccttcgagtgaagttcttaatgagatgattgagaaactcaaatccgagatagatgacgagtacactgaagctgcaatagcagtaggtttggaggagagactaacggcaatgcgcgaagagttctcgaaagcgagttcagaagagcaccttatgcacccggttctgatcgagaaaattgagaagctcaaggaagaattcaatacccgtttgactgacgcacctaactacgagagcctaaaatctaagcttaacatgcttagggacttttccagagccaaagcagcatcagaagctacttcattgaaaaaggagatcaataagcggttccaggaagctgtagaccgcccagaaattagagaaaaggtcgaggcaatcaaagctgaggttgcgagctcaggagcttcttcttttgacgagttacctgatgcactgaaagaaaaagttctgaagactaaaggggaggtcgaagcagagatggcgggtgtgttaaagtcaatgggtctggagcttgacgctgttaaacagaatcaggagggtacggctgagcagatcttatgccgcaaacgaaaccttcaaggaaactttaaagctgacccaggatttccccagcaagtttaggggggttgtgaggccacctg

SEQ ID NO: 121477 - DNA, 1169 bp, Arabidopsis thaliana
  unsure (1)..(1169): unsure at all n locations
atgatcctnnnnnnnnnnnnnnnnnnnnnnnnnnnnnnnnnnnnnncggaattcccgggtcgacccacgcgtccgcaacacaaaacctccaaaccaataatcagaacacagtgagatatttctctctgaagccaaagatggaaacggcgtcttctaatttctctctctcgcagatcctcaatattgaggaaccctacagctccgtaatgctcggtgtcgccgctctcttggccgttgtttgctatttctggatacaggggaagtccaaatccaagaacggaccaccgttgcctccgggaccttggccacttccgatcgtcggcaacctcccgttcctaaactctgacgtcctccacacgcaattccaagccctaaccctaaaacatggccctctcatgaagatccacctcggttccaaacttgcgatcgtcgtctcttcccctgacatggctcgcgaggttctcaaaacccacgacatcactttcgccaaccacgatctccctgaagtcggaaagatcaacacttacggtggtgaagacatcctctggtctccttacggtacccattggaggagacttcgtaagctctgcgtcatgaagatgttcactaccccaactctcgaagcttcctactccactcgccgggaagaaacccgacaaaccattgtccacatgtcggaaatggctcgtgaaggatcaccagtcaacctcggagagcaaatatttctttccattttcaacgtcgtgacaagaatgatgtggggcgccactgttgaaggagacgagagaacgagcttaggaaacgggctcaaaaccctaatatctgatatctccgacatagaagggattcaaaactactcagatttctttccgttgttctcaagattcgatttccaaggattggttaagcagatgaaaggccatgtgaagaagcttgatctcttgttcgatagagttatggagagtcacgtcaaaatggtgggaaagaagagcgaagaagaagaagatttcttgcaatacttacttaaagttaaagatgatgatgagaaagctcctctgtccatgactcatgtcaagtctctcctcatggatatggttcttggtggtgtcgacacatcggttaacgcatccgaatttcccatggcagagattgtgagcagaccggaagtg

SEQ ID NO: 121478 - DNA, 425 bp, Arabidopsis thaliana
aaaatccaacccaagaaccacagtgagatctttctcagaagacaaaaatcccaacagcgtcgtctaagtctaacatcaacctctcgcaggtcctcaacactgaggagccgtacagctccgtgatgctggccgtcgctgctctcttggccgttgtatgctacttatggattcaggggaagtccaagtccaaaaaggaacctccactgcctccgggaccttggccacttcctatcgtcggctaaacctcccgttcctaaactctgacgtcctccacacgcaattccaagccctaaccctaaaatatggccctctcatgaagatccacctcggttccaaacttgcgatcgtcgtctcttcccctgacatggctcgcgaggttctcaaaacccacgacatcactttcgccaaccacgatctccctgaag

SEQ ID NO: 121479 - DNA, 840 bp, Arabidopsis thaliana
ggccccccctccgggtcgacggtatcgataagcttgcttctgaagatactctctcctcgaatcctctattgcagaattttgacttccctccgtttgactccgttgatgctcaccatgtcagacctgggattcgtgctctgttgcagcagctcgaagctgaattggagcagctagaaaaagctgtagagccttcatggccaaaactagtggagccattagagaagattattgatcggttatctgttgtttggggaatgatcaatcatcttaaggctgtcaaggacacacctgagcttcgtgctgccattgaagaagttcagccggagaaggtgaagttccagctcaggttgggacagagcaaacccatttacaatgcatttaaggctattcgagaatctccagactggaattcattgagcgaagctcgtcaacgattagttgaagcccaaataaaggaggcggttctgagtggtattgctcttgaagatgataagagggaagaatttaacaaaattgaacaggaacttgaaaaactttctcataagttttctgagaatgttttggacgctacaaagaagtttgaaaagttgataacagacaagaaagagattgaggggttgccaccatctgcacttggattgttcgcacaagcaactgttttcaagggccatgacaactgcaactgctgaacactgggaccattgggctcaattaccactccgatggcttcctaagttatatcttcccccgtttatgccaaacattgcccaaaaaaaccggagctttttgcggccgaggggaaattcttaccgggggctttacctttattcccccgtggcc

SEQ ID NO: 121480 - DNA, 728 bp, Arabidopsis thaliana
  unsure (1)..(728): unsure at all n locations
nnnnnnnnnnnnnnnnnnnnnnnnnnnnnnnnnnnnnnnnnnnnnnnnnnnnnnnnnnnnnnnnnnnnnnnnnnnnnnnnnnnccacgcgtccgcggacgcgtgggctttctcataagttttctgagaatgttttggacgctacaaagaagtttgaaaagttgataacagacaagaaagagattgaggggttgccaccatctgcacttggattgttcgcacaagcagctgtttccaagggccatgaaactgcaactgctgacactggaccatggctcattacactcgatgctcctagttatcttcccgttatgcaacatgccaaaaaccgagctctgcgcgaggaagtctaccgtgcttacttatcccgtgcctcttcgggtgatttagataatacagcaattatcgaccaaatcttgaagcttcgactggaaaaggctaagcttcttggttacagaaattatgctgaggtaagcatggccacgaaaatggctactgtggagaaagcagatgagctactagaaaagcttcgcagtgcttcatgggatccggctgttcaagacatagaagaccttaagagttttgcgaagaaccaaggtgctgcagaggctgacagtttgactcactgggacatcactttttggagtgagaggcttcgtgaatccaaatacggtattattggggaaggacttcggccttacttctaatttcccaagggttttgggttgc

SEQ ID NO: 121481 - DNA, 633 bp, Arabidopsis thaliana
aaaaaataaaaataaaaatgaagagaataagaataatggcaacgcttgtaatagcaaacatgttaatggcgactccaacgtctcgagcctctctcaatcttcttcgtcgatcgccaaaacccaaatatttctcatcttcttcttgtcattttcgtccctcaacttttcgtaaatcatatccttgccccatctggtcttcttctttctctttttgtctccctcctcctagatccaccacttccacctctctctcctcctcctctttccgccccttctcctctcctccgtccatgtcttccgccgccgctgccgccgtggaatccgtcgtctccgacgagactctttcctcgaatcctctcttgcaggacttcgatttccctccgtttgattccgttgatgccagtcatgttcgtcctgggattcgtgctctattgcagcatctcgaagctgaattggaggagctagagaaatctgtggagccaacatggccaaaactggtggaaccattagagaaaatcgttgatcggttaactgttgtttggggaatgatcaatcaccttaaggctgtcaaggacacacctgagctacgtgctgccatcgaagacgttcagccagagaaagtgaagttccagc

SEQ ID NO: 121482 - DNA, 710 bp, Arabidopsis thaliana
ttcccgggaaagaaagaaaaaaagagaaggcatggccgcggaagaagcgacggagttctacctgagatactatgtcggtcacaaagggaaatttggacacgagttcctggagttcgagtttagagaggacggtaagctccgttacgccaataactctaactacaagaacgatactattatccgcaaggaggtatttctcacccccgccgtgctcaaggaatgcaagcgtatcgtctccgagagcgagattctgaaagaagacgataacaattggccggaacctgaccgtgttggaaagcaagagctcgagatcgtcttgggtaatgagcatatctcattcgctacatctaagattggatctcttgttgattgccagagcagtaatgatcctgaaggacttcgcatcttctactatcttgttccaggacttgaaatgtcttgttttttcgctcatctctctgcacttcaaaatcaagcctatctagagaagaaaatcagtttgtgacatgtcaagacgcgatgaatttgttgggaacatgaggactttgtgactgaagtttggttgtttttatgtctctggttctctgtttttttttttttgttggatttgggtgaaagtgggtatgtaagatgttctacctcaacttttggtccttttttgtgtcaacatcccatgtgaagaacctttcatgaaccacaacctatcttct

SEQ ID NO: 121483 - DNA, 411 bp, Arabidopsis thaliana
gctagtagcctcttgtactcttccattttacgcgcaatccacgcaccaacaaaaagaaaagaaaagaagagataaagaatatctttaaaaagtaagtgtggagaattctttcttctcaataaacaacaacatgtcgtcgagcaatgaaaatgctaaggcacaagcgccggagaaatctgactttacccggagatgtagtttgctcagccgttacttgaaggagaagggtagtttcggaaacattgatcttggcttataccgaaaacccgattccagtctcgcgttgcccggaaaattcgatccaccagggacttttattatctctttcttctttcatggccgccacttggtaatagtactttaaaaactcagttctgttactacttgcttttgccagatttactacttttg

SEQ ID NO: 121484 - DNA, 401 bp, Arabidopsis thaliana
acgtgaaccacctcaccaccagacacacaaaaagacgagaccgatcggcgatcagtagacttaaccaaactcgcggtgaaacagtcggaatccaccgctataaggaacgatgatgatctcccaattcttcgtcttatctcagcgaggagataacatcgtcttccgtgactaccgggctgaggtacccaaaggaagtacagagacattcttccgtaaagtcaagttctggaaggaggatggcaatgcagaggcgccacctatctttaatgtcgatggcgtgaactacttccatgtcaaggttgttggtctatattttgttgcgacaacgagagttaacgtgtcaccctctcttgttttggagcttctacaaaagattgctcgtgttattaaagattatcttg

SEQ ID NO: 121485 - DNA, 341 bp, Arabidopsis thaliana
acggacgcgtgggttttttttttttaataatatagctctcgtcgtttataattttttttttttcgtctggggcaaattgtaatctagaaacgacaggaaccaagggttacgaaattgaagatcgaagatgttagaacagcttttaatctttacccgaggaggattaatcctttggacatgcaaagagattggtaatgcattaaaaggatcacctatcgatactttgatccggtcctgtctccttgaggaacgatctggtgctgtttcgtttaactacgatgctcctggtgctgcctacactctcaagtggacgtttcacaatgatcttggacttgtctttg

SEQ ID NO: 121486 - DNA, 511 bp, Arabidopsis thaliana
aacacgcgtccgtaggattctgattccgagtctctagttccaaagagaagagaacatctgtgagagatctgagacgtctggaaatgtgaagaaaacaaaaaaaaaaaagatctgagagagagagtttcgaaattctcgtgttcgtaagcaaaaatggtttgggagaaagagaagatcgtcggaagttgtatagtcggaggagctgcgttcgccgtcggagcttctttccttcatcttttccttaaaggtgagcttccgttaggattaggtttaggtttgtcttgtccatggcgcattttgagaaaacgaaaacctgttcgcgtttacatggatggttgcttcgatatgatgcactatggccactgcaacgctcttcgtcaagctcgtgctctcggtgaccaattggtcgtcggtgttgtttccgacgaagaaattatagccaacaaaggacctcctgttactcctcttcatgaaagaatgacaatggtgaaagctgtgaagtgggtggatg

SEQ ID NO: 121487 - DNA, 481 bp, Arabidopsis thaliana
aaaaacaaaaaactagctcatcgtcgtcatgtcgtctctgtctcctccaccgattccaatggaactccacgccggtaaccggaaaaagttactagaatcaatacgccgtcagttatctagttccaatcgttctctcgatggatttgttcttctacagggtggcgaggagaaaaatcgatactgtactgatcacaccgagctcttcaggcaagagagttattttgcttacttgtttggagtcagagagccagatttctatggagctattgacattggaagtgggaaatctatcctttttattccaaggttgcctgatgattatgctgtttggttgggagagattaagccattgtcgcattttaaggaaacatatatggttgacatggttttctatgtggatgagattattcaagtctttaatgaacaatttaacggatctggaaagcccctgttgtatctcttgcatggtcttaatactgac

SEQ ID NO: 121488 - DNA, 780 bp, Arabidopsis thaliana
aagaaactaacacaagtataaatttacagaaaaatgcttgataagcttaccagagggatcggaggtctccggcgcggacatgggcatttccaggcaagcgcaggcttcgggttcgaggagcacaaggagttttcgagtcgtgtggagtcatcaggaggcttcgttgaccgtcaagcccgctacaaccaccgtacgggcaaccatggccgtccacccatgcatgtctgggatgaagaagactcagactcagacgtggaggagttctttgagagcagccggacccaacacactactgcgttgccgcaaccacttcatatgaacttcaggcctccacctccagtgactcagcctcaccacaacggaaaaatgggaaagataggtaatggattgcagcagggacacgagatacatgggatgaagcaccagggcgggcacagaatacagcatcagggcatgcatgggatgcagcacccgggtggagtagtggtaaacgctactgagaattggcgggtcagcaaaatcaccggccagaaactcgggtggggaggtaagggactctagactccacctaaatactatgccggttcaaataagaaagtaatgattatgtacccaaataatacatttataagatgtatgtgtgtgatggacatgtttctgtatcgtaccaaaactaaataggtggcttttatcccaaaaaaggtgctttcgtttgatgaccttatgatttctaaagagtgttgttgttgctgcttatgtttaataaaagtgatgtatatt

SEQ ID NO: 121489 - DNA, 854 bp, Arabidopsis thaliana
  unsure (1)..(854): unsure at all n locations
ttctttacttgattgcttattcatctgttgattctgtggttaggtttgattcttctggctctgttttgttctgtttttggtgtttaattcttcttagcaagcaaataagggtatatgagtttgttggacatgggtggagatatgatggaagatgattgggaatttgcgtcatcatcaaaccctaaaagaaccctagttcttgtgggccgtactggaaacggaaagagtgcgacaggtaacagtatccttgggaggaaagcttttaggtcaagagctagaactgtaggagtgacaagcacgtgcgagtcacagagagttgttcaagaagatggtgatatcattaatgttgttgatactcctggtttgtttgatttgtctactgcagctgattttattggtaaagagattgtgaggtgtataagtttggcagaagatgggattcatgcgatcttgttggtattctctgtgaggcggcttgctgaagaggagcaaactgtgcttagtttcttgcaagcgctattcggcagtaagatcgctgactatatgatcgttgttttaaccggtggcgatgagttggaagagaatnaggagacattggaggagtatttggctgactattgccctgagtttcttaaagaaattcttgggatatgtgacaatcggttggtgttgtttaataacaagactactgataaggtgaagnaagctgagcaagttcagaaagcttctctcacttngttgaatctgttgttaaacataaccattnggtaaaccntattcagatgagttgtnccntgngctaccaggaagnggctttcaantaagggccccgaaaaaggngtttgntttacttc

SEQ ID NO: 121490 - DNA, 528 bp, Arabidopsis thaliana
  unsure (1)..(528): unsure at all n locations
nnnnnnnnnnnnnnnnnnnnnnnnnnnnnnnnnnnnnnnnnnnnnnnnnnnnnnnnnnnnnnnnnnnnnnnnnnnnnnnnnnccacgcgtccgctcgactctgttccaagaaattcctctacttaatacagctgattctacagattcctgctacgaaatttctgggtctgggttgatctttgtctcaccagtcaacccaattcaggactttgataaaggtggaaatggcggctttattagcttctcagagctgctgctatggcggtgagaccgcaagagtcaccaaagctattggtttcagtagctctttggagaatcatttcactggggaagccactcagtgttatggcagcaagtctaagagatttcgtattgagatgagacagtcggaattgccctctaaggttggaatcaatggacgttcagtcaaaatggttcctgcgagtgaggtggtgaagaggaaagatggtgtgaatggatccgctgggaaaggggttaatggagcgagttttgttagtagtagaaaca

SEQ ID NO: 121491 - DNA, 512 bp, Arabidopsis thaliana
  unsure (1)..(512): unsure at all n locations
nnnnnnnnnnnnnnnnnnnnnnnnnnnnnnnnnnnnnnnnnnnnnnnnnnnnnnnnnnnnnnnnnnnnnnnnnnnnnnnnnnnccacgcgtccggtaaaactctctcacaaagcaaaaaaaccaaacctaaacaaaaatctagaaagaaagatttccgaaaatctttttaatgaaaaaagagcagacaggacgagaattcgcttttctgaatcctttagagtattgttttctccgtcgaattcgcatgaacacttgagctcaacaagacggcgtggaagtggacggtgaggtagttttttttagtttttgaaagacatggcgcaaaacgggtacttggttccagcggatccttcggcggttgtgacggtgaagaagaaaacgccacaagcgtcgtgggctcttattgacgcgacgggacagagtgagccactcgatgttgataagtatgagatcatgcaccgtgtccagattcacgctcgcgatctccggattctaaccccaatttatctta

SEQ ID NO: 121492 - DNA, 398 bp, Arabidopsis thaliana
cagctttggttctgcctccgccgcttcttcttcttcttctaatctccgacagatttactctgattctgttgtcttcgagatgatgatgatgtcgtcgcttggtggtggtggtggtggaggaggaggaagtggtggtggtattggtggtggcggcggagggaggtttatgacgtattcgtcgtctctttcggtgcctccttctgctcctcagtctcctaattactccggtggtctccgatcacagtcttctgtcttcgttgagcaagagaagtatctttcagagttacttgcagagcgtcataagcttactccattcctgcctgtgcttccacatgcatttcggctactaaaccaagaaattttgcgtgtaaccacactgttggagaatgctacagttt

SEQ ID NO: 121493 - DNA, 411 bp, Arabidopsis thaliana
cccacgcgtccgcggacgcgtgggcagaaacctttgtttcatttgcttcgtgtgcgatcgcgagaacaagggaaaattagggtttatatcctcaagctttttcgaacaccattgatcgttgatctaagatttttcttctagtcgagtttcttaaggggctttgatcaaactcaaaattgaagaccaatactttgaaggattctggtaaagctaagcaactatgagttcaaattcatgggctgatgtttctgaatcagagagggcaccatctggtggtggttggggttattctcgtccgtctcgaaccaactatgttcctccacatcttaggagccgtacaccatcttcggagtttgttgctccttcacctggtaataatgatcgtgggggatatggtggtgcaaatagtgg

SEQ ID NO: 121494 - DNA, 1000 bp, Arabidopsis thaliana
  unsure (1)..(1000): unsure at all n locations
gattctccaagctctaatacngactcactattagggaaaagctggtaccgcctgcagggtcccggtccggaattcccgggtcgacccacgcgtccgaagacaacaagccgatctcattcctttcactaagtcaaagcttgacttccttctcgaccacttctctatcaccaaagactctcctcaagggaaagccataaaggagactttgggacattgtgatgctaaagctattgaaggagagcataagttttgtggaacttctttggagtcattgatcgatcttgtgaagaaaacaatggggtataatgttgacctcaaggtcatgacgactaaagtaatggtaccggcccaaaattcgataagctacgctttgcataactacacattcgtcgaggctccaaaggaacttgttgggattaagatgttgggatgtcacagaatgccttacccttatgctgtttactattgccatggacataaaggtggaagtagagtctttgaagttaatttggtgacggatgatgggagacaacgggtagtaggacccgctgtctgccacatggacacatccacgtgggacgcggatcatgtagcttttaaggtgttgaagatggagccgaggtcagcaccggtttgccatttcttccctcttgataacattgtgtgggtaacaaagtaagaaaatagacgtagctctatataatgtgagtatgtgtttgtaataactatggtttgaaaggaaaaagaaaagaaaagaaaaagacagccttaatgttggctttggtattgcctctcttttgtgcaacttgcagtagcaacgtgagaatactagtaatgttaatgtaagataaaatatgtcatgcgtcctgcttaaaccacaacagaataaatgaatgaaataaataatattcgataaaaaaaaaaaaaaaagnnnnnnnnnnnnnnnnnnnnnnnnnnnnnnnnnnnnnnnnnnnnnnnnnnnnnnnnnnnnnnnnnnnnn

SEQ ID NO: 121495 - DNA, 473 bp, Arabidopsis thaliana
  unsure (1)..(473): unsure at all n locations
gatcacttgaacacttataaaaaatattttgctcttctttctatatatttatataaaaagtcaaaatatcaagaagaggaagaagaagaagaaactcattttctccgcagagaaaatacaatccatggcttctacttttaggctctctattagcttcctcactctcatcctcttctctctgtgggtagtggaggcacacacgtctagaaagttgatatcaatcaaggaaaaagaaggtcaagatattagtcatttgctcaaagatggtgaatttgatgacccttcgttgtacatgtatttcacactcaatgatctcaaactaggaaccaaattgctgatttacttcttcaaaaccggtcttcaaaggcttcctccacttctcacaaggccaccagccgggtctcaattcctttcacctagggcaaagcttgcttcccttttgggccccttttttttttccccaaggcnttcct

SEQ ID NO: 121496 - DNA, 424 bp, Arabidopsis thaliana
aaatagagagagagagtgacagaggagtgtgtgaacatcctttttttagtagatttgggttttcgagatgccgtattgaatcggctacgaatttcccaattttgaattttgtgaatctctctctttctctgtgtgtcggtggctgcgatggaggccagtgccggcttggttgctggatcctaccggagaaacgagctcgttcggatccgacatgaatctgatggcgggtgcagaccaaacctttgaagaatatgaatggccagatatgtcagatctgtggtgatgatgttggactcgctgaaactggagatgtctttgtcgcgtgtaatgaatgtgccttccctgtgtgtcggccttgctatgagtacgagaggaaagatggaactcagtgttgccctcaatgcaagactagattcagacgaca

SEQ ID NO: 121497 - DNA, 414 bp, Arabidopsis thaliana
tccaagggaataacgaatcgaatcgggttgtcgaaacgcctaattcaattgagaatgctactgtttctggtggcgggtttggtgtttccgggtcgggtaatttcccgagacctgagatgtggggaggtgatcctaatatggggtttaggccaatgatgaatgcaccaagaggaatgcaaatgatgggaatgcatcatccaatggggataatgggtagaccaccaccatttcctttgcctttgccgttgcctgtaccgtcgaatcagaagcttagaagtgaggaagaggatttgaaagatgttgaggctcttttgagtaagaagtcttttaaggagaagcaacagtctaggacaggtgaggagttgcttgatctgattcaccgtccaaccgctaaagaagccgctactgctgcta

SEQ ID NO: 121498 - DNA, 685 bp, Arabidopsis thaliana
acccacgcgtccgcccacgcgtccgctttcttcaaataaattcaatgggtcgcttccgtctcatatctgccataactctactcaaattagggttgtgaaacttgcggtgaactacttcgccggaaacttcacttccgggtttgggaaatgtgtcttgcttgagcatctctgtcttggtatgaacgatcttactggtaacatccctgaggatttgtttcatctcaaaagattgaatcttttagggattcaagagaatcgtctctctggttcgttgagtcgtgagattaggaatctctcaagtcttgttcgtcttgatgtttcttggaatttgttttccggtgaaatccctgatgtgttcgacgaattgcctcagttaaagtttttcttaggtcagaccaatggattcattggaggaatacctaaatcgttggcgaattcaccgagtttgaatctgcttaacttgaggaacaattctttatcgggtcgtttgatgttgaattgtacggcgatgattgctttgaactctcttgatttaggtaccaatagattcaatgggaggttacctgagaatctaccggattgcaagcggttaaagaacgttaacctcgcgaggaacaccttccatggacaagtaccagagagtttcaagaacttcgagagcttatcttacttctcgttatcgaat

SEQ ID NO: 121499 - DNA, 787 bp, Arabidopsis thaliana
  unsure (1)..(787): unsure at all n locations
aannnnnnnnnnnnnnnnnnnnnnnnnnnnnnnnnnnnnnnnnnnnnnnnnncccacgcgtccgcccacgcgtccgaaaggagggaagaaaaaagttaggttcgaaacgaaagtaaactagttaggtgaaaagcgaaacaacacccacagagcaatggcccctgctctcgccgttacacgagatctcaccgccgtcggatctccggagaatgctcctgcgaaaggacgtgcttcggtttacagtgaagttcaatcaagccgtattaacaacactcttcctttgccttctgttctcaaaggagctttcaaaatcgtcgaaggtcccgctagttccgccgccgggaatccagatgagatagcgaagttgtttccgggtctatatggccagccatcagtagcagtggttccagatcaggatgcaccttcgtcggcaccgaaattgaagattggtgttgttttgtctggaggtcaggcacctggtgggcacaatgttatttctggactgtttggtaagggtttgatttttacgtcaaatgatgtttttttttttttttgtagaatagttgctgacattgttccactcttgattttgttttcggcgtgttagattacctgcaagagcgtgcgaaaggtagcacattttacgggttcaagggtggtccagctggtatcatgaaatgcaaatatgttgagttgaatgctgaatatattcagccttacagaaaccaggtacttggattcagatccttcctcaagttttgaatttacgctccgctagatgtggagc

SEQ ID NO: 121500 - DNA, 1031 bp, Arabidopsis thaliana
  unsure (1)..(1031): unsure at all n locations
cgacccacgcgtcgcatgacacagtgaacgaaggagggttaattgtaggtcaaacaaataaggtgggggtaaaaggagcgcggacagacaatggcccctgctctcgccgtcacgagatctaccgcgtggatctccggagaatgctcctgcgaaaggacgtgcttggtttacaggaagttcaataagccgataacaacactttctttgcctttgttctcaaaggagctttcaaaatcgcaagtcccgctagttccgcgccgggaatccacatgagaagcgaagtggtccgggtctattggccagccatcagtagcagggtcagataggatcaccttgtcggcaccgaaattgaagattggtgttgttttgtctggaggtcaggcacctggtgggcacaatgttatttctggactgtttgattacctgcaagagcgtgcgaaaggtagcacattttacgggttcaagggtggtccagctggtatcatgaaatgcaaatatgttgagttgaatgctgaatatattcagccttacagaaaccagggtggttttgacatgatctgcagtggaagagacaagattgaaacacctgaccagtttaaacaagctgaagaaacagcaaagaagcttgatttggatgggttggtggttatcggtggagatgattccaacaccaatgcttgccttcttgctgaaaacttcaggagtaagaacttgaaaacccgagtcattgggtgccccaagaccattgatggtgatttgaaatgcaaagaggttcctactagttttgggtttgatacagcttgcaagatttactctgaaatgatcggaaacgtcatgattgatgcaaggtcgcctggaaagtactatcattttgtaagacttatggggtcgtgctgcttcccacattacgcttgagtgtgctttacaaactcacccaaacataaccatttttggggaaggggtttctccccaggagcagacttttaagatttaaanctcntgggggtgtattcaaacgnctacttggtctg

SEQ ID NO: 121501 - DNA, 417 bp, Arabidopsis thaliana
gtcgccggcatattgatcttcgccggaggccgtggcgatttcagaagaagaagccaaactcgaaaggttcctagattggcttcaggtgaatggaggtgaattaagaggctgcaacatcaaatattctgactccctaaaaggatttggcatattcgcttccacctccactcaagcttccgatgaagttttgcttgttgttccgcttgatctggccattacccctatgagagttcttcaggaccctctcctgggccctgagtgtcagaaaatgttcgaacaaggacaagttgatgaccgctttctcatgattctgttcctcactttggagcgtcttcgtatcaattcttcttggaagccgtatcttgatatgcttcctactcgatttggcaatcctctttggttttctgatgatgacat

SEQ ID NO: 121502 - DNA, 647 bp, Arabidopsis thaliana
ataacccttattaggttaacaaaagctggagctccaccgcggtggcggtcgctctagaactagtggatcccccttttctgtatatttcgcggccgcaatttctcaatgaacatactcaacagattgggtttgggatcaagtgggcaaaccaatatggatccttctccgatcgctcagggaaatgacgatgacacaccggcgccggggaatcagtttgcccaattcggagctggatgtttctggggtgtcgagctggcgtttcagagagtcccaggggtgactcagaccgaggctggatacacccaagggaccgtagacaatccttcatacggagatgtttgttctggtaccacaggccattcggaggttgttagggttcaatatgatcttaacgattgcacctatgagtctctgcttgatttgttctggtctaggcatgatcccaccactttgaatcgccagggaaatgacgtgggaacccaatacagatctggaatatacttattacacccccggatctaggagaaacttagcccggggaagttaactttgaaccgtctacccggcaaccataatgggctgaggaaaaggattcaagggacctgggatattcttttgtcccagggtttaagaaaaaatttctttcc

SEQ ID NO: 121503 - DNA, 863 bp, Arabidopsis thaliana
  unsure (1)..(863): unsure at all n locations
cacgttttgagtttcgcagcatctctntcctctcctctgttcatatctntntttagaaattnctcaatgaacatactcaacagattgggtttggnatcaagtgggcaaaccaatatggntccttctccgatcgctcagggaaatnacgatgacacaccggcgncggggaatcagtttgcccaattcggagctggatgtttctggggtgtcgagctggcggttcaaagagtcccaggggtgactcanaccgaggctggatacanccaaggggccgtacacaatccctcatacggagatgtttggtctggtaccacaggccattcgggaggtttttaaggggtcaatatgtcttacggttnncctatgagctctgcttgatttgtcctggtctaggcatntcccaccactttgaatcgccagggaaatgacgtgggacccaattacagatctggaatatacttctacacacccgagcaggagaaacttagcccgtgagtcacttgaacgtcaccagcaacaaatggagagaaagatcatgactgaaatcttgccagctaagaaattctacagagctgaagagcatcatcaacagtatctgtcaaaaggtgggcggtttggccaagggcaatccactgccaaaggctgcaacgacccaatccgctgttacggctaataagctgctttcctctgtccctctccgaaaacagaggacttagcatcaaaggacttgtgtgtcaaatagattgtgtaaaacttgactaagttgttcacacgctatgtaactacttctttggaatttcattcgcaatgttgtaatattgatgttatactctataaacataaaccaaataatcattgcgatc

SEQ ID NO: 121504 - DNA, 401 bp, Arabidopsis thaliana
caccgatgtaaaggtaagaggaagagatttgattgaatgactcattcattgttagtttttggctatgtttaggattatgttctaataagtgttcttttgctgttttcagatgagtcctacagatgaagatgaattctctatttacaaacagagaagcactcatatgagaaaccattctttagaagaggatttggaggctgagaagaccatttcctttcaagataaggttgatccaagtggagaagaacaaactctgatgagaaatgagtccatctcaagaaagcaaagcgatctcgagacaccggaaaagatggaatcatttagcacatttggcgatgaaatccaatccgtgggatcgaagtctacaaaagtatctgaagactacgattcaggtgacgatg

SEQ ID NO: 121505 - DNA, 1324 bp, Arabidopsis thaliana
  unsure (1)..(1324): unsure at all n locations
gtacgcctcgcggtaccggtctggaattcccgggtcgacccacgcgtccgtattgttagagcttccgatgatttctacccaagagatcctgcttctcacaccatccacattgcatcggttgcatacaacagccttttccttggagagttcatgcaacctgactgggatatgttccatagtctacacccaactgcagagtaccatgctgcagcgcgtgcagtgggtggatgcgcaatctatgtcagtgataagccaggcaaccacaactttgatctattgaggaagctggttcttcctgatggttcagttcttcgggctaagctcccgggtaggcctacccgtgactgcttattcgctgatccagctagagatggaatcagcttgctcaagatctggaacatgaataagtttactggtattgttggtgtattcaattgtcaaggtgctggttggtgcaaggaaacgaagaagaaccagatccatgatacttctcctggcacactcacgggttcaatccgtgcggatgatgctgatctaatctctcaagtggctggtgaagattggagtggagattcaatagtctatgcatacagatcaggtgaggtggtaagactacctaaaggtgcttcaattcctctcaccctcaaagtccttgaatatgaactcttccacatctctcctttgaaggaaatcactgaaaacatttcgttcgcaccaataggacttgtagacatgttcaactcaagtggagcaatcgagtcgattgatatcaatcacgtgaccgacaagaatcctgaattcttcgatggagagatctcctcggcttctcccgcgctcagcgataaccgttctccaacagctctggtatctgtcagtgtcagaggctgtggtcgttttggagcttactcttctcagcgtcctctaaaatgcgccgttgaaagcacagagactgatttcacgtacgacgccgaggttgggcttgtgactttgaatctgccggtgacgagggaggaaatgttcagatggcatgttgagattctggtctagaccaccaataagttattttttttcaccaatttgtcattcatcattttgtagtataaaggcatcaataaattaggaaattaatggtcattcttcgctttgtaataatgtaatctcgtcaagttggggaagcaccgtccccttgtagtttcgttctaataatatagtaccttaaaacaaaaaaaaaaaaaaaaagggaccgctctagaggatccaagcttacgtacgcgtgcgttcgacgtcnnnnnnnnnnnnnnnnnngtgtcctaaancncaattc

SEQ ID NO: 121506 - DNA, 1506 bp, Arabidopsis thaliana
  unsure (1)..(1506): unsure at all n locations
nnnnnnnnnnnnnnnnnnnnnnnnnnnnnnnnnnnnnnnnnnnnnnnnnnnnnnnnnnnnnnnnnnnnnnnnnnnnnnnnnnnccacgcgtgcggttcaatctgattttatatgatctcatcattgtctttgactttgtttgtttagcttccttctttcctagactggtttggctggtgcacatgggacgctttctacacagatgtgactgccgagggtgttgatgaaggccttaaaagtctttctgaaggaggtacccctccgaagtttctgatcatagacgatggttggcaacaaatagaaaacaaagagaaagatgaaaactgcgttgttcaggaaggagcacagtttgctactaggcttgttggtatcaaggagaatgcaaaatttcagaagagtgatcagaaggatacgcaagtgtcaggactaaagagtgtagttgacaatgcgaagcagcgccataatgtgaagcaagtttatgcatggcatgctttagctggatactggggtggagtaaaacccgctgcttctggaatggaacactatgatagtgcattagcatacccagttcagtctccaggtgtcttagggaaccaaccagatatagtaatggacagccttgctgttcatggtctcggacttgtcaatccgaagaaagttttcaacttctacaacgaactgcattcatacttggcttcatgtggtatagatggagtcaaagttgacgtccagaacatcattgaaaccctaggtgctggtcttggcgggagagtctctctcactcgtagctaccagcaagctttagaagcttcaattgcccggaacttcacagataatggttgcatatcttgcatgtgtcacaacacagacggactttacagcgcaaaacaaaccgctattgttagagcttccgatgatttctacccaagagatcctgcttctcacaccatccacattgcatcggttgcatacaacagccttttccttggagagttcatgcaacctgactgggatatgttccatagtctacacccaactgcagagtaccatgctgcagcgcgtgcagtgggtggatgcgcaatctatgtcagtgataagccaggcaaccacaactttgatctattgaggaagctggttcttcctgatggttcagttcttcgggctaagctcccgggtaggcctacccgtgactgcttattcgctgatccagctagagatgggatcagcttgctcaaagatctgggacatggataaggtttacctggtatttgttgggggattcaaattgtcaaaggtgcttggttggtgcaaaggaaaccggnggaggacccagntccatgntacttttnctnggaaaaattacggggttaaatccgggcggntaattncttnntttaattntcaaagngggtggtaaaagttngngtggggtcaaaaggctttcaaaaagccaggnnggggaagcnccaaagggttaattcctncccaaacctaaattnccttttc

SEQ ID NO: 121507 - DNA, 575 bp, Arabidopsis thaliana
caggttccatccaattcaataagggaaggctggtccccttgcaggacccggcccggatttccgggttcgacccagccttccgcccagccgtccgggattggggatgatgctcctactgtttataccgtctttctccctctccttgaaggccagttcagagctgttctgcaaggaaatgagaagaatgagattgagatttgttttgagagtggagataaggcggtggaaactagccagggaactcaccttgtttatgttcatgctggaaccaatccctttgaagttatcagacaatccgtaaaggctgtggagagacacatgcagacatttcatcatcgtgagaagaagaagcttccttctttcctagactggtttggctggtgcacatgggacgctttctacacagatgtgactgccgacggtgttgatgaaggccttaaaagtctttctgaaggaggtacccctccgaagtttctgatcatagacgatggttggcaacaaatagaagacaaagagaaagatgaaaactgcgttgttcaggaatgaacacagtttgctactaggcttgttggtat

SEQ ID NO: 121508 - DNA, 748 bp, Arabidopsis thaliana
  unsure (1)..(748): unsure at all n locations
gctggnacgcctgcaggtaccggnccggcttccgaggtcgtccaccccgccggcgagctcggacgaaccaggaagcaatccgttaatctagaagcggtgttgagaagatgacgattacatcaaatatctctgtacagaacgataacctcgttgttcaagggaagactatccttaccaaaatccctgacaacattatcctaactccggttaccggtaatggattcgtttccggttcatttataggcgcgacgtttgaacaaagcaagagtcttcatgtgttccccatcggtgtattggagggtcttcggttcatgtgctgtttccggtttaagctatggtggatgactcagagaatgggaagctgtggaaaagacattcctttggagacacagttcatgctactggaaagcaaggatgaggttgaagggaatggggatgatgctcctactgtttataccgtctttctccctctccttgaaggccagttcagagctgttctgcaaggaaatgagaagaatgagattgagatttgttttgagagtggagataaggcggtggaaactagccagggaactcaccttgtttatgttcatgctggaaccaatccctttgaagttatcagacaatccgtaaaggctgtggagagacacatgcagacatttcatcatcgtgagaagaagaagcttccttctttcctagactggtttggctggtgcacatgggacgctttctacacagatgtgactgc

SEQ ID NO: 121509 - DNA, 664 bp, Arabidopsis thaliana
  unsure (1)..(664): unsure at all n locations
gccnnnnnnnnnnnnnnnnnnnnnnnnnnnnnnnnnnnnnnnnnnnnnnnnnnnnnnnnnnnnnnnnnnnnnggggcgcgtgcgcccacgcgtacgcccacgcgtncgggactttgagggtgagaggaattgaatatgaactcttccacatctctcctttgaaggaaatcactgaaaacatttcgttcgcaccaataggacttgtagacatgttcaactcaagtggagcgggcgagtcgattgatatcaatcacgtgaccgacaagaatcctgaattcttcgatggagagatctcctcggcttctcccgcgctcagggataaccggtctccaacagctctggtatctgtcagtgtcagagggctgtggtcgttttggagcttactcttctcagcggcctctaaaatgcgccggtgaaagcacagagactgatttcacgtaccacgcccagggtgggcttgtgactttgaatctgccggggacgagggaggaaatggtcagatggcatgttgagattctggtctacaccaccaatagggtatttttctttcaccaattgggcattcatcattttggggtataaagtacaataatttgaataatggcatctccgttgaaaatgaacncgcaagtnggacacgccctgagttgcaaaaaangcctac

SEQ ID NO: 121510 - DNA, 570 bp, Arabidopsis thaliana
  unsure (1)..(570): unsure at all n locations
actcactatttggaaagcnggcacgcctgcaggtaccggnccggaattcccgggtcgacccacgcgtggcgccacgcgtcgcgaccgttctgattactgattcttcattgacggtaggagtcaccacttttggcggcgattccttgttctctattttttttgcacaagcaacatttagcttctgcaaactccagttcatctctcaaccctcatatcgccgtgttttctcgctctagtaccgcgagctcggacgaaccaggaagcaatccgttaatctagaagcggtgttgagaagatgacgattacatcaaatatctctgtacagaacgataacctcgttgttcaagggaagactatccttaccaaaatccctgacaacattatcctaactccggttaccggtaatggattcgtttccggttcatttataggcgcgacgtttgaacaaagcaagagtcttcatgtgttccccatcggtgtattggagggtcttcggttcatgtgctgtttccggtttaagctatggtggatgactcagagaatgggaagctgtggaaaagacattccttt

SEQ ID NO: 121511 - DNA, 455 bp, Arabidopsis thaliana
atcaaaattcacaccggcgattttgagattgttctctgattggcttaatccgagagaatcaaggaattgaatggccagtgaatcagatgcatcgagcattgctactctttcctgtgctcgctgcgagaagcctgcacatcttcagtgtccgaaatgcatagacttaaagcttcctcgtgaacaagcctctttctgcactcaagaatgtttcaaggcagcttggagctcgcacaaatcagtacatgtgaaagctcagctgtcttcaatcggtgatcagaactctgatcttatttctcaaggctggctctattgcgtcaagaaaggccaggctagaacacctaagcttccacactttgattggactgggcctctaaagcaatatcccatatctaccaagcgtgttgtgcctgctgagattgagaaacctgactgggcaattgatgggactcccaaag

SEQ ID NO: 121512 - DNA, 652 bp, Arabidopsis thaliana
  unsure (1)..(652): unsure at all n locations
nnnnnnnnnnnnnnnnnnnnnnnnnnnnnnnnnnnnnnnnnnnnnnnnnnnnnnnnnnnnnnnttttgcttaatcttaaaatcccccccccccgtcttgttcaaaagaagaaaaagaaattacgaaactttcttcttcaagatatttcaaaatcaaactttggtttaagggtcccattttttttgtttttgtttttcttgcctgattctttaattcttgattctcattaatgcttcatgggttttatatgaatcccctgaaagcttataggctccgttgaacagttataacttgtgaaagttgaatccttttaaaccgacagaggaagatctcagatggcaaacaagataagtgaaactgcttccaagatggacgattatgaggtcgtggaacagatcggacgaggcgcttttggttctgcttttcttgtaattcacaagtccgagagacgaaagtatgtggttaagaagattcgtttggctaaacaaacagagagatgcaagcttgctgcaatccaagagatgagtttgatatcaaagcttaagagtccttatattgtggagtacaaagattcttgggttgaaaaggattgtgtatgcattgtaactagttattgtgacggtggagacatgactcatatgataaagaaatc

SEQ ID NO: 121513 - DNA, 518 bp, Arabidopsis thaliana
ccctgcgtccgattacggcatcattcacctataaatttcgccgctgggtttaattctctattcattcagaaccaaaaaagaagaaacctttttgattctctttgcgatttctttgttcaatctcttctcagattgtgtgaatcgggtttaaatcggggttttagggtctctgttttcaaaagggtaccaaaaagtttggagctttactgtagaaagatttgatttttcgttgacccactccgagattttcggatacaaatcagggttttagggtttttgttggaatggaagaggattatcaacagccgaggtttacgattggtaggcaatcatcaatggcgccggagaagattccggagccgtcggttcactcagaagaagaggtgtttgaggatggagaagagatcgatggtggtgtgagactaatgtatttggctaatgaaggtgacattgaagggattaaggagcttattgattcagggattgatgctaattacagagacattgatgatcggact

SEQ ID NO: 121514 - DNA, 454 bp, Arabidopsis thaliana
cacttgctcggtggttcatttacgaccacactctctcttctctttagccctctcctgctctatttattctccaacaaactctctcttctcttttcaagtcttcttcttcattactcgcaccatgaccaaaccctccgacccaaccagagactcccacgtggcagttctcgcttttcctttcggcactcatgcagctcctctcctcaccgtcacgcgccgcctcgcctccgcctctccttccaccgtcttctctttcttcaacaccgcacaatccaactcttcgttatttccctccggtgacgaagcagatcgtccggcgaacatcagagtatacgatattgccgacggtgttccggagggatacgtgtttagcgggagaccacaggaagcgatcgagctgtttcttcaagctgcgccggagaatttccggagagaaatcgcgaaagcggagacg

SEQ ID NO: 121515 - DNA, 507 bp, Arabidopsis thaliana
  unsure (1)..(507): unsure at all n locations
nnnnnnnnnnnnnnnnnnnnnnnnnnnnnnnnnnnnnnnnnnnnnnnnnnnnnnnnnnnnnnnnnnnnnnnnnnnnnnnnnnnccacgcgtccgaaatcgaaatcacagatgaaagcgaacatgtcgtcgtcgtcttccactcgatacagatccttcttcgtcttcccaattctcttcgccgtcttgttcctgggacttctgattccctcctccgccgataaccgccacgttatcaacttccgatcgccgggactctacccggagggactaacctgggatccaagggaccagcattttctagtcggttctctccacagccgcacaattcattccgtctccgacgctggagtcatcgaaaccctaatctccgatctcgatctaccggagaactccactatcctcggtctcgccgttgactctactaatcgccgtctccttgcctgtatccagagtttgccgcctcttcctcccttcagggccctagcctcctacgatctccgcagcgg

SEQ ID NO: 121516 - DNA, 797 bp, Arabidopsis thaliana
tgccgtaccggaccggaattcccgggtcgacccacgcgtccggggaaagaagaaagaaggaagacgatgatgatgctcagaatccgaagcagagatggactggagagagtcacagcggagggagctcatatcactgtttcccagctcaaaaccttgatcgcggatcagcttcagatccctctccataagcagaccttatccaccaatcgtgatctcctcctcgccaaaactcccgctgatctactcgccttcaccgacctcacggacccaaacctccccctctcctctctcaacctcggccatggctctatgctctacctcgcctacgatggcgagcgctccattcctggagctcctcccgttactcctgccggatccttcgggaggaagatgaccgtcgatgacttgatcgcccgccagatgcgcgtcactcgtcaggagacgtctcactgcgactccgtctccttcgatcgcgatgccgccaacgctttccagcactacgtcaatgagtctctagcttttgccgtcaagcgcggcggctttatgtacggcaccgtcaccgaggaaggacaggtggaagttgatttcatttacgagccgccccagcaaggcacggaggctaatcttattctgatgagagatgctgatgaagagaagcgcgtggacgcaatcgccatgggcttggggatgaggagggtcggtttcttttttaaccagaccgtggtgcaggacaagactgtatacactctgtccaacgccgatgtactacaggcgtcggagctttatgcctattgcta

SEQ ID NO: 121517 - DNA, 560 bp, Arabidopsis thaliana
gcattttgtacatccctgggatgggtcctcttaacaatgaagatgttacaaacccgaaaacaaagaacattcgtctctacgtgaagcgtgtgtttatctctgacgattttgatggagagcttttcccgagatatctgagctttgtgaagggagttgtggactctgatgatcttcctcttaatgtttctcgtgaaattctccaagaaagcagaattgtaagaatcatgagaaagaggctcattagaaaaacctttgacatgatacaagaaatctctgagagtgaaaacaaagaggattacaagaaattctgggagaactttggtagattccttaaattgggttgtattgaagacaccggtaaccacaagcgtatcacaccgctacttagattcttcagttccaagaatgaagaggaattgacaagcttggatgattatatcgagaacatgggagagaaccaaaaggcgatctactacctcgcaactgatagtcttaaaagtgccaagtctgcccctttcttggggaaactaatccaaaagatatcgaggttctatatttgg

SEQ ID NO: 121518 - DNA, 319 bp, Arabidopsis thaliana
ctccatttggaaatccagatcatgctctagagccctagtttagatctcgaaggaagacaatgggacggatcttcgagtacttcgtcgtgtgcggacttggtccagagatgcgaaccgtggatggagatcttggattccatggaatgcaaacattctacttgcctgctcttcttgaccagttccctcctactgatcaatctccttaccctgcccctcctcctcagcttcctacttgtgttcttcctgctggggtggagttccattcttctggttttgtttccagtgaccctgcaagtttcccacggagctatcccatagt

SEQ ID NO: 121519 - DNA, 493 bp, Arabidopsis thaliana
  unsure (1)..(493): unsure at all n locations
caaaaacttgcggactccagagtgagtgtgagaatcggagatgtctttttcagtagtagcagctttaccggtgcttgtagcagtagtggtactgtggacatggcggatcgtgaagtgggtctggataaaaccaaagatgcttgagagttctttgaaaagacagggtcttaccggaactccttacactcctctcgtcggagatataaagaggaatgttgatatgatgatggaagcgagatctaaacccatcaatgtaacggatgatatcaccccacgtctccttcctcttgccttaaagatgctcaattctcacggaaagactttcttcatatggattggaccacttccaacgattgtgataacggatcctgagcagatcaaggaagtctttaataaagtcaacgctttnaggaagtttctncatncctttgntcagntttttagcaggtgggntttcaagtttcaagggggttaantnggngggcncaggggg

SEQ ID NO: 121520 - DNA, 357 bp, Arabidopsis thaliana
ggtgaatcgagtcatggtgctcactgagctcgctgcgttgtattactcaggtactgtagttgctaaccaatggctcaaattctcgtcgaatttaccatcgaaacctagaagtcctgtgttaatgtctagctcggttttcgcattgtgtgatgttggatctccatggagaagtcaatggaagcttttctcatgtaaattgacgaatctcacaatcactcataccaattgggtttgcttggagaaacatgaatggggtgatatattcgatatcatcaaacgaccgcgtttattgcgcggtaacggtgattctaagcttcttatgatcggtggattgaaatcgacgttttcgttgaaccc

SEQ ID NO: 121521 - DNA, 419 bp, Arabidopsis thaliana
ctctcattcactaactttctctgcttctctctatctttctctgtgcataccaactctaaagtctctcatcaatggcggctcgaaaactagggtcgttgttacgtcaatactttttctctctatgcttcctcttcctcggttgcttcttcttccctaaagacgcagactataaacaaaagagaagaaagaagaagcttagaagagtttcttcttcttctggttcatctctatcctcttcttggacgtatttaaaacgagttttcttatccacgacaaggatatccaaatcccgtaaccaaacacatcctaacgttactttaacatccgcaagatcatctcaaaactccctcgtcactctcgtccaacccgataccacaaaccaacccgacccggaaacacgtattcatcagcaaaccgaa

SEQ ID NO: 121522 - DNA, 409 bp, Arabidopsis thaliana
  unsure (1)..(409): unsure at all n locations
atcatcttatcttcacaagaagaacaagaagacgaaagatgttgtagctgataaagtcaaaacagaagtcaaggaagcaaaaacagaggaaatcaagaacacagagcctgaaacagagcaaaaacagagctgtgttataaacgagaatctgaagaagatcgctagaccggatcatttcttgcctgtgactgtgatcttggttcttgtgtttttggctttctttggaagatctgtagcgattatgtttacttgtatcgcttggtacttggttccaacgattcaagaacagagtggaaacagaggatcatcaccgtcttacgcgatgaagaagaaagatttcgctaggaaattgagtattganaacagaacatcgtttaatccaagaactgttcgtgatcattctcctcgc

SEQ ID NO: 121523 - DNA, 658 bp, Arabidopsis thaliana
ctacgactcactattgggaaagctggcacgcctgcaggtaccggtccggaattcccgggtcgacccacgcgtgcgatctccttcttcttctccttctcaaatcttttttttcaggcgtaacgaatcgaatcataaacacttacgcagaaacaaaaactaaactttggatcttttaaccgaccatagagattcgtgggttcttcttagtttcgacagattcttgatccgttttagttgttacgctcatctttgcttttatacatcagacccttctcttctcttccttctttatctaagaaacattagggttctttgaaatcttgctaaaaaaaatgggtgttgagaaaatggtgtgtttagcttctcgtacgggtcgtcagtttcagagatacaacaaaggtcgtcgtcaagtcgttggatgtgttccttacagattcaagctatctaatgatggtaaaataagtgatgaagtagaagttcttgttatctcttcccaaaaaggccacgccttaatgttccccaagggtggttgggagcttgatgaatctgtagaagaagctgcatcaagagaatgtcttgaagaagctggagttcttggcaacgttgagcaccaacttggaaaatgggattttttaagcaaaagcagaggaacatacta

SEQ ID NO: 121524 - DNA, 564 bp, Arabidopsis thaliana
cccacgcgtccgggctcatccaacagctcttctacgtgctctgatgaaggaaatgttgaaatcatggagagaaggaggatagagatggagaagaagaagaaaagaagagctgttactgtggtagcaatggaagaagataacttgaaagatgatgatgctcatagacttactctgaatcttggtggtaataatattgaggggaatggtgtgaaaaagacgaaacttggaggagggattccgagtcgggcgatttgttgtcaggtagacaactgtggagctgatttaagcaaagttaaggattatcatagacgtcataaggtctgtgagattcattctaaagctactactgcacttgttggaggaattatgcagcggttttgtcagcaatgtagtaggtttcatgtgcttgaagagtttgatgagggaaagagaagttgccgtagacgtttggctgggcataataagcgtagaagaaaagcaaatcctgatactataggcaatgggacttctatgagtgatgatcaaacaagcaattatatgttgattactctcttgaagatactc

SEQ ID NO: 121525 - DNA, 395 bp, Arabidopsis thaliana
gtcgcttccgccagaaatggatggaatgatgatagagctagcagtacaaacgaagcaagtcttcattctgctcttgattttggtggaaaatctagtatagcttctgtgcccataacagacaccacacatgtgaaatctgagactggctctccaagacattcatcctctgctaaaatggatgaaactaatggccgggaggaaaaatcagagaaggaactgaatgatgatggtgaatatttgattagaccttatcttgagcatcttgaaaagattcggttcagatacaactgtgagagagttgttgatctcgacaagcatgatggaatcttcttaataggggaattctgtctgtatgtgatagaaaacttttacattgacgaagatgggtgtatttg

SEQ ID NO: 121526 - DNA, 772 bp, Arabidopsis thaliana
cgataactggaacggcgtcgacagactccatcctcatctctaaggtaagcaagcaagacataggagacacgttcgacgtaccgccccgcatgcgtgttaaagaaggtaacgttgcgagcattatgtgttcgtacaatcaagttaatggtgttcctacatgtgctgatcctaatctcctcaagaagaccatacgcaatcaatggggtctcaacgggtatatcgtgtctgattgtgactctgtcggtgttttgtacgatacccaacattacactggtactcctgaagaagctgccgctgattccatcaaagctggcttggatttagattgtgggccatttctaggagcccatacaatcgatgcggtgaagaaaaacttgttgcgtgagtccgatgttgataatgccttaatcaacacgctaacagtccaaatgagactaggaatgtttgatggcgatatagcggctcaaccgtacggacaccttggaccggcacacgtgtgtacaccggttcacaaaggactagctctcgaagcagctcaacaaggaatcgtcctactcaaaaatcacggctcgtctctacctctctcaagccaacgtcaccgaactgtcgccgtaattggacctaattcagacgctacggtcacaatgattggtaattatgcaggggttgcttgtggatataccagtccggttcaaggtattaccggttatgctcgaaccattcatcaaaagggttgcgtggacgtacactgcatggatgatagattgttcga

SEQ ID NO: 121527 - DNA, 328 bp, Arabidopsis thaliana
ctgaattctgaatccagaatccatcccaaaaaaaaaacatatactgtgagcttcaagtagagagggccgttcagactgaggattggattttattggtactgagagtgggaacgtagtcattcatgagttaagttttgcttggaatggtcgtgagaagtgggtcatcgtctttttccctttgcgttgtgttgtgtgatgttggtacgggttatcttcgtgcttcttgtcgaattgagtatattgtatcagtaaagaatttataacttaaaaagagccttatgtcaaatacgacgtcgttttgtatggaaatggattttttacaccgctg

SEQ ID NO: 121528 - DNA, 420 bp, Arabidopsis thaliana
  unsure (1)..(420): unsure at all n locations
ctctcctctctttgtctctctcgcttctgtgatttgggctttttcagatgggaaatgcgaacggcaaagacgaagacgccgccgccggtagcggtggtgcagatgttacctcgtcctcggcgagatctaatggcggcgatccttctgcacgcagtcgtcaccgtcgtccttcttcagactctatgagcagttctcctcccggaagtcctgctcgatctccatctcctttcttattcgctcctcagcccacattgttattccacgttacatcttacaacatttgctcacctatgcgtcacctcttccattgtttaggcttaaaatgtgtacctaatggctgcatttggtgtcgnatggttccgtggntcaattgnagagggcaaanngcccttcctcctaataaaattccatnggtaccaa

SEQ ID NO: 121529 - DNA, 844 bp, Arabidopsis thaliana
aatattttcaccacaagggaaacaagcttatggtcccattgatttacggccaaagcttttaaatacgacctccactataaggaaaaaattgggtacgccctgcaaggtaccggtccggaaattccccgggtcgacccacggcttccggaaagttggcaatgtctgtaacattttcgatgttcaagtaagttactttcccacctcttttttctcatgttaaatctatcaatcagcttaacagtatctgcaatcattatgcatgcagaactttgtgccagaaaacccagaaagcatagtggagtttgaggcgccaccatcacctgatcatagctacggtcaaaccctaccagccgcagaagattacgcgaaagagccactggcggtgccacctcagcttcatctaacacttcttggcactactgaagagacagccatagccacaaagcctcaacatgtggtgcttaaccatgtgttcatagagcaaggatggactcctcaatccatagtagctttgggtttaacccacaggttcgagtctaagtacataactgttgtcctctacaaaccgctcacacggtaaccctaaaaattcagtgccacattgttctctctctttctttttttttcatctcgcaattatgtgaaaacatgttctttgttcatagtgactagtgagtgcccaacatttgagtttattaacctctttcttacctggtttgtggtgcttgtgtacaaaaaaaaaaaaaaagggcggccgctctagaggatccaagcttacgtacgcgtgcatgcgacgtcatagtataagcctcttttttataggggggccacccttaaaaatttc

SEQ ID NO: 121530 - DNA, 629 bp, Arabidopsis thaliana
  unsure (1)..(629): unsure at all n locations
aacttctaacttnaggggcttttaattatctcctcctcgtcgtcctccctccattttnnttcacgtctggttttctctctcttttcctctatctttncctctatctctctcctctctttgtctctctcgcttctgtgatttgggctttttcagatgggaaatgcgaacggcaaagacgaagacgccgccgccggtagcggtggtgcagatgttacctcgtcctcggcgagatctaatggcggcgatccttctgcacgcagtcgtcaccgtcgtccttcttcagactctatgagcagttctcctcccggaagtcctgctcgatctccatctcctttcttattcgctcctcaggttcccgtggctccattgccagagagcaaacgcccctcctcctaataacatccaatggaaccaatcacagagagtttttgataatcccccagagccaaagggaatccctaaccatcaattacaatgggacccaaggggggtatgtttttttcgcgggaagggagggggaaaattgngattcaggaaaaacttcncaaatntcgggaaaacacccggtttcttttgnctnccctggggaanacnnntaaaggggntttnggnggggnnncaaaaacccc

SEQ ID NO: 121531 - DNA, 1211 bp, Arabidopsis thaliana
  unsure (1)..(1211): unsure at all n locations
tgactcgccgnnnnnnnnnnnnnnnnnnnnnnnnnnnnnnnnnnnnnnnnnnnnnnnnnnnnnnnnnnnnnnnnnnnnccacgcgtccgcccacggtctctctcgcttctgtgatttgggctttttcagatgggaaatgcgaacggcaaagacgaagacgccgccgccggtagcggtggtgcagatgttacctcgtcctcggcgagatctaatggcggcgatccttctgcacgcagtcgtcaccgtcgtccttcttcagactctatgagcagttctcctcccggaagtcctgctcgatctccatctcctttcttattcgctcctcaggttcccgtggctccattgcagagagcaaacgcccctcctcctaataacatccaatggaaccaatcacagagagtttttgataatcccccagagcaaggaatccctaccatcattacatggaaccaaggaggtaatgatgtggcggtggaaggatcatgggacaattggagatcaaggaagaagctgcagaaatcagggaaagaccactcgattctctttgtccttccatctggcatataccactacaaggtgattgtggacggtgaatccaaatacatcccagatttaccctttgtagcagacgaagttggcaatgtctgtaacattctcgatgttcataactttgtgccagaaaacccagaaagcatagtggagtttgaggcgccaccatcacctgatcatagctacggtcaaaccctaccagccgcagaagattacgcggaaagagccacttggcggtgccacctcaggcttcatcctaacactttttggcactactgaagagacagccatagccacaaagcctcaacatgtggtgcttaaccatgtgttcatagagcaaggatggactcctcaatccatagtagctttgggtttaacccacaggttcgagtttaagtacataactgttgtcctctacaaaccgctcacacggtaaccctaaaaattcagtgccacattgttctctctctttctttctttttcatctctcaattatgtgaaaacatgttctttgttcatagtgactagtgagtgcccaacatttgagtttattaacctctttcttnnnnnnnnnnnnnnnnnnnnnnnnnnnnnnnnnnnnnnnnnnnnnnnnnnnnnnnnnnnnnnnnnnnnnnnnnnnnnnnnnnnnnnnnnnnnnnnnn

SEQ ID NO: 121532 - DNA, 318 bp, Arabidopsis thaliana
cccacgcgtccgaagaaatcattttcttctctctctctctctctctgtctaaaatatctatcggttgaagaagatctgaagcttaactttgctctgttacagactctcagggatctgccggctacaaagtccggtggatagtgttattattagacaatggcgtctaataatcatttcatgaacagtagatccaatctatcaacaaactctgatgctgctgaagctgagaggcaccagcagcctgtgtcaaattctgtgacatttgcccgcacgactccctctggccgatatgtcaactactccagagatgatctcgat

SEQ ID NO: 121533 - DNA, 440 bp, Arabidopsis thaliana
tgaacatgtcatagatgagtcaagtaaaagaaaaccatatgcagtcacagcttcaagtggaactggagaatcaatctgatgtcatgcgttacatacccaatggtcataagaaggctttgcggcaacaaaatacggcagaaactaaagatcacttgttttctgcaaattatggtggaatgagtgggtatggagcaagtcttggtgcttctacagtgggttcccatggacaggtcaacatccctaaacgaacctcctcttcagcgagtctctactcaacttcagaccattctagattaggaagcgtgggcttatctgatgtcaatattacgaatggaaatattaatggaacagacttctccacagctggtggttatatggcaaagaacaagttgaattcattagctgagcactattccgctgaaggctcacatttgactggg

SEQ ID NO: 121534 - DNA, 724 bp, Arabidopsis thaliana
  unsure (1)..(724): unsure at all n locations
gcaggtaccggttcggaattcccgggtcgacccacgcgtccgccacaatcactgggctgaacattactggatacgcaatagcgctctgtggtgttgtaatgtacaattacataaaaatcaaggatgtaaaagctattcaaccaaccactgacagcctcccagatcgaatcacgaaggactggaaggagaagaattcgtcagatggggggagccccagagggttggagcttaacgatgaagaagcccctctgataacgtcgcggttgtcgcatattggccggactcagcttggaaaccacacggcggtctgagaatgacccttatgttgtttcacttctcaggtgaaaatgtcttttatctcttttggaacccaaacaatttaaatagaatttacctcggattacttaacattgttagttctacaaaaaaagaaacgcaaaattatttgtagggtctctgaaagttataaatgttttcactagacagcgtagctccggacccggccttggtctactctttatgatccaaacagttctgacttctgagtgtgtggccctgtatttgatattttccttttctatattacctggaaatactataaattttgtttaaaaaaaaaaaaaaaaaagnnnnnnnnnnnnnnnnnnnnnnnnnnnnnnnnnnnnnnnnnnnnnnnnnnnnnnnnnnnnnnnnnnnnnnnnnnnnnnnnnnnnnnnnnnnnnnn

SEQ ID NO: 121535 - DNA, 480 bp, Arabidopsis thaliana
  unsure (1)..(480): unsure at all n locations
nnngaccccgcgtncggctggagaaaccaaatatattatgtctcgcagatccaattcaacttctggttctttttctcaaacgctctctgcgcacttgccttaaacttctccatattcttagtaatcggaagaacaggcgctgtaacaatccgggttgctggggttctcaaagactggattctcatagccctctccactgtcatatttcctgagtccacaatcactgggctgaatataactggatatgctatagcgctctgtggtgttgtaatgtacaattacataaaaatcaaggatgtaaaagcgattcaaccaaccactgacagcctcccagatcgaatcacgaaggactggaaggagaagaattcgtcagatggggggagccccagaggattggagcttaacgatgaagaagcccctctgataacctcccggttgtcgcatattggccggactcatcttggacccacacggaagtct

SEQ ID NO: 121536 - DNA, 719 bp, Arabidopsis thaliana
  unsure (1)..(719): unsure at all n locations
ctccgcccaccacagacacctgtcctctcccccctagtatcgccnnnnnnnnnnnnnnnnnnnnnnnnnnnnnnnnnnnnnnnnnnnnnnnnnnnnnnnnnnnnnnnnnnnnnnnccacgcgtccgcgagaacaaaaaaaacttctttttttttctctttctctcttggcttctctttagaaagtgactcaccagaaaaaaaaaagggtttttgcttttcgggtttagctaagaaaaatctttcaatcttccttaaatctttcaaaaccccaaaatgggacctcgttgctctaagctctctctctgttggtggccgacccatctcaaatcaactcacaacgaagcttctgatctagataacggaacggacgatttgccgtcgtttacggagtttagtttcgaccaactacgagctgctacttgtggattctctacagacagtattgtctccgaacatggtgttaaagctcctaatgttgtgtataaaggcagacttgaagatgaccgatggatcgctgttaaaccattcaatagatccgcttggcctgatactcgtcaatttcttgaagaagcaaaagctgtggggcagttgaggaatgagaggttggcgaatttgattggattctgttgtgaaggagacgagagattgctcgttgctgagtttatgccttttgaaactctctcgaagcatctctttcactgggatagtcagccaatga

SEQ ID NO: 121537 - DNA, 870 bp, Arabidopsis thaliana
  unsure (1)..(870): unsure at all n locations
tgatacttcagctctcnnnnnnnnnnnnnnnnnnnnnnnnnnnnnnnnnnnnnnnnnnnnnnnnnnnnnnnnnnnnnnnccacgcgtgcgatcttcttctactttgtcttccatcttcgccgacgagtcacatctccgaaatccggagccggagagggagaaagaaggagaatttgggttctccgagatcgaagctcttgcctcggaacccttgattttgttttggaataggctatttttttagtaaaagaggaaatggtgggaagtagtaattcgttagcgggtctacaagaccacttgaaattagcgagagaatatgcactagaaggatcctatgacacatctgtcatcttcttcgatggcgccattgctcagatcaacaagcatttaaacacccttgacgatcctttggcccggaccaaatggatgaacgttaaaaaggccataatggaagagacggaagttgtgaagcaattggatgcagagaggagagcatttaaagaagctcccactgggcgtcgcgctgcttctccacctatcaataccaaatcatcctttgtttttcagcccttggatgagtatccaacttcatccggtggtggtcctatggatgatcctgatgtgtggaggcctcctacccgtgatgttactagtcgaagacccgccagggctggtcaaactggtactagaaaatcacctcaagatggggcttgggctcgtggccctactacacggaccggtccagcttcccgtggtggcagaggtggggctactagtaagtcaactgcaggtgcccgctcttccactgccggaaagaagggagctgcctcaaaatctaacaaggctgagtctatgaatggtgatgctgaa

SEQ ID NO: 121538 - DNA, 522 bp, Arabidopsis thaliana
  unsure (1)..(522): unsure at all n locations
nnnnnnnnnnnnnnnnnnnnnnnnnnnnnnnnnnnnnnnnnnnnnnnnnnnnnnnnnnnnnnnnnnnnnnnnnnnnccacgcgtccgcttggagcgacctcgggttgtgtttttgggatcattacttggctaactaccgcaaagacacagtacggacgcgttgatcttgatagcaccgggaaaaatggccctatgttagctggtaacctcgttgcgattctaacaggggggttgatccatgcggtgtgtagtctagtccggccacagaattacgattggtcgacgacgagggagatcaaagtagtggaagcgtatgcttcaggggacgaagatgttgatgttcctgccgaagagctaagagaagagaagctgagaagagccaaagcttggattgtgaaatgggggcttgtcttcactatcctcattggtgtcatttggccagttctcttttcccagctggggatttagcagaggatatttctgggtttgggcaattggggaatagttgggggaatataggat

SEQ ID NO: 121539 - DNA, 663 bp, Arabidopsis thaliana
atctctccagaactttcttttcccagtacttctcctctgctttttattacttgtcttcttctctctttaattttttataaatttaattttgggttgaaaaaaacgaggaagaagagaggagaggagactctttcttttagtatttatttatggaggaggagaggagactgtcttaatcgtttccgggtctcttattctgatccattcttctctcaagatctaagatttactgattttgaagtggagaagaaattagttgtctcgacaaaccccactagaaactttgtttagtgtgtcttcttaaagcctgcaagatgcagagaccacctcctgaagatttctccttgaaggagacgagacctcatctaggtggaggaaaactctctggagataagcttaccagtacttatgaccttgttgagcaaatgcagtatctctatgttcgtgtggttaaggcaaaggagttacctggcaaggatatgactggtagttgtgacccttatgttgaggttaagcttggaaactacaaaggcaccactaggcatttcgagaagaaatctaatcctgagtggaaccaagttttcgccttttctaaagataggattcaagcttctttccttgaagctactgtcaaggacaaggattttgtcaaagatgatttga

SEQ ID NO: 121540 - DNA, 898 bp, Arabidopsis thaliana
  unsure (1)..(898): unsure at all n locations
gctccctacgactcactattnggaaagctggcacgcctgcaggtaccggtccggaattcccgggtcgacccacgcgtgcgccgcacgcgtccggaaaataattcgtaatcaattgaccaaaccgatcgatcactgttgtcataaaagtcatcgccatcttggtttcgtgatcgaaaaagactcgtgaaaaaatggatcatatgatatcagaaaacggagaaacaagtgccgaaggatcgatttgcggctatgattcgctgcatcaactcttatcagcgaatcttaagcccgagctctatcaggaggtaaaccggttgctccttggacgtaactgtgggagatcgcttgaacagattgttctgccggagtctgctaaagccttgtcttcaaaacatgattttgatctccaggctgctagcttttcagctgataaagagcaaatgagaaatcctcgagtggtcagagttggtctcattcaaaactccattgctcttccaaccactgctccattctcggaccaaacaagaggaatattcgacaagttgaagccgataatcgatgctgcgggtgttgctggtgttaacatactgtgcttgcaggaagcttggaccatgccatttgcattttgcactanggagaggagatggtgtgagtttgcagagcctgttgatggcgaatcgacaaagtttcttcaagaactcgctaaaaagtataacatggtgattgttagtcctattctcgaaagagatattgatcacggtgaagtgctttggaataccgctgtgattatagggaataatggaaatatcattggcaagcatcganagaaccatatacctagggtaggagatttcaacgagagcacctattacatggaaggagacacaggccatcctgt

SEQ ID NO: 121541 - DNA, 512 bp, Arabidopsis thaliana
  unsure (1)..(512): unsure at all n locations
ggaaaatctaattctcagacaacttttttcgaagaagacgagcgaattttaaagattttgttttctatattctcttctgatagtgaagtctcggagactgaatgatattgtttctggtcaacttaaccaatttcagaacatggcaaacagagcagacaactcaatgcgttgttcaaatagtaagaaaccgaatgacggtatgatgctcgtaatatcgattttcgcgggaatagttatcggatttttattaggcatatctttccctacattgtcactaactaagatgaattttccatcaagcattcttccttctgttgctactgtctacatagaaaatgagaaaccggagaaatcatctaagacgagttcacaaaacgaaagtgatgcatcacatcatcataagatttgggttccatcgaatcctcgaggtgcagagatgttacctccaagttttgttgcagccgaatcggatttttacttacgaagattgtggngattgcctaaagatgatt

SEQ ID NO: 121542 - DNA, 693 bp, Arabidopsis thaliana
acgagctctcttctccgtacggagacaccgagcaaaaactggcttcttacttcctccaagctctcttcaaccgcatgaccggttcaggcgaacgatgctaccgaaccatggtaacagctgcagccacagagaagacttgctccttcgagtcaacgcgaaaaactgtactaaagttccaagaagttagcccctgggccacgtttggacacgtggcggcaaacggagcaatcttggaagcagtagacggagaggcaaagatccacatcgttgacataagctccacgttttgcactcaatggccgactcttctagaagctttagccacaagatcagacgacacgcctcacctaaggctaaccacagttgtcgtggccaacaagtttgtcaacgatcaaacggcgtcgcatcggatgatgaaagagatcggaaaccgaatggagaaattcgctaggcttatgggagttcctttcaaatttaacattattcatcacgttggagatttatctgagtttgatctcaacgaactcgacgttaaaccagacgaagtcttggccattaactgcgtaggcgcgatgcatgggatcgcttcacgtggaagccctagagacgctgtgatatcgagtttccgacggttaagaccgaagattgtgacggtcgtagaagaagaagctgatcttgtcggagaagaagaag

SEQ ID NO: 121543 - DNA, 637 bp, Arabidopsis thaliana
cagctctatacgactcactatagggaaagctggtacgccctgcaggtaccggtcccgaatttccgggtcgaccacgcctccgggccattgctctgtgtactttgcttctttaggagaaagaaagcacaaggggcaaaatcggaaagattatcatggccgacggtagtactagttcttcggagtccactaccgcctgcgctggaagcggcacaagaagagagattatgctgttcggagtcagggttgtgcttgacccgatgagaaagtgcgtgagtttgaacaatctgtctgactatgaacagacggcggagactccaaagatcgacggcgaagatagagatgaacaagatatgaacaaaaccccggccggttacgcctcggcggatgaagctcttcccatgtcttcttctaacggcaaaatcgagaggaaacgaggagttccatggactgaagaagaacacaagctgttcttgcttgggctgcagagagtcggtaaaggagattggaaaggaatatcaagaaactttgtcaagaccagaacctctacacaagttgctagtcatgctcagaaatacttcctcaggcgaagtaatcttaaccgtcgccgccgaagatctagcctttttgacatgactac

SEQ ID NO: 121544 - DNA, 750 bp, Arabidopsis thaliana
  unsure (1)..(750): unsure at all n locations
aaaactttagaacgaaaaaagatgaaaatctttaactcatctcaaaacctattcttggccataacctttttccttgttctcatagttcatctaaaagcccaagacagtcctcaagactttttggcagttcacaaccgagcacgagccgaggttggggtgggacccttaagatgggacgagaaggtggctgcttatgcccgtaactatgctaaccagcgtaaaggtgactgcgctatgaaacactcgagcgggtcctatggagagaacatcgcttggagcagcggtagcatgacaggcgtagcagcagttgacatgtgggtggacgagcaatttgactacgattatgattccaatacatgtgcatgggacaaacagtgtggccactatactcaggttggtggtggagaaactcggagagggttgggattgtgcaaaagtgagatgcaacaatgggcaaaccctttatcacttgcaactacggacccccccggtaactgggttcggcgagtcggcctccctaaaaggaaacctccctttaaatgttttccggtttttgttatccacatgtatatatgtattgtttccatgttgttcagttttaccaatcatctatcggtcagctaataaagatttggtttgtgtgggccctggnccggnccggncttcttttntaccncatgtataantgnntgcgngggtttttanaatggatnagnaantncaatcctncgggttcnctgctttgtttnt

SEQ ID NO: 121545 - DNA, 663 bp, Arabidopsis thaliana
  unsure (1)..(663): unsure at all n locations
nnnnnnnnnnnnnnnnnnnnnnnnnnnnnnnnnnnnnnnnnnnnnnnnnnnnnnnnnnnnnnnnnnnnnnnnnnnccacgcgtccgctcaaacctaacaaaagcttcagacttcaattctttagctacctctctcccatggcagtaagtgttttctttccttctttccttctcctcttcttcttatttaggtctagagctttctctcagattatagtttttgtttcgattccgtcaatctctgaccctttttttggaggatttgtagaaagttgagtcttaatctatttgcatttatggttcttcctattgagataacatttctatggattgcgatgtctattagtattcaactttatgattctgatttgctttagataagaaaagggttttatgaaagttactatttttatggtaaagtttctatttttgcttagcaaagatttcaactttatcatctgtacttggtcgaaatcgataaacccaatctgtatttgttctgttttggattcttaagagaatntgctatcttgtttctgagatgattgttctttacgattgtatagctattgatgtttgtgaggaaggacattgctgcagaatcgtacggtgcaccatcctgcgacgtaccatactgaggaactggcaagctgaaggacaatgc

SEQ ID NO: 121546 - DNA, 1154 bp, Arabidopsis thaliana
  unsure (1)..(1154): unsure at all n locations
gtgagacaaagagagaagagaagattagagagaggagaggaagggtcaaagaatacatagcatcaccactagtcaacgcttttataaaacttcttcttcgtctcctctccttctcacatctctctctgtctttctctctcaaacctaacaaaagcttcagacttcaattctttagctacctctctcccatggcacgttcgaatgtaccaaaatttggaaactgggaagctgaggagaatgttccttacacagcttactttgacaaagctcgtaagactcgagcacccggtagcaagatcatgaacccgaatgacccggagtataactctgactctcaatcacaagctcctcctcatcctccttcttccagaaccaaacctgagcaagttgacacggttagaagatcacgtgagcatatgagaagccgagaagagagcgagttgaaacagtttggtgatgctggtggttcatcaaatgaagctgctaacaaaagacaaggaagagcttctcagaacaatagttatgacaacaagtcacctttgcataagaattcttatgatggtactggaaaatctaggcctaaacctaccaaccttagagctgatgaaagtcctgaaaaagtcacagtggtgcctaaattcggtgactgggacgagaacaacccgtcatcagctgacggatacacgcatatcttcaataaagtccgtgaagagagaagttctggagcaaatgtgagtggatcttcaagaacgccgactcatcaaagctcccgtaacccgaacaacacttcctcatgttgctgctttggctttggaggaaaatgaaagggaccggaagattgtatatagttatcgagaaatcagtgtgtaatcttgatgattagacattcgtgcttctttagatgaaataaggcataagtctcacttgcataagatttttatagtataatttttgtatgtatattttgcaattcttccttaatacttttggtgttttcataagacacattccagtttcggatctgcttgcagatgcattatatcttgcttggtacggccttagtgatttggtcactgatttgatatgcnnnnnnnnnnnnnnnnnnnnnnnnnnnnnnnnnnnnnnnnnnnnnnnnnnnnnnnnnnnnnnnnnnn

SEQ ID NO: 121547 - DNA, 621 bp, Arabidopsis thaliana
  unsure (1)..(621): unsure at all n locations
cgagggaacgcaaaggtaggggccagattctgtagtaccttcttcgcctacctactctctttcccgaatttatttgccggcggtgatcaatcagaacgggattttagcctgagtaatcggtcactgggaagagaatttcgacggtgagagaagatgaagatatttgtgaaaactctcaaggggactcacttcgagatcgaagtaaaacccgaggattcggttgttgatgtgaagaagaacatagagagtgtgcagggcgcagatgtgtatcctgctgcaaaacagatgcttattcaccaaggtaaagtgcttaaagatgagacaactattgaggaaaacaaagttgctgagaacagttttattgtcattatgatgaacaagagtaaacctgcttcagctgcagcatctagtgcatctgctggcacatcgcaggccaagtcgatacctccctcaacatcacagccttcaatttccccntcagacttcagcttctgtatcagcaccagtggcacctgcaccaacangtccaccancaacttgaccggcaaccggcaactngaacctttaggtnnnaacttgaaaantntntttttttttttnnanagttttntttttattttg

SEQ ID NO: 121548 - DNA, 919 bp, Arabidopsis thaliana
actcacttagggaaagctcggtacgcctgcaggtaccggtccggaattcccgggtcgacccacgcgtccgaaaaaaaatcaaaaaaaaaaatcaagaacaaatcgaaatctcaactctgtgaaaacctcgtccttgttcttcttctgcttctcccattccttcgatttttgcttcaatggatgtttgatttgctctctgactgcgtttggttttactatactatggaccctgagagtatcatggctgctgatgggactgattctgctcctgcaaatggtggtttagcaatggaaaatgtatgtgttaaagaaaatggggctgtttctgtcgaaaccgtggacactacttcagaaagtcagaatgagaattcggcaaacagttccactttggatacaattgaacacgtcaaggaggcagctgagggcacacaagttgaacatgtagatgattcaaagtgtatgaaaggcgaaaaagctcaacggaagccaaggcatgagaaactatcaggtggtaagaataattcatcggttcacatcaaaaagagcaaagagggcaaaagtgcagatgctaaagtggcagcatcaaatggttctgttgctcctaatgtacagacaacaaatcctcttaagagcaaatcattcaatgggcgagaggcacaagtcacaaagcaagggaagcatgactctgcacctgctgaaagcgctgatggggagaaggtgaaaccaaagtctcaaaagaaacaagcccatgagacatctgaagatgatactcagtcttctaatccgaaagcagacgatggaaaacctcgtaaagttggtgcacttccaaattatggattcagtttcaaatgtgaccaacgggctgaaaagagaaaagagttctatgttaagcttgaggagaagactcatgcaaaagaag

SEQ ID NO: 121549 - DNA, 678 bp, Arabidopsis thaliana
  unsure (1)..(678): unsure at all n locations
gaggaggcaaagtgcgaaagctaaacgcagatccacgatcaatctcctccaccttcaaaagccttcaaaagtgtttcttcttcgtcttcttccttttattatctgtgccttgacagatccacgatccgattctggtcaaattttacatttctgcagataagctgctcatactagttatacaacagactccatagaaggtgacatttgtttaagatactcttgttcctggaacacatacgaagatgaagaaagtcttcggacaaactgttagagaccttaagagagaggtcaacaagaaagtgctcaaagttcctggagtagaacagaaggttctagatgctactagtaatgagccatggggtccacatggatcacttcttgctgatcttgcgcaagcttccagaaattatcatgaatatcagctgatcatggtggtcatatggaaacgccttagcgacaccggaaaaaactggcggcatgtctataaggctttgacagttttggagtacatggtaggccatggatcagaacgtgttatagaccgagattagagaacgtcatatcaaatttcgnattgccgatttccaganattgatccggggggngngtcaaggaccatgttaggagaacccaaccnggngcttggnnatgccaggaagattcccgagcnnccgaagt

SEQ ID NO: 121550 - DNA, 480 bp, Arabidopsis thaliana
ctaaactcgagaatttttgtagagagaggaggcaaagtgcgaaagctaaacgcagatccacgatcaatctcctccaccttcaaaagccttcaaaagtgtttcttcttcgtcttcttccttttattatctgtgccttgacagatccacgatccgattctggtcaaattttacatttctgcagactccatagaaggtgacatttgtgtaagatactcttgttcctggaacacatacgaagatgaagaaagtcttcggacaaactgttagagaccttaagagagaggtcaacaagaaagtgctcaaagttcctggagtagaacagaaggttctagatgctactagtaatgagccatggggtccacatggatcacttcttgctgatcttgcgcaagcttccagaaattatcatgaatatcagctgatcatggtggtcatatggaaacgccttagcgacaccggaaaaaactggcggcatgtcta

SEQ ID NO: 121551 - DNA, 796 bp, Arabidopsis thaliana
  unsure (1)..(796): unsure at all n locations
ggcgaacgcgaaatctgggtattgtaatttgaagcgatggcgacgactggaactgctgcggttgcgacgggaacttcgacggtgaagagaaaaccggtgtttgtgaacgtggaacatgctaaagcctgtgaacgactggtcacacgttgactgttaaagtcattgaggctaatatcgtggttcctgttacccggaagactcgtccagcgagttctctgagtcgtccttctcagcctagtcgactcgttgagtgtctcatcggtgacgaaactgggtgtatcctcgtcactgctcgtaacgatcaagttgatcttatgaagccgggtgctacggtgatactgcgcaattcaaggatagacatgttcaagggtacaatgaggctaggagttgataaatggggacgcatcgaagccactggagccgcgtctttcactgtcaaggaggataacaatctgtctctcgttgagtatgaactgatcaatgttggtggtgatcagtgatcttttagtatgtttatggaggttaacccctganagtgttgggttctgattttcctaccgtgaaggtctttnatttaagatgatgaagattgtatgacttggtccagagttgcttgtagggatatgcttctcctttttaacccnaaaatatccgggcaatgatctttcccttggggaccattttagccttcnggtaatgggcgnaatcaattgtncccntaaattngngttgntgaaggtaaaggcccttaggnttcttttcacctntctnatccagaaaaaaaagtttcttttct

SEQ ID NO: 121552 - DNA, 439 bp, Arabidopsis thaliana
  unsure (1)..(439): unsure at all n locations
nnnnnnnnnnnnnnnnnnnnnnnnnnnnnnnnnnnnnnnnnnnnnnnnnnnnnnnnnnnnnnnnnnnnnnnnnnnnnnnnnnnccacgcgtccgggcggatcgaagtcggatcagaggctttcttagagaagaacatgtgacgtatgcttccattcttctctacatcactctctctagcggtcaaatcttcttcaataagtgggtattgtcatctaaggaaataaacttcccttatccacttggattgacattacttcacatgactttttcctctgttttgtgttttctcctcacgaaggtttttaaggtcatgaaggttgaggaaggaatgacattagaaatatatgttacatcagttattccaataggtgcaatgtttgcaatgactctatggttaggaaacactgcttatctctacataaactgtgcatttttccc

SEQ ID NO: 121553 - DNA, 431 bp, Arabidopsis thaliana
attttagttatctgccagagagaaagattttggatgggatggcatttgaggtaccggcagggaaaagtgtagcgattgttggtagtagcggaagcggcaaatcgacgattcttagaatgattttcaggttctttgacacagattctggtaatgttaggattgatggtcaagatataaaggaagtgacactagagagtcttcgaagctgcattggagttgtccctcaagatactgtgctcttcaatgacacaatatttcacaacattcactatggaaacctttcagcaacagaagaagaggtgtacgatgcagctaggcgaccagtgattcacgatacgatcatgaaatttccggataaatattcgaccgcggtgggagaaagagggctgatgctgagtggtggagaaaaacaaagagtggcacttgctcgt

SEQ ID NO: 121554 - DNA, 706 bp, Arabidopsis thaliana
  unsure (1)..(706): unsure at all n locations
atgatactccagctctctacgactcactattgggaaagctggcacgcctgcaggtaccggtccggaattcccgggtcgacccacgcgtgcgcataattgtccacgcctcggtgaattgcccaagaacctcagtaagctacaagctctcgaaatcttaaggctatatgcttgccctgagctaaagacattacctggagaaatatgtgagcttcctgggcttaagtatctcgacatctcacaatgtgtcagcctgagttgtcttccagaggaaataggaaagctaaagaagcttgagaagatcgacatgagagaatgttgcttctcggatagaccgagctctgctgtttcactgaagtctctgcgccatgtaatctgcgataccgacgttgcatttatgtgggaagaagttgagaaggctgttccagggttaaagatcgaagctgctgagaaatgcttcagcctagactggcttgacgaataaagtgtaaactcattgtttagagtctggtaagttaaatggcttgtatagagaactctttctactctgttttctaatttctaagttcaataaaggataacttttcataaaaaaaaaaacaaaaaaaggacggccgctctagaggatccaagcttacgtacgcgtgcatgcgacgtcaaagctcttctataagtcacctnnnnnnnnnncgnnnnnnnnnnnnnnnnn

SEQ ID NO: 121555 - DNA, 771 bp, Arabidopsis thaliana
  unsure (1)..(771): unsure at all n locations
nnnnnnnnnnnnnnnnnnnnnnnnnnnnnnnnnnnnnnnnnnnnnnnnnnnnnnnnnnnnnnnnnnnnnccacgcgtccggttctgcgagacctagctcttcatttaagcaatgcagggaaagtaaacagaagaaagcggttgctgatgccgaaaagagagttagatcttccaggagattgggaaaggaacaatgatgagcattacattgcccagattgtctctattcatactggggaaatgaatgaaatgcaatggtttgacatggagttccccaaggcagagattctaatattgaacttctcttcagacaagtatgttcttccgccttttatcagtaagatgagccggcttaaggtcctagtgattatcaacaacggcatgtctcccgcggttctccatgacttttcaatatttgctcatttgtcgaaactaagaagtctctggctagagagggttcacgtccctcaactctccaactcaaccacccccttgaaaaatctccacaagatgtctttgattctgtgcaagatcaataaaagttttgatcaaaccggacttgacgtggcagatatcttcccaaaattgggcgatctgacgatagatcactgtgatgatcttgtggcactaccntcaagcatttgcggactgacctccctttaggttgcttaaggataacaaattntccacggcctnggntgaattnnccaagaccttagtaagntncagggntnttggaaattttaagggntatatntttnccctgngntaa

SEQ ID NO: 121556 - DNA, 506 bp, Arabidopsis thaliana
  unsure (1)..(506): unsure at all n locations
nnnnnnnnnnnnnnnnnnnnnnnnnnnnnnnnnnnnnnnnnnnnnnnnnnnnnnnnnnnnnnnnnnnnnnnccacgcgtccgcccacgcgtccggcaagatcaataaaagttttgatcaaaccggacttgacgtggcagatatcttcccaaagttgggcgatctgacaatagatcactgtgatgatctcgtggcactaccttcaagcatttgcggactgacctcccttagctgcttaagcataacaaattgtccacgcctcggtgaattgcccaagaacctcagtaagctacaagctctcgagatctttagctcagggcaagcatatagccttaagatttcgacatctcacaatgtgtcagcctgagttgtcttccagaggaaataggaaagctaaagaagcttgagaagatcgacatgagagaatgttgcttctcggatagaccgagctctgctgtttcactgaagtctctgcgccatgtaatctgcgataccgacgttgcattt

SEQ ID NO: 121557 - DNA, 940 bp, Arabidopsis thaliana
  unsure (1)..(940): unsure at all n locations
gggggggggcctgtgttggacacacccgacttaattagggaaacctggtacgcctgcaggtaccgggccggaatttccggggcgacccacgcgcccgcttgagattgcgataatgagagaacggattattacattcctttcgctgcttcttggagctccgcctttcgttcccagtgatagctactgcgacaaccaaaccattctgtatgaatcggttgacgatccttttgatgggggggggggccttctcaaaaaaaacctgaataccaagggcgggtgggaaccacacaaaaaaggggacggggcttgataattttggcccccctaggcgggggaaaaaggctaaaaaccccggatctgttatagggccttgttgttgttcacccttttaaccttataccaaggaaccggttgctcctacataccgatgctcctttcccaaaaaggccccgggggggggggggtctaactaaaagattcctcccccctcaaaaaggtgggggcgcccccagggggttggaaaaggcccccctccccctttatgggggccccgattgtggggggcccccccagggtttttttttttggaccctaaatcccaggggggggcttttggggagcccctttaaagccctccnttctggccggtggacgccttctttgtctaccttgggccttaaacctaagtgggggagattttgtcccggcgggaaaaaaaaaagggtttcttttggggggaaaatttgacgcccggttttctcccaacccccccctgcggagaaaaagaccaaacacgtgggtgagaacacatccgctctccaccgtcataccctcaacggggagaacccccccaaagagaaagaaacccccacccccacggggggggtattctctttgtttaacacccccggcgccccagagggtggaaggaagggggggg

SEQ ID NO: 121558 - DNA, 472 bp, Arabidopsis thaliana
cccacgcgtccgcttctcttgagattgcgataatgagagaacggattattacattcgtttcgctgcttcttgtagctttgctttcgtttcccagtgttagctactgtgacgaccaaacgatcctgtatgaatcgtttgacgagccttttgatggtcgctgggtcgtttcagagaaagctgaataccaaggtgtgtggaagcacgagaagagtgaagggcatgatgattatggacttctagtgagtgagaaagctaagaagtacggaatagttaaagagcttgatgttgatgagcctctaaaccttaacgaaggaactgttgttcttcaatacgacgctcgtttccaagaagggcttgagtgtggtggtgcttacataaagtatcttcgtcctcaagaagctggatgggttcctcaagggtttgataatgactctccttactctatcatgtttggacctgataagtgtggtgc

SEQ ID NO: 121559 - DNA, 658 bp, Arabidopsis thaliana
cccgactacccagagaaagaactacgcctgcaggtaccggtccggaattcccgggttgaccacgcgtccgtctccatcttcgcattcatagtctctacgatcagatagataaaagaagtcaacaacgatgtcttgggacgatggatcacacgcaaaggtgaagaaagtgcagctaaccttcgatgagatcatctactcaatccaggtcacgtacgacggagccaccgctcttcaatcccagcttcgcggctccgttggtcccaaatctgctgagttcactttggctccggacgagtacataacggccctttctgcttacggcaaatcgttgagtacgcaagaagttattacggcgttgactttcacaaccaacaagacttcttatggaccttacggtaccaaatccggtttccagatttctgctccggaagccaccggtaaacagatctccggtttccttggtaccagcggcaatgttctcaacaccatcgacgttcactattctcccatacctactggaggaactggcaccggaggaactggcaccgggactggcaccggaactggcactggacctggcactggcaccggacctggcactggaactggcactggacctggtaccggaggaactggcactggaactggcaccggtact

SEQ ID NO: 121560 - DNA, 671 bp, Arabidopsis thaliana
  unsure (1)..(671): unsure at all n locations
aacgntggccccnccgtaacccttagactcctcgcggtaaacgtccntccttnaagtngggatgnccagaggacccttangcttgcatccccatacgtcccttaagggttaccggttcttgaaacgtgcaccccccatgaacctaaggaccgtggagttgagcttgtgactgaagatttgatctccaaatttgaagatgcttggggtgatgatgatgatgttaaagatattttctacaaagctcatatgattgttggaaaactttcggcttcagatatagagcggcatcgaaagagatttgatacgaactgcgtagttacaacactaaaggatcataacaactcggctgttattgcttcagtgactgctgctgcatttgctggagtggcggcttactgtgcttactctgcaaggaagaacagttagatcctttgaaggacaaagaaacggttttctgaatctagtgaatgaaatcttttttattttacatgttgacatgttgtcatgtatttatttatgtcattgatatgagatggttaagtaatatctaaagatttaagagtcacccaacactcttacattcatgactcaaggggatnnnnnnnnnnnnnnnnnnnnnnnnnnnnnnnnnnnnnnnnnnnnnnnnnnnnnnnnnnnnnnnnnnnnnnnnn

SEQ ID NO: 121561 - DNA, 584 bp, Arabidopsis thaliana
  unsure (1)..(584): unsure at all n locations
caaaacgttgccgtttccgtttgaaagtatagggatgggatcataagggaagcctataatgcttgacattcctcataagctatcgcttaaagggtttatcggtttcttgagatcgtggcagcccgcaatgaaagctaaagaacgtggagttgagcttgtgactgaagatttgatctccaaatttgaagatgcttggggtgatgatgatgatgttaaagatattttctacaaagctcatatgattgttggaaaactttcggcttcagatatagagcggcatcgaaagagatttgatacggaactgcgtagttacaacactaaaggatcataacaactcggctgttattggcttcagtgacctgctgctgcatttgcctggagtggcggctttactgttcttcccctgcaagggaagaccagttagaaccctttgaaggcccaaagaaaccggntttcctgaatccaagtgaatgaaancctttttaattttancatggttgnncatggttggccaatggaatttaataanggccanttganntgngnntgggtaaggaaaaaccccaaaagnntttaaagnggnc

SEQ ID NO: 121562 - DNA, 2042 bp, Arabidopsis thaliana
ctctcaacctaccatacttcaccacataaccacttctgtctctgcgaatctccataagactctttgagaagctttcctctgtttctccgctgttatgggtagctccggcgacgttaactggaaacttgcggaccaccccaagcttcccaaaggcaaaactatcggtttgattgttctcgatggatggggtgaatctgatcccgatcaatacaattgcatccataaagctccaactcctgccatggattcccttaaagacgggaagcccgacacatggaggttgatcaaagctcatggtaccgccgttggtctccccagcgaagacgacatgggaaacagtgaagttggccacaatgctcttggagctggtcgaatttacgctcaaggtgctaagcttgttgatctcgcccttgcttcagggaaaatctatgaagatgaaggtttcaaatacatctctcaatcttttgagaaaggcactgtgcaccttattggtcttctaagcgatggtggagttcactctcgtttggatcaagtccagttgctgcttaagggttttgcagaacgtggtgctaagagaatccgcgtccatatttttactgatggtcgtgatgttttggatggttctagtgtcggatttgttgaaactcttgaagctgacctagctgctttacgtgcgaaaggtgttgatgctcaggttgcatctggtggaggtcgaatgtatgtcacaatggaccgttatgagaatgattggagtgttgttaaacgaggttgggatgcacaagtccttggggaagctccccacaaatttaaaagcgctcttgaagcagttaagacactgacggcagaacctggtgccaatgaccagtatttgccttcgtttgttattgttgatgataatggaaaggctgtgggtccaattgttgatggtgacgcagttgttacattcaatttccgtgctgatcgaatggtcatgcatgcaaaggccctcgaatacaaagatttcgacaagtttgatcgcgtacgtgtccctgatatacgttatgcaggaatgctccaatatgatggagagcttaagcttcctagccgctatcttgtttctccaccattgattgacagaacttctggtgaatatctggcacacaatggcgttcgtacttttgcttgcagtgagactgtgaagtttggccatgtaaccttcttctggaatggcaaccgctctggatatttcaatgaaaagttagaagagtacgttgagattccaagtgatagtggaatatcattcaatgtccagccaaagatgaaagcactggaaattgccgagaaagcaagggatgctatccttagtggcaagtttgaccaggtgcgtgtaaacctgccaaatggagatatggtggggcatactggtgatattgaagcaactgttgttgcctgtgaagctgctgatcgtgctgtgaggacaatccttgatgccatagaacaggtcggagggatatacgttgtgactgcagatcatggaaatgctgaggacatggttaaaagggacaaatccggcaagcctgctctcgataaggaagggaaccttcagattcttacctctcacacccttaaaccagtgccaattgccataggaggtcctggcttgtcagcaggagttaggtttagacaggatatcgagacacctgggcttgcaaatgtagctgcgacagtgatgaacctccatggatttgtggccccgagtgactatgagacaagtctgatcgaagtcgtcgagaagtgatgattcttgttgttgtagttctttttaaaagtcccacctgagcctctatagactctgattctcttttaagttactattttcaccgctctctaataaggctcgtgattttttgggagccatactgtatactcgccggccctctcacgatgttgttcaattcacagactaaatttgatttaaaaaaaaaaaaaaaagggcggccgctctagaggatccaagcttacgtacgcgtgcatgcgacgtcataatcttgtatagtgcacct

SEQ ID NO: 121563 - DNA, 447 bp, Arabidopsis thaliana
gagcataaccacttctgtctctgcgaatctccttaggactctttgagaagctttcctctgtttctccgctggtaagctggcgttgtctctctctctctcgcttctcagatctgctccttaaacctttaatttctcaccgacgagtggatctgcatccacagttatgggtagctccggcgacgttaactggaaacttgcggaccaccccaagcttcccagaacgcaaaactatcggcccgcattgttctcgatggatggggtgaatctgctcccgatcaatacaattgcatccataaagctccaacctctgccctggagtcccttaaaggcgggctgcccgtcacatggaggttgttcaaagctcatggtaccgccgttggtcttcccagcgcaaacgacatgggaaacacttgaattggccacaatgctcttggagcttggccgatt

SEQ ID NO: 121564 - DNA, 442 bp, Arabidopsis thaliana
cccacgcgtccggagaaaacgaaactaaccggagcatgaagagacgaagatcggcgaagaaatctccggcgatggtgacggttaccgattggaaagggttagattgcggcgaatgagacgagaatcgtaaggagattgatgaagttcgaagacttgcctgagtatttgaaggacaacgagtttatacacaaccattatcgatgtcaatggtctctcaaagatacttttctcagtgctttctcttggcacaacgagactctcaacatttggacgcatttaattggatttggtatatttctgtggatgacggtggtgagttgcttggagacgacggagattagtctcgccggcgtttttaacggcatggccggagtgaggatttgcctctcaagcaatcagactctgcttcatgattcgaacgtgacacatcacatctcatgtc

SEQ ID NO: 121565 - DNA, 1091 bp, Arabidopsis thaliana
  unsure (1)..(1091): unsure at all n locations
nnnnnnnnnnnnnnnnnnnnnnnnnnnnnnnnnnnnnnnnnnnnnnnnnnnnnnnnnnnnnnnnnnnnnnngaattttcccacgcgtccgcgcgcccgtgggtgggttgatgtctatcttgacattagtgtgaagcttcttgatctctgcaatgcctttagctctgagcttacccgtctcaaccaaggtcatctcttactccagtttgctctgcataacttggaggccaactctcctcagaatctgtcgaaagctcagtcatcactagacagttggaagcaacacattgtctccaagaacccgagaatagaaaattgccgtgcaatcttgagcagccttgttcagaccttgaatctccccaaggtgaaaaactcggccaaagggaaagtcttgatgagagctctatatggtgtaaaggttaagaccttatacatctctggtgtttttgctgcagcgttctcaggttcatcgcagaatctgatgtaccttacagtctcaaacgagcttacatgggcacaatcattcatggaagtgcagaacaccatgaacgcacaaatcaagaacatatttttgtcagacgggttaacggttctgaaagagctagaggcagttgcttcaggtgtcaagaaactctcccctgcgatccaacaaggatcaatagatcccatatcgctgcagccactgaaggactcggtcacagaattatcgaatgggatagatcttgtttcgaaagaagtggattgtttcttcaagattctgttatcggggagagacacattactagagaacctaaggtcgatgggtgcatcaaccctacaggcaacatcgccaaaaaaggctgccggaaaaaattacagaggattctgataaactataaatgtttgtacagatggttttacttcaagtgttccatcttcttggtattgaatgtattattaggtttttgtgcaatcgtagtcgtttgtatgagatgctttgaaagtagtagttgtataagtaaaggttttaccaaaaaaaaaaaaaaagggcggccgctctagaggatccaagcttacgtacgcgtgcgtgcgacgtcataatcttctatagnn

SEQ ID NO: 121566 - DNA, 666 bp, Arabidopsis thaliana
cggcaacttttgtggttagtcatataagaacaaccgcgttacaaacttctctcgtctttcctggaaatttctgtccacaaatattagtctttaattttcgaaacttctctcaggcgaattcaagtttcatagttttggtctagtttttgtccaccgatctatctctttagttgaaacttatcagaatggctcgtccacaagaccctccacgtggtttcttcccttttggaaaccccttcaaaaatctatcttcgaagaactcggtactctcctcaaagcttctcccactcctgaacaattttgagaccaacttagcatcttctattagtaagcttgtccctaaggaaaagagcgatatcctgactgtctcatggatgaaacaagctatggaatctctttgcgagacacataatggtatcaagacccttataaccgatcttgagcttcctgtatcagattgggagggtaaatgggttgatgtctatcttgacattagtgtgaagcttcttgatctctccaatgcctttagctctgagcttacccgtctcaaccaagggcatctcttactccagtttgcccggcataacttggaggccaactctcctcagaatctgtcgaaagctcagtcatcactagacagttggaagcaacacattgtctccaaga

SEQ ID NO: 121567 - DNA, 485 bp, Arabidopsis thaliana
  unsure (1)..(485): unsure at all n locations
atgatacgctttnnnnnnnnnnnnnnnnnnnnnnnnnnnnnnnnnnnnnnnnnnnnnnnnnnnnnnnnnnnnnnnnnnnnnnccacgcgtcggagaacaccgcgttacaaacttctctcgtctttcctggaaatttctgtccacaaatattagtctttaattttcggtatgaacactgacccttccttgatctattgatctttgtcgcagtatttattaagattttatctctatcagacggctcttttgattaatatttttccgactcttatttcttatcttctttgctcagaaacttctctcaggcgaattcaagtttcatagttttggtctagtttttgtccaccgatctatctctttaggtgagttttgtttatttttttcggctttatagtttgtctacgcttcatgttgttgttgttattataatcttgtggttggattgggggctttggatctcggttctttctgaatttaaatatggg

SEQ ID NO: 121568 - DNA, 432 bp, Arabidopsis thaliana
  unsure (1)..(432): unsure at all n locations
cagaaatctctcttcttcttcttctctacaaaatttcaatggaagctgttcttgtcgcaatgtccgtccccgccacaacggaagacgacggattttcgttaatcaccgataaactttcatataatctaacgccgacgtcggacgttgagatcgttacctccgataaccgtcggattccggcacactccggcgttctggcttcagcttcaccggtactgatgaacatcatgaagaaaccgatgagacgttacagaggctgtggatctaaaagagtcatcaagattcttggcgttccatgcgacgccgtttcggtttttatcaaattcctctactcttctagtttgaccggagggatgagattggagaggtatgggaatccaancttttnaagcggttggnttaacggcttcnatggnnanccnnctttaagna

SEQ ID NO: 121569 - DNA, 639 bp, Arabidopsis thaliana
  unsure (1)..(639): unsure at all n locations
nnnnnnnnnnnnnnnnnnnnnnnnnnnnnnnnnnnnnnnnnnnnnnnnnnnnnnnnnnnnnnnnnnnnnnnnnnnnccacgcgtccgccaaagtctgtttaccagtaatatcaatcgatcgccattctcgacatttctctctctcaagctagtctaaagtttcttcttatctccttcctccgaccaaaacttcgacttctctcttattttcaccctcagagagtaaccatggatgccttgacctcgagtttggttcgatctcccatcgtaccatcgagaacttccgacaacggttctggatctatgttccttaccgccagtggccctggattcacgcgttctggttcttcaagacttcaacttcgtttaaggcaaaacgcgtctgctagatcctcaagatcattacagagcttaacaacgactgctaaaactcggagaagttttgtggttagagcttcttcagcgtctaatgatgcttcatctggttcttcccccaaaccgatcgctccgctccagctgcaatcgcctgctggtcagtttctgtctcagattttggtgagccatcctcatcttgtgcctgcagctgttgaacagcagcttgagcagcttcaaactgatcgggactctcagggacagaac

SEQ ID NO: 121570 - DNA, 1393 bp, Arabidopsis thaliana
cttgggctagggatttaggattagcgttagagactcagtcgagcagagaatgacgacgattgttcccacctccgaagaagatccttacctcgccattgttcgtttcacttcccagcttgcctgggctgatgctggtcccgaggtcgcagagcctgaagtttccaggctatgtaaggaagcagaggagtctataataaatgggaagtggctggatttggcaacgttgatggtaacttcagctgacttggtatcagccaaaatctctgagaaagatcttgagtgtacctacaccatcatttgcaaccttgtcaagaatgcgaacagtcctgaggaagtccttgaaatggtgaaagctatagctgctaaggttattcaacaaccaaacgacaaagcttcattgcgtttgaagatcctcttcaatctatataacctggtagaccacccatgctcgatttcaagtatacatgaaagctcttacactagctgttgatgggaaggttactgagtacatagtttcttcttttaagaagatcgataactttctgaaagagtggaatattgacattaaagatcagagggaactctttcttgccattgctaatgtgctgaaagaaaacaaaagcttggtgaatgaatcccttaagttcttgacgaagtacctagcaactttctccaatgaggatgctcaggtcctggatgaagccaaggaggaggctgtgcgtgcagttatcgaatttgtcaaagcttccagtattttccagtgtgatttattggacttgccagccgtagcacaattggaaaaggatgctaaatatgcacctgtttaccaacttctgaagatttttcttactcagaggttaaatgcctacacggaattccaaaatgcaaattcgggatttctgcaaagctatggactttccaatgaagattgtgttacgaagatgaggttgttgtcactagtggatttggcctcagatgaatctggcaaaataccttacacctcgattaaagacactcttcaggtaaatgaacaggatgtcgagttatggatcgtgaaggcaataactgcaaaactgattgagtgtaagatggatcagatgaaccaagttttaattgtcagccgctcttccgaacgtgaatttgggacaaagcaatggcaatctctccgaacaaagcttgcgacttggaaggacaacatttcaagtatcataactaccatcgaatccaataatgtaactcaggaaggttttcacgcatcatcatcatttgctgcagctattcaaggcttgagtgttcgttgccaaagctatgaagaaaaactctttcattccccgagaagctaaattgtattacgaacctttcgtcttcctttaagctttatctctgcgttttt

SEQ ID NO: 121571 - DNA, 670 bp, Arabidopsis thaliana
ggcggctgaaacaagttgtaattgtggtgcatttgttcttcagcgcagccgagaagattcgaaaccggagctaagctatgacgacgattgttcccacctccgaagaaaatccctttctcgctgttgtccgattcacttcccagctcgcctgggccgatgctggtcccgaggcagcagagccagaaattaccaggctctgtagggaggctgaggagtcaatggtagcagagaagtggcttgaattgtcttcgttaatggtcacttcagctgaattggtaccttctaagatatctgagaaagatcttgagtgtacctacaccatcatttgcagcattgtcaagaatgcgaaaagccctgagcaagtccttgaaatggtgaaagctatagcttccaaggttgctcaacaacccagtgacaaagcttcacttcgtttgaagatcctcttcaatctctataacctggttgaccacccgtatgctcgatttcaagtatacatgaaagctcttacactagctgttgatgggaaggttactgagtacatagtttcttcttttaagaagaccgataactttctgaaagagtggaatattgacattattttttgctagtaatgtttcttaacttgatgctacccactatttcaaaagtttaccctgaatatcttttgccc

SEQ ID NO: 121572 - DNA, 513 bp, Arabidopsis thaliana
acaacaccaatcacacttctcaaaaaagatcagagatttctagatccttcttcttctcctgcaaattcatctacctgaatcttccaactttataaatcgatcatgatctccgtcgtaatcatcgctgagttactagtagagtacacgacggctctcgcgaaactaaccgccgggattcttccatcgagacggcgaggcgatagtaacgttgtacggattggtggtttctctctgccttgtccttctccgtcgagtagtagtactagtcgatcatctgcgattccagatttctcttctcatctcgttgatttctgatcttgtggaagacgaaacagattttgttttcttctctctcttttttttaaatctattcgaagattggattggacggctgagatttttccatgtgtgtctcttctgtctccctctcttcctctagattttaaaatcgcttattagatctttgtaaatcggtatcatcaatataataatagtggttatgaatttttgatg

SEQ ID NO: 121573 - DNA, 720 bp, Arabidopsis thaliana
  unsure (1)..(720): unsure at all n locations
nnnnnnnnnnnnnnnnnnnnnnnnnnnnnnnnnnnnnnnnnnnnnnnnnnnnnnnnnnnnnnnnnnnnnnncacgcgtcagcccacgcgtccgcccacgcgtccggagaaaaatgggaaaggcacgtacggtgggagtgggaatggactattctccgacgagcaaattagctctccggtgggcggcggagaatctccttgaagacggcgacaccgtcatcttgattcacgtccaaccacaaaacgccgatcatacccgcaaaatcctcttcgaggaaaccggttcaccgctaattcctttggaggaatttagagaggttaatttgtctaaacagtatggacttgcttacgatcctgaggttcttgatgttcttgatactctctctagggctaaaaaggtgaaggttgtagcaaaggtgtattggggagatccaagggagaaactttgtgatgctgtcgaaaatctaaaactcgattccattgttcttggcagtcgaggtttgggttctctcaaaaggatcttgctgggtagtgtgagcaatcatgtggtgacaaatgcaacatgtcctgtcacagttgttaaggctaattaaaggtgctcttgtccttaattggcccagtnataccattggtggttccgggtgcccccatgcattgtttncattttcggttgtnctctncaaattttntactgttgncctgtnataaaaantccggtatg

SEQ ID NO: 121574 - DNA, 669 bp, Arabidopsis thaliana
  unsure (1)..(669): unsure at all n locations
ccccgnngccgcgggnacncctngaagccgcgnccccgncatcntnatcccgtcnaccacaanccncgancatccccgcaaaanccnctncggggaacccggtcnccgctaatccctttggaggaattttagngaggttaattggnctaaaccagttatggacttgccttacgatccctgaggtncttggatgttcttgatactctctctagggctaaaaaggtgaaggttgtagcaaaggtgtattggggagatccaagggagaaacttttgtgatgctgtccaaaaatctaaaactcgattccattgttcttggcagtccaggtttgggttctctcaaaaaggatcttgctgggtagtgtgagcaatcatgtggtgacaaatgcaacatgtcctgtcacagttgttaaggctaattaaagtgtctcttgttctttaattggacccagttaataacattagtagttacgtgtgtcactcatgcattgttttgacatttatacgtttgttgccttctacaaatttgtgtgaaactgattggtactgtttcattaataaatttcagttaaatgataaaaaaaaaaaaaaagnnnnnnnnnnnnnnnnnnnnnnnnnnnnnnnnnnnnnnnnnnnnnnnnnnnnnnnnnnnnnnnnnnnnnnnnnnnnnnn

SEQ ID NO: 121575 - DNA, 1835 bp, Arabidopsis thaliana
  unsure (1)..(1835): unsure at all n locations
tccagctctatactactcacttagggaaagctggtacgcctgcaggtaccggtccggaattccccgggtcgacccacacgctccgaaaaaagtaaaaaacatcgagaagagttgtagctgtggtcaacacttgagaggcagcacgatgagctccatatggaacgttgcaatgttgatggtagctttggtggttgtgaggatcagccactggctttaccgatggtcaaaccctaagtgccctggcaagttaccacctggatcgatgggttttccaatcattggagagactctcgatttctttaagccttgtggagtcgaaggtatcccaacctttgttaagaagaggatgataaggtatgggccgttgtttcgaacaaacatttttggttccaaaaccgtggtttcgacagatccggatgtgatccaccagattttccggcaagagaacacgtcttttgagctaggctatccagacatatttgtgaaagtatttggaaaagataatttgttcttgaaggaagtgttcatccacaagtacctccaaaaaatcactatgcaaattcttggctccgagggtttgaagcaaacaatgttaggaaacatggacaaagcaacccgcgaccatattaggtccattgctagccaggggagcttcaatgttcgtaaagaagttgaaaacttggtagtagcgtacatgacaccaaagctgataagtaaccttaaaccagagacgcaatcaaagcttatagataatctcaacgccttcaatcttgattggtttaagtccttcttaagactctctacttggaaagctgtcaccaaagccctcaagtcacgcgaagaagctatccaggtgatgaaagacgttctcatgatgagaaaagagacgcgagagaagcaagaagacttccttaacacgcttctagaagaactggagaaagacggtagctttttcgaccaaggatcggctataaatctcatcttccttctggcgtttgccttgagagaaggtacctctagttgtactgctttggccgtgaagttcatatccaaagacccgaaagtgcttgcagagctcaagcgtgagcataaggcaattgtagacaacagaaaagataaggaagctggagttagctgggaagaatatagacacaacatgactttcaccaacatggttagcaatgaggtgcttcgcctagcaaacacgacccctttgttgtttcgaaaggcggtgcaagatgttgagatcaaaggatatacaattccggctggttggattgtggctgttgcaccttcagcggttcattttgatcctgcaatctatgagaacccatttgagtttaatccatggagatgggaggggaaagaaatgatttggggatctaaaacgttcatggcgtttggatatggagttagactttgtgtaggtgcagagttttcacggcttcaaatggcaatcttcctccatcatcttgtggcatattacgatttctcaatggtccaagactccgagatcattcgttcaccattccatcaatacaccaaggatctgcttataaacatctctcagtctcctaccaagtgaaccatgcatgcagtttccaaatcttaataatcagatcattatatgcaataatctcatttcctgcttccgcaaaatctctggagtctttttatatgtaatatgcgatctctataatttttaaaaagtatctatcttgtccaatgagttaaactttgttaaaaaaaaaaaaaccaaagnnnnnnnnnnnnnnnnnnnnnnnnnnnnnnnnnnnnnnnnnnnnnnnnnnnnnnnnnnnnnnnnnnnnnnnnnn

SEQ ID NO: 121576 - DNA, 552 bp, Arabidopsis thaliana
tacgacttactctaaggaaagctggtacgcctgcaggtaccggtccggattcccgggtcgacccacgcgtgcgaaaaatcttaatttataaaaaagtagtcaactttacacttgaccccttggggtgatagaagaatcatgaagaaagggtccaaagaaatacaatcactttcttaactctactgttccaacatttaaaagagcatatctttcttcttcttcgtcattatcttcatttgctgcttcttcttctttcttgtaaatttcagacctcgttggagagttttggacagcaagcctcgacggcatcagccaccgttagatagatattgtcttgtcctaacatgtcggcaaagtgcgacaagtgtagcttgcctatcaccaacggtccaggattcgccagaatcaactgtttatcatcacaaaacacagagtcaggtaaatcttcttcaacctaatcaactttgagtgcttagattataatccttaaagaattcagtatgtgtgtatacatgtatgtacctgaatgtctcttttctggagagacttgta

SEQ ID NO: 121577 - DNA, 907 bp, Arabidopsis thaliana
  unsure (1)..(907): unsure at all n locations
gttcaggctccttctctctttttctctttcactcagccacgaacgaaccttccccttaatccaatcttcttcttacataaacacctgtcctcccccaccgtttccaaaagagagaagctttctcactaacaccaaaaacaagtctttgaagaagaataaaaagattggattttgataagtttagtgaaaatgggggagcttttgtgttcttcactgtggaacccgtcacgattcattgttgcttctctcaaaaggtattttctgggtttagcttcttagaggttcttcgttcttaaaggtctgtttttttttaggttgtgatactttgaatgtaaaaaagggaagatttttagtttcgatatgtatatctctcggatgggtttgagtcggagtttcccgccgctttttgggggatttcgggaaattctagggttagggttggatattgtcttcctctagcagtctctgccacttttaaaatctcttcatctttctttgagagtgaaagaggtttttttatttgtttgtgtcttcctgggaatcgagattctggatcttaatcaatatgtgggttaattgggagatctgggatttgggagatcttgtggtggattgaagaaaaagcaaggttgtagattttgaaaaatgaaaggttcaattcttactgttttgtcaatggagaatcatcatccgtcaacgcttttatctatggattctagtggctcatctcatgaagagcttgatttggagatgaacaatggnaataggcaaatcacnctttataancaccagacattaatctgcctttgnctgnaggagaagctcccctcctnggatttggatcctgngnaaaaatttggatgtggccnaccccangccatggccggacgtcccaaggggccggggt

SEQ ID NO: 121578 - DNA, 321 bp, Arabidopsis thaliana
cacagagagagatacagatattatggggaagcaaggaccttgctaccactgtggagttacaaacacacctttgtggagaactggaccaccacagaagccggtattgtgcaatgcgtgtggatcgcgttggaggacaaagggaacacttgtgaactacacaccgcttcatgctcgtgctgatggtgatgagaatgatgatcatcacaggtttcaaagaatgaagagcatttttttaggcaataagaacaaagagataaagatgctcaagaggaaagcaattcaagaaaacatcattattaaaagaccggtctttgaattcag

SEQ ID NO: 121579 - DNA, 353 bp, Arabidopsis thaliana
  unsure (1)..(353): unsure at all n locations
caaaatatggcaccagctcaaaaccaaatcacttctaaacacgtggcagtgatcggagccggaccagccggtctcataacgtctagggagctccgtcgtgaaggtcacactgtacttgtgtttgaacgggagactcaagtcggtggtctactgggtttacacacctaaatccgactccgatccacttagcctggaccccacccgatccagagtccactcgagcatctacgagtctctccgaaccattgtcccgagagatcgtatgggtgtcagggacttcccgtttttgccacgtttcgatgacgagtcaagagacgcgagacgttatccanatcatagggaagttcttgcgt

SEQ ID NO: 121580 - DNA, 423 bp, Arabidopsis thaliana
  unsure (1)..(423): unsure at all n locations
gtaaacatcatacaacttcaagtcttgattcaattacttgttggaagtgttcttcgtctctaacttgctgagaaattcatcgaatttgttgaacaattcttatggcgatttcgaaaggtagattgaaagtttggttcgataagaagatcagtgaaccacttatccagatcttgcgcagaggtgctgagccaaagcagctggctttttctgcggcattgggtattaccatgggagtatttccaatctgtggtgttacggtgttactatgtggagtggctattgcgtcgcttggatctctttgtcattctccaactggtgatggttggctaacttcattgctacacccccataggacctaagttttntgggggcttttttacgncctttnggggnaaaaanaaccggggggncccccattttncc

SEQ ID NO: 121581 - DNA, 1160 bp, Arabidopsis thaliana
  unsure (1)..(1160): unsure at all n locations
cttgcaggtaatgagggccgtgagtatgttctgcggcgtattcttcgtcgagcggttcgctatggaaaggatatcctaaaagctgaagaaggatttttcaacgggcttgtaagttctgtcattcaggtgatgggcgatgtctttacatagttgaaggaacatgagaaagagatcacagatataattaaagaagaggaagcaagcttttgcaagaccttggcaaagggaattgagaaatttcggaaagctggacaggcggttcaggggaatacactgagtggagatgatgcttttatcttatgggatacatatggtttcccgttagatttaactcagttgatggctgaagaaagagggttactggttgatgttgatggtttcaacaaagccatggaagaggcgagggaaagatcgagaagtgcccagaataagcaagctggtggtgccattgttatggatgctgatgctacatcaacattgcacaaggctggtgtttcagcaacagatgattcttttaaatacatttggttccaggaccacgagagtgaactaaaggcaatctatactggctctactttcctagaaagttcagctgctagtgataacgtgggactagtattggggtctacaagcttctatgctgagcagggtggtcagatttttgacactggacttatagaaggctcgtttgggacattcaatgtatgcaatgtacaaatatttgggggctttgttcttcacattggttatctctctaaagaaactggagaggtatctgtgggtgataaagtgatttgcaaggttgactatgagaggcgtaaactcatcgctcctaatcatacttgcacacatatgttgaattatgccctgaaggaagtgctcggggatcatattgatcagaagggatcaattgttcttcctgaaaaactgcgatttgatttttctcatggcaagccggttgatcctgaagatttgagaaggatcgaatccatagtgaataaacagatcaaggatgaattagatgtgttttccaaggaagctgtgctttctgaagccaagcgcatcaaaggtctaagagcagtgtttggagaagtctaccccgatcccgtcagagtcggtgtcaaatttgggaggaaagttttnngntnntttttggnntg

SEQ ID NO: 121582 - DNA, 778 bp, Arabidopsis thaliana
  unsure (1)..(778): unsure at all n locations
cgtaattcacacatttcaccatcacgatgaactccttctacgccttatatcgtccaatcacgtcgcggtcagaattggcgatttccttcaactgtattctctactccgggagctttatcgattccggcaccgttatcactcgtctcccgccgaaagcttacgcggcgttaagaagctcgttcaaggcgaagatgtcaaagtatccgaccacgtcgggcgtctcgatcttggacacgtgtttcgatctcagcgggtttaagacggtgactatcccgaaagtggcgttctctttcagcggtggcgccgtcgtggagcttggttcgaaagggatattttacgtgtttaagatatctcaggtttgtctggcgtttgcagggaatagcgatgacagtaacgctgccatctttggaaacgttcagcagcaaacgctagaagttgtgtatgatggtgcgggtgggcgggtcgggtttgctccaaacgggtgtagttaagttagttaatgaaaaacagaacggggtaaattttaaatttatggatttggcacaaattagctttatccttaatcaagtgtgtaatttgggtaaagatcggaattcgtgatggtctttgaagtaattgtatagtaataagtgtgcatgatacaacaattacaagaacgcggccgnnnnnnnnnnnnnnnnnnnnnnnnnnnnnnnnnnnnnnnnnnnnnnnnnnnnnnnnnnnnnnnnnnnnnnnnnnnnnnnnnnnnnnnnnnnnnnnnnacgggcgaagaatcgtc

SEQ ID NO: 121583 - DNA, 403 bp, Arabidopsis thaliana
gtagtgggcaaatgcagccgttgggtggatcaagttacccaagtggtcagcctccatcctcaggagtagtgtcgaaagtgttgagttcgatgaaaaagccagtgaccttgctcgatgtcacaaactttgtctcagttgagaaaagatgctcatccttcttcttatgggtggcgatggaggaacagattgcagccattggtgcctcccagggttgcctgatacatggaaccaacttctctacgcagctcttacgatgtgaagtgttaagatactataaagaaagtgcataacacctttattctgtatatgacattcgtaaatcttctagtgttgtgtgatgctatagaaaacacacttatatcacacgagacattctcagtataaaataacacattggtttggt

SEQ ID NO: 121584 - DNA, 533 bp, Arabidopsis thaliana
cccacgcgtccggccgcctcatcctcctcgtctcttctcgttagctctctcaatgaggagcccgatttagggtttcctccattggttatatcaattcgatcatctccacaaagctctcgaagactctttcggtgatctcatcttcttcttcttgtttagcctcctggaggttactttgtttgttactagttccaaaacatgccgaaagagaggaaagaacggtccgtatctcttgataagtataaacgatcgccactgtgttgtgaggcaagccttgctttgaagccgagtgagaaacaagttaaggaatgggaagaggctcgttgtcctgtttgtatggaacatcctcacaatgggattcttctcatttgttcttcttatgaaaatggttgtcgaccttacatgtgcgacactagccatcggcattctaactgtttcgaccagttccgcaaagcttcttaggggaaacctgctttgtctttacttcgtgggggggggggaagtaatgaaccaactgagatggaagatgtgga

SEQ ID NO: 121585 - DNA, 601 bp, Arabidopsis thaliana
  unsure (1)..(601): unsure at all n locations
nnnnnnnnnnnnnnnnnnnnnnnnnnnnnnnnnnnnnnnnnnnnnnnnnnnnnnnnnnnnnnnnnccacgcgtccgaaacaatccttgttctcgccgaaatagagaattttgtgaatctgggtttttagttcaggtgttaatataagattttgatcaaaagaagacgagattcgatccgatccgatctgattgaagaagaaatggcgaatctgtatgtgaaagcggttccaccaccggatatgaataggaatacggaatggttcatgtatccaggagtttggacgacttacatgcttattctcttcttcggttggctcgttgttctctctgtctctggttgttcccctggaatggcttggactgttgttaatctcgctcacttcgttgtaacgtatcacagcttccactggatgaaaggaactccttttgcagatgaccaaggaatctacaatggtttaacttggtgggaacaaatggacaatggtcaacagcttacccgcaaccgcaaatttcttaccctaggttcctgttgctctgtacttgattgcatcgcatacaacagattacagacatccatggctgttcctcaacacactcgct

SEQ ID NO: 121586 - DNA, 536 bp, Arabidopsis thaliana
  unsure (1)..(536): unsure at all n locations
cacacgcgtccgcccacgcgtccgcccacgcgtccgcacaaaacaaaaaatattaagaaagtgatattatgacttgcagccaaacactcggaaacaacaacaccaacaaataccagatctgcgaggagatcggccgtggccgtttcggcaccgtctctcgcgtctacgctccggccaccggtgatttcttcgcttgcaaaaccatcgacaaagcctctctctccgacgaccttgaccgtgcctgtctcgacaacgagcctaagctcatggctctcttgtcctatcaccctaacatcgttcaaatccatgatctcatcgacactgattcgactctctccatcttcatggagctcgtccatccctctgtttcgatctacggccgtctcgtctcttctggaaccttcttttgagcctcagaacggcgtcgttcgctaaacaagattctccagggggttttcggatttgtnaccgntngggnntngtttaaaaggggtttttaaccggggacatttttggnagntctnnggancgntngg

SEQ ID NO: 121587 - DNA, 539 bp, Arabidopsis thaliana
  unsure (1)..(539): unsure at all n locations
cannnnnnnnnnnnnnnnnnnnnnnnnnnnnnnnnnnnnnnnnnnnnnnnnnnnnnnnnnnnnnnnnnccacgcgtccgaagaagggttggaatcagtttgtggaaataagttcacgagcagtgcttctgcatcgacctgttcagctaaatcggtcaccactgatctgaatcttagggtaagttcagtcaccacaggatccggtctcaagaagcatttggatagcaaagatttttctcagccacaatctgtgtcctcctattcctttgataacccaagggacctcaacgcagagagtttcaagattatttacagaagattaaccgatatggtttcaggacaagatgaggctgctagagttatcagctgtgcactgtcacaaccgcctaagagtgtcactcgaagagatgtttggcttaatttggttggtcctgatactgtaggaaagagaagaatgtcgcttgtccttgctgagattgtgtatcaaagcgaacacagatttatggccgatgatcttggtgccgcggagcagggaatggg

SEQ ID NO: 121588 - DNA, 770 bp, Arabidopsis thaliana
atctctctgtctctctctgtatctctctctctcttcttccccgcgtcgatttcacattttctcttttaagacagctttgaatctacagacaacttcatttttaccaaaatttctgtttcttcaaaggattgaactttcatatttctctcttgcccagttctgagttattgcaatcagaagttgtaaacacttttcctgtctctttctgctacccgaatttatcttctttagcgtctgtctctttcagcggacgtgtcttgtctctttaaggtaatttcaagacttaaacttgaagtatctctggccttcttctgctgtctgtttcatttttgaaatcgatttggagattagatctgactcagcttcgactaaaagccattgctttcgcctttggattgttgattccctagtggatgttctttatctctttaaaaagggcctctcttttaaatcaatttttgctgaacctgcccaattccgaaactttggtgcaaggctcctcttgggctctggtaatcggtttcgcatcaatccttatattgagttgaatctggaatcagattccatccttggtgcttatttgggattctattgaagaccacctatctgaattgggtttcctccgtggattggattagtgggtagggaatgaagaaaatggtttacgagcctggtttcattcagagacccatttgcttcgggccagagacctggtagctcaccttccagggtttagaccttccaccaccgaaaaagggtggttccttttc

SEQ ID NO: 121589 - DNA, 828 bp, Arabidopsis thaliana
acccaagcgtccgcccacgcgtccgctgaaatattcatcgcaattcgtatcggtttaaagtaaaaaagcaatgggaggtggtaaagacaagcatcatgatgagcaagagaaaggatttcatggttttccaggaggtggacattacccacctgctcaaggaggttaccctcctcaaggttacccaccacaacaagggtatcctccagctggaggctacccacctgccggatatcctcctggtgcttaccctgctgcgcccggtggttatcctcctgcacctggaggttaccctcctgctggctatcctgcacctggagctcaccattcaggacattctggtggtggactcggaggcatgatagcaggtgcagctggtgcagccgcagcagcttatggagctcaccatgttggtcacgcctctcacaacccttacgggcatgctgtaggacatggagggtatggccatgcccctgctcatggctttggccatggtggtcatggtaaattcaagcacggaaagcatggaggcaaattcaagccacggaaagcatggaaagcacgggaaacatggcatgtttggaggaggaggcaaattcaagaagtggaagtaatctcaaaaaccccacctttgatcctctcctccagtatagtctcattacctgaccgatgtttctaataatcccccttcaaacatatttcattttaactatgtcggtttagagattactggttgaggaaataattggagagtgctagtataaaccttatggtatctgcagcagaggtttctttaatctctcaatagtagatgctttgaaacttatctat

SEQ ID NO: 121590 - DNA, 789 bp, Arabidopsis thaliana
  unsure (1)..(789): unsure at all n locations
ggcattagagccctttgcaggaacttggccagtgtatcagcatgactgagttgcagctcgatcatactgcagctacatcaaatgtcaatcctggagatcatgttctagggatctctcctacgtcatctctctctccaggaactcagagtcgcctgcctcttattgaggctttctttgttctctgtgagaagattcaaactccgtcaatgttacagcaggatgcaactgtgacagcgggagaagtaaaggagtcgtctactcatggttcttcatcgaaaaccattgtagattctcagaagaaaattgatggttctgttacattttcaaagtttgcggagaagcacaggcggcttttgaattcatttgttaggcaaaatccgagtttgctggagaagtccctttcaatgatgctgaaggcaccaaggctgattgattttgacaacaagaaagcgtacttcaggtcaagaataaggcaccaacatgatcaacatatttctgggccattgcgtattagtgtccgccgagcttatgtgttggaagattcatacaaccagttacgtatgcgctccccgcaggatcttgaagggacgtctgaatgtgcagttttcaaggtgagggaaggtatttgatgcccggtgggtctaaccagagaattggtatccagttatttgtcaaggggtatactttgacaaagggggcgtactttttantanccnttngaaataatgccaccttccaaccggatcccaattnttnttnccaaactggacattttnanacttnaatttc

SEQ ID NO: 121591 - DNA, 883 bp, Arabidopsis thaliana
acaacaccacaacaaacaaccccacatcaacccacaccaaaacaaacgcctcacacaaaacgacacaatccacccaactcaccacccccccaaacaggaccacaacacccccaccatcaacaaaaggcaagaaaaccaacatttgaaccacgctggaaacaatccctctcttctcttctcacatcaattattcatagttctctcttctccggcaagaaaagatgcctatgaagtcgttgaggaatgaccatggaacccttaaggccatgatcggatccgatttcaacgagctcactatcgctgctaagaacctagctacacacgccttcacactcactggtttaggctttggtacctctgtcctcgaatgggttgcttcaatcgccgccatatacttgttggtgttggatcgaaccaattggaagacgaatatgctcacatcacttctcattccttacatcttcttcagtcttccttccttgatctttggtattttcagaggagaaattggtaaatggattgctttcgtagctgttgttgtacaactcttctttcctaaacacgccagagaatacctggaattaccggtggctttgggttcttctcgccgtggaggcaccaaatttgattgctggcacaatcagagacagttggaaaggcttagctataagttgaggtattggatggaacatgcttcaagaacacattagagcttcaggtggattcagaaatgcatccaccaaaaccaaagggatctacaacacccgcggggatcatctgtcccgacggcttcccccgactgggcatctaatcttttaaagaaaacctcctcaaggttcccacattcccagtttgggccaatctgtttggttcaaaggaaaaa

SEQ ID NO: 121592 - DNA, 631 bp, Arabidopsis thaliana
aagctggtacgcctgcaggtaccggtccggaattcccgggtcgacccacgcctccggggaagaccgaatatgcccacaccacttctcattccttacatcttcttcagtcttccttcctggatctttgggattttcagcggagaaattcggtaaatggattgctttcgtagctgttgttgtacaactcttctttcctaaacacgccagagaatacctggaattaccggtggctttggttcttctcgccgtggtggcaccaaatttgattgctggcacattcagagacagttggattggtttagctatatgtttaggtattggatgttacttgcttcaagaacacattagagcttcaggtggattcagaaatgcatttactaaagccaatggtatctccaacaccgtcgggatcatctgtctcgtcgtcttccccgtctgggctcttatcttttaagttaactcttcagtttctttttccatttgtcttttttttttcatgtaagagtgattgctttgtacgatctgtctctcctcgtaactctatcaatgaatgtgatttgaataagaattgcttcagcaataagaaaaaaaaaaaaaaagggcggccgctctagaagatccaagcttacgt

SEQ ID NO: 121593 - DNA, 733 bp, Arabidopsis thaliana
  unsure (1)..(733): unsure at all n locations
tatacgactcatatagggaaagctggtacgcctgcaggtaccggtccggaattcccgggtcgacccacgcgtccgcccacgcgtccgctctttactctcttctcttctcacatcaattattcatagttctctcttctccggcaagaaaagatgcctatgaagtcgttgaggaatgaccatggaacccttaaggccatgatcggatccgatttcaacgagctcactatcgctgctaagaacctagctacacacgccttcacactcactggtttaggctttggtacctctgtcctcgaatgggttgcttcaatcgccgccatatacttgttggtgttggatcgaaccaattggaagacgaatatgctcacatcacttctcattccttacatcttcttcagtcttccttccttgatctttggtattttcagaggagaaattggtaaatggattgctttcgtagcctgttgttgtacaactcttctttcctaaacaacgccagagaatacctggaattacccggtggctttgggtcttctcgccgtggtggaccaaatttgattgctggacattcagggccagttgggtgggtaagcaaaatggttagggattggtggaacttnctcaaaacacattagggcctcagggggggggcaanaatnattccaaccaatggcccaaacgccgggactgcngnggtcccgctgggcaacttnagaacncaagccttncattt

SEQ ID NO: 121594 - DNA, 1029 bp, Arabidopsis thaliana
  unsure (1)..(1029): unsure at all n locations
actctttactctcttctcttctcacatcaattttttatagttctctcttctccggcaagaaaagatgcctatgaagtcgttgaggaatgaccatggaacccttaaggccatgatcggatccgatttcaacgagctcactatcgctgctaagaacctagctacacacgccttcacactcactggtttaggctttggtacctctgtcctcgaatgggttgcttcaatcgccgccatgtaaccattctctctgtttctatgtctctttcctctatccgtttcttgtgttgatcttgatgaggttttgatgtaataaatgcagatacttgttggtggttggatcgaaccaattggaagacgaatatgctcacatcacttctcattccttacatccttcttcagtcttccttccttgatctttggtattttcagagnagaaattggtaaatggattgctttcgtagctgttgttgtacaactcttctttcctaaacacgccagagaatacctggaattaccggtggctttggttcttctcgccgtggtggcaccaaatttgattgctggcacattcagagacagttggattggtttagctatatgtttaggtattggatgttacttgcttcaagaacacattagagcttcaggtggattcagaaatgcatttactaaagccaatggtatctccaacaccgtcgggatcatctgtctcgtcgtcttccccgtctgggctcttatcttttaagttaactcttcagtttctttttccatttgtcttttttttttcatgtaagagtgattgctttgtacgatctgtctctcctcgtaactctatcaatgaatgtgatttgaataagaattgcttcagcaataagatatcatcatgaggtgttagtgtggaataaatctcctctttcatcattatagctttaaaaaaaaaaaaaaaaaaaagnnnnnnnnnnnnnnnnnnnnnnnnnnnnnnnnnnnnnnnnnnnnnnnnnnnnnnnnnnnnnnnnnnnnnnnnnnnnn

SEQ ID NO: 121595 - DNA, 401 bp, Arabidopsis thaliana
ggcgaaatcatcatcttctccggcgatgaagacgacggcgacgtcgtttgtaacgggagagagagttgtagttttcgtcgtggtttctcgtattctcttatctcttcctttatcacttatctccatggcttctccctcttcctcctctctctctccgccttcctcgtcgagatccgcgtcgagacttctccgtttcttctctctcatttcagctccagacgcggtgcgtcttcagggatattactaggagctgtgacacttccttctgttatgatatctaagttagttcagctttcaagagctatttcaatccatgaagctgaacaagatgagcttgcacatgtgacaatgcagtattgggcagcatcggctagttgttgtgctatacttatatatctatc

SEQ ID NO: 121596 - DNA, 527 bp, Arabidopsis thaliana
  unsure (1)..(527): unsure at all n locations
cacatttcaaaccattgactcttcttcttgctccgagatgtggcgttacatttgcttaccgtttttcctcttgctttggaacgatataggtctggccaaggaggcttctgagtcgattttgctccctagtgaatccggatttgacggttctcggagtccggtttgctcctcgccggatccgaacctcaactacagacctgtcatcggtatcctgagtcaccctggagatggtgcgtctggtcggttgaccaatgatacgagctcgacgtacatcgctgcttcgtatgtgaagttcgctgaggcaggtggtgctcgtgttatcccactcatctacaacgaacctgaagaagtgctcttccagaagctagagttggtcaacggtgtgatattcactggtggttgggctaaaaaatatgattatttcgagatcgtcaaaaaaatctncactaaagctttggagagaaatgatgctggagagcatttcccagnatatggnatttccntcggattcgngcttntggcaaatt

SEQ ID NO: 121597 - DNA, 461 bp, Arabidopsis thaliana
  unsure (1)..(461): unsure at all n locations
cccacgcatccgcccacgcgtccggttatggaagaatgtgcaaggagagtaatttgagatatacaacttgggcacaagaatcagatgatcgacaacaattgtttatataaagaagagctgaatcgcaattcttactcaggtctggccaaggaggcttctgagtcgattttgctccctagtgaatccggatttgacggttctcggagtccggtttgctcctcgccggatccgaacctcaactacagacctgtcatcggtatcctgagtcaccctggagatggtgcgtctggtcggttgaccaatgatacgagctcgaacgtacatcgctgcttcgtatgtgaagttcgctgacgcaggtggtgctcgtgttatcccactcatctacaacgaacctgaaggaagtgctcttccagaagctagagttggtcaacggttgtgatattcactggtggttngggcta

SEQ ID NO: 121598 - DNA, 515 bp, Arabidopsis thaliana
gggtagtatcgccggcactatacgactcatatagggaaagctggtacgcctgcaggtaccggtccggaattcccgggtcgacccaggggtccgaaaaaactttggcctctccggtgactcttccttcttctgctaccgaacttttcgcttccttctctgaccaatttttttcaacaacctctcttcttcaacaaattctcttctcaaatcctccaaatcctctctgccatgaacgctactttcttcctcctctccaccaccgtctccaccgtcacaatcaccggattcaacggtctcgatttctcatcttagaaccacatgcatcccttctgttgcgttacaactgtctccgatcactctccttcgatgcctccgttacctgaaccacaaccgcctctaccgaattacgccgccgattttggttcggcgagatccgaaccgattataactcgatctgcttctcaaaggtataatcattcaggtcaattcaataacaatcttattcataggctctg

SEQ ID NO: 121599 - DNA, 1025 bp, Arabidopsis thaliana
atacgactcctatagggaaagccggtacgcctgcaggtaccggtccggaattcccgggtcgacccacgcgtccggaagaactctcctcaaagtcatcatcctcggtgatagcggggttgggaagacttctttaatgaatcaatatgttaataagaagttcagcaaccagtataaggcaactattggggctgatttcttgactaaggaagttcaatttgaagaccggcttttcactttacagatctgggacacagctggtcaagaaaggtttcagagtcttggtgttgcgttttatcgtggtgctgattgctgtgttcttgtatatgatgtcaactccgcaaaatcaattcgaggatctcaacaactggagggaagagtttctgatccaggcaagtccttcggatccagagaactttccctttgttgttatcggtaataagatcgatgtggatggtggaagcagccgggtggtatcagagaagaaggctcgagcttggtgtgcttcgaaaggaaacattccatactatgaaacctcagctaaagtaggcaccaatgtagaagacgcgttcctgtgcataactacgaacgcaatgaagagtggagaagaggaagaaatgtacctaccagacacgatcgatgtcggaaccagcaatccacagaggtcaacaggatgtgaatgctgaaagtgttcatttgacctatgctctctcatcagttatcccactctgaggttttttaccatattgtaaatctgttgttctgtggtacattaatattttaaaaatttagaaccctaataaataaataattaaaaagccgaattgggttggtcggtgtttgtgggtggccgtatattatggatctctctttttctctacactaacgttatttgttgtccactacatttatgaaaagacttaaatggtttcttttttcaaaaaaaaaaaaaaagggcggccgctctagaggatccaagcttacgtacgcgtgcatgcgacgtcaagactcttctatagttgtcctaa

SEQ ID NO: 121600 - DNA, 932 bp, Arabidopsis thaliana
  unsure (1)..(932): unsure at all n locations
ctatagggttagctggtacgcctgcaggtaccggtccggaattcccgggtcgacccacgcgtccgcgatgccgtcctgtagacgtaccctcctcaaggtcatcatcctcggtgatagcggggtgggaaaaacctctttgatgaatcagtatgttaataaaaagttcagcaaccagtacaaggcaaccattggagccgacttcttgaccaaggaagtacagtttgaagatcgacttttcactttacagatctgggatacagctggacaggaaaggtttcagagccttggtgtagccttttaccgtggtgctgattgctgtgttcttgtatatgatgtcaattccatgaaatcatttgaaaatctgaacaactggagggaagaatttctgatccaggcgagtccatcagatccagagaattttccatttgttcttatcggaaacaaggttgacgtggatgatggaaacagcagagtggtttcagagaaaaaggctaaagcttggtgtgcttcaaaggggaacattccttactttgagacctctgccaaggtaggtactaatgtggaggaagctctccaatgcattgccaaggacgcattgaagagcggagaagaagaagaactatacttgccagacacaatcgatgtagggacgagcaatcaacagaggtctacagggtgtgaatgctaaggagtatcaccagaaggaaacgaggcctctcctcccattatctcttttcgcaagttatgtctacattattactatgttgtaaattttttcttttgtgtggaaaagggatgagaacaaaaaaagaaggaaccctaaaaaaaaaagagatgctggccgggtgttaattttgtggggggtttttcanttaaaaaaaaaannnnnnnnnnnnnnnnnnnnnnnnnnnnnnnnnnnnnnnnnnnnnnnn

SEQ ID NO: 121601 - DNA, 706 bp, Arabidopsis thaliana
  unsure (1)..(706): unsure at all n locations
cgnnnnnnnnnnnnnnnnnnnnnnnnnnnnnnnnnnnnnnnnnnnnnnnnnnnnnnnnnnnnnnnnnnggctcgagctcgagccgtgatgaccttgaggagggcccgcctccgggtcggcatcctcggtgatagcggggtgggaaaaacctctttgatgaatcagtatgttaataaaaaaggttcagcacccagtacaagggcacccatttggagcccgactttcttgaccaaaggaagtacagttttgaagatcgactttttcactttacagatctgggatacagctggacagggaaaggtttcagagccttggtgtagccttttaccgtggtgctgattgctgtgttcttgtatatgatgtcaattccacgaaatcatttgaaaatctgaacaactggagggaagaatttctgatccaggcgagtccatcagatccagagaattttccatttgttccttatccggaaaccaagggtgaccgtggatgatggaaacagcagagtggtttcagagaaaaaggctaaagcttgggtgtgcctcaaanggggacatnccttacctttgagccccctgccaaaggnaggaccnaatgtggnggaaccttccaatgnatttccaaggcccattaagaccggggaananannctntctgccgancaacnntgtgggggggaannnnngggccccggggngatcnaagganc

SEQ ID NO: 121602 - DNA, 581 bp, Arabidopsis thaliana
  unsure (1)..(581): unsure at all n locations
aataatagtcacaaaagaaattagaagacagatcaggaacagctagaagactcttcagggcacagagaaaacacccaccacatcaccgtcttcttcaacaaaatttaccaccagagatcgcagatatttcttcattctatctctctcttttagatccgattcgatgccgtcccgtagacgtaccctcctcaaggtcatcatcctcggtgatagcggggtgggaaaaacctctttgatgaatcagtatgttaataaaaagttcagcaaccagtacaaggcaaccattggagccgacttcttgaccaaggaagtacagtttgaagatcgacttttcactttacagatctgggatacagctggacaggaaaggtttcagagccttggtgtagccttttaccgtggtgctgattgctgtgttcttgtatatgatgtcaaattccatgaaatcatttgaaaatctgaacaactggagggaagaatttctgatccaggcgagtccatcagattccggctgaattttccaattggcccttatncggaacaagggttgccgngggttnntggaaacngcnaagngntnc

SEQ ID NO: 121603 - DNA, 572 bp, Arabidopsis thaliana
  unsure (1)..(572): unsure at all n locations
cccacgcgtccgagcgtcttctccataaacccagaaaatcgcagagagctttctcttgtctttgtacagatctctcccatcatcgttcgtgattcgatgccttctcgtagaagaactctcctcaaagtcatcatcctcggtgatagcggggttgggaagacttctttaatgaatcaatatgttaataagaagttcagcaaccagtataaggcaactattggggctgatttcttgactaaggaagttcaatttgaagaccggcttttcactttacagatctgggacacagctggtcaagaaagggtttcagagtcttggtgttgtcggttttatccgtgggtgctgattgctgtgttcttgtatatgatgtcaactccgcaaaatcattcgaggatctcaacaactggagggaagagtttctgatccaggcaagtccttcggatccagagaactttccctttgttgttatcggtaataagatcgatgtggatggtggaagcagccaggtggtatcagagaagaaggctcgagctnggcgtgcttcgaaaggaaacattccatactatgaaacc

SEQ ID NO: 121604 - DNA, 798 bp, Arabidopsis thaliana
  unsure (1)..(798): unsure at all n locations
aatacgactcactttagggaaagctcgtacgcctgcaggtaccggtccggaattcccgggtcgacccacgcgtccgctttcaaaacacattcttggtctttcttgaattactcagaattttcttctctcttcttctctaaaaaacccaaattcaaaaatctgtctaaatcttcccaactcttggtggggttcttgaaagtaaaaaactttgttgaaaaaaagaaatgaagcaaattgttataacagctcttgttttactacaagcttatgttcttcatcaatccacatgtgttatgtcccttactacacaagaatctccttctcctcaaccttctgctttcactcccgccttatctcctgattatcaacagagagagaaggaattgcataaacaagagagtaacaacatgagactggttatttcactagcagctacattttccttagttgggataatcttactttgctctctgctttattggttttgccataggagaagaaacctcaagagctcaggttggtggtgtagtggaatcacattcttgaatcggtttagtcgctcaanacattagacaagagaactacaaagcagggaacagtgtcattgatcgattacaatatactagaagaaggaactnagtggttcaaggagagtaacattttgngtcaagggtgatntggatgtgtatattctgccacattagagacaacatttcagctgcggttaagaagctagactgtgccaatgaagatgcagcanaggaatttaagagtggaggtgagatattgagtnagctc

SEQ ID NO: 121605 - DNA, 803 bp, Arabidopsis thaliana
agtaatcagagctgaccagaacgggttcttctttgatcttgggaacaataacgggggccatttcttaaggatatctgaggtggcaggttctgacaggtcttccatcattctaccgttatcgggtcttaagcagtttcacgaagtaattggtccctttgtggagatcaccaaagataaaattgaaggtatgacaggtgcaaatgtcaggacagttgatcctcctcagagataagtattgattctcttagaggatggaaattttcaatcctctaaccatttgaatctggcaacttcaagtcgactgcctgatcgcggtgtgcaatagtttcacgtaatatctctcgccccttcacatcttctaaaaataattcagcaggatcatcatttgccttaatagtagataaaacaaactttggagtccgcaactgggaataagctgaaaatcatccaccatgtgtatctctctctctctgtatctctctctctctctctccctccctccctcatttgcttctgttctgttttaactttttttgtttttgttcagtttgggtcattgggtgtatatctgttgacggcttgatgcatttcaattgtaaaagaatattggggtttatatgtttgggctaatgcctgttggaataaaagatgaagtgtaagttctatacatgagttacgaattctttttggtcttgtctgaaaaaaaaaaaaaaaaaaaaaaagggcggccgctctagaggatccaagcttacgtacgcgtgcatgcgacgtcatagtcttctatagtgtacctaatagaatcg
